United States Patent Application Publication US 2014/0141044 A1 - sequence listing, part 6

SEQ ID NO: 300 - DNA, 27374 bp, Bradyrhizobium colbertium
agctgccgaactacctactggacgctgccggcatatcgatcgatcgtatgccgatgctcaatgtgatcttcgatcgcatggcggcatcgtgcaccgacagcctgcagccgatggccggcacgccttgctatttctcggtcaacggcatcaccaacgatcgtgtcggcgatatcatcaaggactacgaggccaatgccgtcgcggcggtgctctatgccgagcagtgggactcccgaatcatcatcatgctcgatcgtgatttcgtgttcacgatggtcgaggcgatgttcggttccgacggcgccgaaccgccgctcgatgtcgagcgttccttctcgaatattgagcttcggctcgtacaaacgttgtttgaaaagttcgccaaggcgctgcaatccgccttcgccggcacctcgaacgtcacctttcgcgtggagcgggtcgagacggccatggcttcgctggcgatcgggcggagcggaaacatgtcgatctgcgcgaacatcatgctgcaggcgctctaccgtggcggccagatgttcctcatcattccgcactccgcgctcaatccgctccgccagaagctcgctcacgtcgtcgtcagcgacggtcgagcggccgacccacgctggcgcgagcagatggaaagcgaggtccagcggacagtggtgacgctcagcgccgtgctcgacgagaaaatggtgacgctcgaggatgttgtgaagttcaaggtcgggcaggtgctcgagctggaggccacgccacgcacgctggctcgtctcgaaagcaacaaccaggtgctgttctggtgtcagatcggccagctcgatggctattacgccatgcaggtggcggatcccatcgatcagaagcgggagttcgttgatgatatcctatctcgttgatgtggtgctgctgattgcgctcgccttcaccagcatgcgggtgaccaggatgcaccgcgagctggcgcggttgcgcagctatcagggcgaattctccaccatcgtgcatgagacggcgggtgccttcgatacagtgatcaccgcggcgcaagattccacggcaaatctcggacggctcgccaacgtgctgagtacgaagatcgatcaggcccacgatgtcatcgcggcgctcgatgcgcggagcgggcccgcctccgccgcgcccgcaggcggggccgacttggacaagcattgagccccagccggcgaacgaacacgatcggaacgccctggcgttccgggagcagaacgaccaagaggcgataccagatggcgcaatccttcgactatgagtctgcacctgcatcggcagagtccgagacgtctccgctggagcggctggcggagatcgcccagcgcacggccgaggagaccggcaagttcgccaatgtcgatgccatcctgcgcattcccgtcaccatgcaggtggtgctcggctccgcgaccattcccgtggcaaacctgatgaagctcggacgcggcgcggtggttccgctcgatcatcgggtcggagagcccgtcgacgtcgtcgtcaacggccgcatcgtggcccgcggcgaagtggtcgtcgtcgaggaagacaattcccgcttcggcgtctcgctcacggagatcgtcggaccgctggggcagggtgatacctgaccatggcggcaccggtcggcatcgctcccgtcaagcagcgaggcgttaccacgctgggcggcacggaaaaggtcgccgcgctcctgctggcgatgggccggcaggcggcggcgagcgtgctgcagcagttcgagccgcaggagatccgcatcgtcaccaaggccgcggcggagctgcggccgatcaccgcgcaggaactcgagggaatcgtcgaggagttcgcccagcagttctcgatgggcgccaatattctcggcacccttggcggcctggaggccgtgcttggcgacgtccttccggccgaccaggtttcgcagatcatgtcggatctgctcggcaattcgagccggtcggtgtgggaccgcgtctcgtcggtgtccgagaactcgctggcgagctacctgtccaaggagcatccccagaccgcggcgctgatcctgtcgaaagtcaagccggcctgtgccgccaaggtcatgagccagctgcccgcgagcctgcgcaacgaattgatgcggcgcgttctgagcctcaagccgatcgtcgacgatgccatgcgcatcatcgagaagacgctgcacgaggatctgacgctgaacttcgcccgcaacctcggcgccgacacctacgcccgcgtcgccgatatcatcaacaagatggaacgcggccacatcgaggacatgctgaagagcctgtcggagaagcggccaaaatcggccgaggtgctcaaggagctgctgttcactttcgacgacgtgatcaacctgacgccgaaggcgcgcaccatgatcttcgatcaggtgccgaccgaccgcattgtcgttgcgctgaagggcaccgacaagcatttccgcgaactgatcctgtcctcggtcgcctcgcgcgtccgccgcgtcgtcgagcacgagcttgccatcggcgagccgtcgaaccagcgcgacgtgctggaggcccgacgcgtgatcaccgatcttgcactcgacctggcggagaaaggtgagatcgagctcaatccggagcaggaggatgagctggtcttccgctgaccgctgaacgggcatggcagaaaaatccgatcaggagagcaagacagaagagccgaccgagaagaaagtccgtgatgcgctcgagcagggcaagattccggtctctcgggaggcgtccattttcgcctcgatggccgcgctgatggtgatccaggcattcctgatcggccagggcgtgcagcgattgacgccgacgctgaagagccttctcgacgatcccgagggctttcccctctctaccggggcggatgcgcagaacctgcttaccgtggtcggtctccaggcgctgcgtttcctggtgccgctggtcgtcatcctggcggtgttcgggctcgcggcgtcgttgctgcagaacacgccccgtctggtgctcgatcgcatcaagccggatttggcccgaatctctccggtcagcggctggggccgattgttcggaacgcagggcatgatcgagttcgccaagtcgctgttcaagctcgccgcggttacggccgtcgtcgccttcgtgctacgctcgtcggaagcgaaggcgttcgaggcgatgtacaccgatccggtcgcgctgccggagatgatcctcagtatcgcgatgcgaatcgtctcagcgatctgcattgcgacgatcgtgctggtggcgatcgatctcgcttgggcgcgcttccactggcggcgcgagctgcgcatgaccaagcaggagatcaaggacgagcacaagcaggcggagggcgatccgctgatcaaggcgcgcctgcgctcgctggcgcgtgaccgctcgcgccagcgcatgatcgcctcggcctcgcgtgcgacgctggtcattgcaaatccgacacacttcgcgattgcgctgcgttacaagcgcgaggagaacgcagcgccgctcgtcgtcgccaagggcatggacgtgatcgcgctgaagatccgtgaagttgccgagcaaaaccgtatccccgtcatcgaaaacaaggcgctggcgcgcgcgctctacgaggcggttcaggtcgaccaggcgatcccgacggaattcttccggcccgtggccgagatcatctacttcctgcagtcgaagcaggcgccgcggaccgagaaggtccagtaggtcttctgatggcggtccggccatcagcttgacgaaagcttaacggcctaggctgctcccgaatgaatcagaatggggctgtcgtgggaccgctttatctcttcgaactcgcatcgtcgcaggcgcgctacctcgagctccgccagtcgaccattgccaccaacgtcgccaacgcaaacacgcctggctttcgggctcgcgacgtcgagcccttcaacaaggtgctcgacggcatgccggtgaggcttgcgacgacatcgccgtcgcacatgcagctatccgcaaccgagaccgacacgcggaagactgcgaagagggacagctgggaagtggttcactccggcaactccgtcagcctcgagcaggagatgatcaagggcagcgacgtcagccgcgactattcgatgaactcggcgatcgtgcggtcgtttcaccgcatggtcctgtcgagtgcaaaagcctgaggtgaactgacatgctggactccctgcaagcgtcattgacggtcgcatcctcagggctcgaagcgcagtcgacgcgcatgcgcatcgtctcggagaatcttgcgaacgccacctcgacggggcgcaccgccggtgctgatccgtatcagcgcaagaccatcaccttcgacgccgccatggaccgagcttcgggcgcgcagctcgcgaaggtcaaggagatcggggtcgataccacgccgtaccgcgtggagtacgatccaggacatcctgctgccgacaaggccggctatgtcaagctgccgaacgtgaacatgatgatcgagatggctgacatgcgggaagtcaaccgatcctatgaggccaatctccaggtcgtgaaacaggtgcgatccatgctcggcatgaccatcgacctcctgaggagctgacaatgcttgaggcgatctcatccactgcgatttccgccgggcaggcggcgtcccgcgccaccgagacgcaggtcgccgcgcccgcggcgaccactgcaatccagaccggtgacgaggttggcttcgaatctgtgatgaagcaggtgacgaacgacgcgatcgggacgctgaaggcgggcgaagcagcctcgatctcggcgatgcagggcaaggaatcgacgcgtcgcgtcgtggaagcgctgatgtcggccgagcaagcgctgcagacggcggtcgcggttcgcgacaaggtggtgcaggcctatcaagaagtggttcggatgtcgatctgacctgaaggaatgaattaagtgaaatcgctcgccattgcggccacgggcatgaacgcccagcagaccaacatcgaagtcatcgcgaacaatatcgccaacatcaactcgacctcatacaagcgggcgcgggcggagttcaccgatctgttctaccagatggaccgcatgcagggcgtcgcgaacgtcaacggctcttcgccgatcccggaaggatccaatctcggtctcggcgtcaagtccgcggcgatccgcaagctgcacatccagggcgcgctgacgcaaaccggcaacccctacgaccttgcgatcaacggtcgcggctggtttcaggtgctcggccccaacaacgaggtgcaatacacccgcgccggctcgttcaacaccaatgccaacgcccagctcgtcacgatcgacggctatctcctcgatcccacgatcacggtgccgcagggaacggtggaagtcacggtcaacgccaccggccaagtgtttgccaagctggacacggaaatcaacccgcggcagatcggccagctcaacctcgccaatttcgccaacgaggccggcctggagccgctgggcggaaatctctatcgcgagaccacggcgtccggcacaccggtcgtcgggctgcccggcgatgccggctacggcaagatcaatcagaaatacctcgaagcgtcgaacgtcgacccagtcaaggagatcaccgaactgatctcggcacagcgtgcctacgaaatgaatgccaaggtcatccaggcctcggatgaaatggcccagacggtctcgaagggcatgcgctagtcccggtgttttgatgttgaacagggtgggcctgatcatgcgcgggttggccgccgtgctgctggttctcggcgcgacgcgggccgctgcggccgaggagaagcggcttcccgtgcccgccgtctcgatccgcgccggcgaactgatccgggaggagatgatcaccgagcgcgccttcgcgccgaccctgctcggggtcgccatgttcatcgaggggcgtcaggtcctgatcggccgcatggcgcgacgcgcgctgttgccgggccaaccgatcccgaccaatgcggtggaggatccctggacagtcgcccgcggcgccacggtcaaggtcgtggtcgaagacagcggattgtccatcgtcacttatggctcggcgatgcagtcaggtgccgccggtgcgctcattccggtacgcaataccgacaccggcgtgatcatcaggggcgtcgtccagccggacggcaccgtcaaggtcgtggacggctcatgacccggctcctgcttgcgctcgtcctgctcgtgtcggccgccagcgcccaagctgcggtccgcatcaaagacatcgcggacatcaaaggcctgcgcgaaaaccagatcgtcggctatggcctggtcatcggcctgaacggcacgggcgacacgcttcgcaatgctcccttcacggaacagtccctgcaatcgatgctcgagaacatgggcatcaatgtcaggaacgaggccacgagcaccaatgcccccctgcgtccgaccacgctgcgcacgcgcaatgtcgctgcggtcatggtgacggcggacttgccgccctcgattgggcctggagagcgcatggacgttaccgtctcgtcgctcggcgatgcgacttcgctgctcggcggcacgctggtcatgacatcgctgcgcgcggcggatggcgccgtctacgcggtggcgcagggcgcgatcacggtcgccggctacagcgtcggggggcaggcgcagaacgtcagccagggcacgccgaccgcgggccgtatcccgaacggtgcgctggtcgaacgcgaggtgccgggaagcctccacgagatggagttcctggtgttgcagctgaagaaccccgatttcgtcaccgcaacgcgcatcctcgacgccatcaaccgctacgccggcggacgctaccgtgcgcagatcgcgttcgagcgcgactaccgcaccatcgtgctctcgaagccgcgtcacatcggccccgtccgcttcctcgctgagatcggcgagctggcggtggagccggacacgccggcgcgggtcgtgatcaatgaacgcaccggcacggtcgtgatcgggcgcgacgtgcggatctcgaccgttgccgtgactcacggcaatctgacggttcgcgtcacggagatgcctgtcgtgtcgcagccggcgccattctcgcgcgggcagacggtggtcgtcccgcagaccatggtcgaggcaaacgaggccggagcgcaagtggcgatcctgagtggggtcgatctccagcgcctcgtgcgcggtctgaaccagatcggcctgaagccgtcggggatcatcgcgatcctccaggctatcaagaccgcaggcgcactccaggccgacgtcatcgtgcaatgatgcacaagcgtcgtgcaagcttggtcgctcaatgctcgggtctgaagcgagaatcgcacgcgccccgatgctgaagctggatcacaaagccaaactcctcctgatggccgcggcctcagttctcgcgagcgcatcgcccgtgctggcgctggaggaggcaaagccgaccaagccgctcaacctgctctctttcgcgcgtgcccgcgtggtccgatcgcagaagccgcagctgccggccagcacgatcacaagcgacaatgcgtctgtccgggcgacggcgtgggcagccgaagagttaggacccgcggtcaccggtgcggtgccggagacgccggcagccgcgcctgctcccgcaccggtgcgtccggcgaagcccggcagcgtcacggcgccgccgaagccggcggcggcgcaggccgcgccggcccctgacaacgacattgccctgttctgcagcaacgtcgccgatcccgccgtcgatgcaaggctggcctggcagctcaaggagctggagaaggccgagaacctgctccgcgaacggatcgccgaagtcgaggccaagcgggccgaatacgagaagtggatggcgctgcgcgacgacttcctgaagaaggccgaagcgagtgtgatcgagatctattcgcgcatgaagcccgaggctgcggcgacgcagatcgcgggcatgagcgacgagaccgccgccgccgtgctggccaagctcagcccgcggaactcaagcgcgatcttcaacgagatggacacggcgcgcgcggcgcacctcgccgacctgctgggcgggatgcgtcgggtagatgacggaaagcccaaatagatgaacaagccggtcctcatcctcttgcacctgctggcgtccgtcgtcttggccggatgcttccatgatccagccgaagtcctgatcggcccgcaaatgtcgcctgtcggcagcggcctgaggacgccggcggatccgatcccggtgacgccgcgcatgcgcacgcccgtcagctatcgctcgacctgggacgacggcaccgatctcttccgggatccccgcgcccggcgcaccggcgacgtggtgacggtgatcatctccatgcaggacaaggccaagctcgacaacaagaccggccgctcccgcgattcccaggtcaagttcgggctcgactggctgatggacgtcgccggatggaacgacacgggttcagccaatgccaatctcagcaccaacacccagatcaagggcaatggccaaatcgaccgcaccgaggacatcaagttgtcgatcgcggcgatcgttactgacgtgctgccgaacggcaacatgatgatcagcggctcgcaggaatttcgcgtcaacacggaaatgcgcgtgctcaacgtcggcggtatcgtgcgcccgcgcgatatctcgcgggcaaacacgatcacgtatgataagatcgccgaggcgcgcgtgtcctatggcgggcgcgggaaactgtcggacgtacagcagcctggatggggacatcggatctatgacgccgtggcaccattctgaggctcggcccggtcggttcgcgacgcgacggcaggagacaccatgcgcctgatcgcctccatcctcgtgctgacactgatcgcgatcggcgcaggcgccgttgccggcctgcatctgatcgcgaccgccgagcgcgtcgccgctgacgcgaagaagagcgctgcgcccccgccgatcgcgtcgagctacgccggcagcgcgcggctgaggaaattgtcaccgatcgtgaccaatctcgccgcgccggcaaacaactgggcgcgaattgaagcctccatggtgaccgacagcatgagcgacgaggacgcgggcattctggccgcccacatcagtgaggacatcgtgacctatctgcggtcgacgacggttgcgcagttcgagggatcgcgcggactccagcatctgcgcgatgatctgaccgagcgcgccaacatccgctcggccggcaaggtgcgcgaattgatcatcgagacgctggtgattcagtgagagtgaaaatcctgctgctggcgttgatactggtggtgctgcccgaagcggcgtcggcacagattccggacctgaattccttgttgcctccgggaaacggctcgaccagcggtcggatcatccagctgatggcgctcatcaccgtgctgtcggtggcgccgggactgctcatcatggtgacgagcttcacgcgatttgcggtggcgttgtccttcctgcgtgcaggtctcggcctccagaccacgcctgccaacctggtgctgatcagcctcgcgctgttcatgactttctacgtgatggcgccgaccttcgacaaagcgtgggagtccggcgtccagccactgatgaagaacgagatatccgaagagcaagcctatctgaagatcaccgatccgttccgcgagttcatgctggcccatgttcgggacaaggatcttcagaccttcgaagcactcgccgcggagagcttccgcaagaagttcgacgacaagcgggtcgatctgcgcgtgatcattccggcgttcatgatttccgagctcaggcgctcgttcgagataggctttctcatcatcctgccgttcctggtgatcgacatgatcgtggcgacgctgaccatgtcgatgggcatgatgatgatgccgccgacgatcctggcgctgccgttcaagatgctgttcttcgtgctgatcgacggctggaacctgctggcctccggactggtgcgttcattcaattgagagccgcgatggcggtccgaccggctggatatggttaagcgagacgagccggctatggttagcggttggtaatcttaaccatatgatatcattgcgaaattcgcgcagatcttaatccgggagcaagattcggcgtgctagcgatgcagcacggcgggttggaccccacccacatcagtccaaaggcatgatgccgcccttccgtaccggtgaaagcccggtatgtcccctcgtgaaaatgtaacgcgtacataaagggacattcgcaatgtcaagcctgcttacgaactcgactgccatgaccgcactccagaccctgcggtctgtgagttcgcaactctccaccacgcagaaccggatttcgaccggccagcgcgtggccaccgcttcggacaatgccgcctactggtcgatcgcgacgtcgatgcgcgcagacaacgccgcgctgtcggcagtctcggactcgctcggcctatcggccgcgaccgtcgacaccgaatacaccgctctgacctcggtgatcggcgacaaggaatcaggcttgaccaagctccaggcgctcctggtggaagccaagaccgcgggtatcgaccgtaccaagatccaggcggacatcacgcagatccagcaggacatgaagctgaaggccgactccgccaccttcaacggcatcaactggctgagcacgacgaccggcaccacgccgacgagcttcagccttgtctcgtcgtactcacgtgtcggcggcacgcccacgatcggttccatcaccgtgacgaccgccaactacacgctctattcgaccacgcagaccggcattctggacacggtgagcggcagtgcttccgtcgacacgatcaacatctccgcactgaccgactcggccgccgaccaggccacgctcgatggctacatcgcgcaggtcactactgcgatcaactcggtgagctccgccgccgccaatcttggtgccgtcaagaaccgtatctcgaccaacaccaacttcgtgaagtcgctgatggactcggtcgaccgcggtgtcggtcagctcgtcgacgcggacatgaatgcggaatccacccgcctcgccgcccttcaggtccagcagcagctcggcgttcaggcgctctcgatcgccaataacagcagccagagcatcctgtcgctgttccgataagacctcgttcatggagggagggccgcgcttctcgcgaagcgcggcctttcatttgacgtgacgccgcgcgcgcccagatttcggctgcctgttgcagttcgagcacggagccacaagcctcgcacaagcctcgcccgctaacctctccgctacggcaggttgggccgcgaacccgcgtttgcgggagcccaaaggcatgacgccgctctgccgtaccggtgcaagcccggtatgtcccccaaaactcaattcaatctccaaagggacatcaaaatgggttctagtcttctcaccaattcctccgccatgaccgcgctccagaccctgcggtctgtcagcgcgcaactcgccaccacgcagaaccgcatctcaaccggtcagcgcgtggccaccgcctcggacaatgccgcctactggtcgatcgcgacgtcgatgcgctccgacaacgccgcgctctccgcggtctccgattcgctcggcctgtcggccgcgaccgtcgataccgaatacaccgctctgacctcggtgatcggcgacaaggaatcaggcttgaccaagctccaggcgctcctggtggaagccaagaccgcgggtatcgaccgtaccaagatccaggcggacatcacgcagatccagcaggacatgaagctgaaggccgactccgccaccttcaacggcatcaactggctgagcacgacgaccggcaccacgccgacgagcttcaacctggtgtcgtcgtattcgcgggttggcggcacgcccaccatcggctccatcacggtgacgaccgccaactacacgctgtactcgaccacgcagaccggcattctggacaccgtgagcggcagtgcgtcggtcgacacgatcaatatctccgccctgaccgactcggccgctgaccagaccacgctcgatgcctatatcgcgcaggtcaccgccgcgatcaactcggtaagctcggccgctgccgatctcggcgcggtcaagaaccgcatctcgaccaactcggaattcgtcaagaccctgatggattccgtggaccgcggtgtcggtcagctcgtcgacgccgacatgaacgcggaatcgacccgcctccaggccctgcagacccagcagcagctcggcgttcaggcgctctcgatcgctaaccagaacagccagagcatcctgtcgctgttccgcggctaagcagcgctttcgacgacggccgtgctccctcggagggagcacggtcccgccatgatcggcggacgcagcacgggacgagccagcaatcagcctccgctgcgcgaattcatgcactacaccgcggccgagcgcgtcatgcgcccgagcgccgcttttggctgcgagacctattgcgtcgcgcaatagtcttgtaaaattgcaacgcctcgcgagcgaactgacacattcccggcccgcgcaaccttcagacaaggttggcagctgagtgtcctcaccattagcattggtacgaggtcatatgctcagtcgtgcgcaggtacagcaactgctcaacaatctgctggagcttgggccgcgccgcctgatggccttggggttgatcggctttgcggttctcgtcaccgtagttggcggaacctactatctcagccgccccgaattcgaaacgctctacacaggcctcacccgagaagacgtgacgcgcatcggcgcagcgctgcgcgagcagaacatcgccttcgatgtcaacgccgccggcgatgcggtttcggtccgcccgagccagaccatgcaggcgcgaatgctgctcgccgagaaggggctgccgaccagcgccaattccggctacgagctgttcgacaagatcggctcgctcggcctgacctcgttcatgcaggaggtcaccaagctcagggcactggaaggcgagatcgcccgcacggtgcaattaatgaaaggcgtgaaggcggcgcgcgtacatatcgtgctgccggtgcgcggctcgtttcgcgcaacgcagcagccgccgtcggcgtccgtcgtgctccgcacggacagtgcgatcgaggcgcgcacggctcagtcgatccgtcatctcgtcgccgctgccgtccccggcatgagccgcgacaaggtgactgtgctggacgctgacggatccatgttgctcgcagaagaggatgaggcgagcgccgcgccgagcaagatggcgagcctgcagaagactgtcagcggaatggtgcaggagaacatccgcaaggcgctgacgccgtatctcggcctcgacaatttcgaggtgagcgtcgctccgcagttgtccaccgacaagcggcagatcaacgagaccgtctatgatcccgagaaccgcgccgagcgctcggtacgggccgtgcgcgagaaggaatcctcgcagaacgcggaccgatcgacgccgaccacggtgcagcaaaatcttcccgaccagcaggtgaatgccggcggcggcaagaactccagcgaggacaagacccgccgcgaggacgtcaccaatttcgaggtctcgtccaagacgacgacgacggtgagcgacggctattccgtcaagaagctgttcattgccgtccttgtcaaccgagcgcggctggtcgcggatctcggcgacaagagcaaccaggcgattgtcgacagcaagctcgcagagataagccagctcgcggcgacggcgggcgggctggacaagacgcgcggcgaccagatccaggtgacggccgtcgactttatcgagggttcgcgtgagctggccccagtgccgccgatcagcttcgtcgagatgatcaacaagcagctcggcagcgtcatcaacgcggtgacgattctggccgtcgcttcgatgctggtgtggttcgggctgcggccggcggtcaacgggatactgacccatcgcgcggagcaggagcaggtcgaggcggctgaggtcgcccaactcgaggctgcggcagcgagtgctttacccgagggcgaggagacggagctcaacctcgtcgaagacctcgaaggcaagatgcagcgtacgccgcagaagcggctcgagcagatcgtccgactcgaccagatgcaggcggcagcgatcctaaaggactggatgcggcgtgaggaggcggcatgaacgcggcaatcggaaaactcctgacgcagttcgatgcgaatggccgcgtcaagtcgccgccgcctccgccgccgaaaatccaggacgtgctgaccaggcagaaggaagcccggcgcgagccgccgcctcgatcgcatgctcaggctgagccgcagccacaaccgcaggcgtccccagcgccgcccgcgacggaggctccgtcggtcaatctcctggacgatgcctatcggcgcggccatgcggccggcgtcgcagagagcgacgccaagctggccgaggaacgcgtgcgcagcgcaatccgactgggcgaggagcgggcgaaatggtccgaccagcaggctgtcgcaatcgtcagcggattcgaggcagcctgccgtgagatcgagaccaacatcgcaagctccgttgcgcggatattgctgccgttcctcacggacgcggtgcgcgacaaggcgatcggatcgctggtcgagcaaatcgcggcgctaaccggcaactcttcggtgccggccttcaaggtcacgggccgaagcgatctgctcgatctcgtcaagacgcaactcgaggcgtccagacgaaccggcattgtgtatgaggcggccgagactctcgaggtccgcgtcgtcgctgaccaaaccgtgatcgagacgcagatctccgcatggagtgaacgccttaaggaggcgcgccggtagtccgccatggaagaggtcaagcatgagatcgtgatcgtccgccggcgcagcgccttcgccgaggaggcacatcacggcggcgtctggaagatcgcctatgcggacttcatgaccgcgatgatggctttcttcctggtcatgtggctgctcaatgcgctcaaccaggaccagaagcaggtggtcgcgagctatttcaacccgatcaagctcgcggagaacgcacccgccccaaaggggctcaaggacctctcaaagaaggagccgtcatcgttcgaaggccaggatggcaagcgccagccggccggaccgaatgaagaacgccgcggcgactccccaactgccgagaagccggcctcctacgaggaaaaggttctgttccgcgatccctatgcgactcttgccgaaatcgccagcagcgcgaaccagtcttcgggccagcggcgtgccggcgctctgacatctgccgaagaggagggcctcaaaggtggcgatgcctaccgtgatcccttcgatcccggctattggaggctggcgccgcaagcgtccaaggatgcggatcgcttcatcgagagcgagcccaggccgaatgcttccgcgcgcgatgtctccgtagccgctcagagtgagccgccggcgcatcgtgccaaggtggacgagaccggcggaagcatggcgccaaacgcggatatcccgtccgcgagcctgtcgcctctgctgccgccggggcctgcgccgacgcaatcctcacgggagggcagcgctgctcaagctggcgtccaggccaataccgccgcgcaggcgcgatccaacgacaccgcgaaagagtccgaaccgcatgatgcagcgcaagcgcagcagccgaccctcaagcaccttcagtccgcaatcgcggacgcgctgtcggatatcaaggcgggcgcggggccagcggccgaggtgcgtcaggttgaggagggtctgctgatcagcctgaccgacgatgcgagcttcggcatgttcgcggtcggctcggccgagccgcggcccgaactgatccgcgtgatcgacaagatcggcccgctgctgacgaagcggcagggcatggtcatcgtgcgcggccataccgacaatcggccgtatcgctcggaaacctatgacaattggcggctgtcgaccgctcgtgcgcagatggcctattacatgctggttcgttccggggtggacgcgcggaggatcgagcatatcgaaggttatgccgaccggcggccgaagcttccgaatgatccggcggctgcacagaaccggcggatcgaaatcctgatccgggagaaacgcccttgatcaggctgctgcgccacgccgccctgctgctgctctttacggcggcgaatgcgtttgctcaatctgtgccccggctcgatgaaccctatgagctcgtgcgcgcgctacaggcggtacaggacggtatctccaacggtgacaccgccgcacataacagccacatcgcgctgattcggcagatcggcgacaaatttctcgctgccgatcccggcgtatggagcaatccacagaacggacaggccgtcgtcatctacctgctcagcggcggagcgccgcaattggttcgcaagctgccgcgcgacaagatgaaggtcgacgagcggctgctcaatggtgcgcttgcctatgtcgagggacgtcaggaggaagcgcgggagctgctcaaggacatcaagccgagaacgattccctcgggcctcggcggacaggtcgcgctggtccagggcgcactgttcgcgcgtgcagaggcatcgttcgcgatcgagcgtctggacgaggcgcgcctgctgttgcccggcacgttggtcgaggaggcggcgctgcggcgcgagatcctgttggtggggcaagcggaggatttcgagaagtttgagttcctgacgctggcttacatccgccattaccgcaactcgatctatgcaggcgatttctggcagcgcttctccaccgggctgacgcaatcgaacctggcgctggacgagcgccgatttgcgcggatcgccgcgctgctggagcagatcgatcgcgcaagccgcctcacgctgtatctggtgatcgcgcgcgcggccatggtgcgtggtcggctgcccgtgacccggcttgccggcgagcgggccctcacgctcagcgccgacgcatcagtggaacgcgagcgcgcccatttcttccgcggcgcttcgcgagtgctcacagacgaatatgacggcggtctcgccgagctgaaggcgctcgaccgcgcgaagctgcccgagcgcgacgttcctctcctgaatgccacggtgcagctcgcgctcgacgtgcggaagccgttcgcaagcggatccgccgcggcggccgacaaacctccggcaacgccggcgcgactcgatctggcctcgtcgaccgggatgctcgcgcgcgcgcagaagcagctgggcgagctcgaactcctcaccagggaccgccgtccatgaccaaactcagtggaacctccggacagctcttctcggcgcttgccgagagcctcaatgtgcgcgagacgtcgcgttcggcaaaaggctccggggtcaagtcgcaggcaagttcgtcgttcaacgatctgctccacaccgtctcgaatctcgccaaacaagccctgggcgatgatggcggcgataccaccgcgagcgccggagcgctgcgcacgcatctggcccatccggccgagcaggcgaagaaggctacggcgctgcacgaacgcatcgcagcgtccgagcggccagagtctccagaggattcctccgagaagaaggccgacgggtcgtccgagaggccacttccggtggatcatgccaccgggacagatatccagggtcagtcgagcaccgttgcggtgctcgggcaggaggtcgccgccgcgcccgctgtgaaaacgcagatggcgttgcagtccaccgacaaggatgcccccgcgcgcgacgagcgctccggggcggctaagcgcgacccgctcaccacgggtgcggcgaagacggcgccgtccgatagcactccgcccagcaccgcagcaaccgccgcgcgctcgcaggctgccgtctcgcaaacgatggcgccgcagcccgcgtcgacacaaggtggggagtcttcgagcacaatgccggcttcacccggcttcgaggcggttacggcaaacgttgagcgggccgccaaaacctcggcgcgcgccgcgctccctgagacgaccaagctcaccgtggtccagcaggagacccatctgcctccggcccagttcaacgctccgcaacaggtcgccaatgcggccgtcaccgagctgaaagagtcctcgggaccgaccatggccgcggcgcctgatctcgcagcatcccagaccaatgcgccggatcagccgctcaagatactgaccgtcaatctcgagccacccgcgctcggcaatgtcaccttgcgcctgcgcctcgtcggcactgaagtgtccgtccagcttgcggccgagcgcaaggacacgagccagctgctcgaccggcaacgcgatcagatccgcgacctcatgcagtcggcgggctatgtcgctgatgttgcgccggtccagcacggctcgctggacgccttccaaagcggctccggccagtcgcagccgcagctcgcgggtcagcatcaatcgtcaccgcagtcgcaaggcacgtttggcggcaccggaacgtcgtcggggcaatcggacggcggcgccaagcaggctcgccaggagcgccagttcagtcaggagacgcgtcatgatcaggacgtggcgccgcatcttcgtcgcggccctgtttatctctaatgcaggcgccgcccaggcggccgccgaaactgcgcgcccctgcgagcgcgagatggcacgcgcggcgcgtcagcacggcattccgctcggcattctctatgcggtcggcctgaccgagaccggccggcgcggcgcactccatccttacgctctcggtgccgccggccagacggtgttcgccaaggacgtggatgacgcaatcgcgaatttcgacgcgatgcgcagcaaaggcatcaagctgatcgatctcggctgtatgcaaatcaaccactattatcacggcgacaagttcgcttcggttcgggccatgttcgatcccgcgaggaacgtcgagtacgccgcgcgcttcctcaaggagctgaagcagcgcgaaggcagctggaccatggccgtcgcccgctacaatgcaggccccaacaaccagccggcccagaagcgctacgtctgtcacatcgtcgctcatctcgtctcgagcggcttcggtgcgtggaccgacaaggcgcgctcgttatgtcagccgagaacgacctgacaacaggaagttgtgcatcgcgcccaatcatcagccccgcgcaagcaagacgccccattgtagccgcaacctaccaaaggagcccaattcatgagcctgtatggcgttatgcgcaccggcgtttccggaatgaacgcgcagtccaacaagctgtcgacggtctcggataacatcgccaacgtcaacacaaccggctacaagcgggcctccacggagttctcctcgctaatcctgaagagcggctcgggcaattacgattctggcgccgtcgagaccacgatccgctacgccatctcggatcccggacatacgcagttcaccacgtcgagcacggacctcgccgtccagggcaacggcttcttcgtggtgtcgaacgccaacaacacgcagcagtttctaacgcgcgccggctccttcgtgccggacagtcagggcaatctggtcaatgcggcgggctactatcttcttgggcagcctggtctggtgaccaacttctcgcagaacagcctggccggcatgcaaatcgtcaacattgcccagattccgcaagtgcctgtgccgtcaacgacggcaacgctcacgaccggcaatctggatccggaagcagccatcatcgcaggtccgcccagcccggcatcgtattcatcgaaaagctcgatcgtggcctacaacaatatcggccaggccgttacgcttgacgtttatatgtcccacaccgcgaccgctgccggctcggatacctggcagatagaggtctatgactccgcgacgggcacctcgctgggggccgccaccactttcaccttcgacaccacggcggccggcaggggcgcgctggccgcggcaagcccgaccggtctcacagtgactgtccccggcggtgcggcactgaccatggacctgtcgaacatgacgcaggtcgggaccgacttcagcttcaaggccaccgtcaatggcagcgttcccgcggccatcgataaggtcgacgtcgacgatgcgggccacgtgacggcgatcctcaagaatgggcagcaactgacgctctacacgatcatgctcgccgacgtcgcgagccccgacaatctgacgcccgagccgggcaacgtctattcgaccaacctcaattccggcaacgcgcaggccggaaatgccggcaccggcggactcggcacgatccagtccggtgccttggaggcctccaacgtcgacctcgcggacgagctcactgggatgatcgaggcccaacgcggcttcaccgcgaactcgaaatcgttccagaccggcgccgatctgctggatgtcgtcgtcaacctgaagcgctgaattcttcaacgctcgtttcgggcaagagcaccatgtcccttaccgccgctctcaactcggcccgctcctcgctcatggcgtcgagcatccagtcgtcggtcatctcgcgcaacatcgccggtgccagcgccaccggctactcgcgcaagctgaccgagctggacaatcttcccggcgccggcgtctatgtcgcggcgatccagcgcgccgccagctccgggctctacgacaacgtcctggtcgcgacctcgtcatcggccaagcaaagcgcgatctatgatggcctccagagaatcgccgccgcgactgtggacgatccagagctcgagcaatcgccgaccgcacagctcaatgcgctgaagcaggcgctccagaagtatgccaacgcccccgacaacaccacgctggcgcaggcggccgtcgcatcggccaaggacatggcgagcgctctcaaccaggcgaccaagaccgtgcagtcggtccgcgagagcgctgatgccgacatgaggacgtccgttcagaacatcaaccagctgctctcccagttcgatgccgtgaacactgcgatcgtgaagggcacgatctccggcgacgacatcaccgactacctcgaccagcgcgacaacatcgtctcgcagctgtcgcaggaggtcggcgtcaccatgtcgatccggcccaatggcgacgctgcgctctatgcggatagcggcgtcgttctgttcgacaagacggcgcggacggtcagctttgcgccgacgaatgcctacaccgccgcgaccacgggcaatgccgtctacatcgacggcgtccccgtgaccggcgccaattcggtgatgccactgaagtcgggcaagctcgcgggtctcgctcagctccgcgaccaggacgccgtcacctaccagagtcagctcgacgaaatcgcgcgcggcctgatcaatacgttcagagaaagcgatcaaacggccgcagcgctgcccgacgttcccggtctcttcacctatcccggtgcgccggcgatgcccgcgagcgccaccgtctcggtaggactcgccggtacgatttcggttgcagcctccgtcgatccggccttgggtggcaacccgaacctgctgcgcgacggcgccatcagcggcaatcctgcctaccaatacaacaccgccggcgacggtggctattcggcccggctgcagcagctcatcggcgacatggatgcgtcgcagccgttcgatgcgaccacgcaaggcaagccgagcggcagcctgatcgactttgcatcgtcgtcggcgagctggatcgaaaaccagcgcaagaccgccaacgacaactccgagtaccagagcacattgctcaaccgcagcatcaccgcattgtcgaacgtcaacggcgtcaacatggacgacgagatggcgttgatgctccaggtcgagcgcacttattcggcgtcgtcaaagatcatctcgaccgtagatgagatgctgcaaagcctgctggctgccgtggggaattgagtcatgatgagcgcgaactacgtttccaccctgatgttgtcctcgtcgttgaggtattcgatcacaggcaatcaggcggcactcagcagggcctcgatggaggcgaccaccgggcgcttctacgacgtcggcctcgagctcggtgcgacgacggggagcgacctcacgctgcgggcggactggagcttcgccgatcagctcgtcgataccaacgggctggtcgcggggcgcttggacgtgacgcagaaccggatcacccagctcagcgagaccgccacggacttcctcaaggatttgatcgcggcacgcagtaccgacggcggcggccgggtcatcctgccgcctgcagcctccaatctccaggatctgatcggtgcgctgaacgtctcatataacggctcgtatctgttctccggcatcaacacgcagaacgcgcccatcacgccctacaccgcgggctcggccagcaagaaccaggtcgacgccgactttctcgcggccttcggcttctcgcaatcctcgcccggcgtgggtaccattacccccgcccagatgcagaccttcctcgacacgaccttcgatgccgagttcgcgagccccgcctggaataccaactggtcatcggccaccgaccagaccatgcaaagccgcatctccacgacggagatcaccgatacctcggtcagcgccaatcagatcggctttcgcaggctcgccgaggcgtacacgatgatggccgacctggggaacgtaagcctgagccaggagacatttcaggtcgtcgtggacaaggcgatcggcctcgtcggtaacgccatcaacgatcttgctgcgctcggaggtgccgtcggcacggtgcagcagcggatcaccaccgcaaccgccaagctgaagacgcagcaggacattctgaacaatcagatcgtcggaatggagaaggtggacccgaccgaggcttcggtccgggtcaacacgctgcagacccagatccagacggcactggcgctcacctcgcagctccagaagatcagtctcatcaattatctctgagccaaggcggccctgtcaggctcgtaacctttgtctagttgttcggtctcttgcgcagagtggtcccgatgacgtttgaagcctatgaagcagtcgttgacgacagtgcctatgaggcgcgcagccgcgagcggcaggcactcagcctcggcatcggccggctcgagcggatccagaaggatcgcttcagtgtcgaggatctggtcgaaagcctgctctatgtgcggcgactgtggacgatcttcatcgaggatctggcgcacccggagaacgcacttcccgaaaagctgcgtgccgacatcatctcgatcggcctgtgggtcgtcaaggaagccgatcggctccgggaacaacggtcgaacgacgtggagcagctcatcgaaatcaaccgcctgatccgagacgcgctctaatgaagatctccttgcgcgccggcgaacgaatctacgtcaacggcgcggtgctccgcgtggaccgcaaggtctcggtcgagctcgtcaacgacgtgatgttcctgctcgaagggcaggtcatgcaggcttccgacgccaccacggcactgcggcagctctatttcatcgtccagctcatgctgatgaacccgactgacgtccgggacgcggctacgctctacgctcagcatctcgccgccctgtttgccgtgtgcgagaaccgcgagatgctggatggactaggcgcagtcgatgagctggttacggccacccgctacttcgaggcgctcaagcggattcgcgccctgtttccggtggagcaggccatcctggccggctctgccaccgtttccccattcgaggctgcctgacagcggagaggccagatgaacgtcaccagcgcgaccgagaagtcgtccagttcgaacggcacgacgtcggcgacgtcgagcaacagcgtggactacaatacgtttcttcagctgctcattgcacagatgaagaatcaggatccgaccaacccgatggataccgcgcagtatatgagccagttcgcccagctctcgacggtggagcaggcaatgcagacgaatgcaaagctggacgcactgctgtcgtcgcaatccttgtcgcaagccaacgggctgatcgggaagacggtcagcttcacggactcgaccggtgcgagtttcagcggcaaagtcgtttccgtctcgatcaacagcgacggctccatcgcaactctcgccgatggcacgaaggttgcggtcggccccgggctcacgatcagccagtcatgaacgagcgggacgccctcgacatcgtccaggcggcgatctggaccatcatcgtcgcctccggacccgcggtcggcgccgcgatgctggtcggcaccgtcatcgcgctgatccaggccctgacccagatccaggaggtgacgctgaccttcgttccgaagatcatcgtcatcctcctggtcgtcgccatctccggctccttcatcggcgcgcatctgtcgaccttcaccgagctggtctattcgcggatcgagcgcggcttctgaccgggcggcgacctgccaccaccctcgcgtaagctttgcgcggcagattgcgagccggacctctctgccggtgactcatggccgataccttagctgccagcctgcccagcccgcgccgcctcggagcggacgccttcttcgcgggcggcatcgtggccatgctcacgatcctgttcctgccgattccgccgatcttgatcgatctcggcctcgcgttctcgatcgcgctgtcggcgctgatcctgatggtcgcgttgtggatccagcggccgctcgacttctcggcctttccgaccgtgctgctgatcgcgacgatcctgcgcctggcgctgaacatcgcgaccacgcggctgatcctctcgcggggcggggagggcgaacacgcggccggccacgtcgtcgccggcttctcgaaattcgtcatgggcggcgacttcgtcatcggtctgatcatcttcgctatcctcgtcaccgtgaacttcgtcgtgattaccaagggcgcgacgcgtatcgccgaagtcggggcccgcttcacgctcgacgccattcccggcaagcagatggcgatcgacgccgacctgtccgcaggcctgatcgacgacaaggaagcccagcgccggcgccgtgaactggaagaggagagcgcgttcttcggcgccatggacggtgcctcgaagttcgtccgcggtgacgccatcgccggcctgctcatcaccgcgatcaacatcttcggcggcatcgtcatcggcgtgacccatcacgggttgaccctctcccgcgctgccgacgtctacaccaagctttccgtcggcgacggcctggtgtcgcagatgccggcgctgatcgtgtcgctgtcggcaggccttctggtctccaagggcggcaccaggggctctgcggagcaggcggtgctgcggcagctcggcggatatccgcgcgctgtgtcggctgccgcgctgatgatgttcgtgctcgccttgatgccgggtctgccgatggcgccgttcgttttgctcggaggcgttatggccttcgtcggctattcgctgccgaagcggcaggccgcgctgaaacagaaggaggatgcgcgcaaggccgacgagcgcgcccaggcggaggccaaggaatccgtcaaggagcagctcaagaccgccgagatcgagctggcgctcggcggccacctctcggtccatctgctgggctcgcgcaccgagctcgcccaccgcgtcgccaagattcgcaagaagttcgccaagcaatacggcttcgtcattcccgagatcaagctcaccgacaatctgtcgatcgaccccaagtgttaccagatccggatccacgacacgcgcgtcgcccatggcgaactcaggctcggcgaggtgctggtgctggtcgacaaggatggcaagcccgacgtacccggcgacgaggtcatcgagcctgctttcggcatgaaggcgctgtgggtgacggaagccttcaccgacgaggtcaagcggcagggctgcaagccggtcgacaatctgtcggtgctgctcacccatctgagcgaggtgatcagggcgaacctcgcccagctcctctcctacaaggacatgcgggccctgctcgaccggctcgatcccgagtacaagcgcctggtcgaggatctctgcccctcgcagatctcctattcgggtctgctggcgatcctgaagatcctgctcgccgagcgagtctcaattcgcaaccttcacctcatcctcgaggcaatcgccgaaatcgcgccccatgtgcgccgctccgagcaggtcgcggagcacgtgcgcacgcggcttgcgcagcagatctgcggcgacctctccgacaatggcgtgctcaacgtgctccgtcttggcaaccggtgggacctcgcgttccaccagagcctgaagcgcgacgccaagggcgacgtcatcgagttcgacgccgacccgcgcctgatcgagcaattcgcgaccgaagccagcaccgcgatccgcaagttcaccgagatcggcaccagcgtggtcttggcggtgactcccgaagcccgaccgtatgttcggatgatcctggagcgggtgtttccgaccttgcccatcctgtcgcatgtcgaagttgcgcgcagcgccgagatcagggcgctcggggccatatcgtgatcagcggcctcgccgacagcgtgctggtgacgttcatcgtgttctgccgcatcggcgcctgcctgatgctggtgcccggctattccagcgtcaacgttccgccccaggtgcgcctgttcgtcgcgctcgtcacgacctttgcgctgacgcccgtcctggtcgcggtcctgaaaccgctcacggacaatgcggcgccgttgacgctggcgctcctgatctgctccgaactcgtggtcggcagcgtcatcgggctcggcgggcgg

SEQ ID NO: 301 - DNA, 28998 bp, Bradyrhizobium colbertium
  misc_feature (1657)..(1666): n is a, c, g, or t
taggtgggtgcctcatgccgcttacgctcggtgcccgacgattttcacgacgtttgtagcgaccgtccttctgctctcaacggtcggaggggcaacacctctctacatttggaatgcgtcaaacagcgttccgatcggcctctatcgtcttcagccggtgacgaaattgaccattaccgagctcgtcgccgtacagcctcccgatcttctcgcggtcttccttgatctcaatggctacctgccagtcggcgtccccatgctcaagcgcgtattggcgctccccggacaaacggtctgcagaaacgggttggcgatcgccgtcgatggcatcgacgtcggagacgcacgcgaccgcgacgggcacggccgcccgcttccggcctggcacggatgccgcgtcattgctgatggcgatgtctttgtcatgaactggcagtcgcaggactcgctcgacggtcgctattttgggccactccctgcatccgccgtcatcggcaaagcggtacctgtgtggactgacgaggagtgatcatgcaggtcaccactactctttcgatcgatggcgactggtcccgccacgctctgatctttccttaccggcgcggtccaaagcatgttgaacgtccacgcaatccgcaatggaacagtcgtgcccctgcggtggcgagccagagggcacggcgccgttcgcgccgcataattgcacttgtcggtgtcgccatggcatcgattgtatgccagatggccgcatcaatggcctttgaattgagtgcgcgctcacaagccgaaacccgtccagggagcatcgatcggttcgccggattcatcgcggaggcatccgctcgcttcgccgtaccggcaggctggatccgtgccgtcatgcagatcgagagcggaggcgaccaacgcgtgacgtcgccccgcggtgcactaggcctgatgcaactcatgcctggcacctgggttgagctcagtgctcgctatggcctgggtctcgatcccttcgatccccgcgacaacattctcgcaggtgccgcatacctcaaagagatgcacgaccgtttcggattggcggggttccttgcggcttaccatgcgggtccggcgcgatacgaacagcatctcgcgacagggaaagcactaccgcaagtcaccgtagactacgtcgccgcggtcacgtcattgcttgcccaagagcagggagagcccactgcgatgcgcaacagacgtgcaattccttggcgggaagctcccctgtttgttgagcggttgggcgcaccgtgacggatattcggtttgcattcgaaacgctgcaacacgatacgggcgatgcctccggcccgcgctctactcgtcgcttcgctcctcaccgagccaccctgcgggtgtctcggccctccgggtaacgatcgctatcgcaaacgctcgcttcgctcgcaaacggtcggggcttcgcaagtcgactgtcaagtcgcggcgcctcttcgcaatgaatcatcgccagccgacgtgtccaggcaagcgctattggaggatccaccgcaatgacccgaaccgcaatttgtcgcaaatcgcagcgcgtaccgagagtctgttggcttggaaattgggccctgggagccagcgaccgaggagggcaggataaaagccgcaaggnnnnnnnnnnacggtcggtttagtgagaaacagagccgaattttcgacatgccgcacacattgcgagcgtctcacgcaacctgcgtttttcgacaacacgttagcggcattcggcatttgtcaccttacgagccaatcatgagcggcaacgacgattttcgcgttcgcccaggcaaaatccgatcgacacgcgggccgcggacaaagccgtttctgacgcaagcccttcaggcggcgcagaaggccggcggtctctcgcgcgccgccggcggccacggcggcagtcggttcgggcgagggcgctcggcaagccttgccgcgacacggatgctgcaagctcggggccgcggcgcgatggtcaaggcgcgcgtcgttcgccagatgcgttcacccggagcgctccgcgcccatatcggatatctcaagcgcgacggcgtcactcgtgacggttcgcccggaaagttgttcgacgccgccggcgatgaagcggacggccggtcctttgccgagcgctgcgaaggcgaccggcatcatttccggttcatcgtctcgccggacgatgccggcgagctatccagcttgcgaaccttcacgcgggaattgatggaccaggcctcgcgcgatctcggcacgcggcttgattgggttgccgttgaccactggaataccgagcatccgcacatccatatccttgtgcgcggccgtgccgacgatggcgccgaccttgtgatcagccgcgactatatcggatcaggtctgcgcgcccgggccgctgacctcgtgacccgcgagcttgggccgcgatcggagctggagattcgacgcggtctcgaggcggaagtgagcgcggaacgctggaccaagctcgatcgggtgcttgcccgggaagcgggacggaccgaaggggtggttgatcttcgtccccaacgcgatgcagcgggcgatcctttgcgagaggtccggattggccggatgcggaccctcgagcggctgggtttcgccgaacccgccggccccgcgcgctgggttttggcgccggacaccgaacagcggttgcgtgcgctcggagagcgcggcgatatcatcaagcggctgcacaagacaatcgccaaggatggcgcagctcgcgcgccttcatcgtgggcgctggagggtgagtctcatggcgagccgatcgtcggccgcctcatggcccgcggcctggatgacgaactaagaggcacggcctttgccattgttgacggggttgatgggcgcgtgcaccacctcaagcttccggctatcgacatggccggcgacggtccaatcggcggaatcgtggagttacgccgctttgaggacgcaagcggccggcagcgcatcgcacttgcggttcgctcggatcttggcctcgatcagcaggtcgcggccgaaggcgcgacctggctcgaccgacgcctggttgcccgagaccctctcgagctttcgcgggcaggtttcggcgccgaggtccgtaccgcactggatcggcggatcgatcatctggcggggcaaggacttgcccgacgagacggagacaaggtcacgatcggacgcaacctggtcggcaccctgcgcgaccgggagctcgaagcggtcggccgcaaactcgcctcggaaacaggtcttgcgcattttcctgctcaaacgggggagcaagtctcaggggtttatcgccagcggctgtcacttgcctcgggccgcttcgccatgatcgacaacggtctgggctttcagctcgtaccctggatacccacgctggaacgcgaactcggccggcaggtgaacggcattgccgggacaggcggcgttgactggagttttggccgcaagcgcgacctctcgctctgaccatccgatttctacgccatgatgcgcacctttacgaccacgatcagatgaaccttgaaggttgcttttgagtgagcgttacgtctgcgtatgtccgcaacgaagattctttgggggcagcttctcttcgcgtcgctgctcgtgctcgcctttctctggacggccaccgagtggaccgcctggcggcttggcttccagccgcagctcgggccggcctggttcatgatctggcactggccgatttatcaaccactcgccttcttcatctggtggttcaaattcgatgcctacgcgccgaccatcttccttcagggcggctgtattgcggcaagcggcgggatcgccgccatggccgtcgccatcatcctctcagtctggcgcgccaaagaagcccagcatgtgacgacctatggatcggcgcgctgggccgatacaaaggaggtacgacgtgctgggcttcttgggccggatggcgtggtgctcggtcgctttggtgccatctatctgcgacatgatggtccggaacatgtgctgtgttttgcgccgacgagatcgggcaaaggcgtcggtctggtcatcccgacgctgctgacatggccttattccactgtagtccacgacatcaagggcgagaattttcagttgacgtcgggttggcgtgcacggtttggatcggtgctgttgttcgacccaaccaaccctttgagcgccgcctacaatccgttgctcgaaatccgcaaaggcgattacgaggtccgtgacgcgcaaaacatcgccgacattctcgtcgatcccgaaggcgcgcttgagcgccgcaatcattgggaaaagaccagccattctctgttggtcggcgcgatcctccatgttctctacgcggaagccgacaagacgctcgccggcgtcgccaacttcctgtcggatccttcacgagccatcgagacgactctgaatgcgatgttggcgacgccgcacctcggcgaacgcgttcatcccgtggtggcctcagcggcccgcgaactgctcaacaagagtgaaaacgaacgttcaggcgtgctatcgacgacgatgagcttcctggggctctaccgcgaccccgtggttgccaaggtgacggggcaaagcgattggcgcatccgtgatctcgtcgatggagatcaacccgtctctctgtaccttgtggtcccgccgtctgacatcgcccgcaccaaacctctgatgcgcctcgtcctcaatcagatcggcaggcggttgacggagacgttggataccgttcgacagcggcaaaagcttctgttgatgcttgatgagttcgcggccctcggccgtctcgatttcttcgagagccagcttgccttcatggcgggctatgggatccggagtttcctgatcacgcaaagcttgaaccaattggagcgcgcctacggccctaaccacgcgatcctcgacaactgccatatccgtgtcgcgttctcgaccaatgacgagcggaccgccaagcgcgtatccgatgctctgggaacggcgaccgagatgcgcgccatgaagaactatgccggccatcgcctttcgccatggcttggccatctgatggtcagccgccaggaaacgtcgcgtccgctgttgacgccaggtgaggtcatgcagctctcgccgaacgaagcggtcgtcatgatttccggggttcatccggtacgcgcccgcaaggtccggtactatgaagatccgcagttccagtgtcgtgtattgaagccatcacgcgctgtcccggtcgagctggtcatgcgaccggacgaatggtcgggacacgcgcccattcctccctcggccaaattgcttgcgtcgctcaccaagaaaccgcgtgatcacaatggtggcattcgtcgcgagccggaaatgcaggaacacgaggaagtcgttctcaagtcgccttcggttgatagcgaattcgattcggggacggacgagagcgacgccgaagccgtgcaagcctcagctttgaaccgatctatgcagggtctcgcacgcgctgttagtctcgatccggacgacaagatgggtctatgagccgacaagatgaaaaaggctcagctcagtatctacctcgatcaggagatattccgcagtctggaggcttacgccgaacgccagggtaagccgaagtcgttggtcgccgaagccgcgatcggatcgtttctgtctcccgatgattccgatcggcgggaggctgcgatcgccaaacgattggatcgcatcacgcgcgtgctcgagcggctcgaactcaaccacggtgtcacgctcgagacaatagctctgttcatccgattttggctgacgtcaaccccggcccttccggagcaatcgagcccggccgcgcgcgcgaagggcgcagaacgctacgatcgatttgttgaagcgctcggccgacgtttgtcgagtggatcgacggtcctcaaggaagtcagcgtcgagtttcccgaagctggaaatgccgagcaagccaagagctagctcaccatcgacgaggaagatgccattctctttctttatctacgccagagcacgctcatagttatgttctgttgaagtcatgctcggagtgctctttctgtaattcccgtcgggtgagttcacctcatcgatcgtatcgcgacaccgcgacctcgatctggggaccttgggggttatcagagcatgcaacaattggccgaactggacgggcaagccgggcacgttgacgttccatcgtcgcgaaggcgcaaaaccgtggcgcgtcgcaaggtgacggtccggttgagtgaacgtgtctccggtcggctcgacgtcgctagcgaccgaccgggcgtcggcaagagcatgctcgttgaggcggctctcgagcaattcatggatcccgccccgtcggtcgaagctgtgctccgcgagcaactcgatcacgtgcacgccagattcgaccatcttgaacgtgatatgcgcatgatcgccgaaaccgtcgcgctgcacgcacgctatcacctgaccgttgtcccgccactgccggggtcgcgacaacgcgaggcggtagtcctcggcgatgcacgcttcaaaatcctggccgagcaggtcgatcgacgcgttcgtcagtgccggcctctcatgcaggagacgatcgaccgcctgaactctgccgaacacgaacagtcgggaccgacagcaggagagggcccgacggacagctcggagccaggccgcgacaatgcgagttctgtttcgaaaggcgtgaatttcgagcagaggctggccgcaccagccgggaccgcgaacgacattccaaactttctccggcatccaaaggcggctaccggccaggccaaacctgcctcccgcgcgccgcaaaacctaagcgtggcagaaagctcaaatccagcatcctcgaacgagaagtcaggggctgcgcaggagcagccatcaacatggcggctgatcctctccgtctttcttccttttgccgcgggctattatctctccttcttgtttcgcaccatcaacgcgtcgatttcgccggtgctggcatccgattttgggctcggcgcggccgagacggggttgctggcgtcggtttattttcttgtctttgcgggcgcccagattccgatcggcgtgctcttggaccgttacggtccaaggcgagtgcaaagcgtattgcttgtacttgcagttggcgggacgtcgctgttcggcaatgccgatagttttgctgagcttcttgtcggccgcgccctgatagggcttggtgtcgctgcttccttgatggccgggctcaaggcgatcgtcatgtggtttccgagagaccgagtagcactcgtcaacggcggcatgatcatgttgggctcgctcggtgccgtgaccgcaacggcgccgacggattggttgctgacttggattggctggcgtagcctgttcgaagttctgactatgctaacgctcgcggtcgccgcgttgatctatcttgtaacgccaagagcggagggcagctctaaacggtccacctcttccgagaagccactttcattgggctccatcttttcggatccgcgctttttgaggattgcccctctctcggcaacctgtatcggatcatcctgggcgatgcattcgttgtgggcggcatcctggctctctgatgtcgaagggttcgaccggaaaatcgtgataaatcagctgttcgcgatggctatcgggatcagcgtgggcgcattgctcctgggggcgattgcggaccgcttgcgcaagcgtggcattgcgactgaggttctgttggtggtcgttggcgtgctgtttatgctggccgaactcgccatcgtcctgcggctgccgctgccgtccgtattgccatggtctattgtgtcggtggtaggagctggcaccgtactgagttacgcgatcatcgcggattactttcccgtcgaaatcgccgcgcgtgccaacggcgctctcaacctgctgcacttcggctgcgcgttcgccgtccaatacgggatcgggctcatcgtggcgtcatgggtgcccgaggctggccattatccgctcgtcgcctatcaagctgcattcggtctcgccctcttgctacaggcggttgcgttagtgtggtttgccgtgccgtggcttgggcaattcttcagacttctccgctctccgcctgcgaggccagataacgaagtcacgttcgtgcagccagcagctgagggaatgatccttgagggctcgcaaggggtcgaatggtaacagctggcggattgcggaagacgtccgctccattatcgcatcaccaggcgccgaatgtcgcgaggtcgttcgagtcttagtccgcttgttgtccaactgtagcgagttccggctatgaaccgaacgaaccattgccccaccgtgctctacaacggtggatctccatcacttggctttgcatatactgcacctcgatcacgcaggcccgattcccggcacggcagtctgctcggtatcccggacaatgcagcgcgcgtcggcctgccgaccacgcatgcctagggcatgtacctataaacccggcggcgtcatgtgacggatcactacgtccgctttgctcctatagcgggcaagttcgtgcggcagcgcagtatgtcgcgatgggccatatgcggaagtcgcgcgcccaaccaatcggcgtcaagtttatcaaaggtatgggattgttgaaagcggttgcggctcgctaatacgattgtcgcggcccggcgcaagctttgggtgcaccgccgacgttcccgctgccccatagaactgtcgaccatgttctctttcaagaagtcgtttcgtgttgccgccatagtcacctcagacaagctgcaggcctgcaaccagtcggcccagttctgtccttaccaaatttatcggattaacaagcgagcgctcgggcgcacccgcgaatacgaggccggcgatcttgtgctcgtccgtgatcagggcgcttccgctatccccgctttcgctaaacctccctgtgttgtcgaccgttaccttgacgatgatctgatcgtcaaatgtcgcccgccctccagcgaaatcgacgtccacgacgccatttagaccgctaacgtatccttctgtgtaaccagttgtacggcctattttgaagacgcgtcttggcccagtgatagtgtgatcaaccgggtcctttgcaaatggatctgcgaaacccaggacacaaccggcataggccagcctattgaggtcatctaggtcgcggtccgcactgacaattaacttggccaacgccacgtccgcttggttgcttgggtggggcggtgctgccccgtgaagatcaatggggacgaaataactgaggttagccacaccaaactcactgttaagtgcagccaacgttagcagcctcgacagatcgcttcccgccaaatcccgcgtcgcgggctgtacgatagtctcaggagagacaaggtcgcccctcttacgctccagcgctatcacatgattacaagatactagatatagggtatcattcgggtctttcatgaagaaccccgcggtacccgcctcgaggcgagatgggtatgacttggtggcgtttgcaattccaatgcccggcatcagcgccttgaaccacttctgcgtgttcacggcaggcgggtttgcgtgcgaggatccgaagtatgcctgtgaccggaagcgatcgccgactggaacgatttcaatgtcttcgtctaggagtgcgataccctggctgttcgcgatgtcgactacagcctgtcgagcggaggtaagaccgcgctgagaaagttcagtgggcgtcaacaatctctcaacgtatatagccacacaaaatccttttgccggcccaaagacgagacgttgctccatacggcttgccgacatgcccagaatgcccgtggagcgttcgccatgcatcaccagccgtgcgaattttcgaacaaaatcgcgtgcgctcacgtagtccattttcaagctccccaccttgggttgaatatgctagtctagggccgcgatctaagctccgtccagcattcgttaagtggaggattaccgatgtcgacgacgatgacaccagagcagcgcgaagatgccgaaatgaatgcacgcgaattcttcgataagctcgcgccgtcagataagcttcccgacccgcgcgatcctgcttcaattgaacaatatacccagcggttgggagaaatttcgcaaacgtcattctccgatgcggtttcgacccttgcttcgactgtcgacaaatcaacggctgaatcacttcaggctgccggggatcgacggaacctaggctcgtacgtcatcaaggcgtttcaaaagaagatttgcggaaatcctgaggtcaccgaagaggtaaaaaaagcgctggctgcagcagaaaaacagggcggagtccagatcaccacgccgacagcaacgggaattacgactggtgttgcgacgctcgtatcaatctcaatcctaacggctttcagcggtccggtcgctgtggtagtcgcccctttggcagccggcgtcgcgcttctcgtgatgcagtgcggccttgatggcttctgtgcctggtccgcaggtgaccggacggagcgcaggtcgggctgactacgaatttgacgctgctttcatggcggatcaatttttcaggtcttgagtaagcgcgtccaagcctgtcggttctcggtcattcgcgttgatatggtcgtccgccaactgtttccggttttacataaacagccgacatgtggacaaacgctcgatttcgtcgttaagggccgcaagcagccataccggtctgcgtgaaccagcagctaatgctttgttaggaactgcgctgatcttcataacccaaactgggtagtggagacattcgggctttagtccccccttttgccacacgcgggaagcacctccgtgcacccacatgcgcatggcgatggcgatcagcatactctttcccggctagcgaaaagtgggcgggaaacctgcgagattaatacccagaggttgcgaacattttggtgtccatcgatcgatagggtagagtttgctgatccgcggtctggccccgcagtttccgagcttggccgctgttttgataaaccattttcttttggacatcatggcatcaaaacgatcacgcaagagcaagaaggcgccgccacgcccaaagcgtcgggtcacggctgctgaaaaagcggcgcctagctccgaaaatgccggcaagacggctcgcgcgagccgccgatcgaaatctttcgccgcggcgctgtggtatgcgccgggtctcgatgctcacatcaagggaaaccgagctctaggcaaggcggcgcgcaccctcgccgaacgagtcgttctcacagtggcaccgaagaccgtatcgggcgaacttattcaatcttaccgcggaaggctgcacgagcgcgacatcgaggatttccggccgcgtgccgatgcggtcgagggagctgtcaggcgcctcaagcggctcggcttcgaggtcctgcgccgtggtcgttttggtatcacgattgccggccactgcgagcttgtttccgaagttctgggtgtacagctcattgtgcaggctcggccgcaaaggacgagcgtgcgctccacacagaattttgcagtcagctaccaagcgccgcaagcggtcgacctttacgtagccccgtccgactcgttgacggtgagctccgcagttagccctcatatcgatcatttcgttttcacaccgccgccgcaactctttgtcgagctcagcgacaccccgcctcactgcaactacttcaccctcgatggagctgcgatccgccggttgctcaacgtaccggaaggcgtatcgggcgagggtgtcaaggtggccatcgtcgacaccggatttttcaagcatccattctacacgtcgcacaatttcgactaccgcccgatggcgagcgcaacggcaccggatccagagaaggaccggatcggacacggcaccgccatctcattcaatgcgttgaccgtagccccgcgagcaacacttctcggcttcaagcagaccgaacctccacaagacgctctggaagccgcatccgacgcgggagctgatattatcagcgcctcgtggggatgggacaaggaacagtcattcccgattctcgaagccacgatccgcgcgctggtccgggaaggaaagatcgtcgtgtttgcgtctggaaacggtttgcaggcgtggcccggcagcatgcccgaagtgatttctgtcggcggcgttttctccgcccaggacggaacgcttgaagcgagcaattttgcaagcggatacctcagcagcctttatccgggccgccgtgttcccgatattgcgggcctttgtggtcagagaccggcaggaatctacatcacgatgccgtcggcacccggcagcatcctcgacaacaatctgtctggcccgtcttttcctgaccgcgacgagacggaagccgatgatggctggctttgctcgagcggcacgagcagtgcagctccacaggtggcgggactgatcgcgctgttgctcgaacaagcacggcgggaccgaattgtcctgacttccgagcgaatccgcgacgtgctgcaacagagcgccaagccggtcgagcgcggcagtagcgcgcagggcatccccgcagtcggccacccgaacatcgcggttggctatggactggtcgacgcgggtaatgcacttgagcggatcagaccttgagggctttttccgtcacgacaaggtggcagcttatgttcggccttgcccggtccgcgtcaaaaattgcatcggctcggcggcggcgcggcctcgcttttgccgcggaagggaattgaccagacgaagtcggtctggagatagaacggcttgccatctttctggaaccaattcggatcaggcacgccgcgctcgacgaggggcgtgccatccggcttgaaagcgtccttgccaagcaattgtttgcatgaatcgagatcatcgccggtacctggcgtgatcgagcagacagctttggcttgaccgttgggcatcgacgtaaagggccgtccggccggtgggcctgcaatctctcgcgagatactggcggtggcgtgacaggggatgcaggatgaacgctggaaaccgaattccacatagtggtccgagacgatggtcggctcgcccgtcggcctggagaaatcgatttgtgtgcctccgaggcgatagttgtcccaaacggtgccggcgacctcttgcggcgggccgtaattgtcggggtcatggccgccaaaatcttcggtgggtgcatccttgtggcggaaagtcgcccagaaccagttcgtcaggtccttggtcaggatgtgcaacgcgacgagaccaaactttttcccgttaaactccgcggtatagtaagtgccgcgtttctcaaccgggatcggtggcttgcccgcttccggcttctcgaaatcaagccatgccgccttcacctcgattgcgtcggagggaaactggatcggtggcttcttgcctgcgttcaccgcggctgcatagcgcttttgtccttcgatgctgaacaagcattgcgagcgaacgaactcgtatgtcgcacgattcatcctcgtttccccgaatccgccggcgttatgaaaaacgccatcctcgggagaaaagaatataaccggtccgccggtcggtagcttgatcggcaaggacgggacttgtgcagctttctcgtcaggaagcgacgtatcgtcccacagcggaggctcgcgcccgtcactcaggtagacttctgtgtgcgcattgcgccaagtctcccaaacggacgtcgagcccggatctccaaaaggcctggagcaatcggcaacgccccgtgcaattgatttgtcgatcgctggatggttcaacgatacaaacaaatcccatgcatgcttgctcggccaatctgaggcgttcgcgcgatccggaatcgttcggcagaaattctgaggagccgcctgcgctttcgactggccgtcggcataaatggtgacacagcagatggccacgatggcaaacgacacgcgcatcggaatctcccgtgagtcgttagtatgtattcgtccggcctatacttggggggctggcggcggtgcctgatcgtcgccgttctccggcgcaccggccgctagccagccttgaatatctgcgagaattgtcgtgccatcgacgcggctcccgtcggccaggataacaaaatagccgtcgtcggttagaaatgggccagtcttgggcatctgcggcatagcacaccacgagcccctcagaatttgattgaaggcggaattgactttgtttgcggggttgatgatggggacgacgtcaccgttgcaatgcttattgggaacattgcctgttacgaaggcctgataggtggtgcgccagaataccccgtgacggctgttcgcagggtcgagattggcttttcgcgcgatagcgtcgagatattcctgaagccgtgtgaaacctatcgtcatggcaatcacaaaggaatgaggctcgaattaatatgtacaaccttgatgctaatcttatcaagttgtcaacccaaaatttttgtcgctggcattctcgccagcctctcgaatttcgtgagcgatctggaacgcagcggaaataaactggtttcgcgcgctctttttgaagaacgatctcgctgggaggtgaacaccgacggtcccgagcacgtccgctcagggtcttggtcgcgtgaaaacgtttcattgcggggtgacaccgctgcgaacggccccgtgagggcgggattggcgacaaggtagcatattttccggcgaggcgccgggagccagcccgttggcttccctgagtcactgtgatcgaccgatgaggttggcgacacgcgcgcgacagcgttcctgcctcatgcctgcatcgccgcgatcagcgccccgacgcccatgatgttcatcacgcgcgtgagattgtaggcgagcacgtgcagcgccatctcggtggcgaccttcggcaagcgcctcgtcaggaagtgcgtcgcgcccatgcgcatcttcagtgttccgaatggatgctccactgtctcgcgacggcgacgcatcgcctgaggatcggcgtcgagccgcctctgggcatcctccatgacctgctcatgctcccaacgggagatgacgcggttcttggccgtggtgcagcgcgcctttagtgggcagcttccacaagctttcgtggcgtaacgtcgaatggtgcgttcgccatccactgttgtgagccaatacgccagcacctgcccagccgggcagcgatacacgtcctgcttggccaggtatgcgaagtcgtgcttgccgaacttgcccttcgcctccatgcccgtcgtgttcggcttcggcagtgtcacagcgatatcggcgtcggtgcaggccttgatctcctcgcctgtgtagtagccgcgatcggccacggcctcgagcttgtcgacgccgagcacggccttggcctgtttgcccatgttggcgagctgtgcccgatccgagccgctattcgtcacttcgtgcgcgatgatgaggtgatgctcggtatcaacggcaacttgcacattgtagccgacgacgccagagccacggccactcgtggccatggaccggctgtcgggatcggtcagcgagatctgttggtccggtgatgccagcatcgcctgttcgtaggcttcgagcttcttcatctcgctcgcgagcttggtgagcttctctttcagatgcgccgtcttcgcagcgagagcctcagatggctcctgcagatctgcggtgtcgagctgcgcgagatagcgcgacacgctttcctccagttgctggcgacggcgctcgaccttgcccttcgtgaagttcttgtcacgcgtgttgaccgccttgaacttcgagccgtcgatggcgacgctcgccttcgtcaacaagcccatctgccggcaaagctcgacgaacttcgcgcacgccttcttgatggcggggccgttgtcgcggcgaaagtcggcgatcgtcttgtcgtcgggcgaaagccgctgcaacagccagatcacctcaagattgcgcctcgcctcgcgctccagccgccggctcgactggatgcggttgaggtagccgtagatgtagagcttgagcagcggcgcggggtgataaccgggccggccggttgccgcaggctcgacgtccgtgaagcccagctcggccagatcgagcgctccgacgaaagcatcgaccgcgcgaacaggattgctctcatcgacccagtcgtcgaggcattctggcaacagcgtcgactgcgctcggtccgccccttcaatgaaccgattcatcaatcgccccctaaatcgcgaggcgattcatagccgactcggcgttttcacgcagccagggtcactttcgacggtttcggcggagattatccgctagctgatgtccgcttctacgtcgtaagcgtccaaccggggcctgcgcggttctcaccgctgcgatggatggttagtgactttgaccaagtgaacgtcaaggccgcgcgtaggcgatgaaatggacggcagttaccaacgcggccaacaacatcggtcggcgcgacgcatctcggcaatttggcggggttaatcgttcgattgtgacctttcgtcgacttgccgcatcatcgcttttttgtcggacctttctttttctacgccggtctacgaagacagtgcctctcttgttgcagagagccgttttctgccttttctaatcatccccatctgaggccgcttggcacggcctcgctcggtggggacgatagtgtcaatccaatctattcgatcagaagcgatctcacgtggcgcgcgcatgttgcgcaccgcgttcggtccttcgattgcacgttttcttgaagatccggcgatcattgaggtgatgctcaacccggatggtcggttatggatcgaccggctgtcgagcggtttggcggacacaggtgaaatcgtggccgcggcggacggtgagcgcatcgtccgattggttgcccaccacgtgggagccgaggtccatgcagcaagtccacgtgtttctgcggagttacccgagacgggagagcgcttcgagggattgttgccgcccgtggtgacagcgccagcttttgcgatccgcaagcccgctgtcgccgtgttcacgctggacgactacgtcgccaaagggatcatgacgttcggccaggccggcgctttgaaggaagccgtagccgcgcgtcacaacattcttgttgccggtggtacatccagcggcaagacgacgctgaccaatgctttgctggccgaagttgccaagacctcggaccgggttgtcctcatcgaggacacgcgcgagcttcagtgcaaggcaccgaacctcgtggctttgcgcaccaaggacggcgtgatctctctgtcagatctggtccgatcgtcgctgcgcctgaggcccgatcgcatcccgattggagaggttcgcggtgcggaggctctcgacctgctcaaggcgtggggcacgggacatcccggtggcatcggcaccatccatgcgggcaccgcgcttggagcactacgtcggctagagcagctcatccaggaagccgtcgtcacggtcccgcgtgccctgatcgcggaaaccatcaacgtcatcgctgtcctttccggccgcggcgccgatcgccggttggccgagctcgccagcgtgaccgggctcggaccttcgggtgactacgctctcaccaaaataggggacaaaccatgagttttatcttttcattcaagcgaagtatttcgaccggtgtgttggttaccacctgccttgcggccagctccgcatccgctgccggctccaacatgccctgggagcaaccgctcaaccagatcctgcaatcggtcgaaggcccagtggccaagatcatcgcggtcatcatcatcatcgtcaccggactgtcgctggcattcggcgacacgtcgggtggcttccgcaggctgatccagatcgtgttcgggctctcgatcgccttcgccgcgtcgagcttctttctgtcgttcttctcgttcggcggcggggtgttgatctgatggattcgcggatcccaggcttcgaagcgcccgtccatcgcgcgctgaccgaaccgatcctgatgggcggtgcgccgcgctccatcgcgattctcaacggtacgctcgcagctgcgctgggcatcggtctgcgcctctggctcgcaggtctcctgctttggttcgtcggtcacatggccgctgtgtgggcggccaagcgcgaccctgacttcgtcgaggtcgttcgccgtcacctccgtatccccggtcatcttaactcgtgagtgatcctatgatgaacctcgctgaatatcgccgttcgaacacgcgtctcgctgactttctgccgtgggcggcactcgtcgatgaaggcatcgttctcaacaaggacgggtcgttccagcgcacggcgagatttcggggaccagatctcgatagcgccgtgccgtccgaacttgtggccgtcgctggtcgtctcaacaatgcgctgcgccgtctcgagtccggttgggcgatctttgtcgaggcgcagcgccattcggccggcagctatcctccggacacgtttcctgatgagacgtcggcgctcgtcgatgctgaacgaagagcccagttcgaagaagccggcacccactacgagtcgagttatttcctgacgtttctttatctgccgccggccgaagggaccgctaaagccgaacgcctgctctacgaaggcagcaatcggacggtcgatggcgatgcgcgcgagatcctccgcggatttgtcgaccggaccagccgcgtgctgcagctagtcgaaggctttatgccggaatgcgcgtggctcgacgacgaggagacgctcacttacctgcattcgacagtctccaccaagcgccatcgggtcagggtgccagaggtccccatgtatctcgatgcgctgcttgccgatcagccgctaaccggcggtctcgagcctatgctcggctcatcccatctgaggatgttgactgtcgtcggctttccgacagcgacgacgcccggaatcctcgatgaccttaaccggcttccgttcgcttaccgctggtcgacgcgcgccatcatgctcgacaagacggacgccacgaagctcctgacccgaatcaggcggcagtggttcgccaagcggaagtcagtggccgcgatcctgaaggaggtcatgaccaacgaggcttccgctctccttgataccgatgcgcacaacaaggctatggacgctgacgcggcgctccaggagttgggctcagacgagattggggaagccttcgttacaacgacgatcgcagtctgggatggtgacgccgccgctgccgacgaaaagcttcgtctcgtcgaaaaagtcatccagggacgcgacttcacctgcatgattgagacggtcaatgcggtcgaggcctggctcggcagtgttcccggccacgtctacgccaacgtccgccaaccgccgatctcgacgttgaacttggcacacatgatcccgttgtcggcggtgtgggccggcgaggcgagggaccatcatttcagggcgcctccattattcttggccaaaaccgaaggatcgactccgtttcgcttttcgctccatgtcggcgacgtagggcacacgctgatcgtcggccccacgggggcgggcaaatcggtgctgctggcgctgatggcgctgcagttccgccgctaccccgggtctcagatctttgcgttcgacttcggcggatcgatccgggcagccgcgatcgctatgggcggcgattggcatgaccttggtggcgcgctcgcgggcgagacctccgaattcgtctttctccagccgcttgccaatattgatgacgtcgccgagcgcggttgggcggcggactggatcagctcaatcctgacccgcgagcggatcgaagtcacgccggaagccaaggaacacatctggtcggcgttaagttcgctcgcttccgctcccgtcgaggagcgtaccctgaccggcctttcggtgctgcttcagtcgaacgtcctgaagcgagccctgcaaccctattgcattggaggaccctacgatcggctgcttgacgcggaaaacgagcgcttgggggcctcgtcagtccaggtcttcgaaaccgatggcttgatcggcactgcggtcgcgccggcggttctcgcttatctatttcaccggatcgaggcgcgcttcgacggccggccaactctcctcatcatcgacgagggttggctcgcgctggatgatgcagactttgccggacgcttgcgcgaatggctaaagacgctgcgcaagaagaatgcctcggtgatcttcgccacccaatcgctcgcggatatcgacggatcggcgatcgcgcctgccatcatcgagagctgcccgacacgggtcatgttgccgaatgaccgcgccatcgagccgcagatcatggcagtctaccggcgcttcggtctgaacgaccggcagatcgagatcctggcgcgagccaccccgaagcgggattattactgccagtcgcgacgcggcaatcggctgttcgagctcggccttggcgaagtcgcactcgccttcaccgctgcttcctccaaggccgatcaggcgttgattgcgcaagtcctcgtcgaacatggccatgagaacttcgcgccgggctggctgaaagcccgcgacatcgcctgggcgaccgatcttatcccgcagatcaacggaccggaggcgcccaaatgaagcgcctccgtcttctggtcgccgccagcatcgtcgtgatcgcgatggtcgccggctctcgaactgtgtcggctcaactggtcgttttcgatcccaacaactatgcgcagaacgtgctcaccgccgcccgcgccctgcaacagatcaacaaccagatcgtctctctgcaaaatcaagcgcagatgctgatcaaccaggcaaggaatctcgcgaccttgccgttctcgtccttgctgcaactcgaacaatcgattctacgcacccagcagcttctcgctcaggcgcagcgcatcgcctacgatatccagcagatcgatcgcgcattctcgaccacttatgcgcccgcttcatccagcgtttcagaccaggcgttaatcgccaatgctcaatcccgttggcagaacgcgatgtcgggattccaggacgcgatgaggatgcaggccaccgtcgtcggcaacctcgatacccaccgcacccagatgtccgcccttgtcacctcgagccaaggcgcaacgggtgccctgcaggcgagccaagccggtaatcagcttttggcgttggcagcccagcaactcgccgatctcaccgccgtcgtcgccgcccatgggcgcgcgcagaacctggaatctgcgcagcgtgcggcagcccaggatcagggcagggagcagctgcgccgcttcctgacacaaggcgtcggttatcaacccacaaccgtgcagatgtttcactgatgacaacgcagaaacccaatcgctttccctacatcgtggccttggcgctcgtcggcctcgcagtcgcggcctgtaccatcccgcttcgtggcggcgaggagcaggcgaagctgttggagcccaacagtccacctcccgaccccctggcggcaaagctcgctgaatgccgctccgtcacctatgagcagaaggacgctctggccgaatgccgcaaggtttgggcggagaagcgccaccaattcctcggtcaaaagactccagcaccgcccggcagcgaaggctccgcactgttcgtggcgccgaaggacgagagtcgcttgccgtcggggtactcaccaattcagcaaccggcgaaggagtgaccgatggggggcacgggaataatcgatcaatttctagaaacattcacccgctacatcgattccggctttgggctgctcggaggggaggtcggataccttgccagcacgctggccgcgatcgacatcaccttggccggtctcttttgggcttggggcgctgacgaggacatcttggcgcggcttatcagaaaaactatatttgtcggggtcttcgcgtttctcatcagcaactggaatagcctcgcccgcgccatcttcgagagtttcgccgggctgggtctcagggcttccggcacgagtctttcttcggccgatttcctgaggcccgggaagatagcgcaggttggcctcgatgctggacgaccgctcctcgagtccgtttggagcatgatgggctatgtcggcattgtcgagaattttgcgcagatcgcgattttgctatttgcctggatcgtcgtgctgctggcgttctttattctcgccattcagctcttcatcaccctgatcgagttcaagctgacgacgcttgcgggttttgtgctgatcccgttcggtctctttggcaagaccgcctttgctgcagaacgcgtgctcggcaacgtgatttcgtcaggtgtgaaggttttggtgcttgccgtcatcgtcggcatcggctcgaccctgtttacgcaattcacaacaggcttcggcggcaatcaaccaacgatcgatcaagccatggccctcgtgcttggtgccctttctcttctcgggcttggcatcttcgggcccgggattgccaacggcattgtgtccggcggcccacaacttggagccggcgcagcgatcggcacgggccttactgcaggcggcgccgtcgtcgccggcgccggtcttgcggctggcggtgttggactggccggcggcgcactcgcggccggagctcgcgggacagccgcggtcgcaagtggagcggcaagtgcctatcgggctggtggggtaggcggcgtcgcgagcgccggtggctcggcggtcgtgagcccgttgcggcgcatggcggccagagtcgttagtggttcatcaacagcggaggcggcgccggcctgggcgcgccgcatgaagcgtgcgcaaagcgtaaatcaaggtgttgccgccgctacgcatgccgttcgtagtggtgacggtgccggcagcggatcgtcggtcgatctgtccgagggagggcactgatgtttaatcgaccttccgtgcattatgggcgtacgccagaagccgtgacgccctaccagaaggcagcacaggtctgggacgatcgcatcggctcggctcgcattcaggccaggaattggcggctgatggcgtttggatgcctgttgttgtcggctggcctcgctggaggtctcgtctggcagtcgacccagggcaccattaccccgtgggtggtggaagtcgaccatctcggtcaagctcaggcgattgcgccggcgaacgccttctatcagccggccgatccgcaaattgcatttcatcttgcgcgattcatcgaggatgtgcggggccttccaaccgatgcgatcgtactccggcaggactggctccgcgcctacgacttcacgaccgatcgaggcgcggtggccctgaatgactacgcccgcaccaatgacccctttgccaagctcggcaccacgcaagttgcggttgatatctccagcgtgattcgcgcttcgcccaacagctttcgcgtggcctggaccgaacgccggtatgacaatggtcagctggccgcaaccgagcgctggaccgcgatcatctccatcgtcatcgaaaccccgcgagatgccgagcggctccgcaagaatccactcggcatctacatcaattccatcaactggtcgaaggagctcggctagtgagaaacttcacattccgatcggcgacatcgagcttcactccaaaatctgggtgtttcgcacttcttctgacgatcactctctctggctgcacgacgttcaagccgccacagatcagttatgatgatgaggtgccgccatcgccggacctgtcgatgccggcagacgagcatgcgcgtccattacacatcccgccaacatggacgcccagccacgggggcaacaagggcgaggccgaggcaaaggatccgacggatcgcatcgaagttgccaacgatgtagcacgcgtccaaccccggcgcgccggatatttcaacgcggtccaggtcttcacgtatagccccggagcactttaccagatctacgcttcaccagggcaaatcacggacattgcgcttgagccgggcgagcaactcaccggttcaggaccgctcgcggctggcgacaccgttcgatggatcgtcggcgacaccgagagcggcaacggcgacaccaggcgtgtccacatcatggtgaagccgacacggcctgcgattgagaccaatctcgtcgtgaacaccgatcggcgaacctacctgattgagctgcggtcccgtgagaagctgtatatgccatcgatcgcttggttctatccggaagatcgttccagccggtccaggagcttgccgccgacaccgattatcccggagatggctcaacgccgctatcgttatgccatcgagggcgacaagccgccctggcggccgatcaatgcgttcgatgacggtcgcaaagtctacatcgagttctccctggggattgagcagggcgaaatgccgccgctattcgttgttggccaggacggaaggcccgaactcgtcaactatcgcgccttcaaaaacgtgctgatcgttgaccgtctctttgccgccgccgagctgcgcctcggcggagagaagcaacagaaggtccggatcatcagagccgacgggaggcaatcgtgaccgataatggcgccgacgccaacaacacaggcccttctgcgccaacgggcgcgccgtctcaaattagtccgcaaacgcttcgtctcggtggagaacgtccgcggatcactcgtctctcgaggaaggtcctggccggcggtacggccctggccctgttactgatatcgggtgctgtcctgtgggcgttgaggagcaacgaacggcgtaatccagttccggacgagctctacagcacggaccatcacaaccttgctgacggattgacagcgctgccgaaggactacaccggaattgtccgaagcccgccgcagcttgtgccgacattgccgagcgatctggggcgcccaattggaacagcagaaagtcaatcggtgccgatcggcatcgatgccgagcaacaacgcgccaaccaggaaaccgaggcggctcggaccagcaaagtattcgcctcgacaacggctccggctgcgccgtcgaatgccgcttcacagacacccgcttccagcgccaactcgtcttccgacgagacctttacgcagaacggccaggatcgcaaactcctgttcgtgaacgccccggtggatcggcgaacgaccgcgccagacaggctttcgcgcccagcgtctccctttgtcatacaggcgggaacgatcatccctgcagcgctgattaccggaatccgatcggatctacccggtcaaatcaccgcacaagtcacagagaacatttttgacactccgacagggcgtgccaaacttgtgccgcaaggagcgcgactgataggcctttacgatagccaggtcgcgtttggccaatctcgggtgctgctggtgtggacccggctcatcatgccgaatggtcgctcgattgtattggagcggcaacagggtgccgacgcgggcggctattcaggccttgaggacgaggtcgacaaccattggaaggagctgctcggagctgccgctctatcgacgttgctcggcgtcggttcggaacttggatctggcacggacaacggcagcaacaccgcgatcctgcaagcccttcggttgggcgctgccaattcagtgaaccaaaccgggcagcaagtcgtccgccggaatctcaatatccagccgacgctgacgatccgacctggctttccagtcaatgtcatcgtcaaccgcgatctcgtactcgaaccgtatagaggctaacagcatgaccagactcaagcttggtgcgctcagcgacgacaaaccggtcaaggtcactcatgagttgccggcaagcttgcatcgagatctcgtcgcctacgccaagatcctcgcccgcgaaagcggtcagcctatcggtgaccccgtcaggttgatcgcccccatgctgacccgtttcatggcaacagaccggctatttgcaaagctgcggcgtacaagtcaggttaccaaggagcgcgaggggtagcgttcagatagtagtcttaggaaagtcttcagcgcggggttttcgttgtcattttgccaataggccgaatatcccagaacgctcggcccggtgccgtcgcgcagttcgcgatacgctagacccgagaaacttgcagcagcatccgattccaaaacgatgctaatgccggcgttcatcgtaacaagactcttgaccacaccccgactgacgtcatgccgctcgattttcggacgctcgacgggcgaaaccagcttcgataccaaaaggtcttcaatctcggttcccggatcgtactggctcaaaatcacagtctcctcgcgaagatcggtccaatacacagcttcgcgtattgctagtggatgttccccgggcaagacaacgaagacgcgctcgttccaaagcggctttgtgctactgttcatcgactgcatctttccgataacgattacaatatccagcacaccattgcgcagcgcggtcgccaaatgcgggcgccgccgttcaactacggcgacttcgatctgtggaaatcgctgacggaaatccagaagcgaggctctcagattgccggctgcgagagatgtgcagaagccaacggcaagccggccagcttcacctcggccagtagcctttgtgatggcagcaagggcatctagctgttcgagtatcgagcgtgtcattcgtaagaagtggcgaccggtcggcgtcgcccgtaccccagcgttcgaacgctcgaatatcgtggccccgaacctgtgttcgagtaattgaactgaacggctaagggttgactgcttgactgacaagacttccgctgcttgtcggaagctgccgtagtccgcggcagccaacgcgtgccgaagttgtctcaggggcacgttcatattgttattttgcgtgggcatcgcgatagaatgttcttcttccatgattcaacatccatgacgaacgggtggctagttgttgatgtacagagaattgagacaattcttagttgtgcggtctgcgcagttctagacggggacatgcgtcctcactgctaaaagaggtcggccaagctgcaccgagtcattttcgccaatcttgtatccggttcagttgcggctaaccctcgtcgattttcccgcgcgacagcacgatagaccgccccctcaacagccatgcgattgatgatcttcgacgcaatttcccccatggaccttgcgtttaatccggtgggcgggttcatgattcgaagttgctctatcggaattctcaaacgacgaagagcttcctgaagctcctcttcgagccgacgatctgcgttgactgtcaaatagcaagctgatcttccctattcgtagagaagagccacaatcgatgcttcccagttaagcagcatcgatagtcgctatttccatgtgctcgagaaacgaaaagactgcaagtgctttggccacagactgctcaatgtccgagcaaggtgaacggtcgacaaagcgggttcgggctctccacacgtcggaacgtcggccaaaatccacgaatatgatagtaattacaactatcgtaattgacataattgtcaattcgatcagactggcgcgattgtcggctcgcgctctcaggcctcatgtgcgaatggatggtggtcgcctcagtgtttcgggtcgatttgcgcgaggagagcgtcgcgtgccttgtataacggaagccgtcgaacgaaccgacagggctgatgtcgttcgagggtaaaacgctcatgcgtgagcgatgtttctggaaagaacggcttaagccgcttcttcctggcccgccgatatcgctcggatcgttttcgttccccggagaagtacgcgcatgatcgaccagtcagacttcgacttcaggttggggtatctcattcatgatgtttcccggctacgacggatcgtattcgatagaaccctcgcgccgctcaagataacgcgttcgcagtggagagttcttgaactcgtcgcgcaaagcgacggcttggcgcagaccgacctcgcagatgcgcttgacctaggaaaggtcgcgcttggatctttcatcgatcgtcttgagcgtgccggcttcgtgtctcgtagaaccgatccaggcgatcggcgagtcaatcgggtttacctgactgatgaggcgcggagatgcctcggagaacttagaaaggaaatcgaaaagtttgacgccacgatattgagtgaagtgaaggaaacagaattgcaggcggcttggcgtactcttttggtgatgaagcggaacctcctcgcattgcataagagcacaacagagaatcgttcccccgacattccctcgagtcaaactcagacgctttgagcgagtatctcttgcgaactccatggatgggagtggtgcaatcaagagacgctgtatcgaccggcatcaatgtgagcctttcaaggtgaggcattcgcatgattggactggacggagttattagttcgctaccgaactatcgccttagctaaaggtaatgcatgcctcagtacaacaagcgatagcaatcgggatgtaaccatgagttaggcgcttgtctctttggcgcctcaacgccatcaattgtcccgcgcggcagatgtctgcatcgggcgcttcaatactttgctccgttatatctcgcaaagtaggagcgggatatttgcgaaaccatttagctaacaggacaacagtaagcgaagcttttgtcccatttgattga

SEQ ID NO: 302 - DNA, 76983 bp, Bradyrhizobium colbertium
  misc_feature (24800)..(24809): n is a, c, g, or t
cgtcattccggggcgatgcgcagcatcgaacccggaatctcgcgccacaatctcgggattgccggatcgccgcgcctggggcgccggcggtccggatgactgtggtattgagacatgcgcaccgatctcttcgatttcgatctgcccgccgagcgcatcgcgttgcgcccggcgagcccgcgcgattccgcacggatgctggtcgtggagaacggcgcgttgcacgaccaggcgatcgccgacctgccgcaatggctgaagccgggcgaccagctcgtcgtcaacgacaccaaggtgatcgcggcgcagctcaagggccgccgtatcggccgcgagaccgagcccaagatcgaggcgacgctgatcaagcgcctcgacggctcgcgctggcaggccctggtcaagccggcgaagaagctcacagccggcgatcgcatccgcttcggcaacgagggcaaggtctgcctgctgggccatctcgacgccgaggtcgaagccaagggcagcgaaggcgaggtgacgctgtccttctcgttccacgggccggcgctggatcaagccgtcgccgatctcggcagcccgccgctgccgccctacatcgcctccaagcgcacacccgacgatcaggatctcgccgactaccagaccatgttcgcgtccaacgaaggcgcggtggccgcgccgaccgcggggctgcatttcacgccggcattggaggaggcgttgtgcgcgcgcggcgtcggcatcaatcgcgtcacgctgcatgtcggggcagggacgttcctgccggtcaaggtggacgacaccgaagggcataagatgcacgccgagtggggcacgatctcggccgaaacggcggagcggctcaacgccgcgaaaaagaatggcaaccgcatcatcgccgtcggcaccacgtcattgcggctgctcgagagcgcagcgcgcgaggacggaacgatccagccattcgcggcggagacctcgatcttcatcacccccggctatcgcttccgtgcggtcgacgtcctcatgacgaatttccatctgccgaagtcgacgctgttcatgctggtgtcggcattctcagggctggcgacgatgaagggcgcgtatgcgcacgccatcacgaccgggtatcggttttattcgtatggggatgcgtgcttgttgtttcgggcagcgccgtagggtgggttggccgtagggcgtaacccacccctgtcagtcttcgcggaagcagaagaggtggtgcgccagcggactacgcttcgcgtagccgcggccattcacccacccgccttccgttatgccatcacccgctgcggcagcagctccgcgatctgcaccgcgttcagcgccgcgcccttgagcagctggtccgccgccacgaacatcgaaatcgagtgccctgagggatcgctgagatccttgcggatgcggccgaccaggacgtcgtcttggcccgaggcgtcgatcggcatcgggaagtagttcttggcgcggtcgtcgaccaccttcacgccgggcgcccgggccatcatggtgcggacctggtcctcgctgatcggcttctcgcattcgaaggtgatggcttcgcaatgggcgcgcagtacgggcacgcgcacgcaggtgacgccgatcgcgatcttgtcgtcctcgaagatcttgcgagtttccttgatgaccttggtctcttcgtcgttgtagccggtctcgggatcgacggccgtgttgtggctgaagaggttgaaggcgtaggggtgcagcatcaccgtgggcgtatagacctgcccgttgagattggcccgggtggattcgaccagctcgtccatcgcggcggccccggcgccgctcgcggcctggtaggtcgagatgatcacgcgcttgatgcggttcttctggtggatcggccacagcggcaccagtgcggtgatcgcggcgcagttcgggttggcgatgatgcccttgtggtcgcggatgcggcgcgcgttgatctcggggatcaccagcggcacgttcggatccatgcggaatgcggaggagttatcgacgacgacggcgccagccttgaccgctacgggcgcgaacttcctggagatgctgccgccggccgagaacagggcgacgtcgacgccctcgaacgagcgctcggtcaattcctcgatgacgatctcctgcccgcggaacgataccgccttgccggcggagcgtgcgctggcgagcgccttgagcttgccgacgcggaagccgcgcttgtccatggtggcgatgaattcggcgcccactgcaccagtgacgccgacaatcgcgacgacgggatcgttactcactttgtcctccattgctttgaaatcaagacaacaaaaaagccccggaccatcgagggcggggcttcggcagagctgatgcgttctagtcgacgactacgcgcgcacgcctccccgggcccctgaggccgtggtggttttggtcgtgcgtttggtagtcgtgaacatggcgcagacttatgcgggagagtcttgcgggcgtcaatggccattcggcccatcgatttccccgggcggacagccgctgctatctggcccgtgcgccaggcggctccagaatgacctccttgaggtcgtcgccgctgatcacgacgatcgcaaaactgagccggccgcgctcgcgcaccagcccaccgctgatcgccttgccggaggccgcgcgctcggcgacacggacggcatcggcgaggcggtgcctgatcgcgcccagcgctgcgaggttgctacggtcctcgcggtcgagctccgtgagggggagggcggcttccccgtcgaccagctcgccggtcgacgcactgatggtgtggcgccagatgcggtcgttgtgcacggtcttcacccgatacaccggcacgccggcggcaccgtcgaaactcacatccgctgtcgtggcgccggcgtgccggccttcggcaatcgccatggcctggctgatcgagatcggtacactgcggaagcgctcgatctcgcggctgatggccagacggtcggcatccgcgttgccaaccgtctcgccgtgcagggcgattggggtgcctccggcggagacgatcgcctgcgccggcgctgcgacgagcagcgctgcgagggcggtggcggaaagcgtccaggggtgtgctgtcgtcatactcgaaaccctcggccagcgagtgtgccggatgatcgtaaagaattcgcggccggcctcgggcaaaggccggccgcggagcgccgcggcgggccttacctgccgtggcgaccgaaagcgatacggacctctttggggctgtgaaaaagcgacccgcaccaacttgtaacgaaacaataccgtatcgttttatttcggtcaacggtggcgcgaccgttccccatggaaacctcaagagctcacgagatcgtcagcgcgaggaacggcgcctcgttgggacccgcgtcgagtcctggacccggtcggcaggtcccagcgcgccggccaggaacagcttgatcgccgcgcgcatgcgcttttcggctgtcttcagctccagcgccgttccgaacgtcgccatgcggtgagtgtgaccgacgacgacgtcgagaaatacctccgcggcgatggtggtatcttcgacgtcgagcgcaccttgagtcaccagatgatcgaagaaacgcgccgtggtcgcgaccgccttgagccagccttcctccttgccgagcttggcgacatcggggaagttgatggcttgcgccgtcatcatgcggctgaaggcgacggcatcgggaccacaggtgaaggtcagcatctcgcggccgatctcgaccagccgctgctcgaccgagatgtccgaggcgctgctgagctgcgtctctgctgcggccgagagcggtgcgagccagcgcgcgatctcgcgtctcaatactgccgcgaacagcccgcgcttgtcgccatagcgcgaatagaccgtgggcttgctcacccgagcggcttccgcaacggcgtcaagcgaagttgcatcgaagccgcgatccaggaacaggcgggtggcgacctcgatcagccgctggtctcgctcgatcgcagctgacttcgtcggccggccgccgcgggatttcggcatctcgcgccgtggtgctgccggtttcgtcctggtcgcagtcaatcccatgcccaatgattcctgcgcattgctctcgtcaatcgctctatatcgtgcaggggcgggtgcgtcatcgccaatttggccgaattggccgcatcgtcaacggtctccgttggaccgcgttccgtcacgaaggatcaaggaagcgtcgaggtccaggcttggccggatgcagccctctcgtatccgtattgatacagcgcccgcatataggcggtatcaaatccctccgagcgcggggcggggtagtcgcgcgcgatgtaggagagatgaaagcccaatcggttgcgcttggcgaaatcgtaggtcgagaagatgatcgaacgcgtttgcgattgcgtgatcgccgagaggctgcgcgaggcaacgtcgatggtgccgttggcgacgagttcgaagttgcgttcgatcttcttgttgacaaggatgtaaatgtccatcctcgcattgccgggcaggcggccgctctggaacagcagggcttccggcaacgtcagcaccggcgccgtcacgccgccgtcgacatgcatctcctgaaacttgcggccttgtccttcggcatcgatcatgatgggcggaaacaccaggggaatgctggccgaggccgccatcacgtctcggaacagcttcagcgcctccgggcttccgaccgtcgcgatcttgcccatatcccagatcgcggtgcgctgggtgtccaggtcggtcgtcaccaccaggagcttgcggcccttggcgtgctcgcgcgcgacctgcgccatgatctccggaccgacgtaggctgcgaccaactcgcgcagccgcgtgttgccgaacaggccggacccgaacagcacgcgcatgatgctgggatcgtccaacaggctttccgcgatcccgctggtgtagacctccttcagcgtgtcgtcgtattgcggaccaagaaatgcaaacggagcgatcaagcctccggtgctgactcccgagacgaccgagaaggtggggcgggttccggccgcggtccagccgtggagcacgccgacgccgtaggcgccatcggcaccgccaccggagagtgccagataggacttgggcgcggtgcgggtgtctttctcgaagctgaacttcgtgacgggatcgtccgcgtagcgccggagaccatcgatatcgagcacgcgcgacgtgctggcttcagcggccgtgtaggtcgtgcgaggcagagaggtgcaggcgccgagcgccaggctgcaagtcagcaccagcaggccgacgcctctatgtctgatccggtcacgcgaggagaccggttcgtcgttcgaagatgaagggtgggacattgtcgttggctggcgaccacgcatctaccgccgtcagcaaatcgccgcggcatatcgaccagccccggggaaaactatactgtatcgttttgttttacaagggcgacggggcactgatcttgcgccgatggctgtcccggtctgaagcacaaggggggcccgagcatggcttcgcggttgatcggcttcctccgacacgcaataagcaccgccatgaatcccgacaatgaccttcccaatcactttgagttgctcgccaccgatggcgccgcgcgcaccgggcgcctgaccacgcctcatggcatggtacggacgcctgccttcatgccggtcggcaccgccggcgccatgaaaggcatgcactggcgcgaggtccgcgatgccggcgccgatatcgtgctcggcaacacgtaccacttgatgctgcgtccgagcgccgagcggatcgccgcgctcggcggcctgcagcgattcaccggctggaacgggccgatgctgacggattcaggtggcttccaggtgatgtcgctcgcggatctgcgcaaggtcagcgagcacgccgtcactttccgctcgcacatcgacggcgccaaggtggagctctcgccggagcgctcgatcgaggtgcagcgtttgctcggctccgatatcgccatgcagatggacgaatgcgtgcggctgccggccgagccggccgacatcgagcgggcgatgcaattgtcgctgcgctgggccgagcgcagcaagcgcgccttcgagagcgctcccgacggctacatgctgtttggcatcgtgcagggcggcgatgtgcctcagctccgtcatgcaagtgccgagggcctcgttgcgatcggcttccacggctatgcaatcggcggccttgcggtcggcgagccgcaggcggttatgctggcaatgatcgacgagaccgcgccgctgctgccagcagagcgcccgcgctatctgatgggtgtcggcacgcccgacgatatcctcgaagccgtgaagcgcggcatcgacatgttcgattgcgtgatgccgacgcgcaatggccggcacggcgtcgccttcacgcgcttcggccaggtgaatttgcgcaacgcgcgccacgccgacgatccacgtccgctggacgaggcgagctcgtggcctgcggcacgcaactacgcgcgggcctatctgcatcatctcgtcaaggcaggtgagacgctgggggcgatgctgctgtccgagatcaacatcgcttactaccagttcctgatgcagggcatcagggacgcgattgcgcagcgaaagttcgatgaattctatcagcgtacgcgcgaggactgggcgaggggcgacatcgccccgcgctagctcagttgcagatgaagctttgcttcagagcgtgcttggtcacgaagccatagccacaattgtcgcaggtccagagatagctgatcacgtggtcagagacgtaggctgatgcttcggcggcgaccatggtgtcggcgcagacgggacaggtcggcagctcgctgcaacgcggatcgcggttcagtgcgacggtcgacatcacttcagcaattgctgacatcgtggtgacctccctactttaagacataagtctaacataagcagaagcggttgacgaggtcgcaacacaaatgcggtggttttctgatctttgttgctcacgcgattttgcgatgcagcgtacttaacatgtgccggattgtcgcttgcttgtcgccgtaagctgtctgtaactgcgcaaatggtcgcgacagaaattcagatcgtcgccatagggagttcattatggacacatcgtccaccacgggtgcaacgcaccaacccggccgcggccggatctatgactcggtcgtcgaggccttcggcaatacgcccaccgtgcgtttgcgccggctgcccggcatgcgcggcgtcaacgcgaccattttggcaaaactcgaatatttcaatcctgccgcaagcgtgaaggaccgcatcggcgcggccatgatcatcgcgatggagaaggcgggcatcgtcaagcccgacactgtgctgatcgagccgacctcgggcaataccggcattgcgctcgcattcgtggcggcctcccgcggctacaggctcaagctggtgatgccggagtcgatgtcgatcgagcgacgcaagatgctggcttttcttggcgccgaactggtgctgacgccggcggcgcaaggcatgaagggtgcgatcgccgccgccgaggagctggtgaagacgacgccgaacgccgtgatgccgcagcagttcaagaacctcgccaatcccgatgtgcaccggcgtaccacggcggaggagatctggaacgacaccggcggcaacatcgacttcttcgtggccggcgttggcaccggcggtaccatcaccggcgtcggtcaggtgctgaagccgcgcaagccgggcttgcgtgtggtcgcggtcgagccggaggagagcccggtcctgtcgggtggacagcataccccccacaagatccagggcatcggcgccggcttcgtccctgacatccttgatcgcgcggtgatcgacgagatcgtgaagatcaactccacgacggcgatcgaaacctcgcgcgcgctggcgcgtcaggagggcattcccggcggcatatcttcgggcgcggcgatcgcggcggccctggagatcggcaagcgaccggaggctacgggaaagaccatcctggcgatcgtgccgtccttctccgagcgctatctgtcgacggctctgtttgaaggagtttagcagatggcagatcaaccgaggcgaccgcgtacgcttggcgatgccaggagcgaagcggaggccgcgttcaagaaggtgaccgcaaaggtggccgccgcgccacccaggcaaatcgccgttcccgggatcaaggagcaggtcacgctgcgcatcgatcaggacgtgctggagttcttccaagagggcgggccgggctggcaggaccgcatcaacgaggcgctgcgaaaggcggcggggaagtaggcagcgtcgtgattgcgcgcgcagcgaaacaatccagatgtctccacgggacagcctggatttgcttcatcgcaagggctccttgcgatgacggagcatgcggcgacatcgtcttacaaagaaaaagcccggcatgagccgggctttgttttgagagtggctggcgcctcagcggcggaacatgccgcccatcatgccgccgacgacaccgccaacgaaggccgcgccggctgcatcgccgggattgctgcggtgaggagccggtgccggcgcgctgctcggaggcggcgcgctggcgcgccgggcaggcttctgactggtgtcgctcgccgtcgcgggcgcagccatgatctccgaaagcagggccttgtgctggtgcttgttgaggtagccggacgatggatagccacgcgcggcctgccagcgcctgagtaccgcgcgggtctcttcgctgaacacaccggtctgcttggtatcgaagccgaggctggtgagccggcgctgcacgtcgcgtcgctgggtcttgttgagtccgatctggtcctcggtgagctgggtggcctcgtccgtgaaggttgcgggatcgacgcccgcgttgagagtgcgggtcgcggtcgaggtgccgctcttgattgctgcgaggcgtgccagcgccagcgccttgaactggccattcggataggccgagagataggcgttgagctcctccggcttgttggactccttcaccgagcgccagtattcgagctccacgccatccgagctgctgctggcccccggcacgatgccggaagcggtcggcgctgcgttggcgacctgggtcgtcggggcctgattgagataaacggagccggtcagattggtgtggccccagggcaactggctcttgcgggtctcttcattgacttgggcgcgcaccgaggtcatcgcctgctggatctcgacgccgggcttggtgatgttgtcgatcagcgcgcgggtgaacgggctgttgttgccctcctggccgtcgagcgcggtctggccgggaccggtggcgaacgcgatcagcgtgccttcaccggacttcatctcggcgagaccgctctgcacgttgacgctgcgggtggcggcattcgacttgatcttggcggcgaagggattgtcgcggcaggcgtcgaggaagaccagcttgaccttggcatcgcccatggtttgctcgagcgtcaggtcgatgttgatggcagctcccagcttgacgtccatctccgatttgatgtcggcatcgacgggcagcaagtagttggtaccgctgacggcgatgccgtggccggcatagtagaacagcgcgatgtcggagccctgcgccttgcgaccgaagtcgagcagcttttcggtcatttggtcgcggctgagattggagccttcgatcacctcgaagccgacattgcgcagcgtggccgccatcgctttggcatcgatcggcgggttcggcagttgcgcgacgttcttgtaggagccgttgccgaccacgaaggcgacacggcggtcggccttggcagcactgatcgacagtgccatgcacatcagcgaagcgaggagggtgagatagcgcattctgaaatccccagaatcgaattgcaggcagcaacagactggcaacgaacctacacgaagtgcccgacttcgcgccaccaaaacggccgcccgttgggttcaacccgctgctgtgtggccaatgtgcacgatggagtgcctctccaacgtgatccaaatcacacggtcacttagttttgtcgctcgggggcggcgcgaggttcactgcgcgcgagcggggaccggcgaagtgggcttcaaattcaggagattgccaccgaggatcagcgccgcccccagcacggtccaggcatcgagccgctcggaatacagcagccagccggcagccgcggtcaatggaacccgcaggaagtccatggggacgacgatcgttgcgtcggcatagcgcatggcgctggcgagacaatagtgtgaaaatgtaccgcagacggcaatcacgccgagccaggcccagacgtaggtcgatggccaggtccagacgaacagcgtcggaacgaagcctgcggcggactgcaccaccagcatccagaagaggatcgagagcgcactttcagtgcgggtcagcgatttgacgagggccatggagatgccaaaacccatggctgctccaagcgcgatgagctgacccggattgacctcgccagtggcgggccggacgatgacgatcaccccaaccagtccgagcacgatggcggcgatcttccagggcgtcatgcgctcggataggaagcttgcggcaaggatggccgtccagatcggcattgtgaactcgatcgcgaccacctgaccgatcgggatcagcgtcagcgcaaagaaccagccgagctgggcaaaatagtgcaccagattgcgcccgatgtgttgcggcaggcgcgatgtcttgaccgtcttcaagccgcccgcgcggtagatgatgggggcgagtagcacgaagccgatcagcgacctcacctccatgatctgaaaaacattcagctcgcgcgtggtctcgcgcccggcaaccgccatgaccagcatcagcgagagccagccggccatccacagtgcagccatcgctttggacggtgtcgtgctcatgaggggccggatgccggaggatggaaagccgaaaaggacggccggtatcggcgacattgccgatgtttgcaacggtcaaatctgcggatgcagcgatgcagggctcgtgctaggcatctactggataacgagaatatcgggagaccttcgctcatgcatatcttgcagccggccgaatggaaaaaaccgcgtggcttttcccatggcattgtggtcgacggacccgggcgctgggtggttctggccggccaaaccggcggcgacgagtccggcaattacgcgcccgacatggccgcgcaggtcgcgactgcgctgaagcggatcatcaacctactcgacgaggccggggccggccctgagcacatcgttcgcctgacctggtacctgacgagccgcagcgagtacgaggcggccggtgctggcattggtgccgcctggaaggaaacgctcggacgtaattttccaccgtcgacgctgctctacatccctgggctcgtggacgagcgggccaaggttgaaatcgaggtcacggcgttcgtgccggacgcataaaaaagacccggcgaagccgccgggtcggttttcaaacgcgcggctcgcctcagcgcgacatcgagatgttggcgccgcggaattgactgtcagcgcgtatattgacggtctgcttgttgccgctcgtcttcagcgcgatgttggcgttgaaaccggcggcagacgcgaccaactcgaagtttccgccgctgccacgaccctggagagtgccagagatgttgcggctggcctcgctccaactgcccgaaatggcacggccagcagactgaacgttggcggcgaaggccaacttataggcgtcgctggcgcacgttagggtcagttccatggtgggaccgatgggtgcgtatttggcccggcaacgaatgcgttccgtcgacccgtcctccaggctgaccgtgccggcgccactccagcttcccgccatcggcgcgaatggaccggattgcgccttgctctcggagctgacggctgtggccgcaagcaaaacggcagccgcgatcagcagccgccggttccgagcgggagcctccgctgttctataggcgcgatgcttcccagcgcccgctgcacggtatgcctgctgatgctccattccacttccccgatccggcgttgccgttgagttgaccgttggcatatgcaccattgatcgaaaccttcacaagtcccccactgccgatggtgccggaaacgttagcgccaggcgcggtgattttgccgccagctactgtcagcatggagctggcggtcggctcgcacgagccggtcttggtcacgatggtgacctgccaattgccatcataggggctctgggcaagagcgggggcggcgagggtgccggcgaaaactgaggcggcgcagaacgccgcgatgcgaccaaaacgcatgaatcgtccttgaatgtctctgagatgctgacggtttattcggacgaaatgtgacggaaatttgatgcgacgccaaaccgaaaattattcgtttcgggacaatggtttatttgcgttttcggctccaatttccaaagtgaaatcaaggccccttcacgttaaaggtaaacatcaaggagcctaggagaggctcggtgcggatgtcgcgaactgctcgtcctggactttggctggcagcgccttgtggaccttggcgtagtcgatcacatcggccagcagcttgagcccgagcggcgccagcgcgcgctcccagagttcgcgtgcggtctcgccctttttgacgaagcaccagtcctgggcggcgatcgcgccggcgtccatgcggtcggcgagatggtatatcgtgccgccggcgatcggatcgccctccttgatggtccattcaacggcggccttgccgcgatggcgtggcagcagcgaggggtgatagccgatcccgccgagcttggccgcggccagcgcgtccttgccgatccgggcgtggctatgtgcggtgacgatcagatcggtgtccggggcaatctcggaggccaccaccagcttcggattggcctgcaccacgacgtcgatcccggcagctttggcggtcgcggcgaggcgatcctcggcatcggcaaccacgacccggatgaccgagacgccgtgctcccggagcatgttcagggtggtcacgccgaaatggcgggagccgacgagggtaattcgcatgggtatccgatccgtctcgcaactgcgtcatcccccgataacacgtccgcacgccctgtcaccacccgtggagcgtttgcgcaggttatcaacaatgcgccgggtcgccggctgcgcacatcggacgaggagccgccggcgctccatcgcgccttgtcgcgtgtcttcgcatcaccgtctggcgttgccgcgccgccacggcccgcgggcaagcggccgctgagcggttcctgtgttggtttttgacagagcggtctccgatcggctgataacgtgcgccgaccaaggccggcgacatctcgacccgcatccgttttcgaacccggcttggccgctcgcgtgatcgccagcggccttttcatgccgcgcatcacgaagtcatccaatggtaacgcgatctcaaccagctcggtgtatcgacgaatccgtcgcggatttgtattgcgtaccgcgacatcgaaatggccggcggggcgggcgcgccgtcgggccttttcgccgggacagatttgatgccgagcgcaatcgagcagatcgtcgacgcgtatgtgcgtctgaagaaccgccgcggcctcgatgagctgatgatgcacaggcagcgactcgcggtcgatctcaagagcaggtctggttatgacttcagcctgccgatcggtcagatcgacgaggagatcgcgattatcgaggcggggctcaggcgtctgaaagcagaaaattctacggcggtctagcacgttcgcgagccgcctcgtgcgcggaatttgaggcccacgcttcgtcggagtccaagtcgcgttcatgaacggttcaggccgatccggtcttaattgcgaagtccatgccgctgcctctatcgctcagtcgcgccggccgccgtcaatgactgtgaaaagcggccgcgccggcgtcggctcgaccagcagctcgtccaccagtgcagttgccgcatcaacgtatttgcgtgtcggcttgtcgagaggacgcttggcctcgtcgtcgagcgccacttttgcggcctcgaccagcttgcgcatgcgcgccgcatggtcgtcgcccgccgtcaacgtcgcgcgcgccagcgagcgcagcacgaacagctcgccctcgaggcggagcagacggtcattgagcctggtcaggacggcgttgaggtcggccatgcggttcgtcgcggaggatctatcctgatctagcggcgatcggtgaacggaatccaaatagcgcccgtgcaattcggccgatcccgcgacgccgcgggcagttaccactccacgtccgcccaacgcctcccgaacacaggcggcctcgttttcactgcttgccagccaaagaaatgatgcttgccggaccaagcgtgcacaacgctgttacagatgccgcatttgaaactgccggtgtgagcttcgctgtgctcctctcttgtcgcggtgtagttcatgccgcaacccgcgcaggtgaactcttcgatcttccagatgctgttggccattgcaccgactgcgtttctgatctcgatgcaccgtaggcagcagcgtttgcagcggcgtaaaccggcgcgggggaatccggttaacgggcgttagccaaggcgagtggaagaccgggcatttcggaatgcggagtggcccgacatggtcctggtcctggacgtcagttccagtcatcttgacggcggttgcgttgctggcaataacggccaggctgcgccggaagtcgcgttcatgccgcaaggaaagctgtgcccgtgaaaagtctccgtcagctcctgacgggagaggacgtcatccagctcgtgatccggctcggcctgcttgccttgctgatcatctggactttcctgattatccgcccgttcgtgccgatcctggcctggagcggcgtgctcgcggtcgcgttctatccggcgttcagctgggttgccaagatcctcggcggccggcccaagaccgcggcagcgatcctgaccctgattacgctcggcatcgtcatcggtccagcgacctggctcggcatcagcgcggtggacggcgtgcgagagctggcgcaccagctcggcaccggcgacctcgcgcttcagtcggcgccggaacagctcaagtcgtggccgctcgtcggcccctggctctacgaactctgggaccaagcctacaacaacgttcgggcggtggtgcgcgaggtggcgccgtatcttcagccgctggctggcccgctgctctcgctcgcaggcgatgccggcgtcggaacgctccagtttctcgtctccgtgttcgtagccggctttctctttccgcatgggccgaggctggtcgcggccggccgcggctttctgtttcgtatcgtgcccgagcagaccgagcatttcctggggctggcgggcgcgaccatccgcgccgtggcgcagggcgtgatcggcgtcgcgatcgtgcaggcgctgctcgccggcatcggcttcaagctcgccgaggtgcctagcgcagggcttctagcgttcatcgtgctgctgctctcgatcgtacagatcggggcctttctcgtcctgctgccggtcatcatctggatatggaccgccaaggacgtcactacggcgctgctccttaccgtgtttctcgtccttgtcggcttcatcgacaccatgttgaagccgcttgtcatgggacgcggcctgaccaccccgaccatcgtgatcttcgtcggcgtgatcggcggcacgttggcccacggcatcgtcggactgttcatcggaccgatcatcctgtcggtggcctgggagatgatgatggcctggatcaggacggaggaccgggcggaggcgggggagcgctgatcgcgcctcgacggcttgtctgccgatcttgccgggctggaccgatggctcgccgtctgcgatcgaagcgtgccgcgaacttgtctattcgactagacaagttacgattgagccgattctctttcgatgacggcagcaatggcgaagtcttccaagctggttgccgccaagcgcggcaaggtattgttggtcagacggcggtcggacggcctttggatgtttccgggcggccgcaagcgtgcgcgcgagtcggacaaggactgcctgcggcgggagatcaaggaggaactgcccaagctgaagctcggcaggatcagcctctggaaggaagtgaaggcgaggaacaaggtctctggtcgcaagatgagcgacgcgatcttcattgccaaggccgccaagggcaggctgttgatcggcgacaagaaggagctcgaccgcgccgcctggcagaagccccgtggcatccgcctgacgccgacatcgcgctacatccgcgaccggctgtttccgaggaagcagcggcgaagctgagctagtcctcccgctccgccgatcgcgtccgcccggcgaatctcctcgattgcggcgcttgccgttcgggtgcagcgagccttgcggcctcgagctcgcgcatctccttgcggacctggcgcgcggagcgcatcgcgcgcttgatgaaagggtgctgggagtcttcggcgaagaacagcaccacctcgcagctcggacattgcctggaatagccgtcctgcaaccgcccggcgcggtcgcgaaacacgttcttgcaccgcgtgcactgaatctggaccgaactcatgcgcggacgacaatgactttttaaatggatcgtcagctgatcccaaatatctgaagaaagcttgaatgcgttcgttgctggagtttgcagagcgcacgcggccgagcgtcctcggcgggcgcgcctgtttgcggaagagcccgttggaacacccgaccgctattgcttggccgccatcgtctccaggcaacggttgagaaaagcggtgcgatccctcggcagcaccttctcgagatctgccttgagcgcgcattcacgctggcgcaattgctcggcccggcgcttctccgctgcctcgcggtattcgggggcaaccttgttgggatcgaccagcgtctgggcgtgggcaggggccatcgcgagcagcgcgatgatgctgatgaaaatgaacgacttcaaattttcctccatcaaagcggccatcctagcgcgcggcgtatgcgcgctcaaatggggatgaggtaccctgttccggcaggaggtgtgtgagccagttcacaagcgcgcagcgagatcgctgctatcgagatgacattgcttgaccagttcatttcgaacgaaacgccccagcgtggctccaagcgctggggttttttcatggccatatgcaaggcgtcgcccatcgccgcgccgcatgcatcgcgagatgcagagattgcccgcgtcggttccgtcttcgaggctgaacaacggccagcttgtaagggatcgcggcgccgccttgaacgttgccaacgaggggtgcgttcgcagggcaaatcccatatgcatggcggcgagttgccgattcgacagagagggcggctcgcattctgttggcgacgggttaggattagagacgggttcaagtgaggctttccaagaaggcgcgggtggccaagaaggcgccgaagaagaccaaaggatcgcagcgcgccacgatctcgtcttcgtcgccgctcggcatgatggctctccatctgcttgcacaatggaagcagtccggacgcagtggcatcgtgtttctcgccgagagcgagaaccgggcggagcggctcggcagcgtcattcacgcgctcgacccgtcgtgcgaggtgctggtgtttccgcgattgaacacgttgccgttcgatcagctggagccgtcccatgagctggcagggcgcagagcctccgtgctgaggcgcctcgcgaaatccaagaagccgctgtttcttgtttcgacggccgaagccgtgatggagcgcctgccgccgccggcgagcctggtgcgcctgagcctcagcttgaaggtgggcggtgcgttctcggaggaggacctcgaggcgcgcctgcaatccctcggatacgatctggacgatgagccggactatccgggtggggcgctgttccacggccagaccttcgagatatttcccgccggcgcgctggggccgttccggatcgagcattcggatcgtgcgatcgagcggatcgtggcattcgacccgaaggagcacaggatcatcttcgagaccaaggagctgctcgtcgatcccatgtcggagcggctcggcctcgccggcaaaggcagcaaacgcgccagcctgttcgactattgcggtggcgccaaatggatcggcgatgcaggcgtcccctcgcatgcagacagatggctggatacgatcgaggaggccgcgccccgcgcggagcgcgagcgcgaatatctcggacggcgcgactggaagcagctctccaagggcatgaaggtgctgccgcggatggtgtcgtttcaggccgtcccggagttctccaagctgacatcgtcgaggaaggcgctgcgtggcttcgtcgaggagagacgccgggccggatcgcgattgatcctggccgccgcgcacgaggacgatctgcgcgtgatggagcggatgggcggcgtcaaggcggagcgctgcgatgattgggaggaggcggcgtgcgggcggggcggggcggctgcgctgctggccgatctcgatgccggcttcgtcgcgcctgggaagaagcctctggtcgtggtgacggcgtccgacgtgctcggcagccgcgcccatcatccgcaacccatggcgcgcgcctggagcgcggccttcgatcatgccgacgtacccgagcagggcaccgtggtcgtccacctccagcgcggccttgccgtgctcgacggcctgcagacggtcaacaccggcggcggcgcgatgcgcgagatgatccgcctgaagttcgccggcgacaacgcagttctggtgccgccggccgatctcgccttgatgtggccctatgcggcggagctcggcaagctttcgctcgacaaggcggacggcagcacatggtgggcacgccgcggcgaggccgagcgcgagatccaggctgccggcaaggtgctggccaagcacatcagccagcgccgccggcggcgcggcgaaaagctggtgccgccgggatcggcctatgagaagttcgtcgcgcgttttccttatttcaccacgagcgatcaggccaaggcgatcgacgatgtgcttgacgatcttgcatccggtcatcccatggaccgggtggtctgcggcgacgtcgggtttggcaagacggaggtcgcgctgcgcgctgcggccgccgcggtgctgtcgggcaagcaggtggccatcgcggtgccgaccacggtgctcgcacgccagcacgtcgcaacgttccagaagcgcttcgcgccgttcgggatcgaggtgggcaacctgtcgcgggcgacatccggcgcggaattgcgcgagacccgggagggacttcgcagcggccggatcaaggtcgtgatcggcacgcaggcgctcaccggcaaggacgtgaggttcgacgatctcggcctcgtcatcatcgacgaggaacagcatttcggcgcggccgagaaggcaaagctcgcaggcctcgccaagaacgtccatgtgctgatgatgagcgccacgccgatcccgcgcacgctggccgcgggccttgccggcttccgcgacctcagcgtgatcgcctcgccaccggtgcacaggcttccggtggcaacccggatcgcgccgctgtcggatgccgccatcgcctccgcgctgctgcgcgagcagcggcgccacggccagagcttcctgatctgtccgcgcatccaggatctcgagccgatgctggcgcgggtgcaggcggtggcgccggatctgcgtatcgtctgtctgcatggcaagctgccggcggacgagatcgacgaccgcatgatgagcttcgtcgagggcggagcagatgtcctgctcgcgaccaacatcgtcgagagcggcctcgatattccccgtgccaacaccatcgtggtgtgctggccggagaagttcgggcttgcccagctgcatcagctgcgcggacgcgtcggccgcagcggcatccgcgccttcgctcatctcttgaccgagacagagtccggacaatccgagaagcggctcgccgtgctcgaagagttcagccggccgggcgctggctttgccatcagcgaacgcgacctcgacctcagaggtgccggcgatctgttctccgagcagcaatcaggccacgtccaggtgttcgggcccgtgctctacagccatctcctcaggatggcctcggagaaggccggcgaggcgcaagccgcgctgtgggtgcccgatctcaacctgccggtcggagacatgctgcccgagagttacgtgcagtccgagccggtgcggctcgaactctatgcgcgcgccgctcggtgcaacgatgaggacgaccttgaagatctcgaggaggaaaccgcccgccgcttcggacctctgccgaaggtcgcccgcgacttcttcgccgcggccaagctcaggatcgcgtgcaagcgcaggggcatcatccgcctcgacgtcggtcctgaggcggcggccgcgacgttcctgccggggcgcctgcgcaagtcgcgcggcaagtcgcttcagcgcgacggcgaccgcgtgatccatcacagcccgatgggcgacgcgccgttcgagcgggtggaggagctgttcgaattgctcgacgaagggtagggcgcggttccatcggagcgaggggcagaggagccggaatatccggaagaacccggaacatctcacattgcgcggatctcgaagcgacttggtaacgcctgctgcgtagcttgccgttcgatcaacggaagcgaacgatgcaatcgtacatctcaaagcgggcgagcttgtgcctggtgtccctgctgctggcgtctctcgcctcaacggcagctgcgcaggagagcccgccggactacgcgcgataccgcgaaggcctgttcctgcgttacctcaatgccgacgagggcgacttgcgcgaggtgccgcggatcggactgtccttcggtgagcggccgatccgggcggtgctggattccggttcgacgggcatcgtcgttgccgcgagcttcattcccaatttcgaccggctcgcttcgcttggcgaaggcaagctcacctattcgagttccggccgcgtcatgctcggacaatgggtcgtcacgccggtcgccctggtcggcatcgatggtgcggcggtgcagaccgagccgatgccggtgctcgcggtgacgcgtgtcgattgcctgcagcacgcccgcgactgcacgccgtcggatgcgccgcacggcatcgccatggtcggcatcggttatggacgcgagggcgacctgcagagccagagcacgccggagaagaacccgctgttgcgcgtgaccggcggtcacggcgaacggcgccgcggctacgtgctgacggcgcacggcgttcatgtcggcctcaccggcgcgaatacacgagggccgttctcgttcacgaagctgtcgcggcagccggaccggccggactggtcggcgacgcctgcctgcatttcgttgaacggccggaccccgccggcctgcggcagcatgctggtcgacaccggcgtgtccgtcatgttcatgaccgttccggccgagcaggcgggcggcgcgaccgcgtcgctcgacaccggcaccagcgtgtccatccgggtgggaacggcggagaagtccaccgagctctaccgcttcgccgtcgatggcggctcggcgctggcgccggatcgcattcacctgcgggtgtcgcccgaccggaccttcgtcaacaccagcttccatctgctgaacggcttcgacgtcctctacgacgccgacggcggctatgcgggcttccgccggcgcgaggccggcgcatcgcgataagctttcccattggagtacccgagatgaagagaccgaacgtcgtggcgagcggagccctggccctggccgcattgatcacgctttccacctgcccagcccgtgcggcgggccagctggtcaattcctggcggacgccggacggctggctcaccgagatgcgcgtgcatccgaacggcgccagggtctgctcgaccgggaaggcggcgcaggctccccgaccgttcgggctgtccatcgtccggagcggaaccgagaacgtgctgctggtggtggacgaggcacagccgccgaccagcgcgggcgacatgtcgttcgtccaggccgggaagaccgtgggcacgctgcgcacgcaggttgcggggcccgcctttgcctccgccgatcccttcagcagccagacgcccgacctcatcgcaaagctgaccacggccgcgctgaccatcgatgtggccgggcggcaatatcagacggacatggcgggcctgcccgacgcattggcccagctcgccaagtgcgaggccgagccgaaatgagctaggcggggagtccctgcaaagacgggcgaaacgcaaaacccgaaaacaaccccatgcacagtagccaggtgcttgccgcaggagcgcttctgcggcaggtttcgcctcggccgaaaattccccctttgacccgtcaggcaaaacagtggcatcctgccatcttcggaaaatccgctgcgacggatgccgctgccgcggaccgaagtgatcgcacgcgagcgcggtacggaggaacccgtagtcggacggatcggcaagcccgtccgccggccgcgccgctaacgtggaattaatccagaaagccgacaattttaggcagttgtgtatgggtgctgcgtaagcggagcgtcgtgatggcgttccaggggcggcttcctgttgctcgctccatgggggtcagtgcaaatgaccgcgtccttcgaaacgccaagcttcgccgaagagctcgacgccgtcgcgcttgcagccgctgcatcggctcacgaacctgcagtcaccgatagtccagcactgatcgagcggccaagccgcaagacggtcctgctgctggcggcgtgtgccgtcgccatcgccatcaacggcgcggcggcggtctatacgctgccgtccgccttgccttcgttcagtgtcgcgagactggctgaactgcttccgcgcaaggaggcgccggcgccgaaaccggatcccgtcgtcgcgacgttgaaggagattcagtcggcgcagcagcagcacaccgcgtcgctgcaggagaacaaccaggccctgcagcagaacgcagcgctgctgcagcaggactcgctggtgctgctgtcgctgcggcagagcatcaccgaggaacgggtcgacgtgaggaagatatcgtcgcagctgtccacgctgatcgcgaaggtcgactcgctttcgcagaatgtcttgatgtcggacgtcacgtcgtccgtccggcgcgccaatgcccgctacggattgtccgccgcgatgcgcaagcggatggtgcggccctcgaagcctttggggccggtttcggtcggaggcgcgccgctgagcgtgcccgcaatggtggcggcgccggagagctgaagggcagtgcgagcgggcagacgcgcttaagccgcctgctcctcgaacgaggtgtggacgcggcctgtgggttcgacgacctggacgtcccagcacccgtcctcgaccagctccctggccttcttgagcgcggcggggagcgaaggccgcttgagactgacgacgcctgccgtgtcgaaacccttgatttcaaacatgccgctcctccggttttggtgaagcgtacacgtttctcgagggatgtcagcgggctttgtgagcttagagattggcgcagcgtcgagggagcggcaatcggcagggcttgcgtctgcgacctcgatccagcgcgcgatttcgcacggcacgatgcgtagttcttgctgcccgggagagatgccacagaagccggtcggctcaaggaagccggggaaggccaaatgacaaaatggctgggctcgccggttcgcgctggcgggccttttccttgagccctatccgtcttggtacggaacgccgttgtcgtcgcagatgcgcgcgaacgacgtcttagccttgtcattgtcgaaacagaaacgggtgccgatggcggcgcgatcggtacaccaattcacatcgtttgcttttgcgatgcgcgccgcttccccgcgcagcagatccagctgccgcccgggaggagcgcgaacaatcaaggaagattcggttttcatccagcgctccgtctcgggcaaaaggccgcagcgaacggcgctgcggccttcggccggaggagtatgaattcgtgaagtatgatccagccccggcggcgcgagactagaaagtattcgcggcatcgcaaatcatatctggggccggcgtacgatagcggaccacgaatgcgcagctgcttcgattgaagcggccccggctgagggcattggggggcttnnnnnnnnnncggcgtgaagataatcgtatgccgctgcaggcgttcctcataaggagccgtccatgcatttcgtattgatgaatgccgacactgacagataccgccgtcaagccaaggctagtctcgatgaggcgcagagggcgacacgcgtccaggacctggaggcatggctgaagctggccgaagagtggatggagatggcggaggcagcgcaacgacagagctcctatgagaactaggcgtcatggtggacaagaaacagccagcgaagcctgtagccaacgaggatgcgcctcaacccgaagatacgcggaagatagtccgcgagtatattgaggcgcagcggaagcttttggagcaattccggcgcaagctgaattgagcccgcaatcgagattgatgatggaatcgaagcgagcgcgagctactgccggtcgtgggtgtggatagcggggctcgtcatcacgaagagtgtcttgccgcttcgcgcgctccctccacaagatgatgacggacagcacagcggcgacggcgagttggcctgcgaaagcgcccaagggggcgcgaagcatcatcgctctcacgtgtgcagatgggatttttgagattaaggaaggaatagtcgcgacgaagtatttgatttgacgtggtgagcgcgctggggctcgaacccaggaccccgtgattaaaagtcacgtgctctaccggctgagctacgcgctcccatggccgctgatggcttcgaaagagatggccatcgtgatcggacattcgagaggcatgtcttgccgctgcgcttgagatggcgtcgcggggaaaaccggctgtttccggatcatgccttcggctcgcgctgtgtagggggagtggctgcggaggtcaatagtgcgggtggttgccgaagatcgccgcagaggcggggtttcgttcgtggaatccttggcttaagccgtgattctcaacctgattggcgggacgccgtccacgaactgttggaggtcggcggacgacctgcgcctgcatggtcgcccggcgatgcggagcatcgtccggacgcccgcctgcggcgggctcctcaccatgagggtccttcaattcgcctcgcggcggacctccgtcggcacggcttgcggcgcgcccaccggcggcagggcgaccgggcgcaggccgatcagctcggcagtgcggatggcgctgtcgcgccagaactggaacgagttgatgcggctgagctcgaggacggcgatggcgacggcggccaggaacggcaggctctgcagcacgaggacgccggcgaagacgtagatctcggtgatctgcttgtagctgttggtggcgatcagcacgccggcgcctaccaggagcagggtgccgatcaccgcttcccagaacgcctggaactcgatcgacatccggctgaggccgcccttggaggtgcgggcgaaggcgatgtgctcggtgatgaggccttgcgccaccgcgcgcgacaccgtccattgcacgctcatcgccgcgatcatggcgcccagcatctggccgggcttgatggcgacgcgggcgcggtacatcgacaggaagtgtaccagcgagacgacgaaggcgccgatgatcggcagcgtcaggatcatgtcggggatggcgatgtcggcgaaggcgacgatcggcacccagacgaggttgagcagcgccaccaccacgccgaggctttcggcgcccagccagttgagccagccgaggctgtattcgcgcttctggtcgggcgtgagccggctcgcgccaggcaggaagcggcgccagtgcttcttgacgatctggaggccgccataggcccagcggtgccgctgcttcttgaaggcctcgtaggtgtcgggcagcaggccggcgccgtagcgggtgttggtgtagtgggtgacccagccgagctcctggatcgcaaggccgagatcgctgtcctcgcagatcgtgtcgctcgaccagcccccggccatgtccatcgcggcgcggcggatcaggcacatcgtgccgtgcacgatgatggcgttggcctcgttgcgctggaccatgccgatgtcgaagaagccggcatattcgccgttcatgatgtagtgcatgatcgacagatcgccgtcgcgatgctcctgcggcgcctgcacgaggccgacgcgcggatcggcgaaagcgggcacgaggtccttgagccagtccggctcgacgacataatcggcatcgaggatgccgatgatctcggcgtcggccgcggtgcggtccatcgcgatgcgcagcgcaccggccttgaagccctgcaccttctcggcgttgatgaacttgaagcgttcaccgagcgcgcggcaatggtcctggatcggctgccagaaggcgggatccggcgtgttgttgatgatgaccacgcattcgtagttcggatagttcagccgcgacagcgcatccagcgtctgcttgagcatctcgaccggctcgaaataagcggggatgtggatcgagaccttcgggcagtaattctccggcacgttctccaccggcttgcccttgctgagcagccgttgcggcggccggccgaaggccaccgctgcgatctcgtcgatgcgcgccatcgcgatgagcacgagcggaacgagcaggatcatgccgagcgtcagcgcgaaggccgagccgaagatgaaatagtggctgttccagaaggcgaacacggtcgcggcccaggcgccgacgccgttggcggtggccgagagcaggaaggcctgcttcgcggtcgccttttcgatccgcaggatcggcagcgacagcaggatgccgaccaggagcgcgatgcccatcagcttccagtaatcgggattctccaccgggccggtccaggcgaatttcggctcgcggctggcgttgaggacgccccagtaggggccgacgccgccttcgaagaacttccagggctgatctatggcttcgacgatgttgtattccatgccgatggcttcggcgcgggtgacgaagttgcgcaggacgagggcctgctggaacgggccgggatcggcgttgcgcagattgtagccctggctcggccagccgaactcggcgatcacgatgcgcttgccggggaacaggttgcgcaggaggttgtagcggtcgacggcctggtcgaccgcctggtccgagcggaagttctcccagtagggcagcacgtgcgcggcgatgaaatcgacgttggaagcaaggtcgggattgtcgcgccagatgttccagatctcgccggtggtgacgggcacgcggaccgcgctcttcaccttcttgatcatgtcgatgaggtcttcgaccttctgctcgccgcggtagatcacctcgttgccgacgacgacgccgacgacgttgctgttcttgcgggcgagctcgatggcggccttgatctcgcgctggttgcggtccgtgtccttgtcgatccaggcgccgacggtgaccttgagtccgaactcggctgcgatcggcggcaccagttccacgccgcccgtggacgaatagaggcggatcgcgcgcgtcatggtcgacagcgtcttcaggtcggcgcggattttctcgacggtcgggatgttgtcgatgtcggggtgcgccgagccttcgaacggcgcgtaggacacgctgggcaacaggcccctgaagtcgggcgcgggttccttctcgcgcaagactccccagacgcctgcatggagcgcagacacgagcaacagaacggcggcgacaacgcgcatcgcggctaaaccaaaaggggctggggtggcagggaagcggatctgaccccgagatccgaccgagtccgcggcaaatggagcatacctctgccgcgtggtttcacaactgtcatggcctcatgtccttatgagggcatgccttttgggatgcgcggcagtgccaaccgtctctatggccgatcgttcctgaacgacagctgaaacgaccagagcggtttgagacctcgagctatttcgcgggcgccggggacgggcttgccgcaggcgaggggctggcggccggctgcggtgccggggagctgcctgctgcgggcgccgccggctgggacgccgcggccgctgcctgctgcggctgagcggccggattgatccagcacgcgtgcacgcggctgtccaaggtctcggcgaccttgggatcgatctggccgccgaagcgggtcagacaacggaaggcggcctggatgtggccaccgggacagccgaaacggtcgtagagatcgaggtggcggaatgcggtatccaggtcatcgcgccacatcaggcgcaccacgcggcggccgagccagacgcattcgggattgccggccgggccgttgatgacatgggctgcttccgcgaactcgtcggtgcggcgctgattctgggcggcgtccttggcggcgtcggcgggctgggccgccttgcccgggtcgggggtcggtgtgccgctctgggcggaagcgctgccgagaccggcgatgacgagaagggaggagacggccaaggcggcggcgaactgccgcaggaccgcatttcgtgactcgaacacccgttgccgcatgaattcctcaatgtaaccgctggccgtccgcgtcaggatcccgtggacgggttggtgatggcgtccaaatgggtctccaatgcggcgagaaaggctttgcgattccatgacctgtatttcgaattttgtccagcaaagtcacgatgctaggccgcgctcgaacgacggcggtgaaatttccttcgggggaggagcggatccgcggtgaggatcggcattcggacacccccttggcagacggcgcccgagcaggtaatcgacggacccttcgcggaggacggaaccgatttcacttcgtacgccattggcgcttctgctcgtttcattgggtgcgattgccgccgtgtggtggtggctggcgacgccaatcacgctcgcacgcgccccgatcgatcccgccgagaaggtccaatgcgtctcctatgcgccgttccgcggcgagcagacgccgctggaagcctggacccatatcgaggccgagcagatcgagcaggacctgcgccagctcaaggaaatcaccgactgcgttcgcacctattcgatggagaacgggctcgaccaggtgccggcgatcgcggccaaggtcggcgggctgaaagtgctccagggcatctggctctccagcaatcgcaccaagaactatgagcaggccggccttgcgatccgcctcaccaagcagtttcccgacatcatcacgtccgtcatcgtcggcaacgaggtgttgctgcgtggcgagatgacgacggcggatctcgtctcgatcatccgcctggtgaagacgcaggtcagcgtgcccgtcacctatgccgacgtctgggagtactggctgaagaaccgcgaagtctatgacgccgtcgacttcgtcacgattcacatcctgccctactgggaggatttccccatcaaggcgaaattcgcctccgcccatgtccaggcgatccgcgagcggatggcggtggcgtttcccggcaaggagatactgatcggcgaaacaggctggccgagcgagggccggatgcgtgacggcgcgctgccgtcgcgcaccaaccaggcgcgcgtcgtctcggaaattctcagcctcgccaagtcgcagaagttccgagtcaacctgatcgagtcctacgaccagccctggaagcgcaagctggaaggcactgtcggcggctattggggcctgtatgacgcggtgcaccggacgctgaaatatccgccgggacagccgatcagcaatttcccgttctggaaatggtacatgggcgcaggcatgggcctttccgtgctggtgttcgccgtcgcgctcatcacgctgcgccggcggccgtggacgccgcgcttcgcggcctggctcggcgtcggcatctcggcgaccacagccggcatcctgctcgggatcggcatcgacaagatgtattacgagagctacggcatcggcggctggctgctctggggcgcgctgctgctggccggcatcctgtcgccgatcttctgcgcgcaggcgatggtgatcggccgcagccttccgaccttcctcgatctgctcggcccgcgcgagggccggaagtggtcgaagctcaccgccgtgctcggcctgacgctggcggtgacggccgtgatcgcggccgcgaccgcgctcggcttcgtgttcgacccgcgctacaaggatttcccctacgccgcgctgacgatggccgtggtgccgttcgctctgctgatgttgaaccggccgcagatcggccagcgtccgatcgcggaagcggtgttcgccggcgtgctcgcgctgtcggcggcatacgtgctggtcaacgaaggccgcgacaattggcagtcgctgtggacctgcgcgatctatctgttgttcgcgctcacgctgtggcgggcgcgggccgagcaaagccgagaatgagcaggccgatcgcgaggcccgacagcacgacgttgtagagcacgatgccgaggccggcggcgatgatgccgacggtgagcagcacgatcgacggacgcatcaggttcagcgtcgccaccaccagcgcgacgatgccgaacaccgaattcttgaacagaacggtcgcaaccgaacgccccttgcagatcagcgtctgaaggccggcgtcgcaggcaagcgcgacctgcgacagctcgatcgcgaggtaccgcagatagagcgcatagccgacggaggcgaagccgacgacgatcaggaactgcacctggtagggcgtgaggcggaagggcttttttgtcatggcggcaatatggtcggcatggcgcgggcaggcaacagggcaggtgacacggcaggtgacgtttccgtcgattcggcctgcccctgcatcatgcaggaacaggcgagcgtccggctggttctgcacattgtggggcccaacgcaattgccgtcgaggatcgagcatggacaagccaacgcaggagcagctcagcgagctcaagaggctgagcaaggaagcgcgggtggaggattggtcggaaatcgtccagtcaaaggacgaagccgagacgcggatccgggatctgaaagagaaggcgcgcatggaatagatcgccgcccgcgccagcgcgatcaggctcggccttgcgtgttccggcactgctccgcgagccggcgctcgtatgtttcagtgctcgagcctcggcgaaacctatttgaatcccagccggcgctcgacccagcccagaacgaacagcacgagcaacgtcaccgcgatggctgctccgacgagcaaccaggctcccaatgcgcaggcaatgccgaggccggccgcaacccagaccgtcgcggccgtggtgagaccatgaacggtcttcgacttgcgatcgtgcaggatgacgcccgcaccgataaagccgacgccgctcagcacgccggtcacgacgccctgaatgaccctggagatcgcatccgggtggtcgcgcatgttctggaactcgatcacggagatcgacaccagcgcggagccgagagccaccagcgccagcgtgcgcattcccaccggcttgtcgttcatatcgcgatcgatgccgatgaggagccccgtcgccgctgcgacgagcagcctcagcacatcatccagttcgttcatcaagattcgcgcgcctttcgggagggacgacgcttcgaatgcgaagcacaagatcgcgagcttgctgcgaaagcgcggctcaggccaagcgtccgatagtcgcatgcccaaggtccacgacggaaatcagtatcaccgcctgaagaacgacgacagcgtcgatccggccgatgcctccggtttcggcggcgcgggcgcaggctgcgcggccggggcgggcgcgggctcctcgcgcttcgagcgcttcgatggatagctgcggcggcgctgctgcttctcgggcttggcgctcgcgggtgcggtttcggcttgcgggaccgcgtcggggttcttctccgcgctcttgtcttgaacccgttcctgcgtcttctcttgcgccttgtcctgtcccttgtcctggccgccacgcatcgacaggcgctggccgtcgaatatcgtggtctcgcagtgacggtcgttctcggcgaggcttgcgcagaatttcgctgcgacggcggcgttgacgaggggaccggcgccgaggcgaagctgcattcccaggcccgtggtgccttccttgatcatgatgatcggccgcagcgctgcgatttccggattggacttggtaaggccgcgccacagcgcgcgcaggccgtcgaccgagttggctccgccgagatcgatggcaaagcgggtctgctgaaccgcgatggcaggggattcgctctcggctgcatcggacggctttgttgttgccgccacgacctcggccgccgcgggcggctcggccttcttctcggcggcgtcatgctgaatgagcttcggtgcggcgggatccggcggtgccatgatcgacttggacggcaccagcggaatggtcggcagcgccgaattgttcgccggcgattgttgcatgagcgaggctgcggcagcggtctgcggcggtgcgctcgcgggctccttcgcggtttccttctgcaaggtttccttctgcgcatccttggccgcctcggtccgcggcttctcgctcggcggcgttggcgtcgaggcgaccggtgcgacgctgggagctgcggccacgggtgttgcgtcctgcggcttcgtgccctgcgccggcgcagcggcctgcttggcaatggcaccggtgacggaatcgagcccttgctccagcacggtgacgcgcgaatacagccggtcgcgatcggtgttcagcgtctcgatagcggcggcgaggcggcgggcctcgttctggctttccttgctcagcatctgcagccgatcggcctggcgcgcgagatctgcggacgccacctggtcgcgccgccagccgagctgggcctggttggccatgacggcgacgacgacggcccccactgcggcgacgccccacgagcccagccgccacatcaagcgccggtcgaacgcgctttcctcggccagaagtccggagaacaggccgccggtctccttggcgccgaaggcgtccgccagtgggtcggaatcctttgccatgaacgttaaatgcccagccctgtccggcttccccgaatcaatcagggaacattaacaggaaaagcgtgccgcacttgaattccgggcgtttgcgggggtagcgatagcttccccgagggcgctcgctgcccgtcgcgccaaacgattcggccatatctgacaggatatcgatgaccgcccgttccagcctcacgatcgtgctcgccgccggcgaaggcacgcgcatgcgatcgagcctgccgaaagtgctgcatccggtcgcgcatcagagcctgctcgcccatgtgctggccgccgctcccaggggaaccggcacctcgctcgccgtcgtgatcggaccggatcatcaggcggtcgcggacgaggccaaacgcatccgccccgacgcgatgaccttcgtgcaggccgagcggctgggcaccgcgcatgcggtgctggcggcgcgcgaagcgatcgcgcggggcgtcgacgatctcctcgtcgccttcggcgacacgccgctgatctcggccgagacctttgcgcggctgcgcgcgccgctcgccagaggcgccgccatcgccgcgctcggctttcgcgccgccgatccgaccggctatggccgcttcatcgtcgagggcgaccgcctggtcgcgatccgcgaacaggccgacgccagcgaagcggagcgcaggatcgatctgtgcaatgccggcgtcatggcgatcgacgggcgccgggcgcttgcgatcctggacaagatcgggaatgcgaattccaagggcgaatattatctgaccgacgcggtcgagatcgtccgcaggcaaggatgggagtccgtggtgatcgagaccggagaggacgaggtgcgcgggatcaacaccaaggcgcagctcgcggaagcggaaagcgtgctgcaggcgcgcttgcgcaaggcggcgatggaggccggcgtgacgctgatcgcccccgagacggtgtatctgtccgccgacactgtgttcggcaaggacgtcaccatcgagccgttcgtggtgatcggccccggcgtgtcgatcgcggacggcgcggtgatccactccttctcgcacatcgtgcagacgacgctcggaaagaaggtctcgatcggcccctatgcgcggcttcggcccggcacctcgctgggcgacggcgcgcgcatcggcaatttcgtggagaccaaggcggcgacgctggaggccggcgtcaaggtcaaccatctctcctacatcggcgatgccaccgtcggcgccaactcgaacatcggcgccggcaccatcacctgcaactatgacggcttcaagaagcacaagacggtcatcgggcagggcgcctttgtcggcaccaattcctcgctggtcgcgccggtgacgatcggcaacggcgcctatatcggctcgggctcggtgatcacgaaggatgtccctgacgacgccatggccctggagcgcaaccagcagaccatccgggaaggcggcgctgcgcgctatcgcgagatgaagacgggcggcaagaagccggagaagtgagcggcgctattcttcgtcggcgaattcggagaagatcgcacgggtcaggcgccagccgcgcggcttggcgcgcttcaccggctcgccctccggatgcttcatgaagacgggcttgctttccttgccgcgctggggcggcggccaatgcgcaaggtgcgtgcccgtggtctcgcttgcgcgcaccgacatcgaagacagacccttgcggtcggacgagcctttcatggccttgttctcctcatcggaagcgttggccaaattcgttgacaacgagttaacgcacgcggtttaaggtcggccaattcgacgcaggcgaagctcagatcgcgatccagtgctgtctcaatcggcaataattattgagtatctggttcgctgggaatctcgctaaaaaacgagcgcgtcgtttaggcgatttttcgacgatttgggggatagtgaaccgcatgtgcgggattgtcggcattctcgggcgcgagccggttgcagagcaattggtggattcgctcaaacgtcttgaatatcgcggctacgattccgcgggcgtcgccacgctcgagggcaggcacctggagcgccgccgcgccgaaggcaagctgaagaacctggagaagcggctggaagccgagcccttgaagggcacgaccgggatcggtcacacgcgctgggccacccacggcaagccgaccgtcaacaacgcccatccgcacgcgacagagcgcgtcgccgtggtccacaatggcatcatcgagaatttccgcgagctgcgcgaggagctcgagaggaagggaacggtgttccacaccgagaccgataccgaaatcgtgctgcacctcgtcgacgatctgctcgcgcgcggcaacaagccggtggaagccgtcaagctgacgctggcgcgcctgcgcggcgccttcgcgctcggcttcatattcgccggcgacgacgacctcatgatcggcgcccgcaacggaccgccgctcgcgatcggttatggcgacggcgagatgtatctcggctccgacgccatcgcgctcggcccgttcaccgacacgatcagctatctcgaagatggcgactgggtggtgctgacgcgcaagagcgcgacgatctacgacaaggacggctacgccgtccagcgcgacaagatcaggcacgcggcctcgacgtcgctggtcgacaaggccaattaccgccacttcatggccaaggagatccacgagcagccggaagtggtcggtcacacgctggcacgctacgtcgacatggcgaccgagcgcgttgcgctgcccgtgaacctgccgttcgatttcaacgacattcgccgcatcaacatcaccgcctgcggcaccgctagctacgccggcttcgtcgcaaaatactggttcgagcgcttcgcgcgcctgccggtcgaagtcgatgtcgcctccgagttccgctaccgcgaggcacccttgcgcaaaggcgatctcgccatcttcatctcgcaatccggcgagaccgccgacacgctggcggcgctgcgctacgccaaggcggaaggcgtgcacacggtcgccgtcgtcaatgtgccgacctcgacgatcgcgcgcgagagcgagacggtgctgcagacgctcgcgggacccgagatcggcgtcgcctcgaccaaagccttcacctgtcagctcatggtgctggccagccttgcgatcgcggccggcaaggccagaggtgaattgtccgaggaggacgagaccaagctggtccatggcctcgttgaagtcccgcgcctgatggcggatgcgctcaccagcgagccccagatcgaaaagctcgcgcaccggatcgccaagtcccgcgacgtgctctatctcggccgcggcaccagcttcccgctggcgctcgaaggtgcgctgaagctgaaggagatctcctacatccacgccgaaggctatgccgccggcgagctcaagcacgggccgatcgcgctgatcgacgagaccatgccggtcgtcgtcatcgcgccccacgaccgcgtgttcgagaagacggtgtccaacatgcaggaggtcgccgcgcgcggcggcaacatcatcctgatgacggacgccaagggcgcggcagaggcgacggtcgagtcccttgtcaccatcgtcatgccggacatggcggcggcgttcacgccgatggtctacgccgttcccgtgcagctgctcgcctatcacacggctgtcgtcatgggcaccgacgtcgaccagccgcgcaatctcgcgaaatctgtgaccgtggaataggcagtagggatatcggacggtcggttcgtggtcttccaaaacctgctagaagaccctagcttgtgtgctgcgaccgacttggaacccgaatgaccccccgcgacgacgcgcctgcgcctcttgatcccgtcccggaaccgcataccggcctgatgggccgcttccgcaactatttcctcaccggcctcgtcgtcacggggccgatcgcgatcacgctctatctcgtctggtggttcgtcacctgggtcgacggcgtggtgcggccgttcgtgccgctggcctaccggccggaaacctatctgccctacgtcattcccggctggggactgattgtcgcattctttacgctgacgctggtcggtttcctcgcggccaatttgatcggccgcacgctggtcgacgtcggcgagacgttcctagggcggatcccggccgtccgcgcgatctatcgcggcctcaagcaggtgttcgagacgttgttctcgggcaagggctcgagcttccgcaaggtcggcctggtcgagtttccgtcgcccggcatgtggtcgatcgtgctgatctcgcaatcgccgaacgaggacatcgcgcgcagcctgccagggcaggaagagcacgtttcggtgttcctgccgtgctcgccgaacccgaccacgggcttctttttctacgtccccaagagcaagatcatcgaggtcgacctcaccgcggaggaggccgcgacgctcatcatgtcggcaggcgtggtgcagccgggctcgacgcccgattcgaagaaggcggcggcgctcgccggcgtggcaaacgccgcgcgcattgcaaacgcctcgacgctcaagccggagcctgcgaaagtggagtagggccattcccgcgcgggatgggcccccttcacgccggtgatcgcatcctctgctagtctccgctcagccgggcgtgtcgctcggaattgagctggagtgcacgatgtcgaagatgacgtcaaagaccattgccatcctcgcccccggtgcgatgggcagcgcggtggcgcgccggctcagcgagaacggcgcacgcgtgctgacatcgttgcaggggcgcagtgaggcgaccctgaagcgggcggtggacgccggcatggtcggcgccaaggacgacgcgattgcggaggccgacatcatcctctcgatcgtgccgcccagtgaagcggtcgcgctggcagaacggctggccgcgctgatctccacgcgtgcccacaagcccatcgtcgtcgactgcaacgcggtcaatgtcgagactgtgcggcggatcggcgagatcatcgcctctgcgcaggcaccgttcgtcgatggcggcatcatcggttttccgccgcagccaggtggcaagagcccggccttctacatgtccggtgagcacgccagggacgtcatggtgctgaaggatctcggcctcgacgtgcggatcattgagggcccggtcggcgcggcgtcggccttgaaaatgtcgtatgcgggcatcgtcaagggcctcgccgggatcggctcggccatggtgatcgcggcaacgaaagcgggtgcggccgatgcgctccgcgacgaactggcactgagccagcccgcgattctggcgcggctcgaagtggcgttgcccgacatgattccgaaagcgtatcgctgggtcgcggagatgcgggagatttccggtttcctcgggcccgatcacccggccagccagatctacgagggcttcgcgcgctggttcgagcatctggccgaagatgcgaagggcgagggggcggacgcggagctgatgagggcttttgctgcgcgcgtcgcgcaaacgggggcctgatcgtcagcatgcactttggccgagattgtcgcgctgtattcacaacatcattgcgagcgcagcgaagcggtccagagcccccgcagtagtcctggattgcttcttcgcttcgctcctcgcgatgacgagggaggagacagcgtgtccaacggctagcccgcgccgatcagcgggatcgcctcgtctcgctcgtacaaatacagcaggcaccgcagcgcctcgccgcgctcgcccttgagcttcgggtcgtccttcaggatgcgtagcgcttcgtctcgagcctgggcgatcagctggccgtgcacctccgggcgcgcgatgcggtagccgggcaggccgctctggcgcacgcccaagacgtcgccttcgccgcgcagcttcaagtcttcctcggcgatgcggaaaccgtcggtggtttcgcggatcaccttgagccgggctttcgacatctcgccgagcggctcgctgtagagcaggatgcaagtcgacgcctccgagccgcggccaatgcggccgcgcagctgatgcagctgcgcaagcccaaagcgctccgcattctcgatcaccatgatggtcgcggccggcacgtcgacgccgacctcgaccacggtggtcgcgaccaggagcccgatctcgtgggcggcgaactggcccatcacgcggtccttctccgtgcccttcatctggccgtgcacgagaccgacgcgttcgccgaagcgcttttgcaggctctcgaaacgtttggtcgcgttggtgagatgctcggtgccttccgcctcggactcttccaccagcgggcaaatccagtagaccagttttcccgattgcaaagcgcggccaacaccgtccatgacctcgccaagccggctcatggcgacggcgcgggtgtcgacgggctggcggccggccggcttctcgcgcaactccgagatgtccatgtcgccgaaataggtcagcaccagcgtgcgcgggatcggggtggcgctgagcaccagcacgtcgacggcttcgcccttcgatgtcagcgcgaggcgttcgcgcacgccgaagcgatgctgctcgtcgacgatggcgagggcgagatccctgaagatcacatcgtcctggatcagggcgtgggtgccgacgagcaggtcgatctcgccgtcggcgagctgcgtgatgatctcgcgccgctccttgcccttttcccggccggtgaggatcgcaacccgcatgccggcgcgctcggcgagcggggcgatggtcttgacgtgctgtcgcgccaggatttcggtgggcgccatcagcgcggcctgcttcccggcttcggcgaccgcggcggcggccagcagcgcgaccacggtcttgccggagccgacgtcgccctggagcaggcggagcatgcgcacgggctgcttcaggtcctccgcaatggccgcggcggcgctgcgttgcgagggcgtgagcgcgtagggcagggcgtcgatgatcttgttgcgcaggtgtccgtcgccggcgttgcgcacgccggcgggacggcgcaactgcgcgcgaatcagggcgagcgcgagctggccggccagcagctcgtcgaaggcgaggcgcgaccagaacggctggtccggcaggatgtcggtgagctcggccggctggtgcacgcgggtgagcgcttccgcaacaggcgggaaattgcagcggcgcatcacctccgggctgatccattcgggcagcgccggcagcttttgcagcgcctggccgatcgcgcggcgcagagagccgagcgcaagtccttcggtcaggggatagacggggtcgatgccggagagctttgcaatcacctcctcgtcgagcacgcggtcgggatgcacgatctgcgggatgccgtcatacatctgcagcgtgcccgagacgaagcgcttctcgccgaccggcagaagcttctcgacatagcccggcttggcgcggaagaaggtcagcacgacgtcgccggtatcgtcgctggcatagaccagatagggcgcgcgcgcgttgcgcggcgggggcgggcggtggcgatcgacggtgacctccagcgtcaccatggttccgacggcggcgtcgcgcaccttcggccgggcccggcgatcgatgacctggctcggcagatgcagcagcagatccaccagccgcggcgtctcgctccggctgagcagatattgcaggagcttgtcctgcttgggaccgaccccgggcaggctggtcacgggagcaaacagcgggttgagcaggctggggcgcattggtgcaaactaagaccgtttgcggccgtgatggccggttttgtgcaagacgtctatggctttattccgtcccgacaatgatgcggaacgtccggatcggcctaaggccaacccggactcaacgctgccagacggcttgaaaattcgggcttttgaaccgcttgaccggccggccacgttcgagctgatcgtgggctgcatgagcttcgtttcgggccgcgatcgccgtcaactccgcttgcagcctgagcagcccagccagccggtccagcgccagcgccttgttccgatgttgcgaacgttcctcgcgcgcgacgacggaaaggccgctcggaacgtgaatggcccgcaccgcactctcggtcttgttctggtgctggccaccggggccgccggcccggaacgcttcgaagcgtacgtcctgggcgtcgatggccttcggtacgtcaggcagcggtggcagctcgaagatgccgatgaaccagttctttctcttgtgatggggcctcaacggactctgcgccgtccattggatcacaccgatccacggactggcgaaggcggccgcgggatcgccgtggacgacgacgatggccgatgccggaccatgcgcgtccggatttggtccctccagatagtcggtgtcgagaccgagcgcggtcgcctcggcaatgaggagagccgccgtcttcgcaacagcgatccggcattcccccggaccgcgcccgctggtcaacaggagccggatcatcggcgatcctccttccagcgcttgccgcgcctggcgtcccgcaccgcgacgctcgactgcgccctcttgaaggtcagcagcggccggaaggtcgccacgacgcgcgcgaggccgaactccacgaggtcggcgatgacgcgctcgatgctcttgtaggcgtcgggcgcctcctcggcgagcaggccgcgatcgccgcagacgacgatgccgccgaagggattgcgctccagccgtgcgacatcggacttcttgacccgaacgcgcccgtgcatggaggcgcgatcgtacttgcggccggcaccgtgtgcgagcgaagcaagtgcatcgcccggcatctccgccagtggctcgaccagataggacagcgttccgcgcgatcccggcaccggcaccaggccgcgatctgcgggggcgactcccttgcgatgtagcgccagggcctcgccagttgcgtcagcctgttgctcgatcatgttgtgcgcgaggtcgctgatggggcgcaggctcgcgcgtgctgccactcctgtccgctcagcaatgatgcgacgattgagtcttgcccattgcacggcgtgatcgtgcgccgccagataggcttgtccccggtcgcttccgatggggagcgcatctggtccatcacgcagagcctgctccaggatcgagaagccaaggccccgggagccggaatggaccaggacataggcaaggttccggtcgaggccggcccgcgcggccgcctcaggcgcgaggatctcgtcgatcgcttggacttcgcagaaatggttgccgccaccgatgctgccgagcgcggcatcgaatatgctcgcgccaatgcccgcgtcggccaattcggtttccacaccgccatcccagggccggtcgagcgcatgcatgcgttcggccagatgatcgagccgcagcttgcgtgccgcgatgtccagctcgaagaggcccatgccgcagccgatgtcggagccgaccagctgcggataaatccggtccgacagaatggcgcaaccgacggggccatatttgcccggatgcagatcgggcatggcagcgacggcccggactccaggtagcccagcgacgtgttccagttgtagtgttgcgttgccttcgatccatgaattggacgaggcgaagatgtggatcggcgcgcggccgtccacgttggcagaattgcccattgagaaagctctcagcagatagggatcgtcggcacgcgcaagggaatgcgcatgatttccctaaccgcgcggccagcgcacgcgcagtttaggcgatgccctcgacggggcggcgagacatgatcgtcatcgagccttctccctgatgatcgcgccaaatgggcgccggatcgggggagacacatagcggcgaaatggagaagtcgcaagccacaggcggtgtgcttccggcgacaaaaggctgctgacatttggaggtgcagggcctatatcacccccgcccggcacgtccgggctttctgcgtttgactggatctgagacatgacgggaacgacacgatcgagcgaggggctggacgaccgccgcaagcggcttctgttccgctgctggcatcgcggcacgcgcgagatggacttgatcctcggccgcttcgcggatgccgagatcggcaacctgtccgacgccgagctcgacgagctcgagcgcctgctcgaggtcaacgatcccgatctgtatgccgccatcagcggcgacaaggtattgccggcggacgtcaccggcgcgctgtttgcccgcatcaaggcgttcccgattgcggaacgcgacgtatgaagcaggggatgaaatcaccggccgagcagctgacgcccggccgtgccctgacgcttgccaatgtcgcggagggcgcggaagggctcgtcgtctccgatctcgcccgagcgatcgctgcgcggccgaagaagccggccgtcagcctcgctgtggtctgccgcgacggcgggcgcatgcagcagctcgagcgcgcactacggttcttcgcgccggatctgccggtgctgacctttccggcctgggactgccagccctatgaccgcgtctcgccgcatggcggcatcctggcccagcgcctgacgacgctggcgcggctggcctcgctgacgggcagcgacaagccgctgatcgtgctcacgaccgtgaatgccgtcgtgcagcgcgtgcccgcgcgcgagctcgtcgccgcgcaggcgctgtctgtcgcgcccggcaatgtggtgccgatggataccatcgtcgcctggctcgagcacaacggctacaaccgctcatcgacggtgcgcgagcccggcgaatacgccgtgcgcggcggcattttggatctgtttccggccggcctcgagcagccggtgcgcttcgacttcttcggcgacagcctggaatcgatccgctcgttcgacgccgagacccagcgcacgctgctcgacatgcgttcgctcgacctcgtgccggtgtccgagttccagctcgtcaccgagaccatccgccgcttccgcatgggctatgtcccgagttcggcgcgcccgagcgcgacgatgcgctctacgaggccgtcagcgaaggccgccgtcatcctggcatggagcactggctgccgctgttccaggacaggatggacaccctgttcgattatctgcaaggcgcggctgtcgcgatcgagccgcaggccgaggacgccgtgcgcgaacgcttcaagcagatcctcgactattacgaggcccggcgcgaggcaatggagcatcccgggggcggcgccatctacaagccgctgccgcctgatcggctttatctgaccgaagaggaatggggcaggcgcctcggcgatgtcccgctggcgcggctgacgccgttctcggtgccgaccgacggcaccagcgtggtcgacgccggggcgcgcaagggccgtgacttcgcgccggagcgcaacgacaccaaggtcaacgtgttcgaatccgtcgtcgcgcatgtgatggccctgcaggcccagcgcaagaaagtcgtgatcgcgctgtggaccgaaggctcgcgcgaccgcatgacctcgatgctgcgcgaccacaagctggcacatatcaccagcgtcaacagctggcggacggtgcaggcgacgccgcgcaacgaaaccatgctcgccgtgctcggcctcgaaagcggcttcgagaccgacgagattgcgctgatcagcgaacaggacatactcggcgaccgcctggtgcggccgcgcaaggccagccgcaagctcgacaatttcatctcggaggtgacgagcctcaccgccggcgacatcgtcgtgcacgtcgatcacggcatcggccgcttcatcgggctgcagaccctcgacgtcgccggcgcgccgcatgattgtctcgagctgcattatgccgccgagacgaagctgtttctccccgtcgagaacatcgagctgctgtcgcgctacggctccgaccagaccagtgtcgagctggataagctcggtggctcgggctggcagacccgcaaggccaagctgaagaaccgcatccgcgagatcgcgggcgagctgatcaagatcgccgccgagcgcatgctgcatgaagcgccgaagctgccggtgcagcagggcctctacgacgagttctgcgcgcgcttcccctatgacgagaccgaggaccagctgggcgcgatcgagtccacgctgaaggacctcgaaaagggccggccgatggaccgcctgatttgcggcgacgtcggcttcggcaagacggaagtcgcgctgcgcgccgccttcgcggtcgcgctcgacggcaagcaggtcgcggtcgtggtgccgaccacgctgctggcgcgccagcactacaggacgttcagcgagcgattcaagggctttcctgtcaacgtcgcgcaggcctcgcgcctgatcccgaccaagcagctcaacgaggtcaagaagggtcttgccgacggctctgtcgacatcgtcgtcggcacccatgcgctgctcggcaaggccatcaaattccgcgatctcggccttctcatcgtcgacgaggagcagcatttcggcgtcagccacaaggagcggctgaaggcgctgcgtgccgaggtgcacgtgctgacgctgtcggcgacgccgatcccgcgcacgctgcagctggcgctcaccggcgtccgcgagctctcgatcatcgcctcccccccggtcgatcgcctcgcggtgcgcaccttcgtcgccccgcacgatcccctgatgatccgcgaggcgctcttgcgcgaacgctatcgtggcggccaggcgttctatgtggtgccgcgcatcgacgacctcgccgaggtcaaggacttcctcgacaagaacgtgccggagatgaaggtcgcggtcgcgcacggccagatgccgcccgccgtgatcgaggacatcatgacggcattctacgacggcaggttcgacatcctcttgtcgaccaccatcgtggagtccggcctcgacattcccaacgccaacacgctgatcgtgcaccgtgccgacatgttcggcctggcccagctctatcagctccgcggccgcgtcggccgctccaagctgcgggcctatgcgctgttcacgctgccggctcagcagaagatcaccgcgcaggccgagcgccggctcaccgtgctgcaatcgctggagacgctgggcgccggcttccagctcgcttcccacgacctcgacatccgcggcgccggcaatctcctcggcgaggagcagtccggccacatcaaggaggtcggcttcgagctctatcaatcgatgctggaagaggcaatcgtcaacctcaaggccggcgtctccgagcccgctgccgaccgctggtcgccgcagatcaccatcggcatgcccgtgcttatcccggacgactacgtcagcgatctctcggtgcggctgtcgctgtaccggcgacttgccgatctcgacaccgaggaggagatcgagaattttggggccgagatgcgcgaccgcttcggcgtgctgccggacgaggtgcgctacctcttcaaggtcgccgcgatcaaggcgttctgtcgccgggccaatgtcgagaagatcgacgccggcccgaagggcgccgtcatcgtcttccgcgacaattccttcgcctatcccgatcgcctcgtgaccttcatccgcagctatggccaggcagccaaggtgcggcccgacatgaaggtggtgttcctgcaggactgggagacgcccgaggagcgtcttgccggcaccacggagatcatgcggcaattggcgcagctcgccgagagcaagaaggcggcgtgagcatgcaacttcggagccagcgcggttccggagtctgcttgcagtgtccagacagcgacataacgtcacttgcggatcagacggcgcgaggccatatcccgctcatcgagtttcggccgaacgacttggcctcgccgctgacaagcgcgcctgactgacgaccctccctccaaatctcgacgacgccgactgcgcctctcagcgcggtcctggacatatcatgttgaaggacgaccccaatgacgacgggaattgtgaagtggtttaacagccagaagggtttcggcttcattcagccggacgagggaagccaagacgttttcgttcatatcagcgcggttgaacgcgcaggcttgaataccctcaacgaggggcagaaggtttcttttgaaatcgttgcagaccgccgaactggcaagtctgcggccgagaatctgcgcgccgaataggtgccgcaatcgtcatgatgaagctttgaccacggatgtactggcagagcttcggttctcttgacccgcggccggtttaccggctgcgggtttttcataccggttgcggattgacccgccatcgaaacgactgagaaacgactgaggtggcaagggtgcctgttaacatcgatccggaccgcgaacacgacgacatcatgtatccgcaggttctgccgttcctgttgatccacgccggatgcgtcgcggcgatctggacgggcgtctcgtggcaagcggtcgggctttgcgtcgcgctgtactggctgcgcatgtttgcgatcacggccggatatcaccggtacttctcgcaccgggcctacgcgaccagccgggtctttcagttcatccttgccttccttgctcagagcagcgcgcagaaaagcgtgctgtggtgggctgccaagcaccgccatcatcaccttcactcggacacagcgcaggacgtgcattcgccccggcacaaggggttcctctacagccatgtcggctggatcttctatcgtcagcatgatgggaccgacctcgtcaaagtggccgatcttgcctcgtatcccgaactgatgtggctgcacaggctggagttgctgccggcagctgcgctggcgggtctgtgctttttcgttgccggctggtccggactcgtggtcggcttcctctggagcaccgtgctgctgtatcacgccacgttctgcatcaactcgctggcccatgttcacggacgcaagcggtatgtgactggtgacgactcccgaaacaactggctgctggccctgttgaccatgggtgaggggtggcacaacaaccatcacgcctatcaggccagtgctcgacagggcttctactggtacgagatcgatctgacctattatgtcctggtggtcttgtcctggttcgggatcgtccgggacttgaagatgcctcccgctcaggtcctgcgcaatcagcaacggttgggatcgcgcgtggtcaggcaggcggcggaacagctcgccgcccgtttcgattccgagcgcatcgcgctggcgatccggacctcgatccatgaaaccgaattgtcggtccgtgatgctctcactctgttgcagcagcgtgccggcgaacgtttgtccagcatgccaacgcgcgatcagctgctggctgaagcgcagcgcatgttcgtgaagaccatatcgctggacgacattgtcgaccgtgcctacgagctcctgaacgattcggtcggtctgctcctggcggctcccgctgtgtcgattaaggcgaaagcggagggtggcgtttagcgcggcgatacccatataggggtatgacacattggcagaagtccagttcgcggcaagcacccaagtccaaggccgaactccgggagatgctgaccgaagcggtccgcaacacgcgacccgtccctagccgaagccaggcaaaggcgccgccgatccccgaagagccgtctatttccaatcaggcgttcaaggtcctcccggccgttcgctaaccggagcaggagccgtatgcgcaagtttcccgatcccaccgaccaagaactgagtgaggggccgcaagccgtggccttccaaatcgcgaatgggaacacgcgacagaactgtatcctgcaaacgaacttgccgaccaaggtgcaagcgcagcgatatcttctcgcgaactggccggccgtcgagaagatggcccgcgacgctctcgcgctggggaagttcgagaacggcgagatcaggctcgtgatgccgtagaggtagcggccggcgtcaacgaacccgtcaagtcaagagatactttatcggctacgacgccgcccgcgacgcctctgcggacagccgtgccagcagggaccgcgctgtgtccgacggcgacagcgagtccacgctgacgatgggatcgctgcgcatctcgtgcttgccgttcgaagtgtgccgcatcaccgccgacaggcggcgggcgatcatgtgggcggtgcggaaatcggtctcggcgaacacgacgatgaccgagccatccttctgtgcagtgccaaaatccatctgccgcatcagacggctgaggatgcgcgcggcatcgagctgggcgcgggaattgttggcgtcgaaggcgaagcgcgcgaccgacaaaccgccgccgcgggcgagcgtctgctcgaccgccttggcgaaatcgcgggcgaaggcttccaccgtcaggaggccgctgcgcggatcgagccagccgcccgcatcgatcgagcgcagcgtgcggcttagctgcgcttccatcgcgtgttgacgaatcagcggcagcgcattggcggcgattcttgccggctcgcccgggatcagctcgagattgggaaggtcgtaggtctgcgtcagctggtgcgcggtgacgatcacgggcaggctgcggaagcgggtgtcctcggcgaggacggtgagaaatgcgtcggtgacgcgcgcggtaaagccttcggcgagcacgacgccgtcaaggtcgcgggtattgaggtgtttggcggcggcctcgatcgagagcgcgccgaccacgccgacgcgttcaccgaacgccacggagagcgcgggataggccgcgccgcgaccgatcaggagtacggtcgcatcgcgtgcgggatcgccctgcggcagcgcgaccttcacttcgggtagccggcgcagcaccgtggcatgaagggtgcgcacccgcagcgcagcgcgaagccgtgcgatcagccgatcgggattgccaccgcgcgaggagaagggcagggcgttgtgaggctgcatgcccgccgcatcgagggccacgaagggcaggtagggcgattgatccgcgatcttccttgcgagcgttgcgatatggggctggtgtccggcatgcatcgcggcgaggacagcggccggctgcacctcttcgaccgcgcgtgtcgcgccagcccagtcggtgtcgacgaccggaaagagccgggcctcgtcgagcgccgccacgaaaccggggcgtccggcatcggacacaaacaggatcgggcccgcctgggacatcgcaaaactctgatcacgcaacagatgccgcgcaatctagttcggccggcttaatgcggcgtcaacggaactggcaaaactgtgtctaggccggcccggagcgatcgcgaaaagcctcgaccatcagagggttaagcccaagctcgctgagcgcctcgcgggcgcgggcattgtcctgggcgcgtccggccagccggtgacccgagaggcggtcgggcagcgccgtgagcagggcgccctggccgagccgtcgggcccattcctggagatcgttggaaaggaagcggtagccgccgacggccatgatgccggaagggggcgcagtgatgcagatcgcgccgctcggacggtcgagccgtgccgcatagcccgtgtcgacatagtcgcggggcggctgcgccgtcagcgtctcgccgactggctgcggcggagcataggccgcgatgggcaccatcgcgccgcgcaggccgagcgtgcccttcggggtcagcaggatctcgccggcaatggaggacccggattgttcgcgcggggcgccgtgcggcccgggcatgaccggcaccggcatgccgtcctcgccgcggcgggcgccgaacagcccggcctcgccgaacagatagacgtcggtcagcggtgcatgcggcgcgatccaggcatcgcttgcggcgacctgctcgggcgcgcgccacaggccgatgacgttgcgcaatgagggcatccgcgccgcgaggtcggaaacgccgaggcgcagtgcgagctgggccggcgcgatcagcacctcgcattcgtgcgcgttgatctgctgctccagcacctcgttctcgaagggatggtgcagcgccagcgcgccacccgagagcagccacacggcaagggaggaggcgaggccagcgaacgacatcggcgcgaacgccgccatcacggtcgcgccctgcttgatgtcggcttcgagcgacatcgcgagtccaccggcgatcaggctgaaatgcgggcgcggcaccgggcgaaagccctcggcggtgacgtcgaaggagatcatagccgccttgcggccgtcctggatcacggcccgcgtggtgccgggcgggcgcgccagcacgtcgtcgagcgacgccatgccttcgggcaggtcgcttccgaagccgtagacgtgccggatcgagaaggcttctgcggccgcatgcatcgcaagatcggcgtagctgacaccatcgaccgtgctcatggtgacgatggcgcgcgccgcggtgcggttgagggcggctgtcagttccgcatgccgccagagcagcggcagcacggcgacgacgaggccggcgcgatgggcggcgagcacggtgagcacgaactcgaccgtggcaggcagctggatcgcgatgacggagttggcgggcaggccggattcgacgaaatgcgccgacagcgcctcgatggccgtatcggcctcggcataggtcatccgccgcggctggtgcccggtcacgcgcgccttgttgaggggatcgagcagagcgagcgcgtgcggctgtcgcatcagcgtgcgctgaaacaacgtgtcgagcgtcggcgatattgctggctggttcacggcgtcactttgcttgatgagcttgcggctgccctttcgaccaccaggtctccggcaagtagccggacagcgaagtggccttcggccgttctatccgattccagcgcgcgatccattgctccgatacgttaaacagggggattgtgtagaagcccgcgatcagggcgcggtcgagcgcgcgcaccgccgagacgaagtccgtatgttcacgggcctcgagcagggcggcgatcatggcatcgacggcgggatctctggcgcccatgtagttgcgggtccctgggttgtctgcggcggcgctaccccagtagaaatattgctcgttgcccggcgagagcgactggtcccagcggttctggatcatatcgaactcataggcgagccggcgctggtcgaactgcacgggatcgaccgagcgcacggtcggctcgatgccggcacgcctgaggtcgcgctggaacgcgagtgcgatgcgctcctggtcacgggtcgtgaccatgatctcgaaggtgaagggagccttggttgcacggttgcgcagcacggtgccctcgagatcgtagccggcctctgacagcagcttcagcgcggcccgcagagtcgtacggtcccggcccgaaccgtcggtggccggcaggcggtagctgccatccaggatgtcgggcgggatctgtgcggcgaagggcttcagcagctcacgctcgcgcgcgtccgcaggacgcccataggccgacaggttcgagccggcgaaatagcccgcgacgcgcgaatagagcccgaagaaatagttgcggttgaccagctcgaaatcgaacagcagcgtcagcgcctgccgtacgcggatgtcggcgaagatcgggcggcgggtattgaagaccaggaattcggacggttgcggcacgccgggcttgatggtgtcgcggatcacctcgccggttctcgccgcaggaaagtcgtagccatcgtgccaacgtagcggctcgtgctcgatgcggaaatcgtagaggccgcgcttgaatgcttcgaactggccgttggcctcgcgaaaataatcgagcctgatctcgtcgaaattgtagagcccgcgattgatggcgagatcgcggccccaatagtcgggattgcgcgtgagcgtcacgctggcgcccggcttcaccgcagtgacccgataggggccggagccgaccggggccgccagcgtcgtctcctcgaaggtcgcgacgtctatcgcgtgcttcggcaggatcggcatcaggccaaggatcagcggtagctcgcggtcattggcacctgcgaggtcgaagcggacggtgagggggccgagggcctcggccttggcaactttggcgtagtactgccggtggttcgggcggccgtggtcgcgcagcagttgccaggagaacagcacgtcctcggcgaggaccggcttgccgtcggagaagcgggcgcgcggatcgaggcggaacgtgacgaacgtccggtcgtcgtcggtctcgaccgacctggcgagcaggccgtagagcgtgaaaggctcatcctgcccgcgggccagcaagctctcgaccacgtagttgcggacgggctgcaccgccaatcccttcacgatgaagggattgaggctgtcgaaggtaccgagtaggccccaggtcaggcgaccgcccttgggggcgtcgggattggcatagggcatgtgggtgaaatcggcagccatggccggcttgccgtgcatggcgatagcgtgggactgctccgcccgggcgccgccggccgacagcccgagggcgagggccagaaccagggcctgggcgagacggcaaaggccgggtcgggggccctcgacgaggcgctggaacatgaacatcggcacacgctgattcgaggaccggcgggcctgaatcctatcacagggaatttcccgcagcgcagctgtggatgttgccaaagacgcctgttggcattgatcttttcgtcggccacgttaagaaggcagccaatcgcgcaagagcgtcgagcccgtcacttatccgcctcaattgacggggagagagccgcgcccaaggcggccaggttcggcgcttcggagcggttcgggcacttcccgttcagaaagggttttccgcaatgaatttccgtaacttggccgcgtccgtccggccgcgcgggcgacttctcgtcctgttgacggcgacggcgttggtcgtcccgtttgccgctgaggcccagactcccgcaccggctcccggcgcgcccaaggcgactccggctccgaaggctgctcccaaggccgctcccaaggctccggcgcccgcagcgtctccgcaggctcagccggctcccggccagggcggccagcagcagggcgccgcccagccggcggatcagcagattcagctgatctacgccccctggaccaagttctgcctgaagggtcaggacgccaacgccaagcaggtctgctttaccggcaaggacggccgcatcgagtcgggccagccggtcatcgcggccgtgatcatcgagccggaaggcgagcccaagaagatccttcgtgtcacgctgccgctcggcatgcagctcgtgcacggcacccgcatcatcgtggacagcaatgcgccgctgcagcagccctacgtgatctgcttccagaacggctgcatgtcggactacgaggcgacgcccgagctcatcaacagcatgaagaagggccagaatctcgttgtccaggcaatcaatgccaatggcgccccgctgaccctgccgctgccgctcgcgggcgaattccagaaggcctatgacggtccgccgaccgatccgaaggtgttcgaggaaacccagaagaagctccaggaagagcttcagaagaaggccgaggagcagcgcaagaagctcgagcagcagggtggggcgcccggcgcagctccgaccggtcagaagtaatcggcagatctgaatatgaaaaaggcgctcgctcgagcgccttttttgctggccgcctgtcgtcgaggaatcagttcagcgacggattgcgcgggcgatagccgccggccttgtccttgacgaaaatctcggcgacctgggaatgcctgaccggctcgccggaatcgtccggcaagaggttctgctccgaaacataggcgacgtattcggactcagcgttctccgcgagcaggtgatagaacggctggtccttgtggggccgcacctcttcggggatcgatagccaccattcctcggtgttgttgaattccggatcgatgtcgaagatcaccccccggaacgagaagatccggtggcgaacgacctgtccgatctggaatttggcggtccgcgctttaatcattccccgtcgatagaccaggattgtggccgatgctagtggccttatccggaattaaccttcgcctcaggggcagatagcccgcaaattctcagaaaatacttcaataatggccgacatcctcaatctagctctaccttattttggattgatcttcgtcgggtttgcctgcggcaaggtcaaggccctgccggaatcggggctggcctggatgaacttcttcctgctctacgtgtcgctcccggcgctgctgttcgcgatcatgtcgaagacgccgttcgccgatctgaacaacccgccgttcctggtcgcgactacgctgtcgacggtggcagccttcacgctggcgctggtggtcggcaaggtgtttggccggctgaccttgcgcgaggcaaccctcgcaggtctctgcggcggctacggcaatatcggctacatgggtcccgggctcgcgctcgccgtgctcgggaccaaggcttcggcgccgacagcgctgatattctgctgcgacagcatcttcctgttcacgatcgtgccgctgctgatcgaactctccgaccgcgaccatccctcgctcgtccatgccttcggagtcgtgctgaagcagatcgtgctcaatccgctgatcatgtcggcctgcttcggcgccgcggtggcggcgctgcatatcgagatgcccgtagcgctcgatcgcacgattaccttcctgcagaacgcagctgccccaactgcgctgttcgtgctcggcgtgacggtggcgttgcgcccctttgaccgggtgccgtgggaagtgccgggcgtgatcgccgtcaagctgctgttccatccgcttgctgcattcggcttgatgctcgcgttcgggcccttcgcgcagccgtgggcggccaccgccgtactgatggcctcgctgccaccggcgctgaatgttttcgtgattgcccgacagaacgatgcctggatcgaatccgcttcggtcgcagtgctgcttggaaccttcgcgtcggtggtcacgctgatcagcgtgatgtggataatccagagcgggcggctgacgtttccctgagtggcgaccggcgacaggatgttcacctcttccccgcggggagaggtgaagcgaggctcgcgcggggatcgaacgcagctagcgccgccacgtcggtgtcaggccctcgcgcatggcaaaacggcggagcgggccgacagcgccgagcaggtgcatgccgacggcgcggaccggctggagcggcaggaagtcgttgagcagggagcggttcgcgatgtcgatcgcaaaggtgcggctcaaaatgtccggccgtcgcgcccggtcatagcgtctgagcacttcgtccgcgccgggatcctggcccgcggcgatcgcgtcgctcgcgagcctggcaatgtcggcagcatcgcgaaggccgagattgaggccctgtgccccgatcggcgggacaacatgggcggcttcgccgaccagcgcaatgcgatcgcggccgaaggattttgggcgttcgatcgccagcgggaacaggttgcgcccgggttcgaccgtcatgcggccgagaatcgaatgcgactgcttctcgatcgcggctgacagttcctcatcgctcagggcgcgcagacgctcggcgtccgcagaggtcgagacccacacgatactgcagcggtcgcccggcagcggcacgaacacgcaaggcccgtgcggcgtatggaactcggtcgacacgttgcgatgcggccgggcatggctgacgttgaaggtcagcgcggtctggttcagatcgcgccgcgtcacctcgatgccggctgcttcgcggcacagcgagtgccggccgtcggcgccgaccacgagccgggccgaaagaaattgtccgcaagccgtgcgcaccgagacatcgtcggattcgatgacgacgctttcagcctcgtcgtcgaagcggacgaggttcggcaactcgacggcgcgctcttccagcgccagcatcagcgagcggttgtcgatattgtagccgaacgcatcgaggccgatctcgtgacaggagaaccggacctccggcgcgcgaaacagccggccggtgtcgtcgacgagacgcatcacctccagcgctgcagccttgtccttgcagcgtggccagacgtcgaggccttccaggagatcgatggaggcgcccaacagcgcggtggtgcgattgtccgcatagggcgcacgccgcgccaccagcgccgtccgcgcgcccgcctgcgccagtgcgatggccgctgcgagccccgccggtccgccgccgatcacggctgcgtcatggagtgtcgatgcgtctgtcatgaacgacaaatgacacgccctgcggcaaattcaagcctgctgattctacctgcttccatcgttaatcgtgcgacggagcgccgcaatggcggatgtgcaaaccggtcccattctgatagcagaagccatggacacccagcaggattcactcaagccaagaccggcgatccgcgccgcagccttctcggtgcacatcttcaccgcgttcggcgcggcgctcgcgctgcttgccatgctggaggccgtgcgcgagcactgggcggcgatgtttcagtggcttggcctcgccctggtcatcgacgcgatcgacggaccgatcgctcgccggctcgacgtcaagaacgtgcagccgaactggtcgggcgacgtgctcgatctcgtggtcgacttcctcacctatgtcttcgtgccggcctatgcgatcgtggccagcggcatgctgctgccggtggccgctcccttgctcggcatcgccatcatcgtcaccagcgcattgtatttcgccgatctgcgcatgaaggccgacgacaatcatttccgcggcttccctgcgctgtggaatgcggccgcgttctacctgttcctgctgcactggccgcctttgtggtcgacgctgctggtggccgcgctcgtcgtgctgaccttcgtgccgttccacgtgctgcatccggtccgcgtcgtgcgtctgcgctggctgacgatgtcgctgatggcgatctgggccgtgctcggcctctacgtgctggcgatggattttcgcgtcggtagcggcgtgaccatcgtgctctgcgccatcgcgctctggatcagcttcagcgacaccttgatacgcctggggagatcgttcgcatgatggagcttcttgccagccccgaagcgtgggccgcgctgctcaccttgacggcgctcgagatcgtgctcggcatcgacaacgtcatcttcatatcggtgctcgtctcgcgccttcccgaggcgcaggctcaccgcgcccgccagatcgggcttgcgctggcgctggtcttccgcctcatcctgctcagtcttctggtctggctgatcggcctgaccgagccggtgctctcgatgaagggctacgccttttcctggcgcgacctcatcctgatcgggggcggcctcttcctgatcgccaaggccacgcatgagattcacggcgaggtcgaatccgatcacggccggagcgagaagaaatccacaggcagcgccttcttctgggtgatcttccagatcatcgtcgtcgacctcgtattttctctggattcgatcatcaccgcgatcggcatggcggaggacatccgaatcatgatcacggcggtcgtgatcgcctgcgcggtcatgtacgtttcggcggggccggtgtcgcgcttcgtcgcggagcatccgaccacgaagatgctggcattggcattcctggtgctgatcggcgtcgcgctggtcgccgacggattccagttccacattccgcggggctacatctacttcgcgatcgcgttctcggcggcggtcgagctcttcaacgtgctggccagacgcaaccgcacgaaagccgggaactagtcgtgtttggcccgcctcgatcggcctcgagttgacaaggcgggcgcgatggctttcgcttgcccgcgaaaagaggaggtcgactgatgaccaaagccgtccgtgtgcacaaggtcggaggccccgaagccctggtctatgagagcgtcgacgtgccggcgcccgggccgggcgagatgcgcatccgacagcatgcggtcgggctcaacttcatcgacgtctattaccgcaccggcctttacaaggcaccggggcttcccttcatcgcgggtaacgaggcctcgggcgatgttgtcgcggtggggcccggcgtcacgaattttcatcccggtgatcgcgtcgcctattaccacaatctcggcgcctataccggcgagcgcaacattccctgggagaagctggtcaagctgccggaccacatcacctacgagcaaggcgccgtgttgatgctgaaggggctgacggtctggtatctcctgcacaagaccttcaaggtcgagccgcatcatcgcgtgctgatccatgccgccgccggcggcatcggcctcttggcctgccaatgggcgagggcgctcggtgcgcacgtcatcggcacggtcggctcgcgcgagaaggccgagcttgcggaggccaacggctgcgatcacgtcatcctctacaacgaggaggatttcgtcgcccgcgtgaagcagatcagccgcaacgagggctgcgacgtggtctatgacggcgtcggcaaggcgacattcccgggctcgctgtcctgcctgaagccgcgcggcatgttcgtctccttcggcaatgcctccgggcccgtgccgccgttctcgatcgccgagctgaacaatcacggctcgctgttcgcgacgcggccgaagctcaacgactatgtcggcacgcgcaaggaactgctggaaggcgccgacacgctgttcgcggccgtcatcaacggcaagctgcacgtgccgatcaaccatgcctacgcgctgaaggatgcggcgaaggcgcatatcgatctcgagagccgcaagaccacgggcgcgtcgatcttgaagccgtagcttctcgtcattgcgagcgaagcgaggcaatccaggactgtcgccgcggagccagtccggattgcttcgtcgcttcgcttctcgcaatgacaaggatggacctacgccacgcgccgtgccgcgccggccttggtcaagatcccgtcgagacaatcgaccatctcggcgatctgcgccttcgtgacgttcagcgccggcatgaagcgcagcgtgtcgacttgcggcgcgttcaggagcacgccggcctcgaacgcctgcgcgacgatgccgggcgcgattggcagcttgaggtcgagcgcgagcaggaggccgcgcccccgcacgccgccgaggccgtgccgggccgagactttctgcaactcgctttcgagcaagaggccggtctcggcgacagccttcaggaagtctggcttgctgacctcctgaagcaccgccaggcccgccgcgcacatgatcggattgccgttgaaggtgccgccctggtcgccgtgctcgaagcaggaggcgcgttcggtcgcgagcagggcggcgagcggcacgccgccgccgattcccttgccgagcgtcatgatgtccggcgcgatgcccgtgtgctcgtaatggaagagttttccggtccggcccatgccggtctggatctcatcgaaaatgagcagcatgccgtgcgcctgcgtcagcgcgcgcagctcctgcaggaactgatcgctcgccggccatacgccggattcaccctggatcggctcaagcatgacggcgacggtgttgtcgttgatcagcgcttcgaccgaagcgatgtcgttgagcttcgccttcttgaagccggcgaccttcggctcgaacagcggctcgaacgccttcttgcccgaagccgacatcgttgccagcgtccttccatggaagccgccttcgaagctgatgatctcgaaggcgccgcctttgtgcacgctgccatatttccgcgcgagcttgatcgcgccttcattggcttccccgccggaattggcaaagaacacctggtcgaacgcactgttctcgacgagcgcctgcgccagcttcaggcccggttcgttgtagaaggccgggctcggtgtcagcagccgcctggcctgcgcgccaagtgcctcagcgaccgcgggcggggagtggccgagacagttcacggcccagccctgcacgaaatcgagatagcgcttgcggctgtcgtcccagaggtaggagccggcgccgcggacgaatacggccttgggccgtgcggtgatgtccatcaacgcatcatacggatgggtggcggtggtcatgtcgaactcctctggggcgggtggaaaagggacgcaaaagcaagaaggccgcactttgcgggtgcggccttctcgaaaactggctgagctctaatgcttcagcggcgtcgtcggacatggcgcaacccatcatcgtcgcgggtgcgacgacggaaagctgcgcggcggtgggtccgagaattgatcatggggcgcgtccctacagctgaacgtgagggcttgtcaagcggaggtttctcgggatacccgccggtccgtgggtcgatcatgtcggacgcgcggcttcctcggcatcctcttcgccccaatcggcgtctgcaatcgcggtgtcgatgagctcgccgcgcatcagcttgagcggtgaattccagtacagtgcgatgttgtggaacgggtcggtcagcaccttgaacacccagacgaggccggtcgtgacgtcgcgcgtgacgaagagctggagcatgcgcgcaagtccgccgccgatgccgatcgcaagccagagcgtgccgacatgccggatgaagtcgaggcgagtggccggcgcatcgaacaggccgaacagcgtcggatacaggtagagcgcgatcggcgcgctgccccacaccagcagcagcacgatcttgcgggtctggttgtagccgaccttgatcgcttccttgtagtcgttgctgacgtcgttgacggcgtcatagccgttcggctcaaagaagaagtggccggtctgccgcgtcagcatcgcgagccagccgacgatgccggcgagcgccgggtccttgaacagaagggcgtagctggcgaggaagatgacggcgctgatcaggtgcagcgtctggttgaccgtgctctggtggtagaagcgatagtcgtcgaagcgctgcgtgcgcagcatgtccggaaggcggctcatccttgttcctcgctcgcgttgaaagcgcgggcagagttaggacgagtccgtgacccctgcgtgaatgcactataatgtcacattctggcgcggccggttcgggtgcgtctcagccgatacgccggattgccctgctgcgctcgcaatgacgggtggctcagaatccggcaacgctgccgtgcaggtcgtatgcatcggcgcgctcgatcttggcggtgacgatctcaccgacacgcagcggacggcggctcgtgagatagactgcgccgtcgatctccggcgcatcggccttggagcggcccttggccacggtcgggccgacctcgtcgatgatgatctgctgccgggtgccgaccttgcgcttgagacgtcgggcggagattttctgctggcgcgccatcagcgcgtcgtagcgtgcctgcttgatctcttccggcacgggattctcgatcgcgttcgcggtcgcgccggcgaccggctcgtacttgaagcagccgagacgatcgatctcggcttcatccagccagtcgagcagatattcgaaatcggcatcggtctcgccggggaagccgacgatgaaggtcgagcgcagcgcgagatccggacattcctcgcgccagcgcttgatgcgcgccagcgtcttgtcctgcgccgccgggcgcttcattgccttgaggacgttggggctcgcatgctggaacgggatgtcgagatagggcagcaccttgccctcgttcatcagtgcgatgacctcgtcgacatgcgggtaggggtagacgtattgcagccggacccaggctccgaactcgccgagctcgcgcgcgaggtcgaggaatttggcgcggacttggcgctccttccacgggctctcggcgtatttcagatcgatgccatacgccgaggtgtcctgcgagatgacgagcagctccttgacgccggcgccgaccagtcgctcggcctcgcgcagcacatcgttggcggggcgagagaccaagtcgccgcgcagcttcgggatgatgcagaaggtgcagcggttgttgcagccctcggaaatcttcaagtacgcgtagtgccgcggcgtcagcttgatgccctgtggcggcaccagatcgagatgcggattgtgcgttggcggcagcgcgcgatgcacggcgtcaagcacgctctcatattgctgcggaccggtgatggagagcacgccgggataggcctgctcgatcgcttccggttccgcgcccatgcagccggtcacgatcaccttgccattctcggccatggcctcgccgatggccgaaagcgattcctgcttggcgctgtcgaggaagccgcaggtgttgacgatgacgatgtcggccccgtcatgcttgcgggcgagctcgtaaccctccgcgcgcaggcgcgtgatgatgcgctcggaatccaccaatgccttgggacagccgagcgaatggaaagagatgcgcggcgcacctttaaaagtttcgctcaaagcgagtatcctgaattttgcagagatttcgatccaagtaactgttgtgatagcgaaattcaatccctttcgaatgtgccgtctgtgataaagtaatgcacgctctcggcgagtggaatccaccagtgcctagggagcgggatgcttgcgggtaatcgatgaacccagctctgtacgagggttatttggcgcggctggccgagggacgacggaaggacgcggcggtgatgctcgacgcgtttctccgatcgttcaattcttccgcggaacgggagcaatggacccgcacgtacttgaacacccatacctatggcgcgagagttcggcatgagatctacgccgaactcatattcccggttttgctggccgggagtaaacgaaatgatgcttggagcctctactggctggctggaacctgccagaatttatacagcgcacataggctgtatgcgctgataaagttcaaaggaaagactgatctgctcaaggaggcatatgcgatagaccgtacctcaaccgaggtgcgtcaagcgttgctgaaaagtctgttggatgatttcgcttacgccagtcatgagtggccggccggtatattgtggagcatgaacggggctacactggagcagtgcaacgaattcatgtccgaggtgaccttagcgcgagagttggaccgtgaaagtacctatgcgtcgtcgatcgacgagttcgagagcaaggtcaagcagtacaaaaagcgactgatgtctaatttggggacgagctacaattttgagccccactaattgcgaccggtatgaggtgcgaccggcaacgctcggtcgagcatgtgagtttctgcttggcatccgaaagcggacgtctcgccttgatgagcgcacgaaccgctggacgagctgatagttcaaatgacagccgcctccgggcggctttttctttgggcagcgcggcccggatttctatacattcgttgtctcagggacacccgagcgacacgaagctgaccttgggcgcagccgtctgatccatatctgaactgcctgattgacgggcctcagctagtcccaattgcccgcaattacaaccctttgcagggcgatccggcgtgctatggatggatcagctgccgccgagtgagccatgagcgccgaacagtcgcccaaaatcgtgatcgtcgacgaaagcccgatccgggctgcgatcctggaggaggggttgcgggaggccggattcacgcaggtcgtccacatcagcgaaatgcagagcctgcttgcccgtatttatgcggtcgatcccgacatcatcctgatcgatctggagaaccccagccgcgacgtgctcgaggcgatgttccaggtcagccgtgccgtgaagcggccgatcgccatgttcgtcgatcagagcgattcagcctcgatccaggcctcggtcgaggcgggggtgtccgcctatatcgtcgacgggctgaagaaggagcgtatcaagccgatcctcgacctctgcgtgtcccgcttcaacgctttcgccaagctccaggaggagctggagcgaaccaagtcgcagctcgaggaccgcaaggtcattgaacgtgccaagggcatcctgatgaaggtgaagggcctgaccgaagaagaggcctatgtgctgctgcgctccacagcgatgcgcgagaagaagaaaatcggcgagatcgcgcagtcgatcatcaccgcgtcggagatgctgaaatgaccgccaccctccgcatcgggttcattccgctggtcgatgccgccgccctgatcgtcgcggtcgacaaggggtttgccgccgccgaagggctcgacgtcgagctggtgcgcgaagtctcctggtcgaacgtccgcgacaagctcaatatcggcctgtttgacgccgcacatctcctggcacccgtggcgatcgcgtcttcgctcgggctcggccacgtcaaggtgccgatcgcggcgccattcaacctcggtatcaacggcaatgccatcactttgtcgccggcgctccatgccgcgctgatggagcagatcgacggcgatcgtttcgacccgatggtgaccgcgaaggcgctggcgaaggtggtcgccatcaggcgcaaggcaggggccgagcctctgaccttcggcatgaccttcccgttctcgacccacaattatcagttgcggttctggatggcagcggccggcgtcgatcccgacgaggatgtgcgcctcgtggtgctgccgccgccctacatggtcgacagcctcaagaacggccatgtcgatgcgttctgcgtcggcgcgccctggaattcgatcgcggtcgatctcggcatcggccacatcctgcatttcgtctccgacatcctggtccgtgctgcggagaaagtgctggccgttcgccaagcctgggcggacaagaatccggacgtggtcgcagcgctggtgcgcgcggcggtgaaagcggccgagttcatcgagcatcccgagaaccggaccgaggcggcgcaaatcctggctcagccggagcggatcggggtcgacgccgaggtcatccagcgcaccctcaccggacgcctcaagatctcgcccgacggcactttccgtgagagcggccgctatctcctcgttgggcgcgaaggggcagggcgccccgagccggtccaggccgcctggctctatgctcagatggtgcgctggggacagacggcgctgacccccgatggtgtcaagacggccatggcggtgttcaggccggacctctacgatgcagcccttggcagcagggcgcccaccgaggctcccgcggccttcggcgccttcgccggccccgtcttcgatcccgccaacatccgggggcaccttgaagccttcgcggttgggcgctggaaggcctgattcgccgctgcttcgtttttgagcgcatcggtccccttggctaatgtttgggctggctgctcgaatttcgggagagctgcccggcggggtgccccggcactctgcctcaaccgtctgacatcactgatgtttcagtctcgaccaagctggcacgcaacttgaatgttgcactgcggccagcttgtcataggtgcctgctgagccaagtcccgcagcaacgaagctgatcggaccgtgggtgacgaagccggcgctgagccggcccaagctcccccgcgggtcgcgccaacctcggagccactctggtggccgcaggagcttcgttagcaaccatgaaaatcgaaacgctctcagtcgactttaccgacgagcagaagcgctatctcgaaggcttcacgacgggcctgcagatcagccgcgtcggtcgcgctctgggcggcggcgccgtcaaggcgagcgccgagccgaccgggcccgatgccgtgcacatcaaggcgcaggacagggtgattgcgtcgggcaagaagcttgccgaccaggagaagttcaagcgcgaggagcatcctttcgacgcctatccgcggttgcgccagcaggcgctcgacaacgcggcgccgagcccggccgacaatttccgctggcgctattacggcatcttctatgtcgcgccgacgcaggattcctacatgagccgcctgcgcattccgaacggcatcatgaagcactggcagctgtccggccttgccgacctcgccgacgagctatgcggcccctactgccacgtcacgacgcgcgccaatcttcagcttcgcgagatcccgccgaagcacgcgatcaaattcctcgaaggcattcaggaactcggcctgtgctcgcgcggctccggcgccgacaacatccgcaacgtcacgggaacggcgaccgccggcatcgatccacaggagctgctcgacacgcggccctatgcgcgcgagtggcactaccacatcctcaacgaccgttcgctctacggcctgccgcgcaagttcaacgttgccttcgacggcgccggcaggattgcggtgctcgaggagaccaacgacatcgcgttcacggcttatgaggtgaaggacggcttcggcgtcgagcccggcgtctggttccgcctcggcctcggcggcattaccgggcacaaggatttcgccaaatattccggcatcatcgtcaggccggagcaggcaaccgccgttgcagacgccatcgtgcgcgtgttcatcgaccacggcgaccgcaccaaccgcaacaaggcgcggctgaaatatgtgctcgatgcgatggggcatgacggcttcgtcaagctcgtcgaggagcggctgaagacgccgttcacgcgcgtgccggaggaggcgttcgcaccacgccccgcggcggaccgcatggcgcatgtcggcgtgcacaggcagaagcaggagggcctcaactggatcggggtgtcgctgccgctcggcaagctcacctccgatcagatgcgaagcctcgccaagctcgcgcaggatctcggtgacggcgagatccggctgacggtctggcagaacctgctcatctcgggagtgcgcgacgagaacgtcgagcttgcggttgcggcgatcaagcagatcgggctcgcggtcgaggcctcgcacatccgcgccggcctgatcgcctgcaccggtaatgccggttgccgcttcgccgcggcgaacaccaagcgtcattccgccgagatcggcgactggtgcgaaacgcgcgtggcgatggataagccggtcaacatccacgtcaccggttgtcaccattcctgcgcgcagcattacatcagcgacatcggcctgatcggcgcgcgcgtgccggtcagtgaggaagacaccgtcgagggctatcacctctttaccggtggcgggttcgggcccgacgccgacatcgggcaggaggtctaccgcgacctcaaggccgaggatgcgccaaagacggtcgaacgactgctgaaagcctacatggcgcatcgttcgtcgcccgatgaaaccttcctccatttcgcgcgacgccatgacggtgaaacgctgcgcaagctggccgatgcacaggtgtccgcatgaaccagatcacccctccgccgaagctcgacctcattcccccaagcgcaccgttctccgacgcgcagcgctcctggctgaacggctttttcgccggcctgctgtcgcctgaggtcgccgcgccgctgtcaacggagcagggcgccgccgtcatgcaaggcgcggccggcgacggcgatgacggtgaagcgccgtggcacgaccagaccatgccgatcgccgagcggatgaagctcgccgagggccgtcccgtgcgccgcaagatgatggcggcgatggcgcagcaggattgcggccaatgcggctacaattgccacgactattcggaagcgattgcgagccgcagcgaagcgcggctcaacctctgtgtcccaggcggcaaggaaaccgcgcggatgctgaagtcgctgttcgaggagctcgacaagacgcctgcggcgaagccggccgacaagccggatgcggcggcaccagccgtgaccgtgaccatcgccgaacccggccgctcacgcgacaatcctgtcgcggcgaccttcctgtcgcgccgcctgctcaacaagggcaaatcggagaaggagacatatcacgtcgagttcgatctctccgagagcaagctcgactacgtggtcggcgacagtttcggcgtgttcgcgcgcaacgatgtcggcctcgtcgaccagatcatcgcgctgctcggcgcctcccacaccaccaaagtcaacggcaagacgctgcgcgaggtgctgatcgacgacgtctctctgtcgccggcgcctgacacgctgttcgaactgatttccttcatcaccggcggcgccgcgcgcgagaaggcacgtgcgctggcgcagggcgaggatcccgatggcgatgcggccacgctcgacgtcatggccgcgctgcagaagttttccggcacgcggccgcatgccgaggctttcgtcgaggcgctggagccgctccagccgcggctctactcgatctcgtcctcgcacaatgcgtcgccgggaaagctgtcactgacggtggactccgtgcgctacatcgtcggcaagcgcaagcgcctcggcgtcgcctcgaccttcctcggcgaacgcatcaaggagggcgataagctgaaggtctatgtgcagaaggcgcatggcttcggcctcccgcaggatcccaagacgccgatcatcatgatcggccccggcacaggcatcgcgccgttccgggccttcctgctcgaccgcaaggcgaccggtgcgcccggcaagaactggctgttcttcggccaccagcgcagcgattgcgatttcttctaccaggaggagctcaacgcgatgaagacctcgggtctactgacgcgcctgtcgctggcctggtcgcgcgacggcgagaagaaattctacgtgcaggaccgcatgcgcgaggtcgggcgcgagctttggacgtggctcgccgaaggcgcgcatctctacatctgcggcgacgccaagcgcatggccaaggacgtggagcgtgcgctggtcgacatcgtcgcccagttcggcgcgcgttcgacggatgaggccgtcagcttcgtcgccgagctcaagaagtccggtcgcttccaggccgacgtgtactagtctgctctcacaccggcgttgtacgggccggttccggctggctcggattttaacgaatgagattctcggaacctgccggtcgggagaatatgcgtctgcgatcaggcttcttagaagaagctcatcgctatttctctcggcatcttgcctcgtcccctggctgatccttcatacccgcaaatggggcgttggagaccggccatgcgcgaattatcggcggaagccagactgcatttctacgcgcgttcgctctcgcggcgaacccgggggacgctgcatcatgtcgcgatgtacagcgccttcgccgtcatcgcggcgatcgtgttcgggacgctttcggtgcatccgttttaatgtgtcgttccggggcggcgaaactcacgccccgcgcctgaacggcgcgacctcgattcccgcagccttcaacgcctggcgcacgccgcgggcgatgtccacggcgccgggcgtatcgccgtggatgcagaccgtgtccgtgcgcatcttgatgaccttgcccgtgaccgacacgaccgcgccgtcctgcaccatccgcaccacgcggtcagcgatcgccttggcgtcgtgcaggaccgcaccgggcttcttgcgcgagaccagattgccgtcgtcctcataggcgcggtcggcgaacacctcgtgcaccatcggcaggttggcatcttcgcccgccttcaccagcttggaattggcaagcaccacgaagatcaggccgggatcgaccgccttgatgccggcggcgatcgccttcgcggtcatgtcgtcctcgcaggcgacgttggagagcgcgccatgcgcctttacatgggtcaccttgtggccggccgctgtcgcgatcgcctgcagcgcgccgatctggtaggcgacgaggttctcgatttcggaggccttgagccctgcgatcggatggcggccgaagccatgcaggtcgcgatatccgggatgcgcgccgaccgacacgccgcgcgccttcgcgagctcgaccgtccgccgcatgatgtcgggatcgccggcatggaagccgcaggcgacgttgaccgagcttgcgagctcgatcatggcggcgtcgttgcccatctcccacgctccaaaaccctcgccgagatcgcaattaaggtcgactgtcttcatcggtgctctccgcctctggtcttgttgtcgcttacggctccgccgtgacctgccaggtcccggcatcgaccgcgctgaccgcatagcccgccacgttagcatcgctgagcgcctcgatgttgagtgcgacagtgtcggaggagcgcaggcgatcgggcaggctgcggatcaactgtgcaaacttgcgtgcctcgtcctgcgcttcggccatgctgacagccttgaagcggaacgcggttcccgccgaggtctgggcgaggcgaccgatatcggccgttatcaccgttgcgatcttcggatagccgccggaggtaccgcggtccatcatcagcgcgatgggggctccgttgccgggcacctggatgctgccgttcacggtgccgtcggagacgatgttgtggccatgcagatgcttgatggcggggccctcgagccggtagcccatgcgatcggaagtcgccgagatcttccattcgctctcaaggaacagagccttgttggagtcgtcgaactcgtcgtcctgcggtcccagcagcacgcggatcgggccactcaccggcttcggcagctcgatgcgaagctccggcgcgccgctcgcagcgtcgacgctgaactcgtcgccagcctgaagcgggcgcgggtaggggctgccgaggcctgcgcgggcattgacggcgaggctgccgaacaccggctcgcccttgatgccgccctcgatcgcgagataagtgaacgcgccgccgcgggcaaaaccgagcgtcagcgtctcgccgtccttcagcgttaccgatgcgtccatcgcgaccgggctgccggcgatgtccgcgttgcgcggtgcgcctgaaatcgcgacgcgcacggcgccgtcgcgggcggtgaaggaggcgccgaccgggccgatctcgatggcggccgcgaaaggctcgttgccgacgagggtgttcgccgccgcaagcgacaggcggtccatcgctccgctcaccgtcaggccgtagcgttgcgcgccgagccgcccgccgtcctggaccgagcttgccgggccgatgctggcaacgacgaggcggctcatgcgacgacctgctcggcgacgatctcgccggcttccgcagcgcggtccaattcctcgaatgtcttgtggtcgattgcgaagaacgtcacgcgatcgccgggttcggtgaggaaggtcgggttgcgatggagctgataggtcctgacaggcgtgcggccgagcaaatgccagccgctcggcgcggccagacattggattccggcctgcacgccgccgatcgagatggtgccggccggcgtcagcaggcgtggcgattgccgccgcgacatgtgcagggatttgtcgaggccgctgagataggaccagcccggcgtgaagccgatcatggccaccttgtaatcgccgcccgcatgccgggcgatgatgtcatcgggcgtggtgttgagcgccttggcgacatcctcgaggtcgatgccgtgctcgccgccataggcgaccggaatgcgccagcggcgcgccttggtgaccggcggcagcggttggcccgcgagcgcgagcagcttctcgccgagcgcatcaaaagcgattgcgcagggatcgtaatgcaccagcaaggagcgataggtcggtacggtctcggtgatgccctcgatcggacttgctgccagcgccttgtcgagtgccagcacgcgctggttggcgacatcatcgatggtgcggctgaactcgaccgtgacggcgctgtcgccactgggcagaaggcggggcgggagaagcgtcgcggccattgagctgtcgaagagttgtcgaaatcgggcttttggaagcgcgcgggctcgacgttgagctccgcgtcacctctgcttcgcgtaaatgcgcccgcaagtccaataaattaatgcaaggggtgccgataaagccttgttatcgcggcgcataacagctcagcggccctgcgttattgggaccctcttggcccttgacgcaagggctgcggctagcaagatgcgcgcgttgtttcccgcccatccggagctcgtccgtttccatgtcgctgtcccccgaagctcgcaagactctcgccggcatcaccaccgccaccatcaccacggtcctgctgaagaagggcctgcgcaatgtgtggatgcgcggcgcacggccgctgcgcccgggtctgccccgcttggtgggaccagccttcacgctgcgcttcgtgccggcgcgcgaggatctggcgacaccggaatcctggtcttcgccgatctcgacccgcaccgcgatcgaggcgatgccggaaggatgcatcgccgtggtcgacgccatgggcatcaccgacgccggcatcttcggcgacatcctgtgcgcgcgcatggtcaagcgcggcgtcactgcgctcgtcaccgacggcgtcgtgcgcgacgtcgagggcgtgctcggcaccaacctgccggtgtggtgcgacggctatgccgcgccgccgtcggttgcaggtcttacctttgtcggctggggcgagccgatcggctgcggcggcgttgccgtgttcccgaatgacatcgtcgttgccgaccaggacggctgcgtgttgatcccgcaggcgatgcttgatcacgtccttgccgagggcgtcgagcaggagcggatggaggcctggatcgtcaacgaggtgaacaacggcgcggcgctgccgggcctgtaccccatgaatgccgaaaccaaggcgcgctacgccgcgagcaagaaataacaggagagcagaccctatggagatcaccgtcgcaggcacgcggccgacccgccgcgcgcccaaggaaaacttcaccggcaccgtgtggcaggaccccgtcatcatggcgccgtcgccggcacggctgaactgctcgcgcgtcgctttcgagccgggcgcgcgcaccaactggcatcatcatcccctcggccagacgctctacgtcatttccggcgtcggacgcgtgcagtccaagggcggcccgatccgcgagatccgtcccggcgataccgtctggattcctccgggcgaactgcactggcacggggcgtcgccgaccaacggcatgtgccacattgccatgcaggaagcgctcgacggagtctattcgacctggctggagccggtcacggacgcggaatacggcgccgcggtgggctgatctgcatgccccggacaagacgcatcgcctgagggcgatgcgtcgcggagcgggggccgggatattgcagtggtcgacaccgctgggtcgcggctcggcgcagcaatgccgtcaacgcgttcacacgcgtcctcgatgcgctattgcattgccgcttgtccgggacagaagccctacatccgctccgccgtccacgttcccctgcacatcgcaccgcgccaagtgccggagcccgagctgccgctgagccggccgaagccgaccgcgcgcttgatgccggtgctcaaggtgacattgatgcggccggcatcggccacgtgaccggacgcgttcaccgcggcgctgctcgaggcgatctggcctttgttgatgccgattgcgacggttgcgccgttgccgcaggtctcgctcgatgacgagatgcggacattccatgtgccgtcgaaggtgcttgtcgcggcgtcagcctgcgcgaatggcaaggcgatggcgacgagggaagcgaagagacctttgcgaaagccgttcatgacacgcccctgtgggtgaccatgcgcggatcgtggcatgggcgcggaaccggcgctgtgagggcagtcacgtgcgcaaggggctccgtgagcctgcgcacgtcgcgaggctcccccgggaaaagcaaaggggcccggatcacgagccccttgtctccgtcaggacgttgaactcaattcacgcgcgtccaggtctggccgccgcagaacatgccgccgaaggcgcagccctgcacacgcaggcggtcggtgcccttcatggcgatcgttgaatcgtaggtcgagcccgagttcggatcgaggatgcgcccggtccatttttggtccttgcccggcttcatgttgatcagaacctgctcgccgttctggttcgacctggaatcgaccgaatagccgcagaggttggtgccgcattgctcgatgcggaccttgccttccctctcctcggtgagccagacgccgagcggcgagctgagatctcgcgtgggcgcggttgccgg

SEQ ID NO: 303 - DNA, 279410 bp, Bradyrhizobium colbertium
  misc_feature (9085)..(9094): n is a, c, g, or t
  misc_feature (109988)..(109997): n is a, c, g, or t
  misc_feature (120838)..(120847): n is a, c, g, or t
  misc_feature (175053)..(175062): n is a, c, g, or t
  misc_feature (207731)..(207755): n is a, c, g, or t
  misc_feature (230413)..(230453): n is a, c, g, or t
  misc_feature (246422)..(246431): n is a, c, g, or t
  misc_feature (246808)..(246817): n is a, c, g, or t
  misc_feature (248088)..(248097): n is a, c, g, or t
  misc_feature (249146)..(249155): n is a, c, g, or t
  misc_feature (254228)..(254240): n is a, c, g, or t
aaaaacgatagtttttcagcagactgctaggtacagaacaacgaaagtcgctctccattcggagacgacgatagggaaggcccgggaaaggccgatggaaagggccgtgatcgatctctattacgcaccgacgccgaacggctggaaaatctccatcatgttggaggagctcgggcttccctacagcgtgaagcctgtcaacatccgcgctggcgagcagttcagccccgagttcctcgcgatctccccgaacaatcgcatcccggcgatcgtcgatcacgatcccgccgacggcggtgctccgttttcggcctttgagaccggtgcgatcctgatctatctcgctgaaaagaccggacggttcttgccggcggacctgcgcgggcgttctgccaccatccagtgggtgatgtggcagatggcggggctgggaccgatgctcggccagcacgggcattttgccctctacgccgcagagaaaatcccttacgcgatcacgcggtatcgcgacgagtcggcccgtctgtatggggttcttgaccggcagctcggcaagaccggtagctatgtcgccggcgactattccatcgccgacatcgcctgctttccgtgggccatgactcacaaggcgcaaggcttcacgctcgatgactatccaaacgtgaagcgttggtatgccgcggtccgcgcgagaccgcaggtgcaggcggggctcgcgatcggcaagttcgtgaaagagccgttcgacgaagaatcacgcaagatcatgttcgggcaacgggctaaggaagtgctgggaaagaagtagaccgctcgccacgcccgtcattgcgaggagcccttgcgacgaagcaatccagaatcttccggggcgacactctggattgctccgctgcgctcgcaatgacgagaagagtgccaataacgcaacaaggaaacgccatgatcgaattcttcttcgactgttccagtccctggacttatctcgcctttcacaacatccagccgctcgccaaggagctcggcgcggagatcgtctggcggccgatcctggtgggcggcatcttcaacacggtcaatccgagcgtctatgcgcagcgcgagaagccggtgccgctcaaggcgcgctacatgacgaaggatcttcaggattgggcgcgctcggccggcctgtcgatcaagatgccgccgacggtattcccggtgaacagcgtgaaggcgatgcgcggctgcatttggctgggcaaagacacggtgccgtttgcgacggcggtgttcgaagcctattggggcgaggacaaggacatttcgcaggacgcggtgctcgccgggatctgcaagaaggtcggcatcgacgaggtaagattcttcgccggcattgctgagcaaggcatcaaggaccagctcaaggccaatacggaagaagtcgtggcgcgcggcggcttcggttcgccgacgatcttcgtgaacaagaccgacatgtacttcggcaacgatcggctgccgttgatccgcgaggcgctcatgcgcagcaaggcgagcgcggcctgatggtgcgtgctgtcgtttgccgtgagcttggtgcgcccgagacgctgcggctggaggagtttccgtcgcgtgccttgaagccgggcgaggtgcgtgtcgcgatccgggcggccggattgaatttccctgacgtgctgatggcggccggcgaatatcagctcaagccggagttgccgttcaccccgggcatggaagctgcaggcgatgtcaccgaggtcgggcaggaggcaacgggcgttgcggtcggcgacaaggtgatcgtcaagatgcgccatggtgcattcgccgacgaggctgtggcctcgccggcgcagcttacgccgatgccgtccaccttcgattacgcggaagctgcgacctatctcgcgggccacggcaccgcctatcatgcgctgatcgatcgtggccggctcgagccgggcgaggtgctgctggtgcacggcgccggcggcggcgtcgggcttgccgcggtcgaggtcggcaagatgctgggcgcgaccgtgatcgcaacggcctccagcgacgagaagctggcgatcgcgaagtcgcgcggtgcggatcatctcgtccgctacgatcgcgagccgtttcgcgatgcggtcaagcgcatcaccgagggtcgcggggcggacgtggtgttcgatccggtcggcggccaggtctttgaggattcgatgcgctgcatcgcctggggcgcgcggctgctggtgatcggtttcaccggcggcatcggttcggccaggaccaatctgttgctgatcaagggtgccagtgtgctcggcgtgcgcgccggcgaagccgtgcggaagaacccggagctcggcgagatacgcctgaaggcgctcttgcaatgggcggaggagggcaagctgcgtcccaacgtctcacaccgcctgccgctggcggactatgcaaaggccatgcggctgctgctcgaccgcaaggcgatcgggcgtgtggcgctggtgatggattagtttctaccagcgtcattccggggcgatgcggagcatcgaacccggattctcgcgatcccgggttctcgcttcgcgagccccgggatgacgctccgcctcacttgtactcccgctccgtccaccacgggaaatagtccggcatgtccgtcgacaccttgttcttgaactgtgcgggacgcttctccaggaaggacaccacaccttccttcacgtcgtccgaacggccgcgcgcgtagatgccgcggctgtcgaccttgtgggcctccatcggatcgtcggcgcccatcatgcgccacatcatctgccggatcagcgccaccgaaaccggcgcggtcttcgcggcgaactccttggcgagcgcgcgcgccgtcggcagcaaatcatcgggggccacgaccttgctgacgagacgaccggcaagagcttcctgcgccgggaagacgcggcccgaatagcaccattcgagcgcctgcgagatgccgacgatccgaggcaggaaccagctcgaggccgcctcgggcacgatgccgcgctgggagaacacaaacccgaaccgtgcggcttcggaggcaatgcggatgtccatcgcaagctgcatggtgacgccgatgccgaccgctggtccgttcaccgcggcgatcaccggcttcaggcatttgaagatgcgcagcgtcacctggccgccgccgtcgcggacctgcggatcgctgtaatcgaccttgccgtcggggaggcgcttcaccggcccacgtcgcgcatcgcgatcgaacgtgtcggcgccggaggagaggtcggcgcccgcgcaaaaaccgcggccggcaccggtgacgataatggcccggatatcgtcgtccttgtccgcggcatcgaacgcgtcgatcagctcggcctgcatctgtgcgttgaaggcgttgagcttgtcgggccggttcagcgtgatggtgaggatctgctcggcgacctcgtatttgatcgtctcatacgccatggtgtttccttccttgtcattccttgagtcaattctgtcattgccgggcttgacccggcaatccatcttttttgagggcgatggatgcgcgggtcgagcccgcgcatgacgagttgtgctgtgacgctagtacggcgtcttgtgtgcaggcggcttcggccaagcccgctgcggcccccgcaggccctcgaacgccttggccatgccgaggacgccgatatcgtcgaagcggcggccgacgatctgcacgccgatcggaaagccgttggcgtcgaagccaccgttgacggagattgcagggttttccgacatattccacggcacggtataggcgatgtgctcgaacggcttcatcggatcgttggtgggcgaggcccattccgccggatagttcacgttcggtgcggtcggcgagatcacatagtcgagctcgcaaaagagcttcgccgcagcagcgcggatcgccatggtctggttgaagccgcggatgacgtcgatgcccgagagcttggctccggactcgccccatttgaagatatagggcagcaccttggcctgctctgccggggtcagcttggacaggtcgtcccacatccgcgcgcgccagaaattgtcgagcccgtcgagcatgtcccgcgtgagaatgccgtcgatttcggtgacgacgctgcctgccgactcgaacgcctcagccgccttcaccgcgacctcgcccaccgctttctccggcggcaacccgcatccggcatcgagcatcaggccgatgcgcagtttccgcggcgacttctcgaggcccttccagttgagcggctcggccggcaggctcatgccgtcgcgccggtcgggctttgcgatcacgctcatcatcagggcgcaatcatcaaccgtgcgcgtcatcgggccggcaacgcgaccgacatagctgggatcgatcggcacgcgtccgaagctcggcttgaggccgacgagaccgcaccagccagcgggcaggcgcaccgagccgccgatgtccgtgccgagatggagcgggccatagccggcggccgcggcggcgcctgcgcccgcgctggagccgccgggattcttggagaggtcccaggggttacgcgccagcgcgtggaagctggagagaccggaggacagcatgccgtaatccggcatggtggtcttggcgaagatgatggcgccggcctcgcgcaggcgcgcggcaggcggggcgtccttctccgccggcacgagcttgacgctggccgcgcccagcggcaccggcacgcccttggtcgcgatgttgtccttcaccgtgaccgggacgccatcgagcgcacccgacggctcgccgccgctccagcgcgcggtcgaggcctttgcggcctcgcgcgcgccgtcgggatcgaatgcatagagcgccttgaggtgaggttcccacgcagcgacgtgcgcgagcacgtcctccagcacctcgctcggcgagaattgcttggcgcgatagcccgcgatcagatcgacggcggagagatcgtgcagcgaggtgaccgcctcttcggcgctcttcttaggcattgccgcccaccggcatgcgcgtctcgacgatgcgggcgaacatgctggcgccgatcggcaggatcttgtcgtcgagcacgaagccgggattgtgcacgggcaccgagccgtcatggccgacccagaaataggcgccggggatggtctgcagcatgtcggcaaagtcctcgctgcccatcttcggctgggtgcgggtgatcacgttggcgggatcgacgatggtgcgggcgacctcctcaaccaccttggactgctcgacctggttgaccagcaccccgaacgtgtcgcggatgtccacgtcgatcgcgcactgataggcgctcgcgatgcctgcgcagatcgtgcggatgcgctcgctgatcatggcgcggacttcgttcgagaaggtccggatggtgccgcacagatgcgcatcgcccggaatgacgttgtaggccgagccggcatggatctgggtgatcgagatgacggcggcctgcagcgggtcgacgttgcggctgacgatggtctggatcgcctgcgccagcgtcgttgcgatgatcacggcatccttggagcgctcgggcatcgcgccatgcgcgccatagccggtgatgcgcagatcgaagaagtccgcgccggccatcgccgggccgggcaggatcgcgatctcgccatggttgaggtcgggcgcgttgtgcaggccatagagttcgtcgcaggggaacttctcgaacaacccgtccttgatcatcgcgcgggcgccgccgaggccttcctcggcaggctggaagatcaggtgcacggtgccgtcgaagtttctggtctctgcgaggtagcgtgcggtgccgagcagcatggtggtgtggccgtcatgcccgcagccgtggaagcggcccgggattttcgagctccatttcaggttggtgttttcttccatcggcagcgcgtccatgtcggcgcgcagcccgatgcgcttgctgcccgaacccttgcccctgatgacgccgatcacgccggtgccgccgagacctcgatgcacttcgatgccccagctcttgagcttgtcggcgacgatgccggaggtgcgcacttcctcgaagccgatctcgggatgggcgtggaggtcgcgcctgatagcggtgagttcgtcggcgtaaccgtcgatgcggtcgatcgtgggcatagggtctgtccagttagcgtgagggaggcgtgaaaacagggccgttcggcttgatgcggatgcccgggcgcaggcgcgtccagggcagggaagcggtgtccgccggcatcgcgccgggcgcggcgcagatcatcagcttctccgcgatcggttcgaaatcggcgcggaaatgcaccgagctcttgttgaccaggatcttctgcgcggtcggctcgatcccgacatagcggtacatcgcctggtcggcgagctgcgccttgtgcgaggagacgacgacgcggacatcgccgatgcgcaggcacgccgaggggcccatctccatctcgcggccgccataatagggaccgggcgcgatgaaccggccgtcggagagcttctcgacgacgaaggtctcggtatagggttcgtcgccgggaatgccggacttgccgccgagcgagagtgttaccgcggcgccggcgccggcttcgtgcgcagctttcgccgactccggatcgtagatgacgcccgtcgcagcgctcgcgttgttgcgcaccagcgctcgcagcatgcccgtcgtgtccgaatctccgcctgcgccgggattgtcctgggtatcggcgatgatgattggcttgctggcgttcctcgagagttccatggcgtgacgcacgccgtcgtcgggcgaccagatcttgccgtcgaaatcgtcctcgtggctctcgatcagcttcacgatcgcatcggctgcgcggtcggcgtccgcctgcgtcttgccataggcgaacacgctcggcccgcaatcgcggaaatccgcggccgggaagccgggcgcgaaagacagtgtcggaaccgcgtccccttccagcgcggcgagtttctcgtagatgcctttggtcggctggtcattggtgcactgccagctgatcgggatcaggaacggcaattgccggaatgctttcgcgaagcgctgcttcgtcttcagcagcagggccaggtgccgtgcacaggcacggccggtctctgccatgtcgacgtgcggataggtgcggtaggcgatcaaagcgtcggcatgctccatcatctcgggggtaacgttggcatgcaggtcgagactggtgaccagcggaacgtccttgccgatgacgcggcgcacgcgcgccaggatctcgccttcgccgtcgtcgagatgctcggtgaccatggcgccgtgcaggtcgagatagaccgcgtcgacaggtcctgcggctgctatcccgtcgaccatcgctttgacgatgcgctcgaaagcgtcctcggtgacatgagccgacgggcttgctccgcaggcgatggtcggaacgagttcccagccgttcgcctcggcgctgtcgacgaagccggcgagaccgacattgatgcgccgcatcaccttcaagacgtcggcaccttgggtcatcgccggccagccgccgccatgctggaagtccgcgaatgtggccttggttggagcgaaggtgttggtctcgtgcaggaagccgccgacggcgatacgtgtcattcagttcggtcctagattgaaagtgcgcgacgttagccccggcattgcgacgagggcaagctgggaagcaatcgcgccatgcatagggtcaagacgttttgggaatgctgctgcgctgtcattccggggcgcgcctacttgggcgcgaaccatggtgcgcaattgcacaccaaagctcatcgcttcgcgatgtcccggaatgacggaggggagattttacgcgctcgccaccacgctctcggccaccggccggaaattggcaaagtcccagttgcggcccggcgcggcgtccagcagcgccttggtgtaggcctccttcggatgcgtcagcacttccccggcggggccctgttcgacgacgcggccgtgctgcatcaccaccacttcgtcgcagatctgcgcggcgacgcgcagatcatgggtgatgaacaggatggcgatgccgagccgcttctggatctcgtcgagcagttccagcacctgcgcctgcacggaaacgtcgagcgcggagaccgcttcgtccgcgaccagcacgtccggatcgagggcgagcgcgcgggcgatcgcgatgcgctggcgctggccgccggagaattggtgtggatagcgcgacacggcatcggcgggcaggccgaccagctcgagcagctcgcgcgcccgcttcattgcgtcagcgtgcgccgcgccgtagttgatcggaccttccgcgatgctctcgccgacggtgacccgcgggttgagcgagcgatagggatcctggaacacgatctggatcttctgccggtgcggctggagcagacggcgcgagatgtcggcgatctcgcggccggccaggcgcacgccgccggaggtcggatcgatcaggcgcacgatgcagcgtgccaccgtcgatttgcccgagccgctttcgccgacgatgccgagggtgcggcccttgcgcagcgtcagcgtgaccttgtcggcggcgacgacctcgcggcctttgccgaagaaggcgcgctccttgtagaccttggtgagctcgttggcctccagcaccacggggtcgcggctctcctcgcgcggcgcacgcggcaccaggctcggcaccgacgcgagcaggttgcgggtgtattccatggtcggattgcgcagaatggtctcgagcggaccggtctcgaccaggcggccctgccgcatcaccgcgacgcggtcggctatttcggcaaccacgcccatgtcgtgagtgatgaacagcacggcggtgccgtgatcgcgctgcaattcgcggatcaggctcaggatctgcttctgagtggtgacgtcgagcgcggtggtcggctcgnnnnnnnnnncagcagcttcggctccagcaccagcgccatcgcgatcatgatgcgctggcgctggccgccggagagccggtgcgggtaggaggcgaagatgcgctcgacctggggcaggtggacctgctccatcatgtcgagaatgcgcttcttgcgcgccttcgcgtcgagatccgtatgcgcgcgcagcacttcgtcgatctggcggccgaccggcaccaccggattgagcgcggtcatcggctcctggaagatcatggccatctgcgtggcacggagctggcgcaggcggcggtcggtcgcggtgagcagctcctcgccgaccagcttgatgctgccgccggtgggaaccagcgttcccttcggcagcaggcccatcgtggtgagcgacgtcaccgatttgcccgagccgctctcgccgacgaggcacagcgtctcgcgctcgcgaacctggatcgagatcccgtcgatgatcttcggcccgcccggcttcttgccgacggagacgacgaggttgttgatgtcgaggacggtgttggtcatcaggtcactccgacgtcattgcgaggagcgaagcgacgaagcaatccggagcccatccgcggatgcagactggattgtttcgcttcgctcgcaaggacggacaagggggcagggccgcgagacaaatcactttgcctcccgctgcttcatgcgcggatcaagtgcatcgcgggcggcgtcgccgatcaggttgatgctgaggatggcgatcgagagcaaaagaccgggccagaagatcagcgacggcttgatctggaagtactggcggccctcggccatgatgttgccccaggtcggcgtctccggcgagatgccggcgccgaggaaggagaggatggcttcggtgaggatggcgctcgcgcagacataggtgccctggacgatcagcggcgcgatggtattcggcatcaggtgccgcagcatgattttcggcaggctggagccgaccgagatcgcggcttcgacgtaaggctcctcgcgtgccgagagcacgaccgagcgcaccagacgcgccacgcgcgggatctccggaatcgtgattgcgatcagcacggtccagaggctggcgccggacagcgacacgacggcgatcgcgagcaggatgctcggcatcgccatcaggccgtccatgacgcgcatcaggatcgaatcgaccagcttgaaaaagccggagacgagcccgatcgcgagcccgatggcgatcgacaggatcgccgcgccgatgccgatcagaagcgagatgcggccgccatagatcacgcgcgacaacaggtcgcggccgtaggcgtcggtgccgagcaggaattgtgcggaggacggcttgagccgctgcgacggtgcgagctggatcggatcatgcggcgcgatcagcggcgcgaggatcgagaccaccacgatcaaggtgagcaggaccgtcgccgcggcgatgatcggcgtcgaggtgaggaatccgaatcgcggccgcagcggcgacgtgatcggaatggaggactggggaagggtatcgacggacattgtgttcttaatccttgcctcagtaccggatccggggatcgagcagggtataggcgacgtcgatgagaagattgacgacgacgtagatgaacgatgtcaggaggatcatcgcctggatcaccggataatcgcgcgccaacaccgcatccacggtgaggcggccgatgccgggtatgttgaacacgctctcggtgacgaccacgccggagatgagcagcgcgaagccggtgccgatcacggtgatcacgggcaccgccgcgttgcgcagcgcatggcgcatcatcaccgcaacctcgttgatgccttttgcgcgcgccgtgcgcacatagtcctcgccgagcacgtcgagcatcgccgcgcgcgtcatgcgggcgatcagcgcgatgtagatgaaggagagggcgcaggtcggcaggatgatgcgctcgaagaacggcccgaagccgctaaagatgctgcggaagccttgcaccggcacccagcgcagttcgatggcgaagacctggatcagcacatagccgaccacgaacaccggcaccgagaaaccgagcacggacagacccatcacgaagcgatcgatccaggtgccgtgcttccaggccgcgatcacccccaaggggacggcgacgatcacggcgaggatgatggtcgaaagcgcaatcgagatcgacggctcgacgcgctggccgatcatcttcatcaccggcaggttggagatcagcgaagtcccgaggtcgccgtgcagcagcttgttcacccaggtgacgaactgcacgatcagaggctcgttgaggccgagcgaggtgcggatgcgctcgagccgttccggcgttgcgttgtcgccggcgagaatcgccgcgggatcgcccggcgtcagccgcagcagcaggaacacgaacagggcgaccacgcccatcacgggtaccgcggccagaacgcggcgaacaagataacctagcatgcacctatctccggctgcggaacttgtggggccctggggcgcctgtgaactctgtcgtgtctatcatgcctaccacataggctggaaaggtcgcccggacacgccgccctctcgggcaaattgtgtgccaaggcttgcgctggagcaagaggacggcatgtctcgggcgccggccactcaggatgcctgccgtagttcacgctcaaccccaagtgaaggtaccgtcggcggcgcgttgagtccgcgccaaccgtcgatggtctgggcaatcatctgcgccgtcgccgccgataaagtccagccgagatggccgtggccggtgttgaagaagacccccggtatccgccctgcgcgcacgaccggcatcatgttcggcatcatcgggcgcagcccggcccacggcacgacgcgcgaggtctcgaccgcggggaagttgatgcgcacccagtcgatcagcggctgcacgcggtcggcgcggatgtcgcggttgaagtcgttgaactcggcggtgccggcgacgcgaaagcggtcggcgccgagccggctggtgacgatcttggcggcctcgtcgagcaggctgaccgtcggggcggcgttgcggctttcggcggtgtcgagctgcacggtgatcgagtagcccttcaccggatagacgttgacgcgctcgtcgagcagggcggcgaagtgccggctcgcaacgcccgcgcagaccacgacgccgtccgccttcagcatgccgcgggccgacgcgccggcatcgctcgcggcgagatcggcccagccgatgacgaagccgctgccggcacgtgcgatcgaatcgatgttggcttcgtgaacgaaggtcgcgccgcgccgcttgcaggcttccgccagcccgcgggtgaacttgtggatatcgccggtggcatccgacggcgtgtagaagccgccataatagtcgttgcgcagcgtcggctcgatcgcgcggatctcgtccggagtcaccgggcggcggtcgaggccgccttcctgcagcagcgcgttgacgcgcagaccggattcgaagccggccttgtcgcgatagatgtggaggatgccgcggcgttcgagatcgaagtcgatgccctcgcgcgacgcgatgtcgaacaggtgccggcgcgcttcgatcgcgagccgcgtggtctcgatcgtgttggaccggtagttgccgatattggcgacgaactcgctcatccacgaatatttgtgccagttcggccgcgggttcatcagcagcggcgcgtcgcgccgaaacatccagcgcaggcccttcaggatcgtcgcggtgctgttccacacctcggcattgctggcggagagctgtccgccattcgcaaaggacgtctccatcgcagcgtagcggtgcctgtcgagcaccgtcaccttgtagccgcgttcgagcagggcataggcggtcgtgacgccggtaatgccggcgccgatgatggcgagatgagtcatgatgaggttcggggctcccgtgtttagagtcggctaaccgccggccgaaaggccgttggcggcgccccatctgtcacggttacctgagagcttgatccgctgcggatctcgcaacggactatccccttcggtggacgtcgcgattgcctgaaatcgcgccgcctctctccagatcgtcctgacgaaacggtccttttgcctgagagtttccggggcggttgctccgtcggcgccgcaacgaaggcttagaaccttcgtcgcgatctctcccgcatcgtcgcgtggacggccgagcagtacgatacgcctcatttttagacaaggctaaatttcgaccgcgactgccaatgcattgtgcagtgcaaagttgattcaatttattctaacgtcgccagcagcccggccatcaaccggccgcgctccaccaggctctcgacctcgatgaactcttcgagcgtgtggccattgccgccgcgcacgccgagaccatcgagcgtcgggattcccatggcaccggtgaagttgccgtcggagccaccgcccgagcttgcatgtggcaactccatgccaagagacttcgcgatgccgcgcgccttctcatagagcgccatggtgccggcatccggctcccagaccggacgcgtgacgccgcgcgtgaccttgaaggcgacgtcgttgttggtgcccgaaagcgcaagcatcctctcgacgccgcggtcgagatcggcctggcgcttggccatggagagcgcctcgcccgtcgcggtcgtggcaacacaattgacccattgtccgccgtggacgacaccgaccgagaaggtgcagtcctccgtcgtcattgcgtcgatcgcgaggatctgccgggccatctcgcggatcgccgagcgtcctgccgacagcgtggcaccggcgtgactcggccgtcccgtcgcctcgagattgaagcgtgcgatggcgtagcgtccggtggtgacgccgttgtcggcacggccgggctccggcaccagcacgtatttgttgcgcgcggcctcagcctcgatgatgtcgcgggtcgaaggcgtgccgacctcctcatccggcgtgaacagcacggtgatcggcagcggcgtggtgaaggaggcgcgcgccagttgccggatcgcttccagcgagaggtagttgccgcccttcatgtcgtagatgccggggccgtagcacttgttaccctcgcgccgccatttcagcttctcgatggtgccgaccgggtggacggtatccatgtgcccggcgatcaggatgcccggctcgccctgcttcggatggggaaagcgcgcgcggatgacgccgccaaaaccctgccggccggcgatgcgttcgatcgtcgcacccatgatcgccatatcccgcgctgcgatatcaagcatgcggtccaccgcacctgcgtcccaggtcgggctctcgcattcgacccagccgcgcaggccctcgagcattgcctcggaatcaaaggggagattggcaggattcatcttaatgtctctcaagcttcgaaaggtggaacgcgcattgcatcagcgcggggcgggacaagcggagggtgttgtagagctaaatcgatctttgtggagcccgtgcgcgcgccgcgagggcttgcaacgaaaccggattgacgcgctcggcacggtctgcaagtctcgaaaagacaaaggcattgcatgaagttagttcgcccaacgaatgaacctcatgcttaaccaatagcctgcctttgaacagtttcacgtcaggagaactttctatgtttcacttcatgcgccgggggcctcgcgcattcgcctccaaacttgcgctgtcggtcgtcgcgctttcgaccgcgctggtctcgcccgtgcttgccgccgggaagaccattacggccgtgatgcattccgatctccgcatcatcgacccgatcttcaccacggcctacatcacgcgcgaccatggctatatggtctacgacacgctgctggccaccgattcaagcttcaaggtccagccgcagatggcggactggaaggtctccgacgacaagctcacctacaccttcaccctgcgcgacggcctgaagtggcacgacggcgcgccggtcacggccgaagactgcgtcgcctcgctgaagcgctggggcaagaatgacggcatgggccagaagctcatggacttcacggcgagcatcgaggcaagcgatgccaagaccatcgtgctcaagctgaaggagccctacgggctggtgctcgaatccatcgccaagccttcgtcgctggtgccgttcatgatgcccaagcgactcgccgaaacgccgcccggcaagcagatttccgagcagatcggctcgggtccgttcaagttcgtgcagggtgaattccagcccggcgtgaaggcggtctatgtcaagaacaccgactacgtgccgcgcaacgcgccggccagctggaccgccggcggcaaggttgtgaaggtggaccgcgtggagtggattaccatgccggactcgcagaccgccgtgaacgcactgcagtcgggcgatatcgatttcatggagaacgtgccctgggacatgcttccggtcctcgagggcaacaaagacctgaagatcgaggtgctgaacaagttcggcttccagacgcttggccgcatgaacttcctgctgcctcccttcgacaatcccaaggtgcgccgcgctgcacttctggcgatgaaccagaaagacgtgttggatgcgcttgtcggaaatccgaaattctacaagatctgcggcgccttctttgtctgcgacacgccgctcgcctcggagatcggctcggatactttggtgaagggcggcggcatggcggaggccaagaagctgcttgcggaatccggctatgacggcacgccgatcgccatcatggcaccgggcgacgtcaccactctgaaggcgcagccgatcgtcgcggcgcagctgctccgcgaggccggcttcaaggtcgatctccaggcaacggattggcagaccgtggttgcccgccgcgccggccagaagccggtgaaggagggcggctggaatatgttcttcaccaactgggttgccgcggacgtgatgaatccgatcgccaacgtctcgattggcggtcgcgggaagaacggcggctggttcggctgggcggaagacgccaagatcgaagagctcaaggatgctttcgttcgcgcctcgtcagcagatgcgcagaagaagatcgcagccgacattcagaagcaagccatggagcaggtcatctacattccgctcggccagtatcaggccccgagcgcctggcagaagtcactgaagggtgtgctcgacggcccggcgaccccggtattctggaatatcgagaagtcggaatagccttcgtctgaaatgcgagcggcgccgtgggtctcccacggcgccttttctattgggcgatagttacggagcttctgttagcagtggctgtcgcgcagctgctcgagcccttcgctcatgaatggcaagctggggtccggccgctcgccgggcgaaggacgttgctgtgacgccggccgttcgatctcccacgcggggtgatcgggtctgctctcttgttccatctcggcatcctctcgattgctgcggtacaacatcgagagctccgggatgttcctcagttgactggacgatgatgcggcctgaacaggcggcccttctcaaccaccagcacgatcccgagtgcggcgagggtcgacaggaagaagccgaccgagaacggcagcagcgtgccgtcgaagctctggccgatcgccatgccgaccgcgattccgatcagcgtcgtgatcgagccgtaaagcgaagaggcggtgccggcgatgtgtccctgcggctccatggcgagcgcggtgaagttggcgaccatcatgccgaatgagaacatcatcagggcggagagcagcatgaacagtgagagcggcagcacgccgaggatttccgtcagcagcatcacgccggccactagcgtatagagcgtcagcgccccgtgcgagatcgcgcgcatgccgagtcgcccgaccagccttgcgttgaggaaaccggcgatggcggtgccggcggcgatcgccgcgaacgcgagcgggaagtattggccgagatggtagatgccggtgaagacctgctgggcgcagaagacataggcgaacagcgcgccgatgacgctgccggcagccgtcgcatagccgatggtctggcgattggtcacggtctgccggaaggccgagagcacgtcggcgggcgccagcgacctgcgttcggattcggggagtgtttcaggcagccgcagcacgcaccatgcgagcgcgagcaggccgtagagcatcagcaccacgaagatgccgcgccacgccgtcaccagcagcaccgcctgcccgaacgagggagcgatcacgggcaccgcgatgaacaccatcatcgcgagcgacatcacgctcgccatgcggcggccgacatagcagtcgcgcacgatggatgtcgcaatcacgcgggtcgccgaggtaccgagcccctgcagcgcgcgcgccagcagcagcgtctcggaagagggcgctgcgaccgccagcacgcttgccactgcatagacggccatgccgccgagcagcaccggccggcggccgaagcggtccgacagggggcccatgacgaactggccggcaccgaagccgatcaggaaagtcgacagcaccagctggagatggttcgcgacgggaatcttgaaagctgccccgatattaggcagggccggcagcatcatgtccatcgcaagcggattcagcgccatgatggacgcgatcacgatgacgaattctggaaaccccatcgggcggtgtccggtagacacccaatcgtcggcattgacgtcagacaagaagctcacccctgaaattgagcgatctatctatcgttgatgctgcggtgcacaacccatgtttcgggatggctggcaggcggagcaggggcggacaacaattggtgaggtcgccgtcgcgacggttgcctcaatcgggtcgggttgccgcctgctcgaccaggccgcgcgccaattgtcctgcagcctcgacatagtccaggtcgcgatggatcagcatcacggtcgtggcgccatcgagcaggatgacgagctggcgcgcgagcgcgcttgcatcggccacgccgtgatctcgcaactccgattgaagccatgcttcaaagcgcttcttgtgtgccgcgccggccttgacggccggatgggccggcgtgttggcgagctcggcgatcgtgcgcaggaagccgcagccccgccagcgcggcgtatccacggagcggccgagcttggcgaagagaccgcggatcttgtcggctacgctcccgtcggtctcggcgaaccatcgcatgtagagttcgagcgtcggctggtcccgggccgcgatggtttccgcaacgagctcgtccttgctggcgaagtgataatagagcgtcttcttggtgacgccggccttctcggcgaccgcatccatgctgaccgccttgatgccttcgccatagaacaggcgcgtcgccgcaacgacgatctgctggcgcgttatatcgcctcttcccgacatctcatttgtatactgcctagtgagtatacatgacaagtttgatgtggctgacttcctgcgtgttcgacctggaaggagccgcaaattgtccgacttgatcttgatcgagatgcggggcgccgtcgcgctgctgacgttcaatcgcccgagcaagctcaacgcactgagctacgcgctcatcgatcgcctgatggccgtcctcgaccgcatcgaggacgatgcgaatgtccgggcggtggttctgaccggggccggggatcgcgccttctcggcgggcgccgacatttccgagttctccgagagcgtgaggttcgggccggacattgcagtcaaggatttcgtgcgacgcgggcaggcgatgacggcgcgcatggaatcatttccgaagccgatcatcgccgccgtcaacggcatcgccttcggcggcggctgcgagatcacggaagccgtgcatctggcaatcgccagcgaacgggcgagcttcgccaagcccgagatcgcgttcgggatcacgccgaccttcggcggcacgcagcgcttgccgcggctcgccggccgcaagcgggcattggaatgcctcttgaccggggaatccttttcaccacagcgcgccgtggagctgggattggtcaaccgtgtcgttccgcacggacagcttctcgacgcggccttcgggctggcggatcggatcgcgcggcattcccacctggcggtcgcccgcgtcatcacggccgccacgcggggcctgaacgtctcgatcgcggagggcctcgccatcgaaagcgagcagttcgcgcggatggcggcgacacaggacacccgaaaggcgctcgatgcctggctggccgctcgcgcgtcgcggtaggcgcccgcggttcgttggcgccagcgagttcccgcgatcggaggtcggccggcaaccagggattcaccataaggtcgggcacaggacgtcggggagatgaatctgcaacccatcctgaccattgtggcaggaccggctgccgcggcggcaccggaagaaacaggcgaaacagggggccgcccgtgtccgacatgtccggtgctgcacgatggctggagcccgcggccgccacgactggcaggcgcaacgtctggcttgcctgcctgatcgcgctgacggcgctgctggtgctcggcaatctcgccaacgatgcaacgctcgatgtgaaatttggctgggacgttcgcgtcaattgcgcggcggtcgatgcatatgccgaagggcgcgatccctatttcgtcaagaacctgaagggcaccaagctctcttatccctacctgccggtgacgctggacgttttccgtcccctctgcgcgggtggtgttctggtcgatcattgcagaagcatttttctcgtgcttggcgtgctctgcgggttgctcttgcccggccttgcccgtgcgcgcccgagcccgcgcgacattgcgctccgggtgctctgcgcgatcggcgcgttcgtcggtttcgaatgggtgcaggcatcggggaattttgcgattctgagcggtgtgctgactgcgttcgcgctgaggctcttgcttcgtccgcttggatcggaagcgcagggagaacaaggcttctcgtcgcgcctcgccggcgctgcgctgctcggcctcgtgacctcgttcaagctggtgttcttcccggtgctggcggcgctctatttcctgccgctgccgcgcgtccgcaagctggccttgatcgcggcggcgatcctcagctttgccgtgccgatcctgatatccaaactgctgtatcccgatctgttcgcaagctggcggctcgcgatggcggcgcagattcccgaccagcattttgtcgacttgctggagacaaatccatcgttgctgctgctggcgcagagcctcatggattacgccgggctcggtaacgtcaagccggcactgttcgcggcctatgcgctcgcagcactcgcgctcgtgctcgtgccgttcggccttgccgtcctgcgcgtggtgggccgcggccccgcgggggagggaggatcgcttctgatccgacttgatctctggctgagggatcatcctcgtacggccatgcgcgtcaccgtgctcgccatgttcgcgctctacctcagctcgccgcgtctcaaggaatatgccttcttcgagctcgcgctctatgccgccatcctcatcgtcgatcttcccgccatggcgcttgccgccgttctcggcgtcggcatcgcgttcccgacgctgatctcgcttcttgggggaccattcgagggcagtttcatcctcctcgtcgtcgccctgatctgcttctggatcgtgttgctcgatttccgcgcggagcccgagcgcctcgagcgcggctagctcgttcggcggccgagcttctcgtctgaattgctagcgacaagccgctggagcgccttcccgcggatggccagccaaagacggttgcgcgacgctcagggcggcactccaaacgaaatgcattgagcgtgccgagaaaatctcgggtggtgcgggcagccggggtcgaaccggcacagcgcttgcgcaccgagggattttaagtcccttgcgtctaccaattccgccatgcccgcttgatccaacgagatcaaacacttaagtccatccccggtctggaattggcgtgttgctcgagcccggggacggtccttccttaagcgagccgggcgcacaaggcaaagcctcaatcccgacatctgttgttgctttaggcattctcaatccacgggggctattcatccggcatggttgcttcgttgtcctcttcgctgcgcggcttcggcgcgctcctcgcgctgctggcggcgggtgccgcgctgtccggctgcgccggcatgagcgagacgatcgcgcctgcctttgccgatcccgccaaatacgaattgtacgactgcaagcagctggagaccgagcgcaagcagctcgacaagcgcaccgaggatttgcagaagctgatgcagaaggccgagaccggggcgggtggcgcggtcgtgtccgagctcgcctatcgcaacgactatatcgccgtgcgagggcaggcccaattggccgatgacgcctggcgccgcaacaggtgccggcagacgcccgagccggtgccggctgccgagccgccgtcgcccgtcgccaagcccgcctcgaaatccggaagaacgctgcgctgaggcgccgcgccggcggcgggtcgcatcaagtccgccagctgtagatccagtcttgccgcgccagcatgcgctccgggccgagcgcgcggatcgcaaggtcgcgtgcgatcgccagcggcccgccgaggtgatagatgcggccctgctgccgcgcggttccctgcacgcgccgtacccgcgccaggcgcgcacggccatattgcgtcagtgcggctgcgatgccgtcagtgttctccgccgcctcgacgctcagatgccgcgcgagcacggcggcatcctcgatcgccatgccggcgccttgcgccgcgaacggcagcatcgcgtggacggcatcgccgagcagcgccaccggacctttgctccaggggcagccgtcgggcacgccgaacagcgcccatttccgccagctgtcgaccgcggcgagcatcatccgtgccggcggcggccagcgcggggcggcaaaggcgtccatcacctcgaggggatcgccggggctgctccaacccggccggttccaggtgccgggcagcaccgcgaccacgttgatctggcgtccgcccgcgatcggataggcgaccagatgggccttcggccccatccagagctgcacccgccgcgcagtataatccttcggcagctgcgtggcgtcgagcgtgccgcgccaggcgatcagcccggagaagcgcggctgcacctcggggaacaggtgctggcgcaccgtcgaccagatgccgtcggcgccgatcagcgcgccggcgagatcgctgcggcggatcgtgccgctgcgatggaccaccgtcaggcccttggcgtgggctgcaacgtcctcgaaggtcgctcccagcttcaggtcgatatcgggatgatcggcaagggcgccggccaatgcggattgcaggtcggcacggtgcaccacccaatagggggcgcccgcgcgtgcggaggcggcctccccgagcggcatgcgcagcagctcgcctccggcgcgcgcgctcatgatcgagaccgcttccggagtgacggcgcgcccttcgaggcgttcggcgaggccgagctcgaccagcacgcggctggcgttgggcgagagctgcaggccggcgccgacttcctcgaggcgctcggccttttccagcacgacgatgcggaagccgcgggccgcgagcgcaagcgcggccgtcagcccaccgatgccggcaccggcgatgacaatcgttcgggagagcgccacccctgaccgacggaagcggtcaggccaccttgtccttcaagacacattccggcgggcgggcttcgcccggcttcaggtcggccgcgaagcggtacagcgtcgagcaataggggcagatgatctcgtcgtcgttgccgaggtcgaggaagacgtgcggatggtcgaacggagggttggcgcccacgcacatgaactcatgcgagccgatctcgatgacgggaacgccggcatcgttatggaagtgcgggacgacatggtcggacatcgtaactcatcctggagtggcaatggcggcagacacaatcaacaagtgacgcggcatctttaaggcgcggcggaccataaaggcgggtgcagatgattgctagtccagcggaaccgcaagctccgcaattgccccatgctcatttgctcatgcaaattcgacacaatcttgcggcctgagagaagcccttctttcgtcggggacgttgtgtcgcaattttggcatactatcttctctggcgagcaatttgcgccgaaagacgaaaacatcaggcgtagacgatttttgggatcgccgggcttttccagatgaagtggctgcgaatcaccaccgcgttggcgggtatcgcgacgtgcggcttcctgctcgtgcaggtcgcgccgcacgcccgcgaggccggcgcgcttctcgcggcccaggacgatccggccgtgctctccgagctcaagctcgatgcactgctgcggcagaacgagggtctggtccaggacagcatcgaggccgcactcgcggccggagacgctgacctcgccgacagttttgtcgcgctggcgcgtgaccggaatatcgcgctaccggacgacgtcctcagccgcgtcagcgatgcggtcaaaacagagaactccacctcgcatttcgccaagcgcttcgtcaccggtctcgtcaccggcaatgctgacgacgtcgcgagcctctcggggacggtgactggcgatctcttcgtgttcggcgacatcagggacgtggtgcgcgaaggcaagcatcttgccatgggcgaggacaccgaccgcctcgtgctcgcccttgcggctgccggccttgcggtgacggcggcgacctacgtctccgtcggcggtgccgcgccggtgcgcgcggggctatcgctggtgaaggacgcgcgcaaggtggggcggctcggcgaggggcttgccgcatgggccggccgctccgcacgcgaggtagtcgacgcgccgatgctccggaacgccgtcgcgtccggctcggtgctgcgccctggccagaccgtgagcgcgatcaaggctgctttccgggccgagaaggccggtgcgctggtccggctcggcaaggacgtgacgcgcgtcgccggaaagaccggcacgcgcggggcgatggatacgctgcgcatcgccgaaggccccaaggatgtcgcgcgcgcggcgcggcttgcggaagcgcatggcggcaagacccgcgccatcatcaagctgcttggccgcggcgcgctgctgcttgcgaccggcgcgttcaatctgaccctctggctgttcggcgcggccctgacgctgtttggcctgttgtcgtcgatcaaggccacgacggaaggcctgacccaggcctggtgcgatcgcaggcgcgcgcgccggctccgccgtgcgcagatcgcagcagaggcaagtctggccaacgcggccgcgacggcctgaagcgctgcgcgcatcaggctattgtttgagcatgatgttgccggaaaaccgctgcacagtgttccggatcatgctctaagatcgagctgtcccccacaagatctcacggaactcatgatgccgagcttccacaacggcgccgttgaaattgcctatctcgacgaaggcgagggcgatccgatcatcctggtccacggcttcgcctccagcaagaacgtgaactgggtctatccgacctgggtgtcggagctgcgcaagaacggccgccgggttatcgcgctcgacaatcgcggccacggcgagagcgcgaagctctacgagcccgcgcagtactcgatcccgaccatggccggcgacgtgctcgcgctgatggatcatctcgccatcccgcaggccgacatcatgggctattcgatgggtggacggatagcggcgtggctctccctcaacgagccgcagcggttgcgcgcggcgatcctcggcggcatcggcatcggcggcctgatcgagggcaccggccccgacgagaacgtcgcgagggcgctggaagcgccttcccttgatgacgtcaccgatcccgtggggcgtaccttccgtgcgttcgccgaccagacccgttccgaccaccgcgcgcttgcggcgtgcctgcgcggcacgcgcgatcttatgagcagggaggaagccgcgcgcatcgaggtgccggtgctgattgcggtcggcaccaccgacgacgtagccggctctgcgagtgcgctcggcgccatcatccccggctcggaagtgctcgacatccccaaccgtgatcacatgcgtgcggtcggcgacaaggtctacaagaccggcgtgctcgatttcctctcacgccgcgattgaggcatgctgtcttcgccgatgagctcgtcggtcaatgctcctgatgtcatgccagttgtccacgccttcatgcgcagacatcgggagtccgcttggcgccgattgagacgacggatcgaggacggcgggacgtcggcaaggggtaaccagaagtgtcgatgcaggggaggctttccttcttcaaagcgcaggacgttggtgcaggtagatcttctcgaattgccctgcttcctccaccccgctcttatcgagcaagtggaaggttctgcgttccgttgcgatgagaccgtcgtgacgaagctcttgcagagtccggttgacatgcacgaccgacaatccaaggcagtccgccagctcgatctgagtgatgggcaattcaaaggacccattcgtggttcgtccgatcagttcgagccgctcatagagctccgccagcaggtgggcagttcggacccgcgccggcctgcgcccgacattgacgatccattccctgaagattgcggcgtcgatcaaggtttcgcgccagagcgcagaagctacgttgggcctcctcagattcagctcccgtaaggcttcgtgcttgatgaatccgagggtgcattccgtgagcgtcgtcaggtcatggtccatgacgtgcaagtgcaggctttgcaggtccgggatttctcctggaatgtggagcgagagaatttgccgctgaccgtccggcgtcagcttggagcggaaggcgaacccatcgacgatgagacaggattccgatgggcggtcaccgtcacgtacgaagccgtgctgggcgggaacccgcttgctctggatcggaagctgttgaatcgccagaatatcgtcctggtcaagccgattggttttggtgagtttttgaacgagcgcagccgttgggctaccgggcatcgcacttctccacgcttgagaaatttgagccggattcaactcgccgctccggccgagacaggcgggagcacaagactctcagccaccagcgcccaatgcttcggccggtggtaaatcaacaatcacaggttaagggaaaggttccaaacctgctctatgttatttgtcgtgccggttcgatctcgaaacggaggcagacgctgaggagcaggccgaactcgtcacgaacttcaatcgccaaccttcgagccaccgaaccgggcagcacgtccctagcgagctcggccatagcagtggaggccagcgtctttacctcctgcagggaggcgacctcgacgccgatctcatctgagacgaatttttcattgtcacgggagtcgaagtagtagcgtggcatgcgtgacaatcaggaaacagctcgtgcgttcctcgcagtccccataccttccttgtcgcggacgcccgatgtgccgctcgttctgctaaatgggcgcgtggccgcacgctgggctatggtcgccgcaaggatgagtgcggtggaaatggggagggaggccgtcggcgtggagcgcatgcttgaacaaggtaccaagcgcgatgacgcttcacccaatctcatcgcgcttcaacgtcgccgccgaaacggcgcgccagcgccatcggcaccacgaaggtggcaacccgcaccatccgcgcgccgtagcgatcgtgcgggccggagatgacgccgcagacgaacgtcaaggaatgtcctggggaccgttgagccgacatatttgacgctccgcttggatgagcgggagcgcacttgcgttcacgccaccgatagatgctgagagccgctcgggggtggcgggactgttcgcctttattcgcccgtcagcgagggctttgtttcgattccggcaggagccatttgccagcttcttaccgccgctgactggttgactgctcgcgatgacgcgccagtcgtgtccttcctgcgtggctgtcctgggtgtgcgtaggcgcgaaggttctaagcctgagagagggcatcgtcagatttttcgaacagcctgccgcggcctcggtaagatcggggctcgccggtgatccgcccgacgtgtttgcgcagctcggcaacccgctatgttgccctccacgttcgcgctccctcagggtatcggttcgcggctctcaggttatgccggtttttgaaagggcgtcagcttttgacgcagggcatcggcctgctcacgcagatcacgaagtaccctgccgttgtcagattgagtttcctgccattcgattcgctcttctgctgtccatagccaggattcgcgggcgaaccgggccttctcggccagatcgtatgcctcgtaggcccgaatctgttgctcgatccggtcgaggctctcttggagtgatgcaggcaataccgacccgtcggcgggagctgatggactacatcctcaccgaggtttagttcaaacgctcggcgcatgccgcaaacaatcagtcgactctattgttcctaactgaagtccctccctcagaggtaccggccgcagctcaccagcagggggtcatgaaccgacgcttttgtggcatcacgacaacgcggggtcgtcgcaggtaggtcagagcccctgaccctgacggcgatatcaaattttgcgtaccgccttgcggatattccgcctctgcgcttcggacttccaaactgcagagaactcaatggcttggaacgttcgacccctcagctagttggctcccggtcatctgcggagccgacgatggtcccccaagagcagctagagagcgatcgggtcagggttttgctggtggaggacgaatggttcatccgatttgacgtagctgagcagcttcgaactgcggggtttgaggttgttgaggcgagcactgccgacgaagcgatggactacatctcctcaggcgagcgagttgacgcgcttataaccgacatccgaatgcccggaacccttgatggtcttgaactggccgggaagctgcgcgtcatgcaaccaatgctgcttatccttgttgcctctggaagcgtagaattggagagcgcagcgagccgcgtaggtaggttcatcagcaagccgtacgatcccaagcagatcgcagcgctgatcgcggagatgctcggctcggcgccgtaatatacatgcaagcagcaactgtgatgatcgtcgagcaggacgtcctcgtgcgtcacccgctggcggagtaccttcgcgagtgcggctaccgcgtggtggaagcagctcagcacgatgatgctcgtgaatgcctcgaaggtggcaaacacaacatcgatgttgccttgatcgacgtaggtggtcccaccggttccgggtttgctctttccgcgtggatacggagcaactatccagccgtgaagacgatgctaggcgcgacggtcgggaaggtccttgcactcgcgggtgacctttgcgaaggggggccccaggcggcgaagaagcttgattatcgccccgtgctcgaccacatccgccaactgctcgcgactcgaaagcggcattaggaaaagcggcattaggatatgcaaggcttggttgccaccaccctgcaagcctgaacgaggtatcgcagggaacagcaccataaaaattctgccgacgcatgaagagaaacacgccgcctgatgagagctattcatcggccgaagctttcggatcgttgtgcagttcgtgctttctacgaaggagttcgtcgatgtcgatacgaagcaattcgatggccaagggttcagtggctgatgattgaataaatttccactggctgaccatcctatcgatttcatcgcatttgtcgcacatggcgctccccctcattcaggcgggagcgcaaattgtctctcagtcactgtcataagccacaagtcgttcagtgatcgtgaaacgctatcacggcttcacatgttctccgagattattcgggcgttctttcgtcctatagagcgagctactcagtttgagtagcctgctcatttacagcgcacacgtctgctctgggtcaccggtcgccgctccgagcgctgccggagtcgccaaggcctgctattgggcggccagccaggatgtagcggccggcgactccgtccgccatgagcatcggcccgttcctgcaagccgcaaagacccgtcccgttgcatccgctgattcagcgctcaggccggtccccttggctatgttcgccgcgagcatgagtgccgtcgagatgggaagccgtcggcgcggggggtcgagctcgaaagagctgccaagcgcgatgacgctacaccccgatctcatcgcgcttcaacgtcgccgccgaaacggcgcgcaagcgccatcagcaccgcgaaggtggcaacccacaccatccgcgcgccgtagcgatcgtgcggaccggagatgacgccgcagatgaaggcgttgccgagcagggccagcgccacggtccccgccagcagcgtgaggtcgtcaagccggcggttcgccagcgcatgcgcaagcagcgtaaccagggccagcatcgaggccagcgcgacggggacatgcagccagttgacgtagtcgaaatcgattgcccagtgctgctgccgcgcggcccgcatcggcgcaacctgctcggggatgtagcgctcgatgatgccgtaggtgtgcgggatccagccattggtgccttcgccggtcgccacgtgcagcaattgctgtcccgtcgcgcgcagcgccgcggcggcctgccaggcaggatagtccttgagggaatgcacgacgatgtagctcatctcgtcgttcatgccttcgaaacgtccgagcgtgttgaacatgctcttgccccacaggaattcgtcggcgctggccggcagctcgttgcgatagggacagagtttgaagcgttcgcgcgggcaacggtcgttgagaaagcgcgcgacgatgccgtcctgcatcatgcggccgaaggcgacgccatagccgccgggcgtccaggccaacttgccggacagcgcgtaattcgccgacaccagcatcaggctgcccgcaacgatggtgaggctcgcttgcgtcagcccggcgagcggaagccggttgccgagcagcggccgcgccatccaacccgcgacgcagaggcccagcagcacgccgagcgtggcgctgtgggtcgcggctgcaaacgcggtgaagacgaacagcgcgatcttctccagcgtcgaggtgcggcttgcgccagccaccagcaggaacagcgacagcaccgaaagtcctgcgaagatgtcggtgagcagcatgctcgccagccagggcagcgcggtcgacaggatcaggccgaggctgatcgcgacgaagcgaaaggtctgcatcaatcccaggacacgcaaagtgagctgcagcagccacagggtcgccagcgactggacggcgaggttgatccagaatcccaaactctcgccgtaatgcagatagaggccgaacaccgtggagcggctggggacgagatagccctcgtaccagcgtgcgagatagccgccggtatcccattgcaacagcggatagccgttccagaacgccggcgcgatcatcaggaggggcagagccgccgctgtcaggcggagccataacgtatcggcggcgcgcgcgcgtaattgatcggtggtgatgctcaaatccgctcccgccctcgttcggccatcaccgcaatagcggctcggagagaattcaccaatagtttgacgcagcccgccttgaatttggtggaactctgaccaccttgatccgacttgccgcttggggcgtcagaggaaaccggttacgtttcaagggtttggcaggtgcccgcgaggcaaggtgctgttcactttcaggcaagcccgtcaggactttgtcgcctaggatgtgctatacagccagcaaaagaagccaattcgagagagcagatcccatggcagtgcatcaggtcaatccgggagggaagctcgcatcgctcgatccgatctgggaccggatccggggcgaggcggaggacatcgtccaccgcgagcccgagcttgcgaccttcatctattcgacggtgctgcaccacagccgcctcgaagactccgtggtccatcgcgtcgccgaccggctcgaccattccgcgctgtcgggtgatctggtgcgccagacctttgacgaggccctgcgcgacgatcccgatctcggcaacgccttccgcgccgatctcgtcgccgtctacgatcgcgatcccgccacctcgcgcttcatcgatcccttgctctacttcaagggcttccatgcgatccagacccatcgcctcgcgcactggctctacctgaagggccgcaaggacttcgcattctaccttcagagccggtcctcggcggtgttccagaccgacatcaatcccgccgcgcgcatcggccgcggcatcttcctcgaccacgccaccggcttcgtctgcggcgagacggcgatcatcgaggacgacgtctcgatcctgcacggcgtcacgctcggcggcaccggcaaggagaacgaggatcgtcatccgaagatccggcacggcgtgctgatcggcgccggcgcgaagattctcggcaacatcgagatcggccattgcgcgcgcattgctgccggctcggtggtcgtcaagcccgtgccgcacaacgtcacggttgcgggcgttcccgccaagatcgtcggcgaagccggctgcgccgagccctcgcgcaccatggaccagatgatcaacgcgatggggctttgagaccaggctttgatgctcgcgaagggccggaaattccggcctttttcgtccccaaattctttggcaattcatgctggcggttcgtcgcgtctcgtcctaaaaccccgccacgttagatttcgattggagacttgccgtggacgtcaaggaagtcaggaagctcgacgcgtatctgaagcgcgtattcggcaatcccaagatccgcgtcgtgccgcggcctaagaaggacgattccgccgaggtctatatcggcgaggagttcatcggcgtgctgttcgtcgacgacgaggacgacgatcgctcgttccagttccagatggcgatcctcgaagacgatctcgtcgatcaggaataggcgtttggcgccgtcgcgagcgtaacgaaatcctcgccgcgcgcgctctctcgtgtcccggacgcgctgcaacgccgcagagaaattggatccgctctctccaggccgtcattgcgagcggagcgaagcaatccagagtctttccgcggagaaattctggatcgcttcgtggagcctgtcatcgggtcgcgctttgcgcgggccccttggctcgcaacgaggaacagcagcgactgcagtccggtactctatcgtttcaacaacagcccgtcaccgccgcacctcggcgtcacgaggtcggctcacacgaccctctcgcatttttcatcgcgccattctgcccctgttttgcccgtcgcttcaagctagtttcgtagaatacgaattgccggagcgaataccgcgggaggggagatatagccacgtcattcgctcgcggcgcgacgatcaggtcatgattctggaaatacgaagtccggccaagggcttggctactgtgcatggggttgttttcgaagttctggcttgagaggcaccgagccaggtcagcacggccgtggtcagcccttcggtccgcgcagttgcgccgtcagcttctccatcgcatccgccacgtcgcgccattgcgacagccagctccgtggaaagcggaaggtgaggtcggcgccgccgacgcggcgctcggagaggcacatgcccggggtggccgcatcgcgcgtgcagcgcgcggtcagcgcgggactggcggcggaatagaggtcctcgcttccgtagggcgtgtcggcgcggaacatccgcatcgtcaggccttccacaggcatcgtcgcggcccgatcgagatagcgcggatagatcgtggccgttcgctgctcgggcgcgagcgcatcgtgatgggccgcgatcgacaggaagatgcgatcgatcgattgcaccacggcttccaccgtgtcggcggtgacgtgcttgggcgcgccgggcggctccagcgagggatagaggaagtcgagatcgatccgctcctgcgggcccgagtgccgctggatcttcatgcggatcgcagccctgggcaggttgaacagcgtgccgccgacgctcaccggcagcttgtccggtgcgttcgccgcgcgcgtgccccaggtcggccacagcagataggcgacgagcgcgaccgcaccgaccgcagccgcgcctccgagcacgatcgggacgatatgcgacctgatgcgcgtgcggggggacctgagggaagctgccgaaaacaccgtcatgagctgagcgctggggaaagccggacgtcggccggtggccgacgaatcagcggcgaatatgccatgcgacggcggtttcgcgcagcgttcccgcctgctgggacagaggagggacctgcgccgggcgggcggccgcgttaaccttcccttaaggataatgtagcgttaacccgcactctttgtcacaggaagacggtggcgttgcgtaagggcggaccgttccgatgacacctgaggctctcaataccttttttgcgatcggcatcggtttcgcgctcgcgggcgcgctcgtgaacggataccaggcgctcgcacagcggcccgccggcttcggcctgttgcaggagggcgtggcgccgaagaccttcgcggcggttccgttcctcgtgttcgccgcgcccttcatcatcatgcgcaacacgctgcgaggcatccaggtggaaagccgccggatcgagttcgtgatgatggcgaccgtcatcgcgagcttctggagcatgatgagcggcaccttcttcctgatgacgctgcgcgccgccggcattccggtctgatccccgcgcttcggacgcggccggccctttgcctccaggctgccgtttcgctatggctggtcaacgcgacaggagacctccatggcgatctacgagctcgacgggcaagcgcccgaccttcccgccgacggcaattacttcatagccgagactgccaccgtgatcggccgcgtgcgcctgaagccgggtgcgagcgtctggttcggcgcggtgctgcgcggcgacaacgagtggatcgagatcggcgagggcgccaatgtgcaggacggttcgacctgccacaccgatctcggctttccgcttgtcatcggcaagaactgcaccgtcggccacaacgtcatcctgcacggctgcaccatcgaggagggcgcgctgatcggcatgggctcgatcgtgatgaatggcgccagaatcggccgcaacagcatcgtcggcgccgggtccgtcattaccgagggcaaggaatttccggagcgctcgctgatcatcggctcgccggcgcgcgtgatccgcacgctcgacgatgcgcaagtccagaggatgggaagcgccgcgaggttctacgtggccaacggcccgcgcttcaagaaaggattgaagcggatcggctgaggtcagctgccttccgattcccgcgcttcgatcgcgcctgcgaccttctcgtggcccgcagcccacagcgcatgctcatcgctcccgtcgcggtaagggttggcctcagcgggaatgttttcgcgcgcggcgcgttcgccttccgtaaagggatctgaatccacggtcatgatcgtgcctccctcgcttcaagctgatatggcggcatttgttccggaacaggtcttcgtggcggccgtttaccgccaaaggagaatttcccatgcccgcatcgttcggccccatcaaagggatgatcgtgatcctcgcactcgcggcgatgccggctgcagcgctcgcgcaggcggccggcggctcgacaggctcgagcggagcctcgatgggatcaacgggaggctccgcgggatcgaccggaggtgttcgcaattcgcccgttccgccgcccgggaccaacagcctgggtacggctcaatcatccggctcgggagtcacgaccggcaccggcggaggtggtggggtcgatgcaaccgtcaacgccgagaatcggcagctcgataagagactgaagagcatctgtcgcggctgctgacgctcgcgcggaagtgagacagcgtggctgtcacgagtttccaactgaagctagcttggttcggaagcgtggagcgtgtccacgcggaggatcgagcgatgttacgcaagatgatgatgacggcgctggctgtcgccgcggtcgggctctcggcgccgcaggcggccgaggcgcggggcggtttcgggcgcggcggaggcttccatggtggcggcttccatggcggaggcggctgggggcaccgtcattggcatggcggcggcttttggccaggggtcgcaatcggggcaggtatcgccggtgccggcttctacggcggttactacgggtacggttatccctattacggcgtcccctactattatggtaccggctacaacgatggctatggcggctgctatgtcgcgcgaaagcgcgtcatgacgccgtcgggatggcgataccgtcgggtcgacgtctgcgagtgaggcggagtgagttgtcaaagaacaaggccgttgacgcagtataccgtcaacgaccttgccagccccggatattgaaatcggctcacgccatccggtaacggcgagcatggcccggaatcatacgggcgaatgtgatccagttcacaactggcgaaataagttcccgtcgcgtggtcgtcggctcagcttcgcgaccgcttgcgggcgctgtcgtgggcgcgttgccgcaccggtttcttgcgggtgaccggcggcgtttcgacctcgcttgcccgggcactggcaaaggactgccgcaggccgtcgatggattcgttcagggctgcaacctgctcggacaaccgcttggtatcggcctgttgcgccgccatcagccgcttcatggtcaggagttggtcctgcatcacctgcagctggtcgatcgattcctgctgggtcgcctccaatcccttggtcttctcgaccaactgctcggatgcttgggcggtgcgggcctgcagctgccgcgctgcgacgacccggtcggtctccggcgctgcaccggtataggcgcgccagatcgcgatcgaggtcacgcctacaatcaagagcaagagagctgccgcggtcagcgcgatgggctgaccgccgaaccgaaacaggcgattggatggcgtgtcctgggcgagatcgatcatcgctgacaaaacccaaattgaaacttggtgagtggcgaagaccggcaacccagagggtcaccggggcgtcccgaaagcgttaggtttcagcaaggaatgggaccaaaaagaggctgaaggccaaaaaaccagtgatcatcgtgccttgtggactccgagagcccccttgggagcaggatcaaggctgaaactgcgaaaaaggcccgaaatagcttttcgcgcgcggcggtgcataggggccgagccgggaggttgtcagccgcagccgtaccagtgattccgccagcgtcacagctgcggcaacgccgtcgaccacgggcagggcatgtgtggcggcgagctcagcggcgagatcggccatgccggcgcagccgagcacgatggcttccgcgcgatcattgcggatcgcggcggtgatctcagcggagatcttgccgacggcttcggtgttgcgctcctcgagtgcgagcaccggcacctcggcggcgcggacgcgggcacagcgctcggcgaggccgtacttcttcagattgtgctcgatcggagcgatggagacgccgagcgtcgtcaccacggcaaagcgcgcagcgatcaggctcgccatgtggaagccggcttcgccgatgccgattaccggcgctttggcggcggcgcgcgcggcatcgaggccagtgtcgtcgaagcaggcgataatgtgggcgtccgcgccgtcgcggtcggcctcgcggatgcagccgagcatgccggggacggcgaaagcctcgtcgtagaatccctcgatcgagaccgggcccatcgccggctggcgcgcatcgatcgatgtgccggacagggcgacgctgcgcgcggctgcggcgatcttcgccgtcatcgacgcggtggtgttgggattgacgacgtgcagtcgcatcagaccagactagtcctttctcagacgagtcgcttgccggcgtccggacctctggccgcctgccgcttgttgagcatgtggttggtgccgagcgcaagagtgatcatcgtgaacgaaacggctgaggtcatggatcacgcgatcgatgcggtctctccggcctggctcgatcacgccggcctgcggcaccgatcaccacgccggaatcgtggccgcgatccgcaagcgcaacaagcagctgctcgcgcgctgatgctgtcgcacccaccgaatcgaggccgaactgttcctgaaggatccgccgccgacgactgcggcttgcgggcgtgctcggtgcgagagcgacgcgtctcgccaaaaagttgcgcccagccattgggggatggctgggcgcgcgcgaaccggtctgggacggggaggggtggggatgtgaccgggccgcgtaactcgttgtctcgttcctaatctctcgcgctggcggtggagaccgccggcctggtatcgcccagcgagacccacacgttgggatcgctctgcgactggcgcttgacgaagcggtagccggtctccgtccaggcaacgacgttctcgttctgattgtcgagaacgaactcgcccttgtcggttttcaccgtgagcaccgcgtggccttcgcccttcttgtcgcgcacgacggtgatcagcagggcctggcgtggccaaccggcatccatcagcatcttgcgcttcaacagcacatagtcttcacagtcgccatagccgtctgacggcagcgaccacttctcgatcacgccccagtgctcctggtcggtcaaaggcttgacggtctcgttgacccagcgattgaccttgacgaggtcgcgccacgcagcctgcgacatcacgatgtcgcgcggctgcagcggtgcgccctggcactgggcggctttgtccgcgcagaactcgacccagccgatcggcgcacgcgtggtatcgccgaggctcgcgtagagcagacggctttcgccagcctgcgctgtcgcgctgatcccgaagagcatggcgaccagcgccagcttcttcccctgtcccctgaagtcaaacattgcggcccccgtttcttgttgggaccacattgcgcacggagcttttgagctgctgctaagtcaaccaagtcaagtcgaaacgaatacaagtaaaaggcgcgacgaattcgatctatacttgaatcgaattcgaataaaattggacatgactgcaattgattcaaattttatcgattaacccgaaacccgcggcggaaccggtgattgcgcgcgttcgcaggccctgcgttaactgcagggcgttcgccgccggacgtgaaaaaggcggcatcgcgcatcgcgaaagccgccttccagcctggaaatgtcgaggttttcgcgtcctcgcgctttaccgcgcggtaacgctctcttcgagtgtctcgatcggctgctcgtgcaagaactccagcgcgaagccgtcttcgaggttgcggaccacgcggccctggacccggccgagcagcaccgtcgatttcagcggcggccggttctcggcggcaatggcagcaccggacagagaaaggtcgatgatgcggcaggtcatcttggtgccgtcctcgagcgtcagcactgcaatggggttgcgcggcacgatacggtcatggcggcgatcctccggcagattgaggatgtcgcggttggcgagccaggtcagctgggccgccagcttgtcgcgcttcctcggcgtggctccgatcgtcatggcgaagccgttgtcgatgatgcgggtgatcttgccctcgacgcggccgatgtggtcgagataggcgaccacgcggtcgccgacattgccgatgccgggagcgagcaaagcgaggccgcccggcgacatgttgatcacctggcaggggaattcccggcggtccggcagcatgtaacggccgagcaggtgcaccttcacccgctggaagcgcctgcgctcctcggcggccggaagaaattttttgttcgccaacgccatttccaacacccgaccccccgcccgggcggagtccgggacgaccctaaggtgtatagggttaatgccgcgttaggattgggcctagccacgacgaaccgacgcaatgcgctcgaaaagccacattccgaggacccgattcgaccggtcaagccgcgcgcgtcacccgccgcagcgcgaccgacaggccaagccaccagtgaatgccggccgccatgccatatccgatcgtgttctcgctgaaggcccgcatgccgagcaagggattcgcactaccctatgtgagattggcccgtgcctacgcggttatccgtgggcctaagattagccgagcctgtcacagacatgtttctccaattgctcgacgagatgatcgagagaggctccggcagtgtgtcgagcacaaaatgctctcgatcccatgactcatagtcgtggttcactatctcctcccagctgggagctcgtgaccccagatgtcagcgacgcggtcttccgcccgccgctggtggatagccagatcgctgcagaccaattcgatcttgataatgcgtgccgaagtttccgcggcggtctgtcgccagccgatacggcttgcgagcaccgggttcacacagtcggcaacaacggttcggtggagcttgaggttctcggcggcgatggcattcgctatggcataccccatagagccaaccgccaggcctccctgccgcaatgcctgttcaatggcgtcgacacggaggtaggttgcgttgagctgtgtcgccaactcgcgggagattgtcgttttcccggtgccggggaggccgccgaatacgagcaatgtaggagagcgatcgctggtcatgtcttgtgatcagttgtcttcgtgccgaccccggagcacaccgcaggttcttgctgcgctcacgcaggctacgaggccgagcgcttggcacgcgcgcgcatctcacatacgcttcgcatcagcccgcaccatcaatcataacagacgggcagcgaggaagtctccatggaatccatccgcgtctgcactcacgcaggtccgggctccgagcccgtcatccgtaccgtgccgtggccgaaggtcggccgcaaggccgcgctgatcaaggtcggcgcctgcggggtttgcggcactgatttgcatatcctgaaaggtcattggccgaagccgctgccgtggccgttcacgctcggacacgagctcggtggggtcatcgtcgaatgcggcgatgaattttccgaggacttcatgagcaagccgctcaaggtcggctcgaaggtgatgatcccgcccttgatgccgtgtgggcgctgctattactgcatccattatccccagaccgcgaacaaatgcctgacgccggtctattacggccgctatctcggcttcgacaaggcgccgcacctgtggggcggctgggccgaatatgtctatgtcgatctcgagatgctgccgggcaccaagatctacaagctgcccgatgacatgtcgctgcggttgggagcgctatcggagccgctgacctcctgcattcgcgccttcaaccgtgcgacccgcgccggcggcttcagctggggcgacaccgtggtgatccagggctcgggaccgatcggcattctcgccgtggcggccgcaaaagagatgggggcagggcgcgtcatctgcgtcggtgcgcccgaggcgccgcgattgaagctcgcgcgcgagttcggcgcagaggcgacagtgaacatcgaggagctcaaatcgccgcaagaacgcatcgcgcgcgtgcggaagatcgtgggcggtttcggcgccgatctggtgatggactgctcgggccatcccaccgccggacccgaaggcatcgagatgctgcgcgacggcggcacctatgtcgagatgggccagttcaccgacgccggctcgatcgacacctcctggcaccgcatctgcaccaaggacctcaacgtgctcgggtcctggggcttcaccggcaacgatctgccgttaggcgtcgacatgctctaccgcacgcgggacaagtatccctggctgaagatgcatacgatctatcccttcacggaagatggcgtcgcgcaggcggtgaaagacgcgatggcgatgaagacggtgaagtcgaccatcgtgccgtggccagagctggtggagtaatgccccgccgtgatagacgatccgaagcccggatgagcgaggcgatatccggagcgtttttcgaatcgggcgttcccgcatgtcgccccgctcaagcgggttacgtgccgaaatctggaatgagggccacgatgacagatgcccccgacgtgaacgcgcgctcccccttccacgccatccgcgcgatcgattacaccgtcatcttcgtgcgcgacatggcagcgatgcgccgcttctacgagggcgtgctcgccttctccttgctacgcgagctgtccccgaactggatcgaatacggcatcggcagcaacacgctggttttggcgaggccaagccggaccgcgtccgacgcgccgatcccggcgggaagcgccgcgctgcagctggccttcagggtctcggcggacgaggtcgaccagtgcgccgatgaactccagcggcaaggcgtggtgcttctggctctgccgacggaccagtccttcggccaccgtacgctgttcttccgcgatcccgacggtaatctgctggaggtgtacgcggaaatctgaaagaacctgcatggtacaagcgtccggaacggttgatgccaggtcggccgcagccaacgggcgcgttactctccctcaagccatgcaacataagcatggtgatttccccgcgcttggcgtaaagagcatccaaatcaaatcgccccgtgctgctggccttctgccgcgcacgtgagctcaggcccgccgtccaccgtttacgcgcctgaatcaaccaaggttctccatctcgtgtcctttccggccctgaccccgccgctcgcccgcgctttggccgagcggaactacgattctcccactcccgttcagctcgccgtgcttgcggacgaagccgctggccgtgatctgctggtttcggcccagaccggctccggcaagactctcgcttacggcctcaccatggcgaaggatttgctcggcgataccgagcggttcgagcaggccggtgcgccgctcgcattgatcgtggcgccgacccgcgagctcgcgcttcaggttcagcgcgagctggcctggctctacggacatgcaggcgggcgcgtggtctcctgtgtcggcggcatggatccgcggcgcgagcaacgcgagctggcggcgggcgcgcacatcgtcgtcgggacgcccggccggctctgtgatcatttgcggcgcggtcgtctcgatatctccgaactcgctgccgtcgttctcgacgaagccgacgagatgctcaatctcggttttcgcgaggatatggagttcatcctcgagaccaccccggagacgcgccggaccctgctgttctcggcgacctttccgcgcggcatcgtcgcgctggcccggcaatatcagcgcgacgccttccggatcgaggtcgcgggcgacgaaggcggccacgccgacatcgagtatcgcgcgatccgcatcgcgcctgccgatgtcgagcacgccgtggtcaacgtgctacgcttctacgaggcgccgagcgcgctggtgttttgcagcacgcgcgatgccgtccggcatttgcaggcggcgttgctggagcgcggcttctctgtcgtcgctctctccggcgaattgacgcagaacgagcgcaccatggccttgcagtcgttgcgtgacggacgcgcccgcgtctgcgtcgcaaccgacgttgccgcccgcggcatcgatctgccgagtctcgacctcgtcattcatgccgatctgcccaacgacgccgaggtgatgcagcatcgctcgggccgaaccgggcgtgcgggacgaaagggcacaagtgtcctgctggtgccgcccgcgcgtcggcggcgcgcggagctgctgctcaatctttcgggtatcgatgcggtctggggcacggcgccgcaggccgaggagatccgcaagctcgatcacgaccgcatgaaggatgtgctgttcaccgaagagacgacgcctgacgacgtggccttggcgcaggcattgctcgccgagaggtcagccgaggagatcgccgccgcgctcgcgcggctttatcgcgcccggctgccgtcccccgaggacatcatcgatcccggtgagcggagcggccggccgcgcgacgggcgcgggcgcgacagacttgaaggtggcgacgatcgtcccgcgaagccgcgatcgaagtccggacaagcgtcgtcgaagcacggcatggacgagggcagcgtctggttccgggccgcgatcgggcggcgtaagaacgcggaggcgcgctggctgcttcccatgatctgccgacgtggcggcatcaagaagggcgatatcggcgccatcaaggtcatggacaccaccaccgagttccagatctccgagcgggttgcggagtccttcgcagcaaaggtcaagcgtccggacaaggaagacagcatccgcatcgagccgatggcggacgcgccgcagcagcaggcacggtcggaagagcgatcacacgcgccgcggcgcgcgagagacgatggcgagcgccgcgaggatcgtccgcgcgaggcacgtgagttcaaacctcacagcaaaccgctcggcgggcgcggaccgagattcgaggatgcgccgtcttccggaatgaaaaagaagcatcgcgataagatgggccgcgcggagccgtcggttaggccatggccggtgaggggggcgccgggaaagaagaccaagaagaagcatcgcggctgaaacgccaccgttcaggaaggacggctatgatgccgccggcttgcaccggcgacatcactcgaaaagtcaggtggactcagcggccaccgccgccaccacctccacctccgccaccaccgccgccggcatcgcttagcgacgaactgtagcggggatcggtctgcttcatgtagacgggcgaggtgtcgcgatgggttacggtggtgggttttctgcccacgttcggcgtctcgatcaggaagccgcaaccttcgaaaaaggcgatgtcgcagccataggtccggtactgcgccgcgttggcgctggtcgcggtgaacgcagtcgccgcaacgcacgcaacgaaagcaactttcgacaatgtgagtttcatggacattctccagcctcggttcggcgagaccggaagggctcgcacacaccttcgacggaggctgatctgacccggttcgagccggcggtttcacgcccgcgtgaggcgggagcgagcggggaggggcgttaagtcgcagcgaggtcgcgcagcatgtaggtcgcgccctctccgtaggaggccagtttcgcgcgcaacgctgtatccgccatcagtggacgaaagccgagtcgttgccacagcggccgcgtgccgtagaccgagaccagcgcgagcgttccgatgccggatgcgcgcgctagctccgcgatgcccgcaatataggtgcgcgcgacgcctccgcgccgatgtggcagcacggcgacatcgtgcacgtagaggcagtctgcgtcttcgggcagtcgttcgaggaaaccatcgagcggcgggatctggtgctgcttccagggatgcccgagcccgtagccggcgatctcatcgccggcgacgagcacgcggcatccgtcgggacagagccgcatcttctccgcgagcacctcgaggctttccggaagatcgggatggatgcgcgccgcgatggtgctgatggcgggcaggtcggatgcgtgcgccggacgccaatgcggcttgctcatgtcgtatcgccgttccatctctgttggttcagtttattccgctgcatcggcgcgcgcatcgaaaaatatctttgccgcctttcacggaatacggggccacgcgcggcgtcctatccatgcaagccaatcgcatgaaaggagatatcatgacgtcctcgatccgcctcgcgctcgcgctcgccatttcgctcgcgatcgctcccgccgccttcgcagcgccgccgaccaagaccggcaagaccgacaagggcaccgtgctcaccgacaccaagggcatgacgctctacaccttcgacaaggatgcggatggcaagtcggcctgcaacggtccatgtgccacgaattggccggtgttgaaggccgaggcgagcgacgtcggtggcgacggctacaccatcatcaccagggacgacggctcgaagcagtgggcctacaagggcaagccgctctacacgttcgccaaggaccagaagcccggcgacgtcaccggcgacggcttcctgaacggcgcctggcatctggcgatgccgtaactcccggggcgccgacgccctgcgccggccgttgcagacgacggccggcgcacttccgcgccgctatctcggatattcgagctgcatcgcgacgaagtcggccgtgcgctccccgtagcgcgcatcgatggcgtgcaatgtctgctccagcgcccgcgccggaggcaggtcgacggcggcctgcagcgtctgcttggccggccagcccgccgcgaccttgtccggcaggatgcggagaccgccacggctggtctgcgcctctgccgtggcggcgaaggtgagggcgtgcgagcgatatgtgcgcgaccaggcatcggcaaccagtgcaagcgacacctcatcgacttcaggcgtgagtgggatgccgaattggtcccgcttccagaatgcgagcgtgttggcgatcgcggtcagcgcaaacgggcgcgtgaaccggaacgcctcgctgcggtggcgcgcatcccattccgcaagtccgatgtcgcgggcaaccgcctccgccttggcgcgacccgcgatggcctcgaccagggtcagggccatcggcatggatgcggtgatgccggtcgtcgtcgcgacgccgcggtcgaccaccagcctgcggtccgcgacatagcggatgtcggaatgcttttgcagatctggcacggagtaccagtgcgtggtggccttgcggccgtcgagcagcccggtattggcgacgaccttggcgccgacgcaaacgccgatgacgatcgcgcccttgctggcctggctcttgatccactgcagggcgacggcatcgtcctcgcggctcatcgcggggacgacgacgtagtccgcgccgtcgggatgcgcagcatcgaattcggcgatcgtggcgtgcggctgcaccttcaatgcgggatagagtgcgacggggccaggctccgttcccaacgtgaggacgtcggcgacatctgcgcgcgcgaggatgccatagggcatcagatagtcggtcgtctcgctcatgtcgttgataccaacgatggcgatcaggggacgtttgcgctttggcggcttcaatgccgcaagtgttgcctcggtctcctctttggatatcgctggcgcgttgccttgagccggcggtccgggcagcaggaacagccaggttccgccgatcgccgccagcaatgccacgcagccgacgcaggtccaagccagaatgcgccatgccatgatgatgtcacccgatcctcgttgcgtcatgcgggcgaaagctactccctggcaacgacatcaggaatgacgcagatccggcaaaaacggccatgtgcagattgatttgctggcgcggcggactgcggaggctatctcagcccctcatacaccatcagtccgcgtgcgacctgcaatttgcggatggcgcgcggcaggagcttctcgggctggtgcaggtaacgccaggatgtgagcgtgaaggccaacaacgggccgcattcgttgccgaacggcgcgagcacgccggtcacgctcacgggggtgtgtggccgggcgttgaaagggagcagcagcagttcgagatgcgccttgctgccgtcctcgcgcgctgcggtgacgcctgcgatcgcccccagcgtctcgtcggcgacgatggtggtgatctcctcgatctcgccgcggctcgcatcggtgaacagtgccgcgaagctctggtccttgaggtctgttcctgcgagcgcgcagacgcgcgtgccggcgacgcggaacgggaagccaaggttcggctcacaggacagcacgaagatgtcgccgagcaggccccggactgcggccgggtcgatgtcggcccggtcgggggcccgcgccgtaccgcgcttcttgtcccaatacgcgaagaacgcgcggctcgacggatgtttcatgactgaacgctcgccccgggggcgcaaccccgcgggacagacctgtcccgcttcaatgcacccgcgatcccttcttttgttgtgcaggagggaatctgcagcgtccatgccggagcggcggtttcagcactctcgtgccaggctttgcgtcgttaacgttaagttaactatgcgctttgtgccggccgctcgcctgctatggtgaccgcggtcgcaagcctcgccgctttctccaggttctcggcgaggcctgtaatttgggcgtcaaacagtttggtcacgggccgcgggaggggtggggatcagccaatctctccggccaccggaagaccgacacggacaggcagggctttcccagggccctgccttttccgtcttcgcagcacgcttttcctcaaagcgaggccccccagtcgaggatttccttttgtgcacttgcgcaggggcggtctaggcgactatctccagacggtcgctccgatcgcgcctgaaagcgaagctgccttggattctccgcaagattcgtcaccggacctgccggccgtcatcgaggaggctcctcgcgagccgatcctgacgctgcccccggcactgaccgcctatatcgtcctgctggcggtgatccatctgcgggtgctgctgccgccggagttcgagaactggaccatcgacgtgttcggcttcatcccgaagcgctacgattcctcgctgctgaatttgcagattccgggcggggcgggtgcgaagatctggaccttcgtcacctactcgctgctgcacgccaatctcacccatctcggcttcaacgtgctgtggctgctgccgttcggcagcgccctggcgcggcgctttggcacggtccggttcttcgtcttcctggccgtgacggcggctgccggcgcgctcgcccatctcatcacccatgagcacgcggtggcgccgatgatcggcgcctcggcctcagtgtcgggcgcgatggcggcggcaatccgcttcgccttcgtccgcggcagcttcctgtcgttcagtcgttcggacgccgacaccgccgcaagggttccggcgctgccgctgtcgcgtgcggtgcgcgatgggcgggtggtcggcttcctcgccgtgtggttcggcgtcaacatcatcttcggtgttggcgcgatcggggtcgattccgaaacgacgagcgtcgcctggcaggcgcatatcggcggcttcttcgccggcctgttgctgttcgccctgttcgatcccgtgccgcgggctcgaggcaatgctgcgggtgcgtcatcacaggacgtttcagaccgtatttgaagcggcgcttgcggctccgcccgaattcatccatcattccccagaagaatgttccgcaagccgctggcgacgatgcttcgcaaaggcgcctgagcgtgaaaccggcgctgaaactgttagttgtagactcgaagaacaagttcggacgcggcaaggcggacggctccgattcagggaggcgacaatgacggtacgttccattctcaacaccaagggccatcacatcgtgagcgtcgagcccgacgccaggctggccgccgcgatcaagctgctcggcgagaagaagatcggtgcggtgttggtgatgaaccagagccggctcgagggcatcctgtcggagcgtgacatcgtccgcgtgctcggcgagcgcggggccagcgtgctggaggcgccggtctcggaggtcatgacccgcaaggtcgtgacctgcaaggagaccgacaccgtcgccgagctcatggggatgatgacgtcaggcaaattccggcatctgcccgtggtcgacaacggcaaggttgtgggcctgatttcgatcggcgacgtcgtcaagcgccgcgtccaggaatacgagtccgagcaggaagccctgcgcgactacatcaaaacggcctgatcgccctcgccgctggcctcattcctgcgctttcggcgcggtgccctcgggcgccggcgccagcacatgaatggcctcctggatcgaatccagcgcgcgctcggcggcgcgggtgccgaaggcaatgagttcgtccgcgcggtggaagtcgaaccagccgatctggccaacccgcggcgtgatcagcatgtctggcggatcgccggcgagacgggcgcgggtaatgcggtcctgcatgatgttgaaggcatcgaccatcaccgaggagatgccgggccgtccagcgccgccgaagaactcgcgcttcaccgtcctctccggcgagaacagccgcggaaagcgccgcttggccggcgactccccggctacgggcgcggcggtgtccggcattgcgccgtgcgaatagatcgtcgtggaatgggtaaagatgtcactggaaagatttgctgcgatgacgatttcggcaccgagtgcccgggcggccgaaaccgggaccggattgaccagcgcgccatcgaccagccagcggtcaccaatcaatacaggcgcgaagatgccgggcagggcataggaggcgcgcatcccgtcgaccacgcggccgcgcgtcagccagatctcgtggcccgtacggacctcggtcgcaacagcggcgaacttgatgggaaggtcctcgatcagggtctggccgcaggcctcctcgagccgggttgcgagcttctcgccgccgatcaagcccgagccattgaggcggatgtcgagatagccgaggatggtgcgcatgccttgcaggctgcggccccattcttctagggtctcgagcttgccagccgcatagaggccgccgaccacggcgccgatcgaggtaccgaccacgacgtcaggcacgatgccgttggcgagcagggtcttgataatgccgatatgagcgaaaccgcgcgccgcgccgccgccgagcgcaaggccgatcaccggccggcggatgctgccgagccctaccttctcgccattggagccgttcgcgcctcgccccttcaatctgtccagcaccgaaacactctcctaacgccgaggccagcccgtgtcctaagactaggcaccgcatctgcgctccgccataccgggggcgaagcatggtttatgccgctttgcggagggcacggggcaggagtatggcgagggcgatgcctgtgggtaatcacgccgccgtcactcgggttccagcgaacgtgctcggaccgtatttcctaggacttcagaggcttgaatttgcctcgttttcagtgaaaagcagggaccatgacacgcgggggtgacggcatcattggatggcggcgcagcagcaggctgctgtcggcgctgatcgttgcggcgtgccttgttaccgcaggccaaaatgttgcgcaggcgcagcttttctcggatcgtccgccgccggtgccgccggcatccgtgcccgaccccggcggcgccgtcagcctggcgccgccctccgggccgggcgccggcccgccaagcctcccgccgacgctgatgcagccggcgacgcccagcatgccgccgccagcggtcacgaccgtgccgccggccgccccgctgaacgcggcggtgcccggacagggcgtgctgtcgctgacggcgaaatacggcaaggactcccctgccattaccagcggcctggtatggcgggtgtttgccgaccgtcccgacgagaacggcaccttcaagctgatccgcgaggaccgcagcgccacgcccaacatcgtgctgccgcctggcaattacgtcgttcacgtcgccttcggcctcgtcagcgcggtgcgcaccgtcagcctgaaggccgagaccgaccgcgaatcattcgtgctgcccgccggcgggctgcggatcgagggccgggtcggcaccagccgcattccgcagaaccagatctcgttctcgatctacaagggcagccagttcgaatccggcgatcgcgcctcactggtgccgaacgtcgcggccggcgatgtcgtgctaatacccgagggcacctattacatcgtctcgaattacggcgatgccaattcggtagtgcgctcggatattcgcgtccaggccggcaagctcacggacgtcaccattacccaccgcgccgccgtcatcacgctcaagctggtcagcgacaagggcggcgaggcgctcgccaacaccgcctggtcggtgctgacccccggcggcgacgtgatcaaggaatccatcggtgcgttcccgcgcgtcgtgctctccgaaggcgaatatcgcgccatcgccaagaacgagggcaaggtctacgagcgcggtttcaacgtcgtcaacggcgtcgacggtgaagtcgaggtcgtcgctcggtagggcccggcgcccatgccgggtgcagccgccgtgacggctgggacagcaattctcatctggcgcacgaaagtgcatccccggttaccgtttgcgccggtccgccatgaatgccgggtgagcaacggctgtacgcccgcatccttgagctcacctgaaggctgctggcgtcgccaagttgccgctcgggccagcgcaaacaccgtcggcgggaccttattcccgcatcgtgcgagttcgtcgctccgctgcacgatacgaatttccgatcatcaattttatcctctttgcactccgctaggctatatgtctggcgtccgtgtaatgggggccggagcaggcatatgcgcctgcgggaccggcatggagcaggggaccaggccggtcggcatgttcgaagtgatccttacaaggcgcaagcggtttggctggcgatggcaggtgtgcgaccagtccggcaagatatttgccgatggcttcgaacgcacgcggccgtccgccaaatatcagagcgagcgtgcgttgttcttcctgttgtcgcaagcctacttgcgcaaccgctctgcggcgtccagcgaggattagtagcgaacagcttcgcagccgattgagcgattccgggccggcgtcggcgacgcgccggatattgtttcgctcatcccggcaaccagcctcagctcagatgttaatgaccagcttgcccttcgcggcatgatcgcggatcaacgcatgggcatcaccaacgctttccagcgtaaccgcctgggatcgagccgcggcaccagcttgctggtctctacgaggcgcgtcgcctgcatcatgatctccccgtgatgtggccgcctccgcccgacagcagcggcagcaggctaagacccccgaataggtggcgcggaacgatagcggcgcaagggcatgcgtaccccagccgagcgcgctcaccacatggccgaagcggcgcacggcttcgaatgaggcgtcgagcaccttgccgccgacagtgtggtagacgacgtcgaaaccgacggctgccggtatgctgcgcgacgcctcgacggagtccggaacacgagagcatcgtcttcgcatcacggtcataatctctaacgcccactaaccaacacctgacttaaaactgtcataatcgccgaatggaacccgcgcctgcgcgccttttacatgtcgttaagcgcgcctgcattggatgcgccggcaaagtgcgttggggactgcaatgactgccgcgaagaagatgccgggaaaaccggccgccgaaatgtttgacgacatcccggtgcttcagcgcaaatggcacgcggcgctgaagcccggcgaaaggctgccgcgctacgaggacgtgatgctcggcagtctcggacggctcgccgaccacatcgcgctgctcaggagcgacggcgcgctcgagctgtcgcggagcgggcgctatgtgcaaaaatggctcggcgaggagcgctgggacattccagtcgtcgagctttcgcccgattgcgccacggcgttgtcggaagcggcggcgaacgcgcttgcgacgttacggccgcaccaggcgagtgcgcattgcgtgcgcgacggaatcgtcaggacctacgacgtgctggcgctgccgacctcctcccgctggggcgccacgctggtcggtgcctatgtcaacgagcgcggcgcgcaatacaatcttctcgacgcgatcttttcctcgaccgaggacgcggtggtctccctggtgacgctgcgtgatgccggcggcagtccgctcgatctccaggtcgtccatcacaacaagagtgcaaacgcgctcctgaaggtcgagagcgggcccttgctgtggcggcggatcggcgagggcggcacgctgctgggctcgcccgaaatcatcaacttcctgctcaaggccgtttcgggcgaccgcggcgagcagctcgagatcgagagcgagggacgctacctccggctcagcgctaccgccttcgccgacgtggtctcgctgacgatctccgatgtcacggccctgaagcggcgcgatgcctcgttccgcctgctgttcgacaacaatccgatgccgatgtgggtgttcgatgccgagaccaaggcgttcctcagcgtgaacgacgccgcggtccagcattacggctacagccgcgccaccttcctgcgcatgaagctgcacgagatctggcccgaggacgagtgggacagccacgccgcggcgctggagcgcgtcggcgatgcctatcattccacgcgcaactggcggcacttgcgcgccgacggcagcgagatcgaggtgctcactttcggccgccgcgtcgccttcgacgaccgcgatggctacttggtggcggtggtcgacatcaccgaaaggcgcaaggcggaggcgcgcattgcccacatggcgcaccatgacgggctcaccgacctgccgaaccgcgagcatttccaggagcgcctgaaacaggcgctcgatcaggcggagggaaaaagggtcggcgtgctctacatcgatctcgacctgttcaagaacatcaacgattccttcggccatccagtgggtgaccgcctgttgaagcaggtcgccgagcgcctgaccaccgccgtgcgcggcgccaatctcgcggcgcggctcggtggtgacgaattcgccgtgatcctggccgccgacgtctcgccaaacgaggccagcgcctgcgcgtccttgctgatcgacatggtgaagacgccttacgatatcgacggacaggagatggtgatcggcgccagcatcggcatcgcgctgtcgccgggcgatggcaccacgccggaagagttgatgcgcaatgccgacatggcgctataccgggcgaaatccgacggcggtggcgtgcaccacttcttcgagcgcgagatggatcttcaggcgcagaggcgccgcgatatggagctcgatctgcgccgtgcattcgccaatggcgagttcgagctgcactaccagccgctggtgtcgatcgcctccgaccgcatctccggattcgaggcgctgctgcgttggcgtcatccggacaagggtatgatctcgccggctgagttcatccccgttgccgaggacatcggcctcatcatccagctcggggagtgggtgctgcgcgaagcctgcgccgaggccgtcaagtggccttccgacgtcaaggtcgctgtcaatctgtcgccggcgcaattccgcagccgcaacctggttcaggtcgtgatttccgccttggcgcagtccggcctgtcgccgaagcggctcgaactcgaaatcaccgagtcgatcttcctggccgagaccgatgccaatctcgcgatcctgcaccagctgcgcgagctcggcgtcggcatctccatggatgatttcggcaccggctactcaagcctgagctatctccggagctttcccttcgacaagatcaagatcgaccgctccttcatcaaggatctggcggagcggcccgactgcggcgcgatcgtgcgcgcgatctccgggctcggccgcagtctcaacatcaccacgacggccgagggcgtggagaccgaggatcagctcgactggctgcgcgccgaaggctgcaacgaggtgcaggggttcctgttcagcgcggcccggcctgcgaccgacatcgcgaagctactggctgatttcggtcagcgcacctcacgggcggcgtagtgggggcgggtagcaatcgtagaccagcgccttgaacgcgggagtgatgcggccgcgctcgttctgggtctgctgcatcatcaggtagaccatgtcgagcttgggatcgacgccgaaataggtgccgctgcctgagtcccatttcagctcgccgagcgagccgggcggcggcggtttggcgttgccgggatcggtccgcacggcaaggccatagccatagccgaaaccgtccccggggaagtagaaatagtcgcgtccgacgccggagcccggcccgatgtgatcggtcgtcatcgccttgaacgcggccgggctgagatagcgcctgcccgcgaaggcgccgccgttgagcagcatctgtgagaagcgctgatagtcggtgatggtcgagagcaggccgccgcctccggattgccagtcgggatggtcgaggcgctcgcgctcgccggcgagcaggatgtagtcgttcggcagcggacgcgccatccgcgccagctcatcctcggttgcgagcacgaacttggtgctgttcatgcccagcgggtcgaagatgcgttgtttcagaaactgataaagcttctggcccgagatgatctcaatgacgcagccgagcacgtcggtcgaatggccgtagcgccacagcgttcccggctgccgcgccagcggcagcttggcgatgcgatcggcgaatacccggttgtcgaggggattttcgaatatgtcggccgtcttgtaggcctgctcgatcaattcggctccgatataatcgtaggtgatgcccgaagtatgccgaagcagatcctcgatggtgacgggacggaccagggggacgaggccaagcttcagcttgccgtccggctcggtgagctcgagacccaccttggtgtcggcaaagagcgggatgtatttcgagacggggtcggtgagcgcaagcttgccctcgtcgatcaacatcatcgcgccaaggcacgtgatcggcttggtcatggagtggatggcgaagatcgtgtccggcgtcatggcgaggccggtcctggtgtcgcgcacgccgaagctcttcagatagaccggctcgccgtgctgctggatcaggatcaccgcgccggggagtcggccgcttcccacctcgttgtcgaaatacgcggtgatacggtcgagcccttcgggcgagggggcgggactatcgacagcgcggcttggcgcgaccgcgccggcgagcatcgcggccccgacaagaaattcacgccgtcgcatccgggcttcctcccacgccgggatcaaagccgcacaacttttcgggcgtcaacaagccctggactaaaaccgcgtcacaatttcggaaaggaacggtcgcggtcggtcctcgctcggtttcgtcggcgtgccgatatggacgaggccggcgagcttctcgtcaggcttgaggccgagcccatcaagcacgtcgcgatcgaaggcgaaccagccggtcagccagcatgcgccgtagccgagcgcgctggcggccgtgacgatgttcatggcgctggcacccgccgacaattcctgctcgaacgccggcaccttcggatgcggcttggtgaagctcacgatgccgatgacgagcggcgcgtccatgagccgcttgcgctcggtctcgatgtcggcctccggcgcccccgggttctttcgcgcaaagacccttgcgatcacctcgccggcgcgctggcgggcgtcgccctcgaagacgatgaagcgccagggcgcgagcttgccgtggtcgggtacgcgcgcgccgatggtgaggatcgtctcgagctcggccggcgagggaccgggcccggtcatttcgcgcggcttgacggagcggcgggtcttcaggagttcgatggcgtcgggcactgcgatatcctcttcggctggtcgtcgggcgtgccactccgagataagcacgcacgcccgcaaccggaagcgaatttagatgggtttcaaggatcagacgccgccgcgtgcccgccggacatccggcggggtcgcctcgtccacgagggcggcgatcgcctccgccgtcgtcatcaccttctggccgtcgctgccgaggcggcggaccgagaccgagtgcgtctcggcttccttctttccgaccacgagcagcgccgggatcttggccagcgagtgttcgcggaccttgtagttgatcttttcattgcgcaggtcgacctcgacccggagcccggcgcgccgtgcctgctccatcaccaccttggcgtactcgtcgccttccgaggtgatggtcgtgaccaccgcctgcaccggcgagagccagagcgggaagttgccggcatagtgctcgatcaggatgccgatatagcgttccatcgagccgcagatcgcccggtgcaccatcaccggcggcttcttgccgccgtcatggtcgatgtagaaggcgccgaaccgctccggcaggttgaagtcgacctgcgtggtgccgcactgccagtcgcgaccgatggcatcgcgcagcacatattcgaacttgggcccgtagaaggcgccttcgccgggattgatttcggtcttgatgtgattgttctgcgactggatctcgcgcagcacggtagccatcacgcgctcggcgtgatcccacatcgcatcggtcccgacgcgcttctccggccgggtcgagagcttcaccgtgagatcgccggtgaagccgaaatccgcgtaggtcgagaggatcaggtcgttgatcttcaggcactcttcggcgagctgatcctccgtgcaaaagatatgcgcatcgtcctgggtgaagccgcgcacgcgcatcaggccgtgcatggcgccggaaggctcgtagcgatgcaccacgccgaactcggcgaggcgcagcggcaggtcgcgatagctcttcaggccgtgcttgaagatctggacgtgacccgggcagttcatcggcttgagcgcaaaccagcgtttgtcctcggcttcgtcgccggccgattgcgccgcgaacatgttctcgcggtaccagccccaatggcccgaggtctcccacagcaccttgtcgaggatctgcggcgcgttgacctcgttgtagtcgccggtcaggcggcgacgcatataggcgatcaactgctggaagacggtccagcccttcggatgccagaacacgacgcccggaccttcctcctggaagtggaagaggtcgagctcgcgtccgagcttgcgatggtcgcgcttttcggcttcctcgatctgcttgaggtaagcgtcgagatcctcctgcttggcgaaagccgtgccgtagatgcgggtcagcatcggattgttggaatcgccgcgccaataggcgccggcgaccttcatcagcttgaaggcatttccgaccttgccggtcgaggtcatgtgcgggccgcggcacaggtcgaaccagtcgccctggtagtagatcttgatcggctcgctgccgggaatggcatcgaccagttcgaccttgaatgcctcgcccttgtcgcggaacacctgcttggttttttcgcgatcccagacctctttcgtgaagggcttgtcgcgcgcgatgatctcgcgcatcttcttctcgatggctgcgaagtcttctggcgtgaacggctcgttccggaagaagtcgtagtagaaaccgttctcgatcacgggaccgatggtgacctgagtgcccggccacagcgtctgcacggcttccgccagcacgtgcgcgcagtcgtggcggatcaattcgagcgcgcgcggatcatcgcgattgacgagttcgatcttggcgtcggtctcgatcggatcgttgagatcggcgagcgcgccgtcgagcgccatcgcaaccgtgcgcttggccagcgacggcgagatgcccttggcgatatcgaggcccgtgatgcccttgtcgaactggcgttgggcgccgtcggggaaggtgagggtgaccttgggagcgggagtcacgggtttcagattggagagactgtactggaagccggactcggatttgggctggtcggtcattgcttttctcctgaggctcactcctgcgaacgagcgcaggtaagcgggaaagagcgatatatcaggcgattcggcccgcgcaatccggcaattccaagaaagtgacggccaaaacccgggaccttgcaccaactatttcggacagcgcccttcaattggccgcaagcctgatgtacatgcatttgcatggaaagagcccccgcagccggacgtttcgccccgaccgccctgatgctcggcaatctcgtcaccggctgctccgtgctggcgccggcaggcatgctgccggaattggcgacgggactggaggtcagcatccatgcggctggactcctgatcacgttcggagcggtgacgctgtgcatcggatcgccgctgacggcctggctcaccagccgcatcgaacggcggacgctgctcgcaacaacgcttgcggtgcttgccttcggcaatctcgcttcggccttcgccccccactacgccagcctccttatcatccgcctcgcaatgctcgcggtcggcgcgctctacacgccgcaggccgccggcacggcagcgctgatcgtgccggccgagcggcgtggcagcaccattgcgtacattttcctcggctggtcgctggctgccgcccttggtttgccgctgatcaccttcatcgccagccgctatggctggcgagcggcctatggtggcatcggcgcgctcggctgcatcagcttgctgctgttgctgctgcgtcttccggcgggcctgaagggtgcaccggtcgatctgaagacgtgggccgcagtcgggcggagcaggacgatcttgcttctgctcgcgatcacgatgctgcagatgtcggggcagttcgtcgtgttcacctacatgggcccgttgctcaacaagctcactggagccggtgccgatgcgatcggcatggtgtttgcgctttacggtgtctgcggattccttggcgtcgtcctcgccacccgcatcgtcgacacctcggggccttatcgcacctcgttgctgttcacctggctgctgcttgccgggatcgcgggctgggcggtgagcgcaggctcgctcgtcttgatggcggtcgcggtcgcgacctggggactaggcttcgcttccaccaattcgatgcagcaggtgcgactggtcgcagcggcgccgccgctggcatcggcgaccgtcgcgctcaatacctcggtcctctatatcggccaggcggtcggctccgccgtcggtggcctgctgtttgcccgcgagctcctgcacacgctcggcttcgtcgccgtcggtttcgtcgtgctggcgctgatcctggtggtcctgacccggcccggtccggtggctgccacgtcctgacactcgcgcatgatgtgcgcaaggcgcttggcaaaccgcgcgcgagggcgctagaacgccggtcatggggaccaaagagagttgactgagatgaggatgattctggcggttgccgcggtgctctattcagcctccgcatttgcgcaagccgacaagccaccgatggtcggagacaagccgctggtgcaggtcaagcccaaagaggccgcggccaagcctgccgcggcatcgaagggcaagccgcagtcgatcgccgtccggctccaggcctgtctcgagatcgacgacggcaccaaggatcgcctcaactgctacgacgccgtgatcccgccggcgccgaaaccgaagcccgcgaaggccaagggctacgccgattgccggttcttcaaggaagaggacgagcggctcgcctgcttcaacggctttgccgagagcattccgaagctgcccaagaactgatgttcgcgagcccaagcgcgatgcgctccaaggctcgccccgatcgaggtgggcaagagcgcctaacggcccgctgcggatggattggttgaggctacgcgcgcaagcgcgagcgagggcgtggccgacatcttcaccagcacgtccttgagcggatcctgcgtccaggcccgcgtcacgtaatcgcgatgggtgatgccttcgccggtctcgacgaataccacactgccgggttgtaacggctcgtccatgtcctcggacacgctgatgcccttctgccgcagcatgctcatgagctcgcggtcgcgccgtgccgtgtggcgagtataggagctgacgaagaaaccggagcggtggctctcgatccaggaggcgaatttgtccagctcgccgtagacggcgtcgagcagcacgacgccgcgcacgcggtcgctgatgccgccgacctgcaggctccaggccgtcggcaggaagccgccgctgtagccgacgatcacgatcggcatgttggcgaaggcacgcgcaccgttggggtcgccggtgatgcgggcgagatgctcggccgattccgccatgaagcgtttgaagccgcccggctgccagaacttgccggcgctggaatcggcggcgtccaccgccatctgcggagcgagaagcacggcgttggcgccggaatcggtgatctgcttgggcaccagctggcggttgcgcacgtcccgctccagcgtggcgccgttgccatggaagaacaccacgatcacacccggcttacgcacgtcgaaatgctcgggcacgtgcaccagcacgcggttgtcgttgtaagtctcgtcctgccagtagacgcgcccggaatagctgcggtggccgcggcggtcgcccttggaaatgttgaggaagggcgcgtccgaggcgggattgttgccgaaatagggaaatgccgacgacttcatgctgacgagcgtcgtcaggtcctcgcgcggcggacgcctgtaggggacctgcggttcgagagaagccactttgtaggacgcttgctccggcggttgttgctggacagcgcgcttgggcgagaaatccgacatctgccgctgcaggaaactctcgctcgccgagggaaagcgctctttgaatcgcggggccggaaagcggtcctcgaacgtgtcgccgcttgccattcgtgaattggaggtctgcgaattggttttcgcgacgacctggacatttgcctgcgaatgcgcggccagcgctgtcggatcgggcgccttgccgcagtgccccagcgccagcgacaatggcagcaaggctgagatcaggccgacttggagcgcgcgaccgggccgaccggatcgtgtccggtcggcacgaaagtcagctctcagtgtcgaaacggccccgaacatccacccatgaccccaagccacgacatcaagtccgtcggcgcatcttgagacaattgagccgactggcatttaggcgacgttaagcgtccggagaaattccccacatccggaacgctcaagctgaccaagagatcgtgtcctgattgtggggacggggagcaggatgcatctggcggagcccgcctcatcgtccgaaggcgcacgcaaacggtgtcttaatacccgactgccttcgcctcatttagcccttgttaaccctgcttgaattgactggaccaatctgcacgaccggcccacgaggcgagaggcctgaggttaggaccccgatgacggcatcagatgcgggaaccgcagcctggacgggccggctgaccgggagcggggccggagtctccgttccggttgcaaccgcaatcgttgtggccgacatgatcggggttggcgtcttcaccagccttggcttccaggtcaaggacatcccgtcgggcttctcgatcctgctgctgtggacggtcggcggcatcgtcgcgctgtgcggggtgtttgcgtacagcgagctgggcgcgatgtttccgcgctcgagcggcgagtacaatttccttggccgtgcctatcatccggccttcggctttctcgccggctgggtgtcggcgacggtcggcttcgcggctccggtcgccctcgccgcgatggcgtttggcgaatacgccaaatcggtcgtgcccgatctgtcgccgatcccgcttgccataggcgtggtgtggctggtctcgctcgtgcaactgaccggcgtcaagcgctccgcgacgttccagctgatctcgaccatcctcaaggtcgtgctgattgtcgccttcctcgtggccggcttcatcatcggcgtgccgcagccgatcgccttcacgccgcagccgggcgacctcgcccacatcgtcagtgcgcccttcgcgatcggccttgtcttcgtgatgtactcgttctcaggctggaatgccgcgacctacatcatcggcgagatgaacacgccgcagcagagcctgccgcgtgcgctgcttgcgggcacggtcatcgtgctcgtgctgtatgtcgcgctgaacgcggtgtttctctattccacgccggtcggcgcgcttgccgggcagctcgacgtcgcgagcgtcgccggcagcgccattttcggcagcctcggcggccggatcgtcggcgcgatgatctgcttcggtctgatctcctcgatcagcgcgatgatgtggatcggcccgcgcgtgatgatgacgatgggcgaggacataccggctctgcgcgcattctcgcgcaaatcagtgagcggtgcaccggcctacgccatcctgtttcagcttgcggtcgcgaccttgctgctgttcacgcgcagcttcgaggccgtgctcgactttatccagttcgcgctgttgttctgctcgttcttcacggttgccggcgtcatcaagctccgcatcaccaatcccgatttgccgcggccctaccgggcctggggatacccgtttacgccgttcgttttcctgctcgtgaccgcgttcatgatgtactaccttttgaccgagcggccggtgcagtcgctctcggggatgctcgtgatgctctcgggcctgttgatctatgccgttttccgcaggcggccggtcgccgctgccgcttcaccacatcgcgaatagacatggtcgaactcttgagaattgcggcggtcgctttcgccttcttcgccgcggcagcttcgtccgcgcacgccgccgaggtcactttcgacgacaccgcgcgcttccttgcgggcatgcagccgtcggccgactcgccgctggtgccgctcacgaaggatccaggctggcagcgtcacgcaaaattcttcgatggcgcattcgcgcagctcgagcagcgccagctctcgaagatacgcaattgggccgatgtcaatctcgccgcgccccggccgaccatgttctacatgttcagcggcccggatttcctctacgccgacgcgttctactccaaagcgagcacctatgtgctcggcgccctggagccgattggcgccgtgcccgacctcacgcgcctgtcgcgcggttcgatcggagccgcgctctacaacgtcgagcgctccctcggctccatcctgagcttctccttcttcatcaccaagcagatgaaggtcgacctgagtgccaaccaggtcaacggcaccttgccgatcctctatgtcttccttgcgcgctccggcaagaccatccgcaatgtcgagatggtcgcgctcgacgacaagggcgggctgcatgtcggcgacgacaatccgggacgtagtgcgacgcgcggcgtccggatcacctttgcgggcagcgatggggaaacgcgcacgctgtactatttttcgaccgacctctccaattctggcgcacgcgccgcagggttcctgaagttctgcgagacgctcgggcccggcaacagcctgctcaaaagcgcgtcctatctgctgcactccggcaacttcaccgtcgttcgcgactggctgctcgccaacagcgccacgatcatccaggacgattccggcattccgctcgcgaattacaatgcgcggcagtggcggttcttcccattcggccgctatctcggccccatcgacgaattccccggccgctaccaggagcgctacgcccagttgttcacgcgcgctcagccgatcgacttcggagtcggctatcgctggcggatgcacgagtcgaacttgctgctggcggtgaaggtgccgggcagcgagaccgcgccggctgcggagaccacttccaccgccgagccagcgccgaagccgccccgcccgaagcggctgcggccaccggaatccatcccgccgtcacagggacgcttctattggttccgatagctaccagtgcacactctggctcggcacgataaacgtcgtcgtgctgggcggcgtcgcaagactgtccgccaaataccagcttgaggcgacgacgagagcgagcagtgcgacaatggcgagcaggtccatggctctgggatcgtgtcgccgatgactgaggtgcggaccgagcctgaaatggaaaggggggctgattttccagcgcatcgttgtttcctcccgtgggagcatcgaaacaacgcgagcggaaagttcctgttccgatcgcggcgcaaggagcaccacagccaaggtcaagatgcattgaccccgcgccagcggccgtagcgccagggcagataccaccgagcgcccttcggcgcggtgagggggacgttgtcgatacctgatgtgccgaagggattgcagcgcagcaggcgagcgagcgtcatccatcctccggcccacaagccgaaccgctcgatcgcttcatcgccgtaaacggagcaggtcggcaggtgccggcagttgtagcccaccaggggcgacagcgtatggcgatacagccaaatcagcgcacggccgaatctgcgcggcagccggagcgcactctcaatggaacaatgctcgcgggctgagtgcttcatgtgcgctttgctgcgatcttgagcgaggtgttgcacggttccggcgcagggaactggtaagctgctgtttatgcgccatattctgcctgcttttagggagcagtgcagcaagtatctatggacgatctgtattcccccggataccatttttgtgacgtccatgtgtaaactaatcggacgcaaaacggggctgacctgaatcgccttggggcttggggaagggaccagtttgaaacttctgacgtcgctcaattttcgcggctggttgctggtaggagccgccgtttgtggtgtcgcgctgtcgggcgccgtcgcgacattcgggtcgtcggcgcgagcgggtagtgcgctcgaggagcgcaagctgccgatgaagttcaactgggtcgcctgcgaaccgaactgccgcggctggatcagcgcagtcggcatcatcactgccgatacccccagggaattcgaagagttttcgcgcgggcgccagctcggcggcgccaccgtggtgctcgattccagcggcggttccgtaaatgatgcgatcacgcttgggcgccgcttccgcaacctcggactgtcgaccacggtcggcgtgagccttcgcggcgggccgtcgactcggccggctgtcgcgccagaggcctattgcgaatcgatgtgcgtgttcctgttgttggccggcaagaagcgatacgtgccggcggccgcacatgtccgggtccaccagatctggatgggcgaccgcgccgatgatgccaaggccgcgagctacagcgcgcaggatctgatgatcgtggagcgcgacatcggtcgccttgccaaatacacattcgacatgggcggcaccggcgatctgctgtcgcttgcgctcagtgtcccgccctgggaagacctgcacgaactcgatgctggtgagctcaagctcgccaatctggtcacgaccgatctcgtggctgacgtgctcccgcatatggacatttccgcgccggcaatggcggggcttgcgccaaagacgcaagccagattcgccacggaacaggagccgtccaaatcgaccaagacggcggaggccgtcgtgccgacgggcggcgtggcggcgccggcaccggagaagtaagctcttcaataatatcggccgtgattccggcgcggagcgcgggctgtggcgcgccagcgcccacctgagaacgcgccccgtgatcttcgcaccaggcgtcgtgcggcgcctaaaataaaggagcggtcagccctgcgccgcggccggctgcttggccttggcctcgatctggccgatcgcatcgaccacggcatcgaaggttagcagcgtcgaggcatggcgcgctttgtagtcgcgaacgggttcgaggaacttgatctcctcccatttgccttcaggaggcgcgccgttctccttcagcatcttgcgaacagtttcccgtaactcgcggagttcgctcgcagtcgagccgaccacgtgacttgccatgatggatgaagacgcctggcccagggcgcacgccttcacgtcatgggcgaagtcggtgaccgtgtcgccgttcatcttgagatcgaccttcacggtcgagccgcacagcttggagtgggctgtggcggaagcatcggggtccgaaagccgcccgaggcgcggaatattcccggccagctcaatgatccgcttgttataaatgtcgttcagcatgtgatggagtccaacactgcggcgccggatcggccttggcgggcgccacccaggggcctatatagggatggaactggcggaaaaatagtcccgcgctgcggcggtgtgatccagagcgttggctccgacgtaatgatttgcggactttcgccgaaactgttctcttcaggcgtccggcggctttcccgccccgtctgccggtgacactccggccgcgaggccgtcgaacggagtcgatatggacgctgcaatcaaatccatccgccccaacaagccctccgaccggcagcccgagagccgcccggcggagctggaccccgccgagttcctcgcggccgccgtccgcgccgatcagccgcgcccggcgcgtgccgaggcggaagccgcggtcaagacgctgctcgcctatatcggcgagaataccgagcgcgagggcctgctcgacacgccgcgccgcgtggtggaggctttcgacgagctctatcagggctaccaccagtgcccggccgaggtactcgaccgcaccttcggcgagacagcgggctatgacgatttcgtgctggtgcgcgacatcgagttcacctcgcagtgcgagcatcacatgatgccgttctacggcaaggcgcacatcgcctatacgccggtggagcgcgtcgtcggcctgtccaagcttgcccgtctcaccgacatcttcgcccgccgcctccagacccaggagcacctgacggcgcagatcgcggcggccatcgacgaggtcctcaaaccccgcggcgttgccgtgctgatcgaggccgagcatacctgcatgtcggtgcgcggcgttgccaagcatggcgcctccaccttcaccagccgcttcaccggcatgttccgcgacaatccggcggagcaggcccgtttcctgtccctggtgcgaggcacgcgctgacctcgcgaacagatcggcgacgtcgtcgtgtccgctcactcccatgagatcgaggaaggtcttgccttcctgcccaagttcgatgccgcaggcctggtgacctgcgtcgcgaccgacgccgttactggcgatgtgctcatggtcgcgcacatgaacgaggaggcgctgcgcaagaccgttgccaccggcgaggcctggtacttcagccgctcgcgcaatgccttgtggcgaaaaggtgagacctccggtcagacccaacgcgtgatcgagatgcgcaccgattgcgaccaggacgcggtctggatccgcgtcgagcagatcggcgccgcctgccacaccggtcggaggtcgtgcttctaccgcaaggtcgaggccgagggcggcggagcgaagctggtcttcgccgacgccgagcggctgttcgatccgagcgagatctacaagaaatgacttccgtcattccggacggctcgaagtgccgatccggaatctcgaaattccgggttcgcacctgcggtgcgccccggaatgacgggcatggctgagttaactccgcattaaccatacctgtctcacggtgagacgacacgggcgccgaattgccggcgccgcggaacgccgcacggggcgggtacttcatcatgtcggtcgacaattccagtgcgacgcacacggccggtctcgacccctcgcgcgcgcgggtcgccggtgcgatcaagcaggcctcgaacatctccggcgtcagcttccagtacatgctgaccaccgccaagatggaatcggacttcaatccgacggctgctgcccccacctcgtccgcccaggggctctaccagttcatcgaccagacatggctaggcaccgtcaaagaggcgggcgcccagctcggctacggcagctacgccgacgccatcaccaggacgccgtcgggtacctacaccgtcgatgatcccgtgaagaagcggtcgatcatgaagctgcgcgatgatccggaggcggcatcgagcatggccgcggcgctgacgcagtcgaacagcttcaagctcaccggccttctcggccgcaggcccagcgacagcgagctctacatggcccatttcatgggcgtcggcggagccgcaaaactcatcgccaatgccgaggacaatccgcaagccgtcggcgcgaggctgtttcccaatgcggctgccgcaacccgctcgatcttctacgcgaaagatggccgcgcccgcagcgtctccgaggtctattcggtgctcgacgcgcgctacgccagtgcggccaactcgaaagtgacccgcagcgcgatggcgatgtatggcggcgcgccgtcgaccactgaggtggcgagcgcaagcggcgtgctgccgagcgcacccgtgatcgacaatgccgcatatcttcagacgtttccgaacacgcgcgcggtgacgcccgtcagcgcgacgacgtcgaaaacgcttgccgagaatgctccaagcactccggtgtttcgttcgatctatcagcccggcgatgcgacgcagccggtctccgcgacggtgcagaaattatggggcaacaacgcctcgctcacgtcaattgcctcggcaacgccggacgttcggccgccgcagccgctcgacctcttcagcgatcgcagcggcacgttctcgagttaacgccactctcgcatctgcggggagcatcgcctgaggcggcgctgcgatacgtccggcacgcagcccaggcgcccctgtccttaacaaatcatcaatgaaaccagccagttatggtgaacgctttgttaagcgtcgtggtttattttgtattgcaggtggcgagaggtcaccatttcgtttgttgtgtaagccggaaacaggatgattgttcggcagttcatcaattggatcagaacggcgccggccggcgagcgggccgaggcaacgcgggcactggcccgggcctggctgatctcggacctttctgcagacgaccgtatcgccgccgaaggcgcgcttctgatgctcctggacgatccctcgccgctggtgcgacaggcgatggccgaggcctttgcccgcagccttgaagcgccggccgcaatcgtgcgggcgctgtcggcagaccagccgagtgtcgcgctgcccgtcctcgaacattctccgctgctgatcgacgccgatctcgtcgacatcgttgcgaccggcaacgaagaggtgcaatgcgcggtcgcccgccgcattgcgctgccggtatcggtctgcgccgccatcgccgaagtcggctgcgcggctgccgcgctggagctgatcgaaaacccacatgccgaactggcgccgttctcctgggaccgcatcgtcgagcgccacggccatctcgccgcgatccgcgaggcgatgctggtgctggaggatctgccggcggcaacgcgcgcagcgctggtggcaaagctctcggagatgctggcgcaattcgtggtggcgcggaactggctgagcgccgatcgcgcggaccgcatcacgatcgaggcacgcgaccgctccaccatgaacatcgcggcacgctcccgcggagaggatatgcagggcctggtgcgtcacctgcgcgtcaccggccagctgaccgcaggactgatcctgcgtgcactgctgtcgagcaatctcgatctgttcgatgcggcacttgccgagcttgccgatctgccgctggcacgcgtctcggcgctgctgcacgaccgcggcggcaacagcctgcaggcgctgctgcgccgcgccgggctgcccgagacgacgtttgcggcgttccaggttgcgctcgatgcctgtcacgagcagggttttgtcgacagcgatgacggtgcggtgcggctccgccggcgcatggtcgagcgcgtgctcacccattgcgagatggagcgcggcgtcaccgagccgctgatggtcctgctccgccgcttcgccacggagtctgcgcgtgaagaggcaaggctgttctgcgacgagctggtcgcggaagaggcgatggacccggcctatgacgatctgatcgcggcctagaaggatcagcaaactgcgtcgttgcgagcgcagcgaagcaatccagactgtttccgcggagcgattctggattgcttcgctgcgctcgcaatgcgaaaggaagcgtccttactccaccggcgcgatgctcggggacaggatcacctcgagatgctcgggccggtcgcgattgacgtgggcgagatagtcgtcggcgaccttgcgcaggcgacggctgagctcggctgagacgctgatggtgtcgagcctggtgttctcgtgcacgatggcgagaatggcattgatgtggtgcgtgaacagctcgggcggcaccttctgcagatcaggtgcgtgctcgatgacgcggcagaggctttcggcaattcccgcggccgaaggaaagccgaatgtcgccgcgtcgcccttgatgtcgtgtgcggcgtgaaacagctcgtcgcgcagcttcttcgtgaagccatccttctgcaccgcagtccaggcggcggacagtcgctggacctcgatcgccatccaatccctgaactcgccggacaggcctgccagcgcctgctcggcgcgggcgaccggatcgtccatgtccttttcttcgacgcggcgcaggacctttcgcagcggattgggctgggtgatgacgtgatgcgtggcgaaggccttgacctcgatgtccttcgcgctgttcttcgccatgatgcctgcctcgtctggagaggttgcgctagattgaggaacgggccttgtcgagcagtgagggctgctgcagcacctcgtgcttctcgccgacacggcgctcggggcccatataggcggagttggtgttgcggcggcggtccggcccgaaataggtcttggtcttgatgaagggtcggggattggcgaccacgttgaggatgcgctgatagaggcccttggccgagatcggcttggccaggaattcggtcacgccggcatcgcgtgcgaccgtgacgcgacgcttctcggaatggccggtcagcatgatgatcggcgcgtaaggattgcccttggattccggttggcggatcatctgcgcgagctcgagcccgtcgaagatcggcatggcccagtcggtgatgacgatgtcgggcacgtagtggctgtacatttcgagcgccgtggccccgtcctcggcctcgtagacttcgcgcgcgccgaacgaatgcagcagcgtccgtaggatgcggcgcatgtgcggattgtcgtcgcagacgaggaagcgcagcttgttgaagtcgatacggaacatgacgcccgggccaaagcggtcaaccttcgttaaccatatcgcgccgggagttaacgaagggttgctgccgggcactttgaggcgatgcgggcgggcggatcaatagccgaactgctcgcgcaggatgcgctcttccaggctgtggccggggtcgaagagcatgcgcatcgagatggtcttgtccgagagaacctcgacgcggcggacgtcgcgtacctcgtcgtggtcggcgacggcggcgacgggccgcttgtcgccctccagcacctcgatcacgacataggccgtattgggcagcagcgcgccgcgccagcggcgcgggcggaaggcgctgatcggtgtcagcgcaagaagcgcggcgttgatcggcaggatcggtccctgcgcggagaggttataggcggtcgagccggccggtgtcgccaccatgatgccgtccgcgatcagctcggacatgcgctcgcgctcgtcgatcaggatcctcaggcgcgcggcctggtaggtctgtcggaacagggcgacctcgttgatggcgtgatgcaggtggacgcgatcgttgacatcggtcgcgcgcatcagaagcggattgatctcggattcgtgagccgccgcgagccgcgcacgcaaatcgtgcgtcgagtactcgttcatgaggaaaccgaccgtgccacgatgcatgccgtagatcggcttgcccgtgcgcatgttctggtgcagcgtctggagcatgagcccgtcgccgccgagcgcgaccacgacgtcggcatccgcagggtcgcaattgccatagtccctggtgagctggccaaaggcggcctgtgcctcgttgctcgggctggcgacgaaggcgatccggtcatatcgcgagggcttggtcatggcttctcggcagggccgccttgctggagaaaagttccgccgggcccgtctatacgaggtgggcctgcattgtcgaggatgaccgaccagcaaaactaacggagatgtccatccggagttgaggagagcagcggcttgaacctggtcggccgctccagtcccgccagtccaatgatcccccaaaccgtcgcaattccgcgttaggctgcagtctgcaccggttgtcaccgccgggcagggagaacgatcatggtcaagcaactgccgatgctccgccgcgcgagcctggtgctggcggtctcggctttcgcgctcgcgggctttgcgcgcgcggatgatccgccgcagccgcgccccgaggcggcctcgccgggcggacagaagggcggtcgcggcggtggcgcaccaaacgcttcaccggcttcgccctccgcggccgagcagcaccggctgccgccggattcgatcacgaggcagacactcgatctgcccggccggactctcaatttcacggccaccgccggctcgatccgcgtgttcgacggcaagggcgagccgctggccgatatcgccgtgacctcctatgagctcgacggtgccgaccgcgcaaaccggcccgtgacgttcctgttcaacggcgggcccggcgcgtcctcggcgtggctccagttcggtgcggccggtccatggcggctgccgctcgacggcgaggccctgtcgccctcggcctcgcccgaggtgaagccgaacgcagagacctggctcgacttcaccgatctcgtgttcatcgaccccgtcagcaccggctacagccgtttcgtcgccagcggcgaggaggcgcgaaaatccttctactcagtcgacggcgacgtcaattccatcgcgctcgtgatccgacgctggctcgagaagcacgagcggctgacgtcgccgaaatttgttgccggtgaaagctatggcggcattcgcggcccgaaggtcgtgcgccagttgcagcttcagcagggtgtcggcgtcaggggattgatcctggtgtcgccattgtttgacttccgcgagttcaccggcaccagcatcctgcaatatgtcgcgacgctgccgagctatgtcgcggtcgcccgtgaggccaagggaccggtcaagcgcgccgacctcgccgatgtcgaggcctacgcgcgcggcgagttcctgaccgacctcgtcaagggcgaggcggacaaggaggcgaccaatcgtctcgcggacaaggtcgcccagctcaccggcatcgatcaggccgtcagccgcaggctagccggccgcttcgacgtcagcgaattccgccgcgagctcgaccgcaagaacggcaaggtgacggggcgttacgatgcctcggtgcgtggcttcgatccctatccggattccagcaactcgcgcttcggcgacccgtccggcgatgcgcttcaggcgccgctgacgagcgcagcggttgacgtgctctcgcgcaagctcaactggcggcccggcggctcctatgaagtcctgaacggcacggtgggaggtcaatgggatttcggccgcggcatcgacccgccgcagtcgatctcggagctgcgccagatcctcgcaaccgatgggaagctgaacgtgctggtcgcgcacggcttgttcgatctcgccacgccctatttcgggacgaagcgagtgctcgatcaattgccggccttcgtcacacagcgcgtgaaattcgtcgtctatcccggcggccacatgttctattcgcgcgagggggcgcgacaggcattccggagcgaggtcgagacgctcattcgggagtaggccggcgcttgcgcggcggatagcggcgcgcgatctcgcgcgcgaccacggcttcaggcttcacgttggcgcctgcgatccagatctcgctgaccttgccgcgcttgttgcgaacgcggcgcaccggctcgccgtggctggaatagcctgcggcccaggccagcttgccgctatcgcgaccggtgacttcgatctcggcggcatccatgaacgggttgttgaactgcggattggcgaggagcacgcggttgcctgcggggacaagatcggtcgcgccccagatcgtccaccaccggccggtccagtcgcgcaggcggcgatcgggcgcgccgcgggtctggaagactcgcaggatctgcatcgcgccgtccatccagatcggtgccgctccgtcgatggagttgctgaggatgctgatggcgagctcgcaggcaggaatggagcaggtccgcgagatgtaaccctggaaaccgccgctatggccgaaccagtcccagccgtcggtcttgccggcattgacgccgaggccgtagtaggcctcgaagctctgcgggatgcgccaatggtggcgcgtcatctcgcggcggctcgcaaccgacagcacgctcttcttcgcattgggcgcaagctgcgcgaagaagcgggccgtgtcagccgcggtggcggcgaagcctgcagccgatgccatcgcctgggcgggattgtccccggcgatgacgcatcgctcgccatatggcagcctccgtgtgtggccgcgcgcgaacagggcggccctggggagcggagtgtccggttcggtttcgcgcaagcccgcgggtgcaatgatctcgcgcttgatccaggtggggtagggctccttcgtcacggcctcgatcacgaggccgagaaggccaaagccgtgattggaatatttgaagcgcgtgccggcctcgatcgcggccggctgcttcaattccgcaagcagctcgctggcgttgagataggggcggctgtcgatgaactgcccggaatcagcgccgtcgcgcgtcaaccccgcgctgtgcgagagcacctgcgcgatcgtcgtctcggccacgcgcggatgcaggccgccgacatattgcccgaccgtgtcgtcgagccggatcttgcgctgctcgcgcagcttcatgatgccggcggaggtgaagctctttgaatgcgaggcgatgcggaagcgatggcgcggagtgagcttctcgccggtatcgaggttggcgagaccgaacgcgtgctcggctacgatctcgccgcgataggcgaacgcgacgaggacgcctggctgttggagtgtcgccagctggaattcgatccaggagccgatgtagtcgatcgcgggtcgcagccacgggtccatcgcgcaccaattcgcagggagattgaaggcaggaagcctagccgagaacgcggaacgggcacaaccggcaggttgtgcccgtatgcggggtccgaagactggatgcttcagtagacgagcgtggcgccggtcggcttgtcgagcgcagcggccagcgagcgatactcggagctgtcggtgccggcgagcgaggcgatcttgtcgaggtgatactgcgcctgctcgcgattgccctgctccagctgccagagtccgtaatactgccatgtgcggacgtggttcggatcgtccttcagcgccagctcgtaatagaccttcgacgattgatagtcgccgagcttgcgataggaatagccgatcaggttggcgacgtcggcgacgtcgtcgcgcttgagcgacttcaattggtcgatggcgcccgagtaatcgtgcttgtcgtagatcgcggcataggcggtacgataggtcgcgaggaatttggggtcgctgacggaagagctcttcttcttgcccttcttggtcgaggagtccgatttcggcggcgacgaaggctcgtcgctgcccgccgcatacgcgctggacagtaccggcgcagccgccagcgccaaggcgaggagtgccggcacaaaaaacattgagagtttgcgcatctaaattctcccgtctgaacgtggcgatcctacacgattgcctgaagaccggaacacccgtcgcgcaaaaacattcccgcttcgcacgatctattcgcccgcctgcggatgacaaacgcgtcatcgagatgaacggaagcctgcgaggggcttcagattgggttcagtgcgcggcccctaggctcccaaccacggtcgaagggcaggcgagacggcgccgcctcgagatcattccagaggagacctccatgttgaagaccatttccgcagccttgctcgcagcctccgtgctcgcagccccggccttcgcggccgaggccggcaagaccaccacgaccgcgccggcgatcaaggcagaccagagccagcccaaggcggcgactgccgtcaagccggaagccggcttcaaggccgacacgaaggccgccgacgttaaggccgatgccaagatggacggcaagccgaatgcggtgaacgctcacaccaacgctgcgcccgacgagcacaagaccgtgggccagcatcgccatcaggacaagcaggtctctgacaagcagtcacagaagccggacgtgaccaagccggcagcgaccgacaagcgcaactgacgaccggtcccgcgcggcggcatccttgcattgcccgccgccgcgcgcggatttctggcccggaccgttcgccacgtctcgtgcgaaagtgcgaggcgtcggcggcggccggtgcgttgttcgcttcgtggcaagcgaattcccttcgagcaggcttggggctagaacgtctcctgatctgatcgagcggagagcggcctgtgaggagattggcgagatgtgcggtgatcctggcgttgccgctggcggttgcggcatgtttcggcagcgatggtgaccgcccaacgctgatgggcggcacccaggcgggcggaccgcagccgtttcccgacaatttccggagcgacacgctggccttgatgcggacctatctcaacaatccggtcggcgtgcgcgatgccagcatggccgaacctgtgcagcgcgaggtcggtggccggcagttctatgtgagctgcctgcacttcaccccgcgggagaccgatggcagctacaaggccatgcgggaacgcgccgtggtcttcgtcaacggccgggcggaccgcgtggtcgaccgcaccagcgatctctgcgccggtgcggtttacgccccctttccggaactggaaaagatgacgcggtagcacaaagcccgtctttagggcttcgtgctaggcagaagcagccggggccgctcgatcacatgtcgccgagctttgaacgggatggtttcgtcttgcgacaaatcgttgcggcggccttgcgcaggcgacgtgacggaacaaattcgcagtgttgccacgccgtcacagtaacgaacgatcaacgttccggcatcgccgcgaagcaacccaattcacgccacgttgtttcccgagtgtcgcaaatgaaagaacggggatgatcatgaagtcgattttattgggtgcagccgctctgcttgcgctggtcgcgccggccgcagccgcagacatgcagccgcgcccctacgccaaggctccggcctacacgcccccgcaggtgatctataactggaccgggttctacatcggcggccatgtcggcggcgcgtttgccggcgacaacagcttccagtcgagcgacgcccgcttcatgggcggcgtgcagggcggcttcgactaccagttcgcacccaactgggtgatgggtatcgaggcccagtattcctggctgccgaccaacaacaacggcgtcactttcccgctcggcacgcaggtcacctccaacaccgaccagatcggatcggtgaccggccgtatcggctacacctgggggccgacgctgctctatgccaagggcggttatgcctggcggaacaacaatctcggcgtcaacatcgccggtgtgcctcaggccttcaccacgagcggcaacagcaaggacggttataccgtcggcgccggccttgaatacatgttcgccccgagctggtcggccaaggctgagtaccagtactacaattttggcagcaccaccttcacctccggcccggccgacgtcgtcggcgtacggggtcgggaggacgagcataccgtcaaggtcggtgtgaactaccgcttcggctggggtggcccggcggcgtcgcgctactgatgccgacggcaatcataggatcgatgaaaggccggcctccgccggcctttcatttgcctacctttattcgccttgtatgaaccatctggcgcgtcatttgcttgcaaacgaagctgacgcgccttctcaccgacgtcatggggcatggggtaaagcaaaaataatttttgcgacgtagggaactcgcgctccggaacgcgttatatgagaattaccgggctggtgggacgacggacatgcgtattttggtgtcggcggcgatgctctcgagcttcttttgcctgccgtgctctgcacagacaatcctcaaatccgagcctctgatgttggcaccctatgaggtggccttcgtcaaggacgtgtcgtgtccgtcgggcaaggtcctgaaggttacgggcgccatccgtgggctgcatcgccgcaaggcctgcgtggccatgccgggcgagcaggcctcgcttgcggcggccacgccctgagctccgctccggctcggccagcccgtcaagacttcagttcgagctccatcctggactgctggtctgcctcagccttgttcttggcggggtcctcgccctgtgctgcctggcagggcgcgatctcgtaatcgttgtcgagcatccggcgcgggccggcccgctcgtcatccgccgccacgtccacgacgagaccactccgttgcgcgagcttccagacgtcggattcgctcggataggccttgctgatctgggcgccgttgcagaatagggcgtagggcatttttcccgctccgagaatgcccgttaacgagtttgcgccgtatggggttccggcttcgggctcgatcacggcgccgtgatcgggacggcgtgccctgagtctttaacgagtcctgaatcccggaaaaaagaatccctgggactcgtcggccggaatcagcggatgttttccgccatgacgagcgacctgaaaacgtcctgcggacacatgcttctgcctctcacgctggcgctgctcggcgcctgcgcggccaatctctggctggtgtggtcctggctgtaagccgggcgggttatttcttgaccggtcggccggaggcgtcacggagggcggcacgcaatttggtcagggtcgccgcgcaatattcttcccgctcgcgctcgaagcgctcctggtgcttgcggaaattggcgatgcaggcctgcatctcgatgcgtaaatcgccgctcgcccagggcagggcaggaggcgtggaccggggtgaagggggttcttgtggcgcgtcgatatcggcggtgaccgccttcatggcgatgaggtccatcgagatgggtgtgccagccgctggcgcctccggctgaaggacgacatccttcctgccggtcacggattggacgaaggagagtgtctgcgcgatcagtgcgtcgcgctccctgatccatttcatgatccacctcagccgctcttattcgagcaaagcggctgcgttgaatcaagcaggtttgcaagggattgcatatttttcccgggtatccgacattaagcgcatggttgcaggagaagaacggtcggacgaggcggcgggcctgaggctcatccgtgcgttcctgtcgctgccgcgcgagaagcgggcggaggtgatcgcgtttgtcgaagaattggcgcgtgcctatggccggcccgaggagggcacgaaggcttcgccgaggtgagcgctaccgctcgctgggattgacattgggttcgaatggcgcgccgacgacccggaccggcgtctgggcggaggcttcgatcgccatgcgctgggcgacctgctttgcaggaagaggtgctggcgttggttcgaacatcgcgaccgtgccggccacggcgctacagcacagcgccaccgccgtcagcagaaacatgtttcgattttcttccctgatccgcatgggtcgagaacgagcgatgcacgtctttggttccgggacggtctcatcgatcgacggcgtttggcgattcaggacgctgcgtatgggctgttacactggctggcgacttcgcatgaggctcgtccgatgatctcccatcgacctcccgtgctcgcgcacgaacgtttcgtcgccgaccgcgagaatttcgcgggcctcgatctcgccgcccggttcgagcgcatcgagcgtaccaacctttggggcgcagccacttcggtgtctggcctcggttcggaggaccccgcaaccagcgcgatccgggaagcgtttcctccgctgctgcaacggctcggcgcgcgctcgctgctggatgcgccctgcggcgatgcgggatggatcggccggctcgaactcgatgtcgattacaccggtgttgacatcgtgcagtcgctgatcgaggccaatcgccggcgcgttgaaggtgccggttcatccgcccggtttattgtcggcgacatcacgcgcgatgcgctgccgcgcgcggacgtggttctctgccgcgattgtctggtgcatctcagtttcgccaacatcgctcgcgcagtcaggaattttcgtgcgagcggcgcgcgctttctgctcgcaaccacctttcccgaatgggagcaaaatcaggattgcgaggacggcgactggcgggcgctgaacatggagaaggcgccgttcgaatggcaggcgccgcacgcctcgatcaacgagcggtgcgaggagggcgatggcggatggcgcgacaagagcctcgggctctggcggctggatcagttgccggaggcgagacccgagagccgcacatagctgcgcgctgaaggcttcggattgaaacggcgtcaaagctggtgccggctgaggggattgaacccccgaccttcggtttacaaaaccgctgctctaccgctgagctaagccggcgaagcttgagatgcggaggcagaagtcggctcgcgccgggaccgtcctcccatgcgcgtcgcaataccagacttgattggaaagtgccagaaccggaaagccgctgtcgcaagacatgaatcaggcggcctcgcgggccgcctgatgggtcgtgttcggttcaagccgccttactggcagatgtgacggcggccgtcctcgcccctgaagtaggtgccgggcgtgcagacgaagccgttgcgctgtgcataggtacggttgtcccatccgcgattgtgccagccgcggtcccacgaattgtcgtaggcgtaggaattgtcccacgcgcggaacggagccgtggcaattgcgccggcggtgccgattgcggcgccggctacgccggccgcgacgtcggtcggcaagaagccggtgcgcctcctgttccaatcattattccaaccgccgctggtctgcccataggacgcgcggcgatcgcgatacccgccatcggtgtatgggttaccggggccgaggttctggcagtttgcattcgggaattgcgccgagcagcggccaggattggtgacgaccgcttgcgccatggcagaacccgccagcatggtcgctgcaaccgccgtagccccgagaagcttgatcttcatggttcttcgctcccaatctgttgacgggggctaaacgctggccgcgtcggacgttccgatgcaccttgggattttcgcgggcgaacagtcaaacggacgtgagcgcgtgaactctgttccgcctgcaaggtccagcgcgttaacgcttcgctagctcgtcttgcagcatttgaggagcgggcgatcctcgcacgttaggcttaccggaatttggtgagcaggccttaaccctctctgcgtcgcgatcggttagcttgtcgccggacaacccgggatcccgtcatgcgtgctgtaacgctcgccgcctttctgatcggtctgcctgcggcggcgctcgccggcgagggcttcgagatcgtcgttcccggccgccccggcgtgccgatcatcatcaacaacatcgacgcgtcctacagcgtggtcgaaggcacctggggcctcggcaaaaatcagcaagtgcagccgacgatctatggcgggcgctatatcgccgagcggcaacccgaccacgtcggccattactatccgacactcggcctgcggccgggctacggccggctcgaggtcgagccgcccgccaaccgtaaattgcccaagcccgccgaaagctaccatcagagttggggcgcgtcgtctgcgccgctgcctgcgcagatggacccgcccgtcgattctccgccggtgatctacgcgcccgagatcaacgagcgaccacggccgcctcggccgcggccgcgtacagaactgcccggcaggccgccgggttgagaaacgaaaatcgaaaaaacggaaatcaacaggagagagtaatgcgtcagatgatttcgggactggttgcggcagttgccgtgacgttcgcggccaccgcgcccgccgcggcctgcggcttcaccacctgcgcgcccgttgcgccggtctattccggctgcaacaccggctgcggcggttacgggtatggttatggttatggcgcctatgagcgcctcgccgagccggccacgcagtattactacgtcaaccagggcccgacctacaccggtccgggcgccttcgcgccttatccgacctaccgcgaggacgccgtcgtcgcgcccgccaattatggctacggctatggctatcgttccgctgcggtcgcgccgccggccgcttatccctatcgccgtccgtactaccgtccatatcgctacggctacggcccgcgttacggctatctgccgcgcacgcactacggccatgctcatcgtcatggctacgcccatcgccacgcgccgcactaccatggcggtcaccgcgtgctgcgccgctattactgatctttgaccggttgagttttgcgggacgcccgttcgcatgatgcggacgggcgttttgctttaacttcaaaacaaccccatgcacagtagccgggaacagtgaaatcaaggacttgaagcgcaatgaggccgacatgagcgatcgtcgctcattggctcgttgttcgagttcaagatttcggaaaaagagatatctcgatttgatccgtcgggcaaaacaggcgtagtatggtatcgtccggatatgcggagtacctaaagcgctagcgcttcatcaggccgagccggcttgcgccgacatagagcgcgagcacggcggcgttggagacgttgagactcttgatctcgccgggcatatcaagccttgccacaacgctgcaggtctcgcgcgtcaactgcctgaggcccttgccttcggctcccaacaccagtgcaagcggctcgcgcagcgcgacgtcgctgatgtcctcgctgccttcgctgtcgagacccacggtctggaagccgcgctcgttcaatgcggcgagcgcgcgggcgaggttctgcaccgtgacaatcgggaccagctcgagcgcgccggaggcggccttggccagcacgccggtcgcttcggggctgtgccgcgcggtggtgacgatcgccttcacgtcgaaagctgcggccgagcggaggatggccccgacattatgcggatcggtgatctggtcgagcaccagcaccatgccttcctgctcgagggtttcgatgtccggcgagggcagcggatcggcctccgccagaaggccctgatgcacggcgtcgggagacagcagccgatcgatctcctggggccgcacgatctccggcgccacgcgggtctcgatgttctcttccgcaaggcgccgcgcggcgttttcggtcagcgtcagctttcggatccggcggcgagggttggcgagcgccatcgtgacggtgtgccagccatagagaatgacggggccgtcgagatgcgattcgcggtcgcgccaagccggccggccagccgatttccccggccggttgaagggcttagttcccccgcgagcccctttggggccgaattttcgatccttcatgggctcgcttctgtcatgggttccggaatatggcaatttcggcgtcggagagggcgattttagctgcttgcctcggttgactttgccccaccgcatcgcccataaacgcgcccggtcgcgccccgatccgggttgtcgcggccttcacgttccatggccgtcttcggtccgccggcaaggtccggcccgattgtgctgccgtcgagcgggggagtgtcccgagtggcaaagggagctgactgtaaatcagccgcctcatggcttcgcaggttcgagtcctgcctcccccaccacgcttcgcccttcgggctacgcgtggcgcagttaagtgatgccagaagggcgaagcgtggtatccggcgaagcccgaacggcaagacggactgaggcaagccaaccaagatcgtcaacacgcgaactgaacgaaggctgtcgcgccgtccgcagggaatgggcggacgggctcagccgttgccagtccgtcatcccttctatcccgcgtgctcttcccgttcgtggatcacgttcgcacgcccgacgaggagatcgtcgatcatgccgatgcgcttgccgtccttgcccgcgtagggcatcgcatgcagcacgtaacgcatggcgttgagacgggcgcgcttcttgtcgtcggacttgatcacgatccaggggcagtccgcggtatcggtgtggaagaacatcgattccttggcgcgggtgtagtcgtcccacttgtcgagcgaggcgaggtcgatcggtgacagcttccactgcttcagcggatggccttcgcgctccttgaagcgccggcgctgctcctcgcgactgaccgaaaaccagaacttgatgaggtgcaggccgctgcgcacgagattgcgttcgaactcggggacctggcgcaggaattcgccgtactcggccggcgagcagaagctcatcacgtgttcgacgccggcgcggttgtaccagctgcggtcgaacagcacgatctcgccggcggtcggcagatgctgcacgtaacgctggaagtaccattggccgcgctcgacatcgctcggcttctccagcgccacgacacgcgcgccgcgcggattgaggtgctccatgaaccgtttgatcgcgccacccttgcccgccgcgtcgcggccctcgaacaacaggacgaggcgctgccggctctccttcatccagttctgcaatttcaagagctcggtctgcaggacgaatttctgctcctcgtagtcgcggcgatacatccgcgacttgtaggggtagccgcccagccgccaatcgtccgccagttcgtcgctggtggtgcgcctggcgcgcttggcttccttgccgaccagcagcgcctgcaagcgctcggcatcgtcgggcgccgcgcctgtcaaaatggcctgcaccggctcactatccggcgaaagtgcgggcggccccttcaggacgctgtcgagtgccgccatctcggtttgcagagcggccgaggaagactgcgcggccagagagcgctcgaccggcgtcagctcgaggaccggcgtctgcgcgcctgccgatcgaacctgccgtttggttttgccgggagtcttgcggcggcgcgcctgcggggacgtcttggaaggaggtgccattcgctgagcctgtcctgatgcacggggattcttcttctagtgcggcaccccgaccgtgcgacttgacgtggatcaaccggcaagcatctccctgaccatcggcaccaccttgcggccatagagctcgatgctccgcatcagcttctcgtgcggcagcggccccgcagagtacttcagttgaaaccgcgaaatcccgagcaccttggcggtcttcgcgatcttccgcgcaaccgtctccggtgagccggcatagagcgagccgtgctcgatctcgctgacgaactcgtctcggcccatcggcggccagccgcgttccttgccgatgcggtcgcgcatcgccttgtaatcgggccatagctcctcgcgcgcctgcgcatccgtttcggcgacatagccgggcgaatgcacgccgatcggctgggccggacggccgaactccttgaacgcgcggtgatagagctcgacgtagggcgcaaagcgcgcgggatcgccgccgatgatcgcgagcatcaaaggcagatcgtagtgcgcggcgcgcaccaccgattgcggactgccgccgacgccgatccaggtcttgagcgtgccggtctcgaccggcggatagaccagctgatcccgcagcggggggcgcagcttgccttcccaggtcaccggctgctgcgacaggagcgcggcgaacagatccagcttctcctcgaacagctcctcatatttgcgcaggtcgaagccgaatagcggaaaggattcggtgaacgagccgcggccgaggatcacctcggcacggccgttggagaccgcgtccagcgtggcaaagcgctggaatacgcggatcggatcgtccgagctcagcaccgtcacggccgaaccgagatgaatgcgcctggtgcgcgatgcgatcgccgcgagcacggtctcgggcgaggagatcgcgaaatcggcgcggtggtgctcgccgaggccgatgaagtcgaggccgagctcgtcggccagcactgcctcttcgacgacgttgcggatcacctgagcgtgcggaagcagcgtgccggtggcgtccttggtgacgtcgccaaaggagtccaatccgaattgaagcggtgcagtcatggatcagggtctctgtgggaggatcggccagacttaatggaccgcggccgcgccacaagtcggcattcggaaatgctcggtttccgtttgcgaaatctatcgcgcgatccgcacgaccatcttgccgagcgcagcgcgcgtccgcatcgacttgaatgcatcgcggaagtcgtccagcgcaaagatgcggccgacgacgggtttcagctggccgtcggtgagccaacccgtcaactgcgacatcagacgcttctgcacgtcgggctcgcgcagggggatctgcgcgagatcgacgccgagcagagcgccgcccttcagcagcggcagattgaagggcagcgcggggatggtgcctgcggcaaagccgaccaccagatggcgtccgcgccaggcgatggaccggaaagcctgcaccgagatctcgcctccgacgggatcgaagatcacgtcggccccgcgtccggcggtcagttctttgagcgtgtcgcgccagccggcctgcgtgtagtcgatgacggcgtcggcgccgtgcgcttgcgcaaactcgcgcttctccggtgtcgacgcggccgcgatgacgcgcgcgccgagcagcttgccgatctggatggccgcgatcccggtgccgcccgccgcgccaagcacgagaagctgctcgccggcgcagagcgatgcgcgcgcgcttagtgcataaagtgccgtcaggtagttggcgcgaaacgatgcggcgacttcggccgcgacgccctccggcagcggatggagtgcttcgggcttgacgacgatctcttcggccagcgcgccagatcgcgtcatacccatcacgcgcatgcctggttgatagccgcccggcgcgccgggcgcgtccgcgaccactcccgcgaactccgtcccgggaatgaaggggagggggtccttggtctgatagcgtccttcgatcttcaagccgtcgacgaatccgattccggcagcttccacccggatccgtagctggccaggctcgacaacggggcgagggacttccttcagctcgatttgatcgatgggggcatattgctcgacgacgacggctttcatatcggacctctgttgttcgagttatcctgacaggtgccgatatcagcctcttgtgtctaccgccacatcccgcgcatcttcgccccgatgtcgaccttcggtccctgggccgcggtacgcgccgcgccggccgcggccctcggccatgccgtgcgctcgaacaggtagaccagttgctcggggatgaagcgggtgcgcgaggcgtagacgtggcggtcgcctttggcagcctggccatggacgaagaagcgctgcggtaccaccaggtggagatcgtccttggcgcgcgtcatcgcgacatagagcaggcggcgctcctcctccagctcggcgctggtgccggcgccgagatcggagggcatgcagccgtcgacgacgttgagcacgaacaccgacttccactcctggcccttggccgaatggatggtcgagaggatcagatagtcctcgtcgcgcaaggggggaccggatttgtcgctggtcgcatcgggcggaccgagcgtgagctcggtcagaaatttctcgcgcgaggcatagccgctcgcgatctgctcgagctgcatcaggtcggcgcggcgcgtctcggcatcctcgtagatgcgatcgaggtgcggctcgtaccagagccgcacgcgttcgagatcgacaggccattccgaatagcgcagattttcgatgatgcggacgaagtcgatccagtccgcaccggtgcgcgccggcaccggcaggcggccgagcgcggcaagcgggtcggtgctctcggccatctgctcgagcacgcgctgggcggttgccgggccgatgcccggcagcagatgcaggacgcgaaagccggcgacgcggtcgcgcggattttcggcaaagcgcagcagcgccagcacgtccttgacatgcgcggcatcgaggaatttcagcccgccgaacttgacgaaggggacgttgcggcgcgtgagttcaatttcgagcggtcccgaatgcgaggacgtgcggaacagcaccgcctggtgcttgagcagcgcgccttgctcgcggttggccagcaccgcttcgacgatgtagcgcgcctggtcggcctcgtcgtgcacggtgacgagctgcggcttctgcccggaggtgcgatcggtccagaggttcttcgtgaaacgctcgcgggcgaggccaatgacgccgttggctgccgacagcaccgcttgcgtcgagcggtaattgcggtccagcgtgatcatctcggcgcgcggcgaaaagctctgcgggaagtccaggatgttgcgaaccgtggcggcacggaacgaatagatcgactgggcatcgtcgccgacgacggtgaggccgcggccgtcgggcttgagcgccagcaggatcgaggattgcaggcggttggtgtcctggtattcgtcgacaagcacgtggtcgaagcggccgccgatctccccggcgatgagcgcatcgctcatcatctgcgaccagtagagcaggagatcgtcgtaatcgagcacgtgctgggcctgcttggcctcgacataggcggcgaacaagcctttcagctcggcggcccagcccgcgcaccagggatagtgctgccccagcaccttctcgatctccatctcggcgttgacgcagcgggaatagatcgagaggcaagtgcccttcgccgggaagcgggactcggtcttcgacaagccgcgctcgtgccgcaccaggttcatcaggtcggcagagtcctcgcggtcgtggatggtgaaggcgggatcgacgccgatccgctcggcatattcgcgcaggagccgcgcgccgatgccgtggaaggtgccggcccaggtgagcgcgtcgcgcatgatcgcggcgttgttctcgcccagcaccttgcgggcgatgcgctcgacccggccagccatctcggctgccgcgcggcgggagaacgtcatcagcagaatgcgtcggggatcgctgccggcgacgatcagatgcgccacgcggtgggccagcgtgttggtcttgccggagcccgcgccggcgatgacaagcaggggggcgcccacggtcgagccctcggtcacgccatgctcgacggcgcggcgctgctccgcattgagcgtgtccagatatgtcgccacgaatcgccccggtgaaaggccgagagtcggccatcccgtcacgaatcgcaatgcagctggacgaacccgaggttaggatttaggggaagggcggcccaaagttccagcccgaagagtgcgcacccgacatgaccgagctcaagcccgaccagttcgagatgcggcggctggaatcgctcagcaacaccattttcggcgtcgccatgacgttgctggcctacgatctgcccaaggcggcggtgtttaccagcgcgcctgactggagcgatctcgcccatgtctattccggcaagctcgccggcttcgcgctcagcttcattatcgccggcgtgttctggatcagccatcaccggaggctggctcgccagcccgtcggcagccgcggcgcggtgatcctcaatctgttcttcctgctctcgatcgtgctgctgccggtgaccaacggcctgtataccaatttcggcatgagcggcgcggtcgccgtgctctatggcctgcacttgaccgcgatcgccggcctcaatgcgtggctgtggtggacgatcctgggcagctggcggcacgagatgcttgcctcgctgtttccgctgctggtgttcatcccgggcacgatcgttgcggcgttcgcgccgcacgtcgcgcccttcttgtggaacatcgcctttgcagggctcctgatccagcgcttctacggtgcgcggatcagaccggacgcgtagggcggcagttcacccctccgtcgcgccgaacccatcggccggcacgtaaagcttgatcgggcggatttcgtagaccgccgtcggattgaccgcgcgcagcttccgcgccgctgcgattgcctcatcctcggtatcgcactgcatcaggtggaatcccagaagctgctccttggtctcggcaaacgggccgtccagcactattcccggcccggggccacgcaaggtgcgggccttccgggtttcatccagacgggccgccgggccgaactgtccgctttccctcaggggtgcctgaacctcgatgactttggcgacgactgccgcgtcctgctccggcgtccacgacatgacctcgtcttccacgtgataggccaggatggcgtacagcatcatcacctcgttgttttgccagacagactccaaggacgtagcacctgaggctaagccgacaaacccgaaccggaaaatattgcattgccgggggtgcgacgaaaccgtcctgaaacccgattgcgggcttgccatgtgaacgccgccaaaagtggtcgcgactgatggaccacaacaacaagttctttgctggaggcggcaatgtcgggtcacaccatcaagatcatctgcgacgcgcggcgggcaggacagtcggctccggccgatttgcacgatcaggccggccatcaccgctactatggcagctcggccgagaacggcggcgagcggatcgcggagagccggggcggcaagcgcccgcgcgcgcgcaacatctgcggcttctgagctattccgacgaaccggttcgttcgaagatgaacgtcctgcaaatatcggtcgcggcgataccgttcctggtcgcgctgatgagccggaccggcaaggccatcgcgccctgccttctggcaagcatcttcacggtgctgctcggggaggagccacaccgcgcagtcgtagcctggtgcatcggcatgctgatcgccgccgtcgccctgcgcgaacggcttcgcgccggctgactgggcatcaatcaaggcgagagcaaagaaaaggcgcggcggggaggccccgtcgcgcccgatttcttgctcgctggtccagggctgagagcgccccgatgccaagcctcactcaaagctcagcgggcgatcccagcgaggtgacagcgcttgagataagacactggatcacctcctttcgttggtttcggaagtcctcaatataggtggcaaccgcgccgctgttaaggggcggggtgtggaggaaccggcggcaggttcgcaacagggtggaggacgccgaaacgcggcctcctgggcagttgagacagccgcccagccgtgttaggggatcgccgacgcgggtgtagctcaatggtagagcagcagccttccaagctgaatacgagggttcgattcccttcacccgctccaaggcccgcggactcgatgtccggtgaggccgcaagtcccgcccgtttcccggattgaatcgccgctacggatgccgtgggcacaccttgtcgcccccacgttcgctgtccagagcttggaccgttgcgacggccgatcgctccgatgaaaacgcgaaactgatccaggtcaagtctgcgtgcacaggatcgtctatctctcggccgtgtcttgggaagaagatgacatgaccgacaagccgatcgactggacgccggatctcacactgccgacctccaagtccaccgtccagcacttcaccgcgaccgccggcggcgaccggctgacgattgacactactccttggggagaggccgacctcagggtcaacggccagtcgattgctcacatcgatgtggcgccgagcgctggtgacgcgtttcgcacgctcgagacgtttgctgaagatttcgaagccggcaaccgcgagcgtctgaaccagacgatcgatgacgacgacgttcgtgaaaaactgggtctgagacacgctccctgatatctcgcaggaattgcgggggcgaggactaacttcacccgggcggagcttcgcgtcggttcctggcaagctgctcgctcgggcgccgtcagccacttttctttcgcttgctcgcgatcctcccgcgcgcggtccaccgcgccgcctcgagcctgtcggctgaccctcacaccgggaagatgatcgatcctgtcgttctcggcagcctcagcgcgctgaagttcgcgcccgtcgatatcgcatgatcctcccttttcgaatgagctcttggtctcgatgtccgaacggccgcggtatccgtggcctgcctgtggggcttcacccacggcggtccggccgggacgatcgtcggacgatactggccgaactcctcatctaatagtaaaaatatacccgacttgggctactggacatcgctcgtgcatgaagcgatccacgatcaggaaggatattcgagcttgcaagttgccgccttcccgtcggaccgagctgaagaaatcctcgcgtcagcttcgaggctatttgcccgccatagctatgcgaatgtgacgatggagcaggttgcagcgtcggttcgatcggtgccgggggcgctctatcactactttcgcgacaaggaggacctgatctatcactgctacctgcgcgggctcgcgatctacaggcacgagatcgagacggcggccgaagcgggtatcgacgggctcgaggtcgtcaggcgcatcatacgcgcccggctgcggcgtgaaggtcagcgtatgatcctgttttccgacatcgatgcactggccccatcttacagcaatgacgtgcacgccaggcgctggcagaatgccacgctgctggccgatattgtgaagcgaggcgttggagacggctcgatagcttgcgatgagccgctcgttgtcgccgtggctctcatctccatcctggactgggttccgttctggctctccgagcgcgattactacacgcgcgaacaggcgattgatgcgattgatgacatcgtcacgcatggagtctatcggcgcgatatcgctttaccggacatgcccgaaccgccgagtctcgcgccgtttctccaggctcgctcgagattgaataagcgcgccgcgaagctggacagaatgctctcgattgcttcggacagcttcaatcgaaggggggcattgggcacgtctcttgagagcatcgcggcggaagccgggatgacccgcgcgggcatctattatcacttcagcgaaaaagagagtctcttgctggcttgcctgcaaagagggctcgtcggcgagatcggcattcgggaacatttgcaggatctggggcttggagcgtttgatcacatcgttcagagagttcgtctgttgctgatgctgcacgacaccccatgcggccccaaggcgacctaccacaacatcaactatctcaacgacgttgaccgaaaacactatgtggagcaggtgctcgcaacgatcggccaggaccagaagaaccatcaacgttggatcgacgaggggcacttccaggaaggtcgacacgcatttcgcggaacgtgtcttgactggtatgagccactggtacccgatctggttcagagatgtgcggggctggtcaccaattcagatcgccgatcatttttcgcggctgttcctcgcggggctcaagccgcgtcgtcgttcggcctgaacagccaatccggcccagctcggcccgttgaaggatccacgtccttcaactggatcgttcgacaaaagctgggacgagcaggcggacaaaagttgacttgaatttcaatgagggggagggggcgacaatctttgtgttaacgacacaattatggcttgcgtcaaaactttacacagtattcaatatttgggatagcgaaggtggcgcgaccgacgttgcatggcagcttcgatcgccaaggaacaagaacatccaaaagggagaaagccagaatgcaaaaactcataattgctgcggcggcagcgctgacggtgctcggaggagcggcattcgcgcaggagaccatcaagatcggctacatcgatccgctgtccggcggcggcgccagcgtcggtgaaggtggcttgaagacgttccagtatctggccgacgagatcaacgccaagggcggcatactgggacgcaagatcgaaatcctgccccttgataacaagaccaacccgcaggaaagcctggtgcaggcgcagaaggctattgatgccggcgcccgctatatcacgcaaggcaacggctcgtcggtggccgctgctctgtctgatttcatcaccaagaacaacacgcgcaatcccggcaaggaggtcctttacttcaactatgccgctgtcgatccgagcctgaccaatgaaaaatgcagcttctggcatttccgctgggatgccagctcggacatcaagatggaagcgctcaccagctatatgaaggatgtcccggcgatcaagaaagtgtacctgatcaaccaggactattcctttggccagtccgtgcgcgccgatgcgcgcaagatgctgggcgccaagcggccggacatccagatcgtcggcgacgaactgcatccgctgctgaagatcaccgacttctcgccttacatcgcgaagatcaaggcgtcaggcgccgatagtgtcgtgaccggcaactggggccaggacattgcactgctgctcaaggcagctgccgatgccggcctgaaggtcaattggtatacctattatgccggcggcgctggcggtccgacggcgatcaagcagaccggcctggaccatcaggtattccagatcacggaaggctttgccaattcgggccaccagccggcaatggagttcgagaaagcattccgcgccaaggtcaatatgtcgctgtggtatccccgcgcggtcaacgagatgcgcatgttcaaggctgcggcggagaaggccaactcgcttgaccctgtgaaggtcgcggctgccctcgaggatctcaaattcgaggtgctggacggtggcgagggcctcatgcgcaaggatgatcaccagttcttccagccgatctacatctcgtccttcggcaagctcgcggcaaacgagccgttcgacgaggaaggcaccggttggggatggcacctggtttccaagatcgatacgtccaagacgatggttcccaccacctgcaagatgacccggccgtaagcccttaagctttgccttcccgcggccgacggcggccgcgggaaggtcgtggttcgcggacgggaccgacgaattcgccgaggccttctcggtcccggctagaggtgtgaatgctgtgcttgaactgatcgttatatcgacactgaacggtctgttgttcggtatgctgttgttcttgctgtcgagcggcctgaccgtcatcttcagtatgatgggcgtgctcaactttgcccacgccagcttctatatgctcggcgccttcttcggctttcagctcaccaaatggatcggcttctggtcggcgctgctgttggcaccgctgctggtcggcgcgatcggcatggccgtcgaacgctacggcctgcgcaacacgcacaagcacggccacgtcgcggagctgcttttgaccttcggtctcgcattcgcgatcgaggaaatcgtggcgatgatgtggggcaggagccccgtcgactaccgcgtgccggcgctgctcgactttccggccttcacgatcttctcgaccaactatcccgcctacaagatcttcatgctggccgtgtcgatcgtgatcttcgtcgcgctgttgatcgtgctcaagcgtacgcgggtcggcttgatcgtgcaggcggcgctgacgcatccccacatggtcggacatctcggtcacaatgtcggacgcgtgttcatgctagtgttcggcgtcggcagcgcgcttgcgggaattgcgggcgtgatcgccggtccggccctggtgacgcagtccgatatggcggcggcactgggcccgatcctgttcgtggtcatcgtgttcggcggcctcggctccttgccgggcgcattcatcgcctcgctcgtcatcggcctggtgcagacctttgcggtggcgttgaacggttcgctggcgagtgctttcggtccgctggacccgtcggcgggcccctccgtgcttaccgacatctggaacgtcacgatcgcccaggtggcgccgatcgtgccgtatcttctgctggtgatcattctaatcgtacgccccatgggcctgatggggacgcgcgagtcatgaacgccacgacgacttccgcatcgaacatctcaggcaagtccgccggcgacagcctgcgcttttatggcgtctggctggtcggcatcgctacgctgatcctcctgccgatgatcttctcctccggcggctcgctcacgtccttcagcctgatcggcatcgcgatcgtgttcgcgctgtcctacaacatcttgctcggccagaccggcctcctgtcgttcggccatgcggtgcattacggcctcggcggcttcgcggcctgccatgtgatgaatgccgtggtctcgcacggctggccggtcccgcttcccttcataccgttgttcggcgggctcggcggtcttgctttcgcaatgatcatcggctgggtgatgaccaagcgcgccggcaccgtgttctcgatgatctcgctgggcattgccgaactggtggcgtcctcctcgctgatcctgcgttccgtgttcggaggtgagtccgggatctcgaccgaccgcacggctttgccgaaaatgttcggctggactttcggtcctcagattcaggtctattacctgatcgcgttctggctggtgatctccgcgatcgcgatgtacgcgctgacccggacgccgctggggcggatcagcaacgccgttcgcgacaatcccgagcgcgtccagttcatcggctatgatccgcacgtggtccgttacattgccttctgttttgccgggttcttcgccggcgtggctggaggcttggctgcgatcaacttcgagattgccaacgcggcctatctcggcgcgatccagtccggcctcgtgctgttctcgacctttatcggaggcgtcgcatttttcttcggccccatccttggcgcgatcctcgtgacatatctgcagcttgggctgaccagcgtcacgggcgtgtggcagctctatttcggcattatcttcatcggcatcgtgatgctgtctccgggcggcatcgccggcctgatcatgatgcaccggccgctggctcgtgccggaactttgcagacggtgattccgtcctatgtcgtcgcggcggtgccgaccctggcgctggcctgcggcgtgatcctgacgatcgaatcgatcgcgcgcacccatagcggccaaagcagccccatcaacctgttcggtgttgccttcactccggcgtcgccgatgacgtgggcgagtgcggcgatccttatcgtcgtcggcttcttcgtggcgcgcctcagctggcgacgagtcgccgatgcttgggatcgcgcggcgacgatcgcgcgcgaccgggggtatctggcatgacggcagccatcgaacttaacgctgtcgaaaagcgctttggcaacgtcggtattatccgggacctcaatctcagcgtcgcgcaaggcgagcgtcatgccatcatcggtccgaacggtgccggcaaatcgacgacgttcaacttgatcagcggccatatcaggccgagttcgggcgaggtaagactgaacggcgatgtgatctccggtctcaggcccttcgagatcaaccggcgcggcctgtcgcggtcgttccaggtcaccaacgtgttctcccgcatgtcggtctgggagaatgtccgttgtgccgtgctgtgggcgacggggcaccgttacgcgttctggaagaacgtcgacagcctgcctgaggtgcgcgaacgtacctctcagatactcgacgatatccatctgacgcaccggcgcgatgttccggcgggcttgttgacctacgctgagcagcgcgagcttgagatcggcatcaccatcgccggcggtgccaatgtcgtgttgctggacgagccgaccgccggcatgagccatgccgaaaccgaccgtgcggtggcgctgatccggcggttgacggaaggcaagacgctcgtgatcgtcgagcacgacatgagcgtcgtgttcggccttgccgatcgaatttccgtgctggtctacggccacatcattgcctcgggcacgccggaagagatccggcgcgatccgaaggtcaaggaagcctatctcggcgaggaggcgcactgatgctcgaggtcagggatctgcacgcctactacggcaagagccacattctccagggcgtcgacctcgatgtcgcctcgggcgaagtcgtgagcctgctcggccgcaatggtgtcgggcgttcgaccacggtcaaggcgatcatgggcgaggtcgcgccgcaaggcacgatccgcttcaagggcaaggacatcgccgggctgccgagctacaggattgcgcgtctcggtctcggctatgtgccggagcatcgcgacatcttcccgggtctgaccgttcgccagaatttgctcctcggtatcaaggacacgcgacgtcccggcaaatggcagcttcaggacatgctcgacatgtttcccaatcttgccgcgcgggccgacacgcctgcgggggtgctgtcaggcggcgagaagcagatgctcacgacctgccggaccctgatgggcgaccccgatctcatcatgatcgacgagccgaccgaaggtcttgccccgctcatcgtacagcaggtcggggatctcattgcccgcattgcgcacgccggcgtcgcgattctcctcgtcgagcagaagctgtcgattgcgatgaagatctccaaccgggtctacgttatgggacacggtcgcgtcgtcttcgaagggacgcccgagcaactgaagtcgaacggcgacgttcgcgcgcaatggctggaagtgtgagatcgggcgtatccgcacgtcgatgcagagttgaagccgagcgcagcctgcgatcgatcggctatttctccttcgtgttctcttgctcgcgttcctcgcgcgcacggtcgacggcaccaccttgcggctgcccgctgaccttcacgccggggagatgatcgaccttgtttttctcggcatcgtcagcgcgccgcagttcgcggtcgatgatgtcacgtgatccttccgccggttccttgtcgaatgggcttttggtctccacgctcatatgaatgatcctgcttgtggtcgcatgttgattgttgaggcaagcccggttcgagcctatcgttcctgaccaagccgcacctttcgggcggatttattccctgtgatcgtcgatctccgctgcgacctgtccgtagttcagcaacgcaaccagggtcgttccgccgagaatgtttccgagcagtgtcggcatgaagaagtccgaggcgtattgggccagggatgcccggccgctctgcaccaggaaggcacactcgacggagcctgcgacgatgtgcgagaatccgccgagcgcgacgacataggtcattatgacgatgatgtgcgcgcgtgattccttcgccgccggaagaagccaggccatcaaggcgatcagccagccggcgaagatggcccggacgaaggtggtcgagaacgtcccctcgaccgtatgccggctgatgtcgacgaaggcgtccacaatgcgcggctcgaagatgctggtgtgggcgagcaccgacccgatcgcccaggttcctgcgacgttcgaagcaaggaccagaaaccacagcttgagcacgcttgccagagtgcggaggtcccggttgtgcaagagcggcaggatcggcgtcagcgtgttctcagtgaacagttgttgccgtcccagcaccacgacgaggaagcccaccgtgtagccgagcggagcgaccaggcgccgcgtcgcatcatccgaaatcagcccgtgaaacgcgccctgaacgatcagcgacagggccatcgacagccctgcggcaagaccggagaggacgatcgcccaccagcgccgctccagttcctgctctccctctgcgcggatcgtttcatggatgagcgcggcgctcggccggctctgggattcgacctgcttggtttgacgccgcgagacgccgtcgagcttggatgcaggactgaaggaggctccgtcgccaggctgatccacgctgcggtctccgaaagaatgattgagtccaagacttcggggcgtgccattccgttcctcccgaacattgtggttggctcgttgtgcaatgcagagatcgaaggaaccttcacccgatgcatgagttggcggctcgggcagcgaaagttacacgagcccgatcgtgcaaaaggatgtgcgcgtgcgctccacggcgcaatcgcaggccatccgatccatccgatgctggtgccgatcccgattgcgtgcttcatcggggcgctgccgaccgacatcgcctatgtcgcgagcgccgagatcatgtgggcggacttttccgcctggctcctggtagtcggtgtcatcttcggcgtgctcgccgccatcgcggggctgactgacttcatcggcaaccgcctggtccgggcgcggacgtcccgtcggcgtcgccatcgacaagaccggtgcgccgctggttgccgacgacagcggcaacacgttgtggcgggtgaacgctgcgcatccgcagctgacgcaacgttaagcccggtcccgcgttgggagttcggaacagttaaagcccaagccaggaggaggacaatgggtctcgctcaatacgccatcgtgccggtacaggacgaatggggcgtgctgcatgacggcgacgtcaggagccggtacgccaccaaggaagccgcgttcgagtcggcagtcgccgcggcatcactggcccttcgtgagggacacgaggtccatgtcagcgtgcccggccgcgaagccggcgacaacgcgctgggtgtgtagagtgcccagccggcggatagcgttcgcaagaaggaggccgcaatgaccaagccccgcgagcccaacggcatcgagccatcccgctccgaggacgacatgcagcgcgaccagctcggtccgcgcggcgtgcctggcgcgcccgatcctgccaagatgacgccccaacgcgacaagaagaccccgaagcacgtcgatcccggccataccgcttgaggcgggcgctgtctcttttcgaaccctgcctggtttttcaaagtttggccggggcgacctgaaccgatcaggcaatattcgcggcgcggaaaatcgcggacggcaacggccccctggggcggccggagatggccgcatgccgccagtgcaatgctcgcaccttcgaaatagtgtatccgcaggaagcgcggcctgcggcctcgccgccgcgccaagatcagttctccggaggaaatcgacatgtcggccctgccgctttcaggcatcaagatccttgacctcacccgcgtgcttgccgggcccctgtcggcccagatgctgggcgatctcggcgcggaggtgatcaagatcgagcggccgggcaccggcgacgacgcgcgcgccttcggaccgccttacctgaatgaccccgatggcaaggccaacaacaacaattcattctatctctgcgccaaccgcaacaagaagtcggtcacggtcaatatcgccaagccggaagggcaggcgatcgtccgcgcgctcgccaaggacgccgacgtcttcatggagaattacaaggtcggcgatctcaagcgctacggcctcgactacgagaccatcaaggcgatcaatcccggcatcatctactgctcggtcaccggcttcggccagaccggcccgtacgcgccgcgcgccggatacgacgccatcctgcaggcgatgggcgggttgatgagcgtcaccggccatatcgacggcgagccgggtgagggcccgatgaaggtcggcccgtcgatcgtcgactacatgaccgggatgaatgcctcgatcgggatcctatcggcgctctatcatcgcgacgccaagggcggccagggacagcacatcgacgtctgcctgttcgacaccgtcatcgcatccctgtcgcactggctgcagatttatctggtcaacgggaagacgccgccgcgccgcggcacttggggcaatggcgggatgccggccggtgtgttccgctgcgccgatggcgagctgatgctggtggtcggcaacgacgggcagttccagcgcacctgcgccgtgctcggcgagccggagctcgcgaacgatccccgcttcgtcaagaacaacgaccgcgtcgtgcacggcaaagagatcatggccatcttcgccggcctgttcctgaagaagccggtggcttactggctggagaagctggaggaggccggcgtgccgtcaggtccgattaacaatttcgagcaggtgttctccgatccgcacgttcagtcgcgcggcatgcgcgtgaaggtcaaacatcctttcgagccggatctgtcgctggtccgcaatgcgctgaccctgtcggagacgccgatcaaggagtaccgcgcgccgccgctgcttggggagcacacgcaggaggtgctcggcggcaagctcggctttgacgcggagaagatcgcggccttgaagcagctggggatcatctagcgcgttcctagcctctcccgtggagcgccggggaatgtgcctggtcgtgcaggacgcccgcatgccggggcttgcgtgaagcttgcgcgcaatccccagataatcccggtccgtagtcgcacaggcttccgcttcgcgcgcgactctgattcgatccctgcacttgagttcgggagggaagcgaatgtcctacacgatcgggttccaggccaaggaccagaagtccattctggcgaccgaggcggccaccgccaatcaggccgtcgccatcattgccgcgctgcggcagagcgcggacgaaataaagttcatccgctcgccgcaggaaggcgagatgggtatcgagatgctgctgctgctcgccaaggaagaggccgaggagatgccgcagcgggtctagccgccgcgttagccgcaaaattcaggcattttccgccacgccgaactgacctcgcgccgggtttcgaccgggctcattgatcagcgcgcgtcccgtgcgagtgcgcgcgcgggggctttcgcctcgacctttcccgccgtcagcgccatcgtcgccacgctgaccacgcgtgcgaccacgtcctcgacgtcatcgagatcgcatttgccttccgacaatttcgtcagtcgctcgctctcgcggatggtgtgatgcgccatcgcgagcgcaaagttgaggccccaatagatatcgacctcgctccgatcgggcagggaccgtcgcatcgcgccggcaaatttgcgcaaatggtcgatctcgcggttcttgatgcggcggatcggcggcacggattcgatcgaggcacggatcatgaagcgcgcggcggtggagcgctgggtctccgggccgaggcagccgcgcaaggtcggaccgacgagggcgcgcaagatcgcctcgatcggcgcgcggccgccgccttgctcttccgccgcctttaattcgcgcaggcgctcgcggttcgtggcgatcgagcgcgtgacaaataattccgcgatcaactcgtccttcgagccgaaatgatagttcaccgcggccaggttgacattggcggccgcgacgatgtcgcgcagcgtcacgtcgccgaagccgcgatcggcatagagccgttcggcggcggcgagaatggcggacctggtgtgatcgctggccatgaaatgtcccgaaggggaggagttgcaaatcaaacagttgtatgaaactatcgtttgaaggccggaaaagtcaatccgcattcggactcgttcgcaacttcgcggcttggtcagaagggcccgcgctctcgaccattgcgggcagcgcggagcgggaggacaatccggcgcaagagtgtctgttgaaagaagcgaggagcgtcccatggacttcgatatgtcccccaagcagaaggaatggctcgaccgcgtgcggtccttcatggccaagcacgtgcgcccggcggtgccgatctacgaccagcaggacaagagtggcgaccgctggaaggtcatcccgatcctggaagacctcaagaagaaggcgaaggcggaaggcctctggaacatgttcatgccgccgtccgagcacgaggacgacgaattccgcggcgcgggactgaccaatctcgaatatgcgctgctgtcggaagagatgggccgcatcacctgggcctcggaagtgttcaactgttccgcgcccgacaccggcaacatggaagtgttcatccgctacggctccaaggagcagaagcgcaaatggctgcgtccgttgatggacggcgagatccgctcggccttcctgatgacggaacctgcggttgcgtcgtccgatgccaccaacatcgaaacccgcatcgagcgcgacggtgatcactacgtcatcaacggccgcaaatggtggtcgtccggcgtcggcgatccccgctgcaagatcgcgatcctgatgggcaagacggatttcaaggcggccaagcaccagcagcagtcgcagatcctggttccgctcgacacccccggcatcaaggtcgagaagatgttgccggtgttcggcttcgacgatgcgccgcacggacatgcgcaggtgctgctcgagaacgtgcgggtgccgaaggagaatatcctgctcggggagggtcgcggcttcgagatcgcgcagggccgcctcggtccgggtcgcatccatcactgcatgcgcaccatcggcaaggccgaggaggcgctggagaagatggtgaagcgtctcacctcgcgcaccgccttcggcaagaagatcgtcgagcacagcgtgtgggagcagcgcatcggcgaagcccgcaccaaaatcgagatgacccgcctcctgtgcctcaaggccgccgacatgatggacaaggtcggcaacaagaccgcgcaggccgagatcgccatgatcaaggtcgcggcgcccaacatggcgctgaagatcatcgatgaggcgatccaggcctttggcggcgccggcgtctcggacgaagcgggccttgccaaggactacgcccacatccgcacgctccgtctcgccgacggtccggacgaggtgcataaccgcgccattgccagacttgaggttcggaagtatgcaaactctcccggtcattagacgggagagcctggaggcgctcccggcttgacgaatgagagggcatgatccggtgaccgcttgacgcaagtgcgtcagcggttaccgactaggatcatgctcgacctgaaatggtcaggactgaagagggagcgtcactgtggcggacggcgtcaggaaagacgaagagttctcgggtaccaagccggtcgaggagcggcatcgtttcgacgagctgcgcctcgaagcctggatgcgcgagcatgtcgaaggttttgaaggcccgctggtcgtgctccagttcaagggcggccaatccaacccgacctatcgcctcaacacgccgaaccgctcctacgtgatgcgcagaaagccgttcggcaaactgctgccgtcggcgcatgcggtcgatcgcgagtatcgcgtgatcgctgcgctcggaaagcagggctttccggtcgcgcgcgcctatgcactctgccaggacgacagcgtcatcggtgcagccttctacatcatgtcgatggaggagggccgtgtgttctgggatccgacgctgccgagccaggcgccggacgaccggcgcaagattttcaccagcaagatcgagacgctggcaaagctccacatgttcgatcccgacgcgatcggtctcggcgatttcggtaagcccggcaactattttgcacgccagatcgaccgctggaccaagcaatatcgcgcatccgagacgcagcacattcccgagttcgagaaggtggccgaatggctgccgaagacggtgccggagcaggcgcgcgtctccatcgtccatggcgattatcgccttgacaacatgatcttccacgcgacggaaccgcgcgtgcaggccgtgctggactgggagctgtcgaccctcggcgatcccatggccgacttcacttatctgttgatgcagtggatcatgccgggcctcgagggcgccgacctcaaggcgctcaacatcccgagcctggaagaggccgcgcagatctactgcaacgtcaccaagatgacggtgccagatctcaactggtacttcgcctataacctgttccgccttgccggcattacccaaggcatcgccggccgcgtccgcgacggcaccgccgccaacgccaaggcgctggagtccgccaaacgcaccgtgccgctgtcaaaggcctcgtgggaatacgcgcagaaggcgggcgcggtgtagaaatgacgaaggcgcggccggtggccgcgccttttgcatgtggggagctgcgtcattcccacaccttcgctgtcattgtccgcgaaggcgagcaatcctgcatttcagagacgccagttcttgaatcgagacgccgcggcccgctggacgcccccggtcaagccgggcatgacagcgatgatgaggcgactcattccaccgtcgttgcgagccaacgggtccgcgcgannnnnnnnnnggcaatcagtgtgccctctactggcagtctggattgcttcgtcgcaggaactcctcgcaatgacgggaggcgctcagctcttcacgcaatgcgcgatcagcctctccacgaaggctccgcatttctccagctccgccatctccacgaactcgtccggcgtatgcgcctgcgcgatcgagccggggccgatcaccacggaggggatatcggcgatgtcggcgaacaggctcgcctcggtgccgaaggcgaccttggcgtggtcgttgcgtcccgccaggctcttggccagggtgacgattggagcatcggcttccgtgtcgagcgcggggtagtcgaggatctcctcgaatgcgatgccgcactccgcattccttgccttcatcgcaggctcgagttcggccttggcccaggcgacgattgcatcggtgacctcgcgcgactcggtgatgccgatgccgcggcactcgaattccaccgtgcaggtatcaggcacgatgttgagcgcggcaccgccgtgcacgatgctggtgagcagcgtcgagtgcggaacgtcgtagagactgtccgtcgcgtgcgcggctgcgagcgccatggcgcggcggcggatttcgacgatcagctcggcggcatattcgatcgcattgacaccctccggcgcgatcgaggaatggcgggcgagcccgcgaaacgtggcccgcacgccgtgcttgcccttatgaccgatgatgacctgcatctgggtcggctcgccgacgaagcagccgagcggcctgaccttcttcctggcgacctcgcgcagcatcggccgcacgccgacgcagccgatctcctcgtcataggagatcgccagatgaatcggcgtcttcagcctggcgtccaccatctccggcaccatggcgaggcacaccgccacaaatcccttcatgtcggtggtgccgcggccatagagcttgccgtcccgctccgccagcttgaacggatcatggctccagtcctggcccacgacaggcaccacgtcggtatggcccgacagcacgaagcccggccggtcctccggcccgattgtgacccagagagcggccttctgcccggtctcgtctacgatgcgctcacccttgatgccgaacccggcgagatagcgttcgatatgggcaatcaggggcaggttcgtgcggtcgctgatggtgtcgaagccgacgaggtcggcgaggagctttcggatgcgatcgggtcttgagcttggcattgtctcattctgtcgaggaaatggcggctgaaacgcttgcaggaaccataccaatgtggcgcccggtcgggcaaatcaacacaggtcgtacaagatatcgaggtgcctgtcgggcaaaacacgccagcggtcggtcaatgctcgaagccggaaatattccgctttaccgaaattcggaaaagacgtattgatcgccgcagcccggcccaaggaagaggggcgtatcgcgatcgtcacgaacgcgggccgggcggcggtggacgcagatggcgttggcgcgaacggatttgcagggcgggagaccgtgagcaagctcgccgcgcatgcgacaggtgccatctgcgtacggcaaaatcgtgtggtcctggcgcccggggtctgtgcgccaagtgttgcggtgatgtggcggtccgaccggacgcgcgcacccgccatccgcaaggcgacgggggcaatagtgcatcgctccccggggagagcacgacataagccgttccaaccactgcgcagggaaggccgggatgtcctggctacacctgtatgccgctgtgcagcttctcaccacgcagattccgcacagtggacctcgggtgccagcgggctcccggtcttccctgcgccctctttcatttcagagggtgaggcgacaaagcaaagctcgggcgagatcagccgcgagaacgagaagatgtgtcttcgggtgagatgcgaatcgaaagagcgatgcgcgccaccgcagacacaatgacggcgttgatgcagttacgtgcgaccacccgcccttgggtcccggctctgcgcagcagcgcaagaacgctgccgcgcgtccgggacacgggaggatcaaaccggcttgcccgtgtacggcatcgacgcggtaaggccgccgtcgaccggaaacgcctggccgttcacataagacgcctcgtcgctcgcaaggaacagtcccatcgccgcgagctcatgcggctggccggggcgcttgagcgggttgagctgcccgatcttgtcctgggtgccgcgctccttggcgcggtcgaagatcggcttggtcatgcctgtttcgatcagcccggggcagaccgcgttgatgcgaactccggtgccggtgagcgaataggccgtggtctgcaccaggctgatcacgccggccttgctcgcggcatagggatgtccgctcgcgccggccttaaggcctgcgacggacgccgtcagcacgatcgcgccggattgctgcttgaccatgtgtggcatggcgtacttcaccgcgaggaatggcccgatcaggttgacccgcaagatctcctgccagtgctccaccgtctgctcggcgagcggaacgagcccgccggagattccggcattcgcccagatcacgtcgagccgcccgtgcgtcttcacggccttgtcgatgacggcgatgacgtcggtctcggagccggcgtccgcgatcatggcttcggcggtgccgccggccttcttcacctcgtcgaccgtctccttcaccgcctccgagcgatcgaccgcaatcagtttggcaccttccttggtgaacagcagcgcagccgcgcgaccgatgccgctgcccgcgccagtgatgatgacggatttgccttgcaggcggcccatgcgcttctccctttggctcgcgcgcagcccttgccgcgcgacggaatttcaaacaagatttcaaacggtaaagtgtcttgagacacgttcgctactgacgtacagcgacatcaaacgggatggaagggtttcgatggccggtgcagacaagccgaatgtggtcgtcacgcgatggtggtgggtccggcacgcccccgtgcgcaatgacggcggcaacatctacgggcagagcgatatcgcctgcgacaccagcgacacctacgtattcaatgccgttgccaaggtgctgccacgcaccgcgatctggtactcgagcaacttgatgcgcacgcaccagaccgcggaagcgatctgggcggctggtttcccgcggcctgcgtcgatgaaatgggaggccgacctcgccgagcaaaatctcggccgctggcagggcatgaaccgcgcccagttcatcgccagccgccccgtcggatcgagttggttcgccgatatcaatgagcccgcgcccggcggcgaaagcttcatggatctctacaaccgcacgcgccgcaccatcgagcggatcaacaacgaggcggcagggcaggacattatcgcggtcgcgcatggcggcaccatcaaggcggcgctgggtctcgcgctcgacggtcagccggagcgcgggctgtcattcgacatcgacaattgctcggtgacgcggttggactattttgcgagccccgagcgcacggtctggcggctgccgatggtgaaccagcagccgtggatcgcggatgttgcgcacgcggcgatgcaccagccggcggggccggaagtcaagaagctcgcctgaagcggctgtccgctcgcgcgagcggcataagctccgggccaatcaaatcgtactcagggagatcaaaatgaccttgttcgacatgaaggggaaagtcgccgtcatcacgggatcgacgcgtggcatcgggctcgcgatcgccgagcgcatggccgagcacggtgccaaggtggtgatctcctcgcgaaagggcgacgtctgcgaccaggtggcaaagggcatcaacgacaaatacggcaagggcaccgcggtcgcgatcgccgccaacatctcctcgaaggaaaatctgcaaaacctcgtggacgagagcaaccgcgcgttcggcaagatcgacgtgctggtgtgcaacgcagcatcgaacccgtattacggtccgctcgccggcatctccgacgatcagttcaggaaaatcctcgacaacaacattgtcgccaacaactggctgatttcgatggtggtgccgcagatgatcgagcgcaaggacggctcgattatcatcgtctcctcgatcggcggcctgaagggctcgaccatcctcggcgcctatgcgatctcgaaggccgccgacatgcagctcgcccgcaatctcgcctgcgaatacggcccgcacaacatccgcgtgaactgcatcgcgcccggcctgatcaagaccgattttgcaaaagcgctgtgggacaatccggagaatttgaaagcctcgacctcgcgctcgccgctgctgcgcatcggcatccccgacgagatcgcgggcgctgcggtgctcctggggtcaaaggccggcgacttcatgaccggccagaccatggtgatcgacggcggcgcgacgatcagttgagcgatagagcgtagaagaggcacgcagcccacccaacgaccggtgtcatcgcccgcggaagcgggcgatccagtattccgggggccgacattggagagctcgctcttaccacatccgccacggcgtactggatgccccggtcaagccggggcatgacagcgaatgtgaggatgcagcgtcaccgtgcgagaccatgcggacaccgcgtcactccaccgcggcgtaaaccagatcccgcaccagggtccgcgtgtagtcgcgctgtccggggccctggctcatgaacaccgcgaacagatcctccttcggatcgatccagaagaacgtgccggcaatgccgctccagaaatactggccgatgctgccggggaagggcgcgatgcccgcctccttgcgcacggcgaagccgaggccgaagccgtggccgggcgagagcagggtgccgttgatcgcaacgcctggcccgagatgatctgacgccatcagttccagcgttttgcggccgatgaccctgttgccgtcgagcgtaccgccattgcgcagcatcaggcagaatcgggcatagtccatggtggtcgagaccaggccgccgccgccggactccatcaccggctgctcgagcatgttgaacagcgcgaccttgtcgccggtccagggatcggacgcgaacggctcggcgagccggcccgcattggcctccgatgtcgagaagccggtctcggccatctggagcggcgcgaggacgcgctcggtgaggaaagcgccaagcgacttgccgctgacgacctcgatgatgcggcccagaatgtcggtggagcggctgtagttgaactccgcgcctggctggcagaccagcggaaagctcgcgaccagtgcggcgtgctcggcgttggtgatcttgcggctgcggacgcgggattcctgatagagcttgtgcacggggccatcgccctggtgctcgtaggtgaggccggaggtgtggcggagcaggtcctgcaccgtcatcggccgcgttgccggcaccagttccagcttgccgccactgactacgccgaccttctggtcggcgaactcgggtatgaacttggcgaccgcgtcactgagaagcagatggccgtcctcgaccagggccatgatgccgacggagacgatcggcttggtcatcgagaagatccggaagatcgaatcgcgcgccattggcgcagcgcccgacgggctttgcttgccgagcgcctcgaaccagccgatctggccacgccgggccaccagcacagtagccccagggatggttcccttttcgatttcgcgcttgaaagcgtccgacatggcttggaggcggggacgcgacagcccgagggtctcggggcgggcttccggcacaggtggcgtccggaacgcggtcgtggcctgtgtagcggctgtggcggtggctgtagcggtcatgggcactcccggttgcttttcattatgggcgatggactgtggcccagaagcctcggcataaacaagcgaggcccgcgcggttcacccttgcaaaccggccgtcccctgtgcttgaaagcggccctgatccgcggcgacgtgggtccgtaggagtgtagctcaattggtagagcaccggtctccaaaaccgggggtcgcaggttcgagccctgccactcctgccagttaaatcaatcacttgagtgaggtggcggcgagataggcgcggtggcgtctaacgaggcgaatcgcatgcgccgtcataccccgggcctcagcctacccgctcacccgccgcttccacacggcttccgcaagtgcgatttcggtgactgaatcggcgcccgaggccaacggcgtgcgtcgcctggcgacatcggaaacgaaggcatcggcctgacgccggaatgcccagctcggtgcacccgccgtctgcatgcgttgaccatcgtgatcgacaacgaccaaagcctcttgctcggcaaagggtggaggcagttccagggtcattgcgccacgttcaaactcgaccgtcagcccctcgcgccagggcccggccgacccgctggtgagatcgagcgtgcaggcgaggccgtcgaaatcgagcgtgatgcgccccgcccccgaatcctcgatcgagctatcgagaagagtcggcgatggtccgagcaggtagcgcaccacattgatgatatggctggagacattcaagaagtggtcgtaaccctggcgcatcgcgcgcggcatccagtcggggccatcctcccagagttcgagcccgtccggccgtgcttcggcggtcatcacgaagttgtcctgcgctcggcccgtgtcgccgccgaagcaccagccatgcgcggcgacgatgcgccccagcgaccggtctgcgcgaatacgtgccaactcggccacgcgcgtgccacgccggcatcgtgacgcttccatgtagccgatgctgtagatgaggtcctgtcgccgcgccgcttcgaccagcgtctcggcttgagccgtcgtgtaggccatcggcttttccgacagcacgtggcggccgctgttcaagacgtccaggacgatcggcccggtcgcgcgccgcttcgtcaccacgaccaccgcggagacctcgctgtccgcaagcagctcccggtgcgtgccatagatccgtgagacgccgaatttctgcgcggcggcggccgcgagttccggccggagatcggcaatcgcgatgacgcggcccgcgggattggccgcgaaattggcgaggtggcacatctgaccgaccatacccgttccgatgatgccaatgcctggtgtcactggctcgatccctcagcgtttgcggatgacgaggaaatgcgccggctgccccccgggcgttgatgaacgccgggtccgtctgggtgagggcggtgaccgtggtgtcccgtcgctcgatcgcgtcaaagatgcgatggaagctgtcgagggtcgcgatgatggcatcaaggtcgacagtatcgtcggacaggatgtcagcggtgcggatcgcctcgcgcagggccgcgaggccggcgacggcgcgtgccaggctctccccgatgggatcgtcgatcatcctgtcgacatcgggagccagcgtctcgactgatgccgcgaccgcctgcacggcatcggccttgcccaccagatagagctttcgtccgccgaggaagctcaggcggctgcgatcgagatggcgtgtgaggcggtgcagcttgtcgggccggacaggacctttttgtgccagtagatgtccaggctgtcgcggtaggcgggccaggccgaatggatatcgaatccctgctcatgcgccgccgtgcacaaggctgccgcgtcgagaaagtatctgtgccgaacgaaaggattttcgagcacgtccatcagccaggattcgaagctgcgggtgtgcggaatgctgttccatttcggctcgaacagcgtcctcgccgtctcgagcgcggggcgccctgtcagggccttgccggccgcatggatcgccttgagcgcgagctcggagaagccgccatagcgctcgtaataggacaccacggcataaccgtccggattgagcaggccgcggaagatgcccagccgattctccgtcggctgcaccgtgtagatgaacccttcggcatcgatgatgtcgaaacggcgatcgctgcggaatccctcgacatcggccagcacgagctcgcgcagtcgcttcgtcaggccaaaacgcgcgaaaaaggcctggatcttcgggtgcgcatgctggttcggctcggcgagcgtcatatttccgccccagccggcaaacaccagcgcgttctcgccggaatcaggaccgaactcgagcacatcggaacagccgggggggcagcaccagcttgtccgagaacagatcgcgccgctggctagcataggccatgcggcgaccctgcggccgcttcgagacgatcgagctcgctccagatgtccgacggcgcgaagatcgaaacgacgtggagcgggcgcctcacgttctcgcgcagccggctgttaaccttggcttcgttctcctgattcacggcgagaagacagacgagcggcccagtcttgccggcgagaacgtccggcgagcggatggggatcccggtgccgggcagggagaggccctggcgctccttctggtcgtcgaccgagaggtcgacgagatccgtcagctcgtgggcattggtgaaggtgcaggcgcggcagccggcgccatagatggcgatctcggcaccgctggcgcgggccttggcgaggatcggacgaagacgagcgctgtactcccttgcgcgctgaccgaatgtctcgccggcgcccgacggttccggattctggctgtggtcgacgacttcactcgcgaatgcctggcgctcgtcgccgatacttcgctgccgggcctgcgggtcacacgcgagctcgatgtcatcattgcctggcgcggccggccggcgatgtgcctgtccgacaacggtactgagctgaccggaatggccatgctgcgcttcagccaagagaggcagatcgagtggcactacatcgcgcccggcaaacagacccagaatgccttcatcgagagctttaacacccgcctgcgcgatgaactcctcaatgagacgctgttcacttcgctcgcacaggcgcgagccgtgctggccgcctggaaagacgactacaacaacgcccggccgcacagcgccctgggcaacctcacgccgaccgaatacgccaaacgcaacgctcttgggccgcaacgggacgggacgctgcgctatgccgagggctccgcgccccgccccgttgcttcaccgagccccttgggctcatattcaaccgggactctttccattgctggatgaagcgaggggctcagaccacgatctgcggcaggccgcattcgccgcaggccagcacctcgaacggctactgctcctgctgctcgtcttggccatgccgaagccgatgcgcaatcggcattagaccgaggtcgatgaccggacgcaggttgatcgaatggcaaaggcggcattggtcggtcacgggtttgactcattgggagagtaggacgaaatcagcatcattggttggttgtcatcgaacattcgcggcgcgacaatcgaatagcagcagcactcgatctacggccccctcagatgcttgccgcgagcgtaccgatccttgtaacgtagtcctgcacggttcggagcctggatggcgccttgcggggcagggataagcccttgatcccacgccggtctgcgcggccgtcgcgcggcgccggctggtccgtgcaagccccgataccttgacctttagccctatccgcagtagataccccgcactcgcagccggcccgttagacgcggatttccggcgcggccttgaaatccccgaacaatcgagcccggtttccggctcatccttcgcgacagagggctgggtcaacaacggcggctgttcggatccctgaaattcatttgcgtctgtcgacggacgttggacatcaaacgatggcagtcagcccgttcaagttcttgcaggaagtgcgctcggaaactgccaaggtcacctggccgacccgccgggagaccacgatcaccaccatcatggtgttcgtcatggtcgccgtcgcctcgatcttcttcttcgccgccgaccagatcatccgctatctcatcaccttcctcctgggcattcactgatggcaacagcaaccgctcaagtgtccgacaagcgctggtacattgtccacgcctattcgaacttcgagaagaaggtcgccgaatcgatccgcgagcaggccaagcagcgcgggctcgaggatctgttcgaactggtgctggttccgaccgagaaggtcacggaagtgcgccgcggccgcaagatcgacgccgagcgcaagttcttcccgggctatgtgctggtgaagatgaagctgaccgacgaggcgttccatctgatcaagaacaccccgaaggtgacgggtttcctcggcgcggaaaacaagccgatgccgatctcggaagccgaggccatgcgtatcctgcaccaggtgcaggaaggcgtggaacggccgaaggcgtcggtatcattcgagattggcgagaacgtgcgcgtggccgatggcccgttcgcctcgttctcgggcgtcgtcgaggaaatcgacgaggcgcgctcgcgcgtgaaggtcgcggtctcgatcttcggtcgcgcgacgccggtcgagctggaattcggtcaggtcgagaaggtctgatcgttggtcattgccgggcttgacccggcaatccatnnnnnnnnnnccttcgcagaagtctctgcgaagatggatggatgcccggattcaagtctgggcatgacagagtggaggcggcgacgtctccgatggaggccgtgggaggacgagggcggttgccagccgcctgagatcccgaccacaaacctgaaaccgccggcggcacgccggcacaacaggagtgatatatggcaaagaaagtgaccggatacctgaagcttcaggtcccggccggtgcggcgaatccttcgcccccgatcggtcccgcgctcggtcagcgcggtctcaacatcatggagttctgcaaggcgttcaacgcccagacccagaaggaagagaagaacaccccgatcccggtgatcatcaccatctatgcggaccgttccttcaccttcgagatgaagacgccgccgatgtcctacttcctcaagcaggccgccaagatccagtccggctcgaaggcgccgggccgtgacaaggccggcaaggtgaccaaggcgcaggtgcgcgagatcgccgagaagaagatgaaggacttgaattgcgacaccatcgaatcggccatgaagatggtcgagggctcggcccgttcgatgggtctggaagttgcggggtaagcggtcatggcaatcggaaagcgtttgaacaaagcccgcgaaggcattgatcgcgaaaagctttacccgctcgcggacgccatcaagatggtcaaggaacgtgcgaaagcgaagttcgacgagaccatcgaggtcgcgatcaatctcggcgtcgacccccgtcacgccgaccagatggttcgtggcgtcgtaaccctgccgaacggcaccggccgcacactgcgcgtcggcgtgttcgcccgcggcgccaaggccgatgaggccaaggcggcgggtgccgacgttgtcggagccgaggatctggtcgagaaggtgcagaacggcaacatcgacttcgaccgctgcatcgctacccccgacatgatgcctttggtcggccgcctcggtaaggtgctcggcccgcgcggcctgatgccaaacccgaagatcggcactgtgaccatggacgtcaccggtgcggtgaagggggccaagggcggctcggtcgagttccgcgtcgagaaggccggcatcctccaggccggcgtcggcaaggcctcgttctccgaggagaagctcgtcgagaacatcaaggctctggctgatgctgtctcgaaggcgaagccggccggctcgaagggcacctacatccagcgcgtggcggtgtcctcgacgatgggcccgggcgtgaaggtcgagccgggcaccattctcggctaaggtttggaaattgcatgaggcgaggggcggaattgggcaaccgattccgcccctcgtcgtttgtgacggctttcaccggaaacaagaacaatgactgacaaggtcctgatctactcgcgctttcccaagtcgatgatggtgcgtttcgctgagcgtttcgagttgctcgataccggtggcaagcccgcgcacgaggtattttcggctgatgagctgagcggcatccgcgcgatgctgacggcgggcggcaccccgctcggcccggaggcgatggacgagtctccaaagctgggtgccatcgtctgctatggcaccggctatgacggcgtcgacttgaaggcggcagccagccgcaacatcgcggtcgggcacagtccgggcgccaatgcggcctcggtcgccgatatcgcgatgaccctgatgctggcgacgacgcggcggatcctggtggccgaccagtatgtccgcagcggcgattgggctgagtcaaaacagtcgccgatgatgcggccccaggtcggcatgcccgggcgccggatcggcgtctacggcatgggcgagatcggccgcaagatcgcggcgcgctgcgccgccttcgagagcgaggtcggctatttcagccgcaccagatacgatctgccctatcgatatttcccctctctggaggcgctcgtcgactggtgcagcgtgctgatgattgccgtgcgagcagggggcgagacccagcacgtggtcaatggcgatatcctgaggcggcttggcgcggatggctatgtcgtcaacatctcccgcggctcggtcatcgacgagaaagccttggtcgcggccctctccgacaaaaccatcgctggcgcgggcctagacgtctatgagaaggaaccgcacgcgcctgacgcgctgaccgcgcttccaaatgtcgtgttcgccccgcatatcggcggccacaccgtcgaatcgcacgtcgccatgcagaattgcgtgctggcgaatctcaccgcgttcttcgaggggaagccgctaccttatgcggtcaaatcagcctgaatcggcccttttcggccgtttcaagtccggccggcaacgaactggaattggtgtgaattttgctcttggcaagcgggcagagagcggttaaagaaccgcctccggacgtgccggcctcggctggcgcgttcgtgcacgcatcccgaaaaacccgatacgacaggagatcattccttttcaggacgtccgtaaggatttgccggaaaaggaagagagaaatccgtcggttggctggggtgcgggcagaggtcgggcggttcgccggctgaccttgtcctgtccaagactgcaggcgccggcggggaatttcgatttctcaacggcttaatcgcatagcctgcatagacgggtgaagaccggatttcacttcgcacccagctttagcggctggtttcgcgaaacgggtctggttcggacctcgacacgccgtgggcctcatgggctcccggagggcaggctttgaattgtcgtcttgcccggcgtgtccgaagggctttgccccggaggttcaggtttgggtgggacgatgggtgcaacccggtggtcccgcttttgcgatgaccgccaaccggagagagcttgctgtggaacgagcggcaaaaaaagaagcggtcgaacagctccatgaggtcttcaagaccacgggcgtcgcgatcgttgctcaatattccggcctcaccgtcgcccagatgcagactctgcgcaagcagatgcggcaggctggcgcatcggtgaaggtctcgaagaaccgtctcgccaaaattgctcttgaaggcactgacgtcgttgccatcggccccatgctgaagggaccgaccgtgatcgcgacttccagcgatccggtagcggcgccgaaggtcgccatcgacttcgccaaggcgaacgaaaagttcgtcatcgtcggcggatcgatggggaagaccgtcctgaatgtcgacggcgtgaaggcgcttgcctcgctaccgtcgcttgacgaactgcgcggcaagatcgtcggcctcatcgtggccccggcgaccaagctggcccagctcgccaacgcgcccgcgggcaagctcgcacgcgtcatccaggctcatgcctcaaagggcgaagcggcctgacgcccttcgcaaaactcaaacccgaaccagacttacactcaaggaaactgaacaatggctgacttgcagaagatcgttgacgacctctcgagcctcaccgtgctcgaagctgccgagctcgcgaagctcctcgaagagaagtggggcgtttcggctgccgcggctgtcgccgtggccggcccggccgcaggtggcgccgccgccgctccggccgaagagaagaccgagttcacggtcgttctcgccagcgccggcgacaagaagatcgaggtcatcaaggaagtccgcgccatcactggtctcggcctgaaggaagcaaaggacctcgtcgagggtgctccgaagccgctgaaggaaggcgtgaacaaggaagaagccgacaagatcaaggcccagctcgagaaggctggcgccaaggtcgagctcaagtaagcagcacttactggcaaggatcccggctgcgttcggcgcggtcggggtcctggtccgctgctccagagggtggccgagatgcaaaaggcgtgcgacggaacctcccgacgtaggccgaacacgaaaaagtgtggggatttgagggtttgaccctcgaatctgcactattgtcgccccatatcgggtcgacagcacgaaagcgcggtgggcagggatgccggatttccctgtaagccgttgggagagcaggttatttcgggcttttgcagtccgtgaagttggtcgatgtgacgggcgggtgcgctcttgcgccccgcgcgtcgttttgcgttttgaaggtctgaagaacagattcaggacattcctgcctgaagctgaggctccagccccaagacggttcgaagaattcaacccggagagcggtggcagccgcgttccggacggcgcgccccgagcgggcgacgaaaatgagaggccacgatggcgcagcagacattcaccggtcgcaaacgagttcgcaagttcttcggacacatcaaggaagtcgccgagatgccgaacctcatcgaggttcagaaggcgtcctatgatcagttcctgatggtcgacgagcccccgggcggccgtctcgacgaaggtctgcaggcggtgttccgctcggtgtttccgatttccgacttctcgggcacctcgatgctggaattcgtccgctacgagttcgagcagccgaaatacgacgtcgacgagtgccgtcagcgcggcatgaccttcgctgcacccctcaaggtgacgctgcgtctgatcgtgttcgatatcgacgaggaaacgggcgccaagtcggtgaaggacatcaaggagcaggacgtctacatgggcgacatcccgctcatgacgatgaacggcaccttcatcgtcaacggtaccgagcgcgtcatcgtctcgcagatgcaccggtcgcccggcgtgttcttcgaccacgacaagggcaagacccattcctcgggcaagctgctattcgccgcccgcgtcatcccgtatcgcggctcctggctcgatatcgagttcgacgccaaggacatcgtctatgcgcgtatcgaccgtcgccgcaagattccggtgacgtcgctgatgttcgctctcggcctcgacggcgaggcgatcctgtccacgttctacaagaagattctctacaagcggacgaaggagggctggcgtgttccgttcgacgccaaccgtttccgcggctactcgaccgtcaacgacctgatcgacgccgacaccggcaaggtcgtgctcgaggccggcaagaagctcactgtccgcgccgcgcgccagctccaggagaaggggctgaaggcgctgcgcatggctgacgaggaactggtcggcaactacgtcgccgaggatctcgtcaacccgaagaccggcgagatccacgccgaggccggtgaggaaatcaccgacaagctgatgaaggcgctcaacgagcagggatacaaggagctgccgctgctcgacatcgaccatgtcaatgtcggaccctacatccgcaatacgctgtcggccgacaagaacatgacgcgtgaggacgcgctgttcgacatctaccgcgtgatgcgtccgggcgagccgccgacgctggagtcggcgcaggcgatgttccagtcgctgttcttcgacgcagaacgctacgacctctccgcggtcggtcgcgtcaagatgaacatgcgcctcgacctcgatgcgcccgacacccagcgcacgcttcgcaaggaggacatcctctccgtcatcaagacgctggtggatctgcgcgacggcaagggcgagatcgacgacatcgaccatctcggcaaccgccgtgtgcgttcggtcggcgagctcatggagaaccagtaccgcatcggcctgctgcgcatggagcgcgcgatcaaggagcgcatgtcctcggtcgacatcgacacggtcatgccgcaggacctgatcaacgcgaagcccgcagctgccgccgtgcgcgagttcttcggctcctcgcagctctcgcagttcatggaccagaccaacccgctgtcggaaatcacccacaagcgccgcctgtcggcgcttggaccgggcggtctgacccgcgagcgcgccggcttcgaggtgcgcgacgtgcatccgacgcattacggccgcatctgcccgatcgagacgccggaaggtccgaacatcggcctgatcaactcgctcgcgaccttcgcgcgcgtgaacaagtacggcttcgtcgagacgccgtaccgcaaggtcaaggacggccgtgtcaccgacgaggtcgtgtacctgtcggcgatggaagagggacgctattccgtggctcaggccaacgtgccggtcgacgccaagggtcgcttcaccgaagacctggtggtctgccgctcgagcggcacccgcgacgtcgtgccgatgacgcccgacaaggtcgactacatggacgtgtcgccgaagcagctggtttcggtcgccgcggcgctgattccgttcctcgagaacgacgacgccaaccgcgcgctgatgggctcgaacatgcagcgccaggcggtgccgctggttcgcgccgaggcgccgttcgtcggcaccggcatggagggtgtggttgcccgtgactcgggtgccgcgatcgcggcgcgccgctccggcgtgatcgaccagatcgacgcgacccgcgtcgtcatccgcgcgacggaagatctcgatcccaccaagtcgggcgtcgatatctaccgtctgatgaagtaccagcgctccaaccagtcgacctgcatcaaccagcgtccgctggtgaaggtcggtgacgtcgtcaagaagggcgacatcatcgccgacggtccgtcgaccgatctcggcgaactcgcgctcggccgaaacgtgctggtcgcgttcatgccgtggaacggctacaacttcgaagactcgatcctgctctccgagcggatcgtgaaggaagacgtcttcacctcgatccacatcgaggagttcgaggtgatggcgcgcgacaccaagctcggacctgaggaaatcacccgcgacatcccgaacgtctcggaagaagcgctgaagaacctcgacgaggccggcatcgtctacatcggcgctgaggtgcgcgccggcgacatcctggtcggcaagatcacgccgaagggcgaaagcccgatgacgccggaagaaaagctcctgcgcgccatcttcggcgagaaggcctccgacgttcgcgacacctcgctgcgcgtccctccgggcgtgcagggcacgatcgttgaagtgcgcgtgttcaaccgccatggtgtcgacaaggacgagcgtgcgctggcgatcgagcgggaagagatcgagcgcctcgccaaggaccgcgacgacgagcaggccatcctggaccgcaacgtctacaaccgtcttgccgagctcctcgaggggcggcagggcatcgcaggcccgaaaggcttcaagaaggacaccaagatcacccgtgcggtgctcgaggagtacccgaagtcgcaatggtggctgttcgcttcgcccaacgacaagctgatggccgagatcgaggccatgcggaagcagtacgacgagtcgaagaaggggctggaacagcgcttcctcgacaaggtcgagaagcttcagcgcggcgacgagcttccgcccggcgtgatgaagatggtcaaggtcttcgtcgcggtgaagcgcaagatccagcccggcgacaagatggccggccgccacggcaacaagggcgtggtgtcgaagatcgtgccgatcgaggacatgcctttcctcgaagacggcacgcatgccgacatcgtactcaatccgctcggcgtgccttcgcgcatgaacgtcggacagatcctcgagacccatctcggctgggcctgcgccggcctcggcaagcgtatcggccagacggtcgatgcctatctgtcgaagcaggacatcaagccgctgaaggaaaccttgaagaaggtctacggcgaggacgagacgatcaagtcgctcaacgacaacgagctgctcgaactcggccataacctcagccgcggcgtgccgatcgcgacgccggtgttcgacggcgccaaggaagccgacatcgaggagatgctgaagcttgccggtctcgacgcgtcggggcagtcgaccgtctatgacggccgcaccggcgatccgttcgatcgcaaggtgacggtgggctacatctacatgctcaagctgcaccatctggtcgacgacaagatccacgcgcgttcgatcggtccgtactcgctcgtcacccagcagccgctgggcggcaaggcgcagttcggcggccagcgcttcggcgaaatggaggtgtgggcgctcgaggcttacggcgcggcgtacacgctccaggagatgctgacggtgaagtcggacgacgtcgccggccgtaccaaggtgtacgaggcgatcgtgcgcggcgacgacacgttcgaggccggtattccggaatcgttcaacgtgctggtcaaggaaatgcgctcgctcggcctcaacgtcgacttgcataactccaagatgggaccggcgccgacgtcggaagcggccgagtaatacgatctttcatgcccggccctcgcggccgggcattggtgcccctcccgaggccttgagggcagggcgccccgctaagtgattttcgaatttgcggccggaggcgaccggcacgcgaggagaagacgatgaaccaagaaattatgaatctcttcaatccgacgacgccggctcaggtcttcgaccagatccggatctcgatcgcgtctccggaaaagattctgtcctggtcctacggcgagatcaagaagccggagaccatcaactaccgcaccttcaagcccgagcgcgacggcctgttctgcgcgcgcatcttcgggccgatcaaggactacgagtgcttgtgcggcaagtacaagcgcatgaagtacaagggcatcatctgcgagaagtgctcggtcgaggtcacgctgtcgcgcgttcggcgcgagcgcatgggccacatcgaactcgcagcccccgtcgcccacatctggttcctgaagtcgctgccctcgcgcatcggtcttctgctggatatgacgctcaaggatctcgagcggatcctctacttcgaatattacgtcgtgctggagccgggtctcaccgcgctgaaggaccgtcagctgctgtcggaagacgaatatctgaaggcacaggacgagtacggccaggattccttcaccgccatgatcggcgcggaggcgatccgtgagctgctcaagggcatggacctcgagaagctcgaggcctccttgcgcgtcgagatgcaggagaccgactccgacatcaagcacaagaagctcgccaagcgcctgaagatcgtggaagcgttccgccactccggcaacaagccggaatggatgatcatgaccgtggtcccggtgattccgccggacctgcgtccgctggtgccgctggacggcggcctcttcgcgacctcggacctcaacgatctctaccgccgtgtcatcaaccgcaacaaccggttgaagcggctgatggagctgcgcgcgcccgacatcatcatccgcaacgagaagcgcatgcttcaggaggccgtcgacgcgctgttcgacaacggccgccgtggtcgcgtcatcaccggcgccaacaagcgtccgctgaagtcgctcgccgacatgctcaagggcaagcagggccgcttccgtcagaacctgctcggcaagcgcgtcgactattcgggccgctcggtgatcgtggtcggtcccgaactgcgcctgcatcagtgcggcctgccgaagaagatggcgctcgaactgttcaagccgttcatctactcgcggcttgacgccaagggtctgtccaccaccgtgaagcaggccaagaagctggtcgagaaggagcggcccgaggtctgggacatcctggacgaggtcatccgcgagcatccggtgctgctcaaccgcgcgccgacgctgcatcgcctgggcatccaggcgttcgagcccgtgctcatcgagggcaaggcgatccagctccacccgctggtctgctccgccttcaacgccgacttcgacggcgaccagatggccgtccacgttccgctgtcgcttgaagcgcagctggaagcgcgcgtcctgatgatgtcgaccaacaacatcctgcatccggcgaacggtcagccgatcatcgtgccgtcgcaggacatcgtgctcggcctgtactacgtctcgatcatgcgcgaaggcctgcccggcgagggcaaggtgttcggcgacatggccgaactcgagcacgcgctgcacgcgaaggtcatccacctccacaccaagatcaagtaccggtgggaaggcatggacgagaccggcaaggtctccaagcgctggatcgaaaccaccgccggccgcgtcatgctcggcaatctgctgccgaagaacccgcggatttcgtacgagatcatcaacaagctgatgaccaagcgcgagatctccggcgtcatcgaccaagtctaccgccactgcggtcagaaggagaccgtgatcttctgcgaccgcatcatggcgctcggcttctacaacgcgttcaaggccggcatctcgttcggcaaggacgacatggtcgtgccgcacggcaagtggaagatcgtcgacaccacccgtacgctggcgaaggatttcgagcagcagtacaacgacggtctgatcacgcacggcgagaagtacaacaaggtcgtcgacgcctggtcgaaggccacggaagaaatcgccaaggcgatgatgaaggagatctccgccaccaagaagacggcgagcggagccgacgccgacatcaactcgatctacatgatggctcactccggtgcccgcggttcgccggcccagatgcgccagctcgccggcatgcgcggcctgatggccaagccgtcgggtgagatcatcgagacgccgatcatctcgaacttcaaggaaggcctctcggtgctcgagtacttcaactcgacccacggcgcccgcaagggcctcgcggacaccgcgttgaagaccgcgaactccggctacctgacccgtcgtctcgtcgacgtggcgcaggactgcatcatcacgcagagcgactgcggaaccaagctcggcatcaagatgcgcgccatcgtcgacgccggcaccgtggtcgcttcgctcggctcgcgcatcctcggacgcacggcctgcgaagacgtgcgtgacagctcgggcaaggtgatcgtcaagcgcgatacgctgatggaagagagccacgtggatgccatccatcaggccggcatccaggaggtgaagatccgctcggcgctgacctgcgagctcgtcaacggcatctgcggcaagtgctacggccgtgacctcgcccgcggcacgccggtcaaccatggcgaagcggtcggcgtcatcgcggcgcaatcgatcggcgagccgggcacgcagctgaccatgcgcaccttccacatcggtggtgcggcgcagctcaacgagcagtccttcgtcgaagccaacttcgacggcaagatcgtgatcaggaacaaggccatcgcccgcaacagcgaaggtcacctgatcgcgatggtgcgcaacatggttgtcgcgatcgtcgatgccgacggcaccgagcgtgcaacgcaccgtattcagtacggttcgcgcctgcacgttgacgagggcgacatggtcaagcgcggccagcgtatcgtcgagtgggatccctacacccgtccactgctcaccgaagtcgaaggaaccatcggcttcgaggatcttgtcgaggggcagtcgatctcggaaacgctcgacgaagccaccggtatcgccaagcgcgtggttatcgactggcgctcgacgcgcggcggctcggacctgcgtccggccatcgtggtcaagggcaaggacggcaaggtgctcaagctcgctcggggcggcgatgcccgctacatgctgtcggtcgacgccattctgtctgtcgacattggagccaaggttgcgccgggcgacatcctcgcccgtgtctcgaccgaaagcgccaagacgcgtgacatcaccggcggtctgccgcgcgtggcggaactgttcgaggcccggcgcccgaaggatgcggcaatcatcgccgaaatcgcgggcaccatccggttcggacgcgactacaagaacaagcgtcgcatctcgatcgagccgatggacaagaccgacgagccgcgcgagtacctgatcccgaagggcaagcacatccacctccaggacggcgacgtcgtcgaaaagggcgacttcatcgtggagggcaacccggcgccgcacgacatcctggcggtgaagggcatcgaggaactcgcggcctatctggtcaacgagatccaggaggtctaccggctgcaaggcgtgctcatcaacgacaagcacatcgaggtgattgtccgtcagatgctccagaaggtggaagtcaccgaccagggcgatacggacatgatctcgggcgagcaggtcgacaagatcgagttcgacgcgctgaacgcgaaggccaaggaagagggcaagaagcccgccacgggaacgccggttctgctcggcatcaccaaggcgagcctgcagacccggtccttcttctcggcggcatcgttccaggagaccacacgcgtcctcaccgaagcggcggtcaacggcaagatcgatccgctcgagggcctcaaggagaacgtcatcgtcggccggctgatcccggcgggcaccggcgcctccatggccaagatccgcgaagtcgccatgaagcgcgacaagctgatcctggacgagcgcgagaagcaggcggccgtcgtgtcgcccgcaccggaagccgagcttcctgcgctgccgcctgcggaatgatcgttcatccgtaggaatacgtaggacaatgaaaaggccggcttttgccggcctttttgctgctatctttgcctgctgcgacgcaggctcagcctccattcatctttccttcagccgcaaaagggcttctgctaggagagcgtagaccggtggtcccgcgatgggggcagggccggaagaccacggaacccacatgcttgatctcgcaatcgtaggcggcggccccggcgggctgatgagcgcctggtatctgaagcgtaagctcggcgatctctgtcgcgtcaccatctacgaggcctccgatcggctcggcggcaagatcgtcacgcgcaaattcgattcagcccccgcgatgtacgaggccggcgttgccgagatctacgactactcgatgacgggacccgatccgctgcgcgaattgatccagcatttcggcctccagaccatcccgatggacgccgagcaggtacattttggcggcgaactcatcaatgatgtgcccggcatgcgccgcagatatggcgccaagaccgcggacgcgatcgaggcgttccggaagcgctgcaccgaggcaatgtcgcccgtcgagtattacgagggcgttggtgcgcacgacaacgagaatccctgggcttacaagaccgccgagcaggtgctcgacgaggaggtcgaggacgagacggcaaagcgtttcttcaaggtgatggcgcggtccgacatcgcgaccgagagccacaacaccaacggtctcaatgccctcaagaactatctgatggacgtcgatggctatatcggcctctattccatccagaacggcaacgagcagctgatcgaatgcctgcagtccgaggtcaacgcggacatccagctcaatcaccgcgtgctcaccgtcggcaaggcgccgaccggccgctatcagctcaagatgatgaacggcaagggaccggagatccgcgatttcgatctcgtgctggtctgcctgccgcattcctggctcgccaccctcggctgggagggcgagcagctgcgcaggtcgatggtcaagcacgttgcctacttcgaccgtcccgctcattatttgcgcgtgtcgatcctgttcgacgagccgttctggggcgagaagattcccggagcctggttcatgtcggaggccttcggcggctgctgcgtctacaatgagggtgcgcgtcacgacgtcggcaagcatggcgttctgaactggctcatccccggctccgacgcgctggctttcgccaatctgtcggacggggagctgatcgatgccgccctgaagtcgctgccggcgtctctcggcgatgcgcgtttgcatttcatggaaggcaagatccaccgctggctgtcgtcggtgaacgcaattccaggcggcttgccggtgcgcgacgtcatgaccaatcaccggcccgagccgaaggatcatcccggaatcgtcgtggtcggcgactatctgttcgactcgacgctgaacggtctgctcgactcctcggacgcagcgaccgacattatcctgaccgagatgatgcgcctgcgccgcgaacgcacgcaggaggataagccgctttcgaacaagatcgatcgcgattatttcgagaactatcgcggcctcggaccctatcaccaggcctggcgccacttcaccgaccccgattacctcaccagactgatcagcatcgtctggggcaaggcgacgggcgccaagatgctggtcgcgggttccgccagcggagaattggtcggtgcgctgcgcgatcgcggcatcgatgcatggggaatcgagaacaatcgcggcatccacgccaagacgccaaaagcgctgaagaagtacaacaagctcggctcgatcaccgacatgccgttcaaggaccgcgcgttcgatttcgtgtttgagaccagcctctgtcacgttgcccccagacaggtgggccgcgcgatccgcgagctcaaccgcgtggtcaagaccggcctcgtgttcggctcgatcacctcggacatggcgccggcattgatcgaccgatacgatctcctgcgcggcgtcaagaagctggttacctggtgggaatggtccgaactgttcttcggcaacggcttcgatctgtcgatgcaccgcaaggattgcaccgatgcgctctgggaagcgacgctcgccgcgaacaaggggcctgggcaatggtacgccgacgccgatagcttgcgttattccttcttcgacaaggtcgaggacgaggattagcccgcgggatgcggtgcgaattcgccaattgttttgccgaattcatcctgatcgcatagaatcggtgcaatagcggttgccgctattcctgcattctctgcggtcatgccggccgtcagcatcggttggtttcatggcgtccaagcccctccctcccgacaaacagaagctcgccgcgaaagaggcggtcgagctcgacgacaagctggcctctgctgccaaagtcgatctcgacgacgaggacgaagaagacggagaggacgaactggaactcgacgacgatgaggacgaggacctcgtcgtctttactgcgcgcgaggccgccggggcgctcgcgaccatcgtcggattcgtcaggccctatctgaccaactacaagcggatgctgtcctacgtggcgttcggtgtcctcgtggagacgctgttcaacgtcattatgcccctcagcctcaagtatctgatcgacgacgcgctgggcgaggaggacttccgggcgctctacaagatcctcggcgtgctcgcgatcgccggcatattcacctcgatcgtcgcggtctggtacgagcgctgggacgcgcggcttgccgcctgcatcatctccgatgtccgcaagcgcctgttcgagcatgtccaggacctgccggccgcctatttcggccgcacgaagcgcggcgagatcctgtcgcgtttctcggtcgacctctcggccttcgaaggttcggtcaagacgttcgccaacagcgcggcgctgccgttcctggaactgatcgccggcatcatcctgatgttgttcctgaactggcagctcgccgtcgtcgcgctactggtgttcccgatcacactgatcggcccgcggattctgactcctaaagcggtgcaggccaactacgagcagaagctcaacgagagcgcgctgctcggcatggtgcaggagaatgtcgcggcgcaggctgtgatcaaggcgttcagcctccaacgcaagatgttcggcttcttcaccttgcgcaacgacgagacccgcaacaggatcgctgcggctacgttcctctcgacgatggtggagcggacggtcaccatctcagttcttctcctgcatctcgtggtgctcgcgatcggcgcctatcttgcaaccaccggccagatcaccatcgggaccttcgtcaccttcgagagcgcgttctgggaggtgtcctacaacatcgctcacgtcatgcatttcgtcccggtgtcgatctcctcggccgccgccatccgccacatccaggaattgctcgatgagccgacccgcgccgccgatcgtccgggtgcgcccgatctgccgcgcatcaccaacgacatcactttcgatcacgtcaccttccggtacgagggcagtcagacgccggtgctggataatctcagcctcaagctcaatgccggcaagcgtatcgccatcgtcggtccgagcggctccggcaagagcacgctgctcaatctgatcctgcggctctacgttcccgacgagggccgcgtcaccatcgacggcgtcgatgtccgcagggtgacgctggattcgctgcggcggagcatggcagtggtgttccaggagaacatgctcttcaacatgtcgatccgcgagaacatccgtctcggcaaggagggcgcaacggacgaagaggtggaggaggcggccaagaaggccgagatccaccgctacatcatgagcctgccgcagcgctacgatacgcccgtcggggaacgcggagacacgctgtcgggcggccagcgccaacgcatcgcgatcgcccgcgcaatcatccggaacccttccgtgctgctgctggacgaagccacctcggcgctcgatcagaccacggaggccgcaatcaaccgtacgctgctcaaggtcgccaagggtcgcaccatgatctggtcgacccaccgtctgacctcggtggtcgagatggatgagatcatcgtgatttcagggggcagggcgatcgagcggggctcccacgccgagctgctcgccaggaacggcatctatcgcaagctgtggaacgaccagatccaccagcctcatggcgcgtcggctcacgccgaggacagcggcgatgacgatgatgacgatctcgacgatgaggacgaggagtgatcgcgggcgggcgttcagctccggaagaacagaccctgtctgatctatcttgccgtcggggctgcgcaaacgcagcgccggcatagcgattctcggatccaaatcgttcggccggcgcggagccgctgattttctcgggcctctgcgtgggtggcataagcttctgcaacggcgatcagtgtcgtcggaaatcagctcgcggggctcgacatcgcaacgcgcgattgcgccggaacccgaccgcggagggcggattggcgcccggccataaaaagaacctcattctagtaataaaggaatatttaatccggatgaaatatgatcgatactggcacagcggacactctgttgctccgtcggtcggacgcggtgggtacgccgaagaggctaattctgcaggcgcatgaagcgctttgtgactgtcgtttcgccttgactagaccgattctcgcttatagaaagcgcctcacttaacgacaggcggtgagcatcgccagagtcggaacgggccacccgttgatccccaaggactagtccacaagggtcgctcaaggcgggcaccaacctcgacgaatgccgctcaaacgctgtcgatcatagctaggcaatgccagtgcgattttagttctcttgagcacgctctcttgagatcgaattcggatgcatgacctcagtattcgggccgcggcgttacgctgaacggcttcaagactgcggtcctctgtggcgtcgaagcgctttccgctcggtgatggagcggttggcgcaatttcgctttgcgcggattgttccgcttgaggcgacctcgtcgggcgggtggctcgaaaacaatttgcggtcccggcaacgggccgcggcaagacagcgggtccggaagggcctgcggcagaacaaagggtaaggccaggatgccgacgatcaaccagctgatcgctcaaccgcgggaagtgcagaagtcgcgcaagaaggtgccggcgctgcagcagtcgcctcagaagcgtggtgtttgcacccgcgtctacaccacgaccccgaagaagccgaactcggcgcttcgcaaggtcgccaaggtgcgcctgacgaacggcttcgaggtgatcggctacatccccggcgaaggtcataacctccaggagcactcggtggtcatgatccgcggcggccgcgtcaaggacttgcccggcgtgcgctaccacatcctccgcggcgttctggatacccagggcgtcaagaaccgtaagcagcgtcgttcgaagtacggcgccaagcgtccgaagtaagcgggaaccaagcctatgtctcgtcgccactctgcggaaaagcgcgaagtcctcccggatcccaagttcgggaacatcatcgtcaccaagttcatgaactcggtgatgtacgccggcaagaagtcggttgcggaaggcatcgtctatggtgcgttcggcatcatcgaggccaagaccaagcagaacccgctcggcgtgttcgagcaggcgctcgagaacgtcatgccgaccatcgaggtgcgctcccgccgcgtcggcggcgcgacctaccaggttccggtcgaagttcgctcgacccgccggcaggccttgggcattcgctggctgatctctgccgcgcgcgagcgcaacgagaagacgatgacggagcgcctctcggcggagctcctggacgcatcgaacaaccgcgggaacgccgtcaagaagcgtgaagacgtgcaccggatggcggaagccaaccgcgccttctcgcactatcgctggtaacggcgacacactcggactcgcaaggaacgccccatgccccgccaacatgccatcgaggactaccgcaatttcggtatcatggcgcatatcgacgccggcaagaccacgacgaccgagcgcatcctctattacaccggcaagagccacaagatcggcgaagtgcacgagggtgccgcgacgatggactggatggagcaggagcaggagcgtggcatcacgatcacctcggctgcgaccaccgccttctggaacggcaagcgcctgaacatcatcgacacccccggccacgtcgacttcaccatcgaagtcgagcgcagcttgcgcgtgctcgacggcgccgtctgcgtgctcgactccaaccaaggtgtcgagccccagaccgagaccgtctggcgccagggtgacaagtacaaggttccgcgcatcgtcttcgccaacaagatggacaagatcggtgccgatttcttcaagtgcctgtctgacatcgtcgaccgtctgggtgccaagcccgttgcgatccagcttccgatcggcgccgagaacaacttcaagggtctcgtcgacctcgtgaagatgaagggcgtcgtctggaacgatgaagcgctcggcgcgaagttcgactatgtcgacattccggaagacctcgtcgaccaggccaaggaataccgcgagaagatggtggaagccgccgtcgagctcgatgacgacgccatggccgcctatctcgacggcaaggagccggacgaagcgaccctgaagcgcctgatccgcaaggcggtgctgaccggcgcgttctatcccgtgctgtgcggctcggccttcaagaacaagggcgtgcagccgttgcttgatgctgtcgtcgactatctgccgtcgcctctcgacgtgcccgcgatcaagggtaccgacgacaagggcaacgaggtggtgcgcaaggcggacgacaaggagcccctggcgctgctcgcgttcaagatcatggacgaccccttcgtcggcaccatcaccttctgccgcatctattccggtatcctgcagagcggcaccggcgtcgttaactcgacccgcgagaagaaggagcggatcgggcgcatgctcttgatgcatgcgaacaaccgcgaggacatcaaggaagcctatgccggcgacatcgtcgcgctggccggcctgaaggaagcgcgcaccggcgacacgctgtgcgatcccgacaagccggtgatcctggagaagatggagttccccgagccggtcatcgagatcgcgatcgagccgaagtccaaggccgaccaggagaagctgggcgtggcgctggccaagctcgccgcggaggatccgtccttccgcgtgtcgaccgaccacgagtccggccagaccattctcaagggcatgggcgaactccatctcgacatcaaggtcgacattctcaagcgcacctacaaggttgacgccaacatcggcgcgccgcaggtggcgttccgtgagcgcgtcaccaagcgggtcgagcatagctacacccacaagaagcagaccggcggtaccggccagttcgcggccgtgtcgttcatcgtcgagccgaacgagcccggcaagggctacgagttcgagtcgaagatcgtcggcggcgcggtgccgaaggagtacatcccgggcgtcgagaagggcctggagagcgtactgtcgtccggcgtggtcgcgggcttcccggtggtcgacgtcaaggtgacgctggtcgacggcaagtatcacgacgtcgactcgtcggcgctcgccttcgaaatcgcgtcgcgcgcctgcttccgcgaagcgctgcagatgggcaagtccgtcctgctcgagccgatcatgaaggtcgaagtggtgaccccggaagactacaccggttcggtcatcggcgacctgaactcccggcgcggtcagatccagggccaggacatgcgcggcaacgccaacgtcatcaacgcgatggtgccgctcatgaacatgttcggttacgtgaacaacctgcgctcgatgagccagggtcgcgcgaccttcaccatgcagttcgaccactacgcagaagcgccggccaacgtgtcggcagaagtccagaagaagtttgcctgattgtcgtcggtctcaagctgacgattgaacggagagtcaaatggccaaagcaaagtttgaacgtaccaagccgcactgcaacatcggcaccatcggtcacgtcgaccatggcaagacgtcgctgaccgcggcgatcaccaaaatcctcgccgagaccggcggtgcgacgttcaccgcgtacgatcagatcgacaaggcgccggaagagaaggcgcgcggcatcaccatctcgaccgcgcacgtcgagtatgagacgcagaaccgtcactatgcccacgtcgattgccccggccacgccgactacgtgaagaacatgatcaccggcgccgcgcagatggacggtgcaatcctggtcgtgtcggccgctgacggcccgatgccgcagacccgtgagcacatcctgctcgcccgccaggtcggcgtgcccgcgctcgtcgtgttcctcaacaagtgcgacatggtcgacgatccggagctgcttgagctcgtcgagctcgaagttcgcgaactgctctcgaagtacgagttccccggcgacaagatcccgatcatcaagggttcggcgctcgccgctctcgaagactccgacaagaagctgggccacgacgccattctcgagctgatgcgcaatgtcgacgagtacatcccgcagccggagcgtccgatcgaccagccgttcctgatgccggtcgaagacgttttctcgatctcgggccgcggtaccgtcgtgaccggccgtgtcgagcgcggcgtcgtcaaggtcggcgaggaaatcgagatcgtaggtctccgcgccacccagaagaccaccgtcaccggcgtcgaaatgttccgcaagctgctcgatcagggccaggccggcgacaacatcggtgcgctgcttcgcggcaccaagcgcgaggacgtcgagcgcggccaggttctggccaagcccggttcggtcaagccgcacaccaagttcaaggctgaggcctacatcctcaccaaggaagagggcggtcgccacaccccgttcttcaccaactaccgtccgcagttctacttccgcaccaccgacgtgactggtgtcgtgcacctgccggaaggcaccgagatggtgatgccgggcgacaacatcgcgatggaagtgcacctgatcgtgccgatcgcgatggaagagaagctgcgcttcgcgatccgcgagggcggccgcaccgtcggcgccggcgtcgtcgcctcgatcatcgagtaatcacgcgaatagggaacggtgagtggcgaataggggattctgttcgctactcgctactcgccacccactgagaaagacacggcaatgaacggccaaaacattcgtatccgtctcaaggcgttcgaccatcgtatcctcgatacgtcgacccgcgagatcgtgaacacggcgaagcgcaccggcgcgcaggtccgcggacccattccgctgcccacccgcatcgagaagttcaccgtcaaccgttcgccccacgtcgacaagaagagccgcgaacagttcgagatgcgcactcacaagcgcctgctcgacatcgtcgatccgaccccgcagaccgtcgacgccttgatgaagctcgacctcgctgccggcgtcgacgtcgagatcaagctctgagcaagaccccgagagtgggcgccggtttctgaccgggtcttgctcacaccgaagattagctagtccgcaaggacagaaagaacaggaagcaagccgatgcgctccggagtgatcgcacaaaaggtcgggatgacgcgggtcttcacggaggccggcgaacatatccccgtgaccgtgctgaagctcggcaattgccaggtcgtaggccaccgcaccgaggagaagaacggttacgtcgcgctccagctcggatctggcagccgcaagaccgtttacatgccgaaggctgagcgcggccagttcgcggtcgccaaggtcgaaccgaagcgccgggtcgaggaattccgggtcagcgccgatgcgatgatcccggtcggcgccgagatccaggccgatcacttcgtcgtcggtcagttcgtcgacgtcaccggcacctcggtcggcaaaggcttcgccggcggcatgaagcgctggaacttcggcggtctgcgcgccacgcacggtgtgtcgatctcgcaccgctccatcggttcgaccggtggccgtcaggaccccggcaagacctggaagaacaagaagatgcccggccacatgggcgtcgaccgcatcaccacgctcaaccttcgcgtcgtccagaccgatgtcgagcgcggcctgatcctcgtcgagggagccgttcccggctccaagggcggctggatccgcgtgcgcgacgccgtcaagaagccgctgccgaaggaagctccgaagcccggcaagttcaaggttgctggcgacgcggaagccgctccggctgcgcaggaggcgtgagatggaattgaaggttaccaccctcgaaggtaaggaagcgggctcggtccagctttccgacgccattttcggcctcgagccgcgcgaggacatcatcgcgcgctgcgtgcagtggcagctgaacaagcggcaggccggcacgcacaaggccaagggccgcgccgagatctggcgcacgggcaagaagatgtacaagcagaagggcaccggcggtgctcgtcacggctcggcccgcgtgccgcagttccgtggcggcggccgtgccttcggtccggttgtgcgttcgcacgccacagacctgccgaagaaggtccgcgcccttgcgctcaagcacgcgctctcggccaaggccaaggacggcgatctggtcgtgatcgagaaggccgctctcgataccgccaagaccaaggcgctgctcggccacttctcgggcctcgggctcaccaacgcgctgatcatcgacggtgccgagctcaacaacggttttgccgctgccgcccggaacatcccgaacatggacgtgctgccgatccagggcatcaacgtctatgacatcctgcgccgtcagaagcttgttctgaccaaggccgccatcgatgcgctggaggcgcgcttcaaatgacgaagaacatcgagcctcgccactacgacgtgatcctgtcgccggtcgttaccgaaaaggcgacgatcgcctctgagcacaacaaggtgctgttcaaggtggccgcgaaggcgaccaagccgcagattaaggaagcgatcgagaagctgttcgacgtcaaggtcaagagcgtcaacacgctggtccgcaaaggcaagacgaaggtcttccgcggtaatctcggttcgcagtcgaacagcaagcgcgcgatcgtgaccctcgaagagggccaccggatcgacgtgaccaccggtctgtaaggtcgtacgacgatggcactgaagacattcaatcccacgacgccgggccagcgccagctggtcatggtcgatcgttcggccctgtacaagggcaagccggtcaaggcactcactgagggcaagaagtcctcgggcggccgcaacaacaccggtcgcatcaccgtgcgtttccgcggtggcggtcacaagcagacgctgcgtaccgtcgatttcaagcgcgagaagatcgacgtccccgcgaccgtcgagcggctggagtacgatccgaaccgaaccggcttcatcgctctgatcaagtatcaggacggcgagcaggcctatatcctggcgccgcagcgcctggccgtgggtgacaccatcatcgccggcaactatgtcgacgtgaagccgggcaacgtcatgccgctcggcaacatgccggtcggcacgatcattcacaatatcgaggtcaagatcgggaagggcggccagctcgcccgttctgccggcacctatgcccagctcgttggccgcgaccaggactacgtcatcatccgcctgaactcgggcgagcagcgcctggtgcacggccgctgccgcggcacgatcggcgcggtgtcgaacccggatcatatgaacacctcgatcggcaaggccggtcgcaagcgttggatgggccgtcgcccgcacaaccgcggtgttgcgatgaacccgatcgaccatccgcacggcggtggtgaaggtcgtacctcgggcggccgtcatccggtcaccccatggggcaagccgaccaagggcaagaagacccgcaccaacaagtcgaccaacaaattcattctcctaagccgccacaagcggaagaagtaaggaacgccggacatggttcgttcagtctggaaaggcccgttcgtcgagggttctctgctcaagaaggcagatgccgcgcgcgcgtccggccgtcacgacgtcatcaagatctggagccgtcgttcgacgatcctgccgcagttcgtcggcctgaccttcggcgtctacaacggtcagaagcacgtgccggtggccgtgaacgaggaaatggtcggtcacaagttcggcgagttctcgccgacccggaccttccatggccactccggcgacaagaaagccaagaaggcttgaggattaaacgatgagcaaacctaagcgcgaacggagcctcgccgagaacgaggccaaggcggtcgcccggatgctgcgggtgagcccgcagaagctcaatctggttgcccagctcattcgcggccggaaggcgtctgccgcgctcgccgacctgcagttttcgcgcaagcggatcgcggtcgacgtgaagaagtgcctggaatcggcgatcgccaacgccgagaacaaccacgacctcgacgtcgacgatctggtcgtggcgcaggccttcgtcggcaacggcctcgtgatgaagcgcttcgccgcccgcggtcgcggccgctcgggccgtgtctacaaaccgttttcgcagctgacgatcattgttcgtcaggtcgaagctgaagccgccgcttaagggcgcaggagaacacgatgggtcagaagatcaatccgatcggtctgcgtctcggcatcaaccggacctgggattcccgctggttcgccggcaagcaggaatacggcaagctgctgcacgaggacgtcaagatccgcgagatcctgcacaaggagctcaagcaggcggccgtcgcccgcatcgtgatcgagcgtccgcacaagaagtgccgcgtcaccatccactcggcccgtccgggcgtggtgatcggcaagaagggcgccgacatcgacaagctgcgcaagaaggtcgcggacatcacctcgtccgacgtcgtcatcaacatcgtcgagatccgcaagccggagctcgatgcgacgctggtggccgagtcgatcgcccaacagctcgagcgccgcgtggcgttccgccgtgccatgaagcgcgccgtgcagtcggcgatgcgtctcggcgcggaaggcatccgcatcaactgctcgggacgtctcggcggtgcggaaatcgcgcgcatggagtggtaccgcgaaggccgcgtgccgctgcacacgctgcgcgcggacatcgattacggcgtggcgaccgccttcacgaccttcggcacctgcggcgtcaaggtctggatcttcaagggcgagatcctcgagcacgatccgatggcccaggacaagagaatggccgaaggcgagaccggcggcagtggcgatcgtggtggccgtcagcgccgcgatacggccgctgcctagagccagacaggaatttgagggcttaaagccatgatgcaacctaagaaaacgaagttccggaaggcgcataagggccgcatccacggcgttgcgtcttcaggcgcgacgttggcgttcgggcagttcggcctgaaggcgaccgagcctgagcgcgtcaccgcgcgccagatcgaagccgcccgtcgcgcgctgacccgtcacatgaagcgtgccggccgcgtctggatccgcgtgttccccgacgttccggtgtcgaagaagccggccgaagtccgcatgggctccggcaagggttctccggaattgtgggtcgcgcgcgtcaagccgggccgggtgctgttcgagatcgacggcgtcaacacccagacggcgcgtgaggcgctgaccctggcggcggccaagctgccgatcaagacgcgcttcgtcgagcgcattgcggagtaatggccatggcccagatgaagatcgaagacatccgcgcgatgagccccgaccagcaggatgacgccatcctgaacctgaagaaggagcgcttcaacctgcgcttccagcgcgccaccgggcagctcgagaacacctcgcgcctgcgcgaggctcgccgtgacatcgctcggatcaagaccgtcgccgcgcagacgcgcgccaagaagaagtaagaggcttacgaagatgccgaaacgtactttgcagggcgtggtcgtcagcgacaagcaggccaagaccatcgtggtgcgggtcgatcgccgcttcacgcacccgatctacaagaagacgatccgccgctccaagaactaccacgcgcacgacgagagcaaccagttcaagccgggcgacatggtgtggatcgaggaaacgaagccgatttcgaagttgaagcgctgggtcgtgatccggggcgaacacaagaaaagcgcctgatctgttggctctagccgactgacttcagggaaatgttgagcgccggctgggctggcgcaaatagaaagaggacgaggtgcatcaatgattcagatgcagaccaacctcgacgtggccgacaattctggcgcacgccgtgtcatgtgtatcaaggtgctcgggggctccaagcgccgctacgccacgatcggcgacatcatcgtcgtctcgatcaaggaagctatcccgcgtggcaaggtgaagaagggcgacgtgatgaaggccgtcgtggtgcgcgtccgcaaggacatccgccgcgccgatggctcggtcatccggttcgaccgcaacgctgccgtcctgatcaacaatcagtccgagccggtcggtacccgtatcttcgggcccgtgccgcgcgagctgcgcgccaagaaccacatgaagatcatctcgctcgcgccggaggtgctgtgatggctgcgaagatccgcaagggcgacaaggtcgtcgtgctgaccggtcgcgacaaggggcgcaccggcgaagtgttcgaggttcgccccgacgccggcacggcgctggtgcgcggcatcaacatggtcaagcgtcaccagaagcagacgcaggcccaggagggcggcatcatctcgaaagaggcgccgatccaactgtccaacatcgcgtatgtcggcaaggacggaaagccgacccgcatcggattcaagattctggcggacggaaagaaggtccgcatcgccaagagctcgggagctgagatcgatggctgaggccgcttacacgccgcgcctgcgcgcggaatacgatgcgaatatccgcaccgctctgaccgagaagttcggttatgagaacgtcatgcaggttccgcgtctggacaaggtcgtcctgaacatgggcgttggcgattccgtcaacgaccgcaagaaggccgagaccgccgcagccgaattgacccagatcgccggccagaaggcgatcgtgacctattcgcgtatcgcgatcgcgaccttcaagctccgtgagaaccagccgatcggctgcaaggtcacgctgcgcaaggctcgcatgtacgagttcatcgatcgcctggtgaacgtcgcgctgccgcgcgttcgcgacttccgcggcctgaacccgaagagcttcgacgggcgcggcaactactcgctcggcatcaaggagcacatcattttccccgagatcgacttcgacaaggtcacggaagcccgtggtatggacatcaccgtctgcaccacggccaagaccgacgaagaggcgagggccttgttgaccgctttcaatttcccgttccggcagtgagacgctgatttaaagcctctcaaacgcggatacccaggagccaagcatggcaaagaagagttcagtcgagaagaacaaccggcgcaagcggatggtgaagaacgccgccgccaagcgcgagcggttgaaggcgatcatcgccgacaagacgctgccgatggaggagcggttcgccgcgaccctaaagctggcggaaatgccgcgcaattcgtcggcgacccgcatccgtctgcgctgcgagctgtcggggcgcccgcgctcgaactaccgcaagaacaagctgtcccgtatcgcgctgcgcgaccttggctccaagggcatggtcccgggcctcgtgaagtccagctggtaaggagggtcgtttagatgtctacgcacgatccaatcagcgatctgatcacccgtatccgcaacgcgcagatgcgttcgaagaccaaggtctccacccccggctcgaagatgcgcgagaacgtgctcgaggtcctgaaggccgagggctacatccgcggctacgccacgctcgagcattcctccggccgcagcgagatcgagatcgagttgaagtatttcgacggcgagcccgtcatccgcgagattgagcgtgtttccaagcctgggcgcagagtctacgcctcggtgaagaacctgccgcgggtgaacaacggactcggcatttcggtgttgtcgacaccgaaggggatcatggccgaccacagcgcgcgcgacgcgaatgtgggcggcgaagtcctcttcacggtgttctgagaaggattttcgatccatgtcacgtgttggcaaaaagcctgtggcggtgccgtcgggcgttaccccgaccgtcgacggccagaacgtcaaaatgaaggggccgaagggccagcttcagttcatcgtccacgacgacgtcgaggtgaagctcgagaacggccaggtcaaggtcaagccgcggaccgagaccaaccgcgcgcgggcgctgtacggcaccgctcgcgcccaggtcgcgaatctggtcgaaggcgtcaccaagggcttcgagaagaagctcgagatcaccggcgtcggctaccgcgccgcgatgcagggcaagaacctgcagctcgcgctcggctacagccatgacgtgatctatccaatccccgaggggatcacgatcaccgtgccgaagccgaccgagatcacggtcgccggcagcgacgtccagcgcgtcggccaggtcgccgccgagatacgcgcctaccgtccgccggagccctacaagggcaagggcgtgaagtatgtgggcgaattcatcttccgcaaggaaggcaagaagaagtaacggagccggtcatgtcgaaagccaaggttacgaatgcccggcgcaagcggagtgtgcggctgaagctgcgccgttccgccggcggccgtccgcgcctgtcggtgttccgctcgtcaaagcacatctacgcccaggtcatcgacgacctgaagggcgagacgctggcctctgcctcctcgctcgagaagtcgatgcgcgatggcggcaagaccggcgccgacatcgatgcggcgaaggcggtcggcaagttgctggccgagcgcgccgccgagaagggcgtcaaggaagtcgtgttcgatcgcggcagctatctctatcacgggcgcgtcaaggctctggccgacgcggcgcgtgagagtgggctgagcttctaacggaatttgaggattggggcgtaagcctctgaaggattggaaaaaccatggcagctgaacgcgaacaacgtggtggacgcgatcaacgcggcggcggacgtgaacgcagggagcgcgaggagcgcgacagcgagttcgtcgacaagctcgtccacatcaatcgcgtggccaaggtcgtcaagggcggcaagcgcttcggtttcgcagcgctggtcgtgatcggcgatcagaagggccgcgccggcttcggtcacggcaaggcgcgcgaagtgcccgaggcgatccgcaaggcgaccgagtcggccaagcgtaacctgacgcgcgtgtcgctgcgcgagggccgcacgctccatcacgacatcgccggccgtcacggtgcgggccgtgtctacctgcgtgcagctccggccggtaccggcatcatcgccggtggcccgatgcgtgccgtgttcgagacgctcggcgtccaggacgtggtagcgaagtcaatcggctcgtcgaatccgtacaacatggtgcgcgcgacctttgacgcgctcaagcaccaggattcgccgcgttcggtcgcagcccgccgcaacatcaaggtgtccaccctccagtcgcgtcgtatcggcggcgatgccgaggcggctgccgactaacggaagcttttcggagtaactcccatggccaaggccgcaaagacgatcaagctcgagcagaccggcagcgcgatccgccgccatcactcgcagcgttcgacgctgattgggctcaagctcaacaagatcggccgcaccagcgaactgcctgacaccccggcagtccgcggcatgatcgagaaggttcaccatctcgtccgtatcgtcgacgagaagtaagcaagagcgcaggatcccgaaaaccgggaagcggttttcggtgaagatcgtgcgcaagacacaaggagaagggcgatgaagctcagcgatatcgccgacaacgccggctcgcgcaagaagcgcatgcgcgtcggccgcggcatcggttccggcaagggcaagcagtccggccgcggcggcaagggccagaccgcgcgttcgggcgtgcgcatcaaggggttcgaaggcggccagatgccgatgcatcgccgcctgcccaagcgcggcttcaacaacattttccgcgtcgagttcgccgagatcaatctcgaccggctccaggaagcggtcgatgccaagaagatcgacgccggcagcgtcgtgaacgtcgaggccctggtaaaggggggtgtgctgcgccgcgccaagggcggcctgcggctgctcggccgcggcgagctcaagtccaagctcaacatcgaggtgcacggcgccaccaagacggcgatcgcggcggtcgagaaggccggcggctcggtgaagatcctcgcccccgccaaggaagaaggcgaggcggcgtaacaactgcgtcatcggcccgcggcgcgcgggcctttacgcatgcgggaacgtagacttatcgaaggcgagccttagataatgtccggcgtccgccaaagcatgatacggaaaagtgtgaagcggttttccgggaagatcatgcttaatgcgacaacctaaagcgcgatgacgaggcatcctgatctcatcgcgccttagcagcccggccgcgggcatgacggcgcaacaggcggcgggagaaagtccaagatggtctctgcagcggaacaactggcagccaatctcaatttcggcgcgtttgccaaggccgacgaactgaagaagcgcatctggttcaccctgggtgcgctgctcgtttatcggctcgggacttacatcccgctgccgggcatcgatcccaacatctgggagcaggtgttccgctcgcaggcgggcggcatcctcggcatgttcaacatgttcgccggcggcggcatccaccgcatggcgatcttcgcgctgaacatcatgccgtacatctctgcctcgattatcatccagcttctcaccaccgtctcgccgcagctcgaggccctgaagaaggaaggcgaggccggccgcaagactctgaaccagtacacccgctatctgacggtgatcctggccgcattccagtcctatggtattgctgtgggtctcgagggcgccggcaatgtcgtcagcgagcccggcctgttcttccgcctgtccaccgcgatcacgctgaccggcggcaccatgttcctgatgtggctgggcgagcagatcacctcgcgcggcatcggcaatggcatttcgctgatcattctcgcgggcatcgttgccgagctccccgccgcgctcgccagcatgctcgaactcggccgtcagggtgcgatgtcgaccggcctgatcctggtcgtcatcatcatggcggtcgtcgtgatcgccttcatcgtgttcatggagcgcgcccagcgccgcctcttgatccagtatccgaagaggcagggcggcaacaagatgttcgagggtcagtcctcgcatctgccgctcaagctcaacacctccggcgtgattccgccgatcttcgcatcctcgctgctgctgttgccgaccacggttgcgaacttcaacgcgggcagcgggccggaatggtttcagtggatcaccacgcagctcggccatggccgtccgctgttcctgatcatgtatctggcgctgatcgtgttcttcgcgttcttctacaccgcgatcgtgttcaacccgaccgagaccgcggacaatctgaagaagcacggcggtttcattccgggcattcgccccggcgagcgcaccgccgaatacatcgactacgtgctctcgcgcatcaccgtgctcggcgccatctatctcgcgatcgtctgcttgatccccgagatcctgatctcctacgcctcggtgccgttctatttcggcggcacctcgctgctgatcgtggtcagtgtcaccatggatacggtggcgcaggtccagggctatctgctggcgcatcagtacgagggcctgatccgcaagtcgaagctgcggggccgccgtagatgaacagggagctcgcccgccgaatcgctttgacgatcggcgcgctgcttcttttcaggctcggcacgcagattccgattgccggggtaagcacgtccagcctcttgccgacctcggccctcatcgcccgcctctcgctctttgcactcggccttgttccctatctgaccgctgcgatctttgttcggctgctgtcggtggtgtggcccggcgtgagttcgcttgagcgctccggtgagagcggtcgccgcaagattgcgcgggctacgctcgggctcaccttggttctcgctgcctttcaagcctatggcattgcctcagcgttgacgtccattccgggcctagtcaggagtcccgatggctggttcgtggcggcggcgacggcctcgatggtcggaggcgtcttcgtgctggtgtggttgagcgaacagatcacccgccacggcatcggcaacggcctggctctgatcctgagtgccggctttctcgtctccattccgcaggacgtctcgggcatcgtcggtctcgtgcagagcggggcaatctcgggctatctcgtgctcggccatgccgtgttctggatcgtgaccgtggccgtgatcgtgctattcgaagaggcccggcggaacattcccgtcacatttggcgcgcgcagggtcggtacgcgatacctgcccgcgcgtaatgccgtgctgcctatcaagctcaacagcgccgggtttctgattccggttaccgtggcgccgtggatattctttctgccgctcacctttgctggcctggtcctgggcggcgatcacccggcggtcgcggcggtctacggacatcttcaaatggggcagcctgtgcacctcatgctcgtgtcgatcgccgtgttcgttctggccttcgtctacaccgcctacgtcgtggatcccgagtacaccgccaaatgtcttgccgcccgcgatggcgccattcccggtgttgctcgcggcgaggctaccgccgattatctcgatcgcgtcgtgtcattgacgacggtcgtcggagccgtctacctgacggcgttgcaggtgattccggaggtcttcgacctttacgggatcggactgccttatagtatggtcatcaatggcggtgcggtgctggttgtggtttgcaccgctcttgatatcaaagcacaggtgcgcgacgtatcgctcaccaatccggggggcgtacgccgatgagaattatacttctgggaccgccggggtcgggcaaggggactcaggctcagcttctggtgcagcgctatggcatcgttcagctctcgaccggcgagatgctgcgtgccgctgttgctgctggaacgccggtcggactgaaggccaaggagatcatggccagcggcggcctagtgccggacgatgtcgtcgtgggaatcatctccgaccggatcgaccagccggacgccaagaagggtttcatcctcgatggcttcccgcgcaccgtgccgcaggccgaggcgctggacgagttgctcaagcgcaagcatctcaagctcgacgccgtgatcgagctccgcgtcaacgagagcgcgctcttgaaccgcgtcgagacccgggtagcccagatgcgcgaacggggggaggaggtccgtgtcgacgataccccggaggtcctgaccaagcggctggccagctaccgcagccagacggaaccgctgattcactactattccgagcgtcgaaagctttccaccatcgacggcatgatggccatcgacgaggtcacccaggccatccatcgccaactcctggccctcggtgcggttgagcccaagacccgcgcccgaagcgcagcgaaggcggcgcctgccaaaaaggccaagaccaccaagaggacggccaagaaaccgacgaaaaccaccaaaaaaggcgccaaatcggtcaagactggcaagaaggcggccaagagggtcgtgaagggccccaagacggcgaccaggaaaacagccaagaaggcggtcgtgaagaccgccgggaaggccgtcaagaagggagccagaaaggccgcaaaaaaggtcacgaaaaagcgagccaaacgctagcagcggttgacgaaagcccccggaatcccctaataagccccgcatccaagtcggatagtttcagacgatgccgggccccaggaagaccgggggtgggcgtcgtgttcacgtttgtgaacacctgcccgagaacacaagcacttaaagcccggtcctgacgaggatcggcgacaggagagaaggccgtggcccgtattgccggcgtgaacattcccaccaacaagcgcgtgctgatcgcgctccagtacatccatggcatcggtcagaagatcgccggtgagatcctggagaaagtgaagattcccgtggatcgtcgcgtcaatcagctcagcgacgccgaagtgcttcagatccgcgaagtcatcgaccgcgactatctcgtcgagggcgatctgcgtcgtgaggtcggcatcaacatcaagcgtctgatggacctcggttgctatcgcggcctgcgtcatcgtcgcggtctgccggtgcgcggccagcgtacccacaccaatgcgcgtacgcgcaagggcccggccaaggccatcgccggcaagaagaagtaagttttcgaatccaatcgcggcgtgtggcgaagaggggatgacccgttcgccacgcgcttttcgttccacaggtgtagccgctggcattacggcggcgtttgagatcttcaggaaagggactcaatgggcaaggaagccacccgcgttcgtcgtcgtgagcgcaagaacatcgcgtccggcgtcgcgcacgtgaactcgtcgttcaacaacacgaccatcaccatcaccgacgcgcagggcaacacgatcgcctggtcctcggccggcacgatgggcttcaagggctcgcgcaagtcgaccccgtatgccgcgcaggtcgccgccgaggacgtgtcgaagaaagcgcaggagcacgggatgcgcacgctcgaagtcgaggtcgccggtcccggttcaggccgcgaatccgcgctccgcgcgctccaggccgcaggcttcaccgttacttcgatccgcgacgtgaccacgatcccgcacaacggttgccgcccccgcaagcgtcggcgcgtttgataccaggttgcgggcgcatcggcgcccgcaatgagttttgcaataagccgcaggtacggcccgcggcctttctccaacgccagtgtctgcatggcagttcgactggcctgtatgggtgaaacagtgacgatccagaaaaattggcaagaactgattcggccgaacaagctccaggtcacgcctggcagcgacccctcgcgtttcgcgaccatcgtcgccgagccgctcgagcgcggcttcggccaaaccctcggcaatgcgctgcgccgcatcctgctgtcgtccctccagggcgcggcggtgcagtcggtgcatatcgacggcgtgctgcacgagttctcctcgatcgcgggcgtccgtgaggacgtcaccgacatcgtgctcaacatcaaggacatctcgatcaagatgcagggcgaaggccccaagcgcatggtcgtgaagaagcagggtccgggcgtcgtgaccgccggtgacatccagaccgtcggcgacgtggtcgtgctgaaccccgatctgcagatctgcaccctcgacgagggcgccgagatccgcatggagttcacggtctcgaccggcaaaggctacgtgcccgccgagcgcaaccgtcccgaggacgcgccgatcggcctgatcccggttgacagcctgtattcgccggtccgcaaggtctcctacaaggtcgagaacacccgcgagggccagatcctcgactacgacaagctgacaatgaccatcgagaccaacggcgcgatcacgccggatgactccgtggcctacgctgcgcgcatcctgcaggatcagctcaacgtgttcgtcaacttcgaagagccgcgcaaggaagtcgcccaggagatcatccccgatctcgcgttcaacccggccttcctcaagaaggtggacgagctcgagctgtcggtgcgttcggccaactgcctgaagaacgacaacatcgtctacatcggcgacctcgtgcagaagagcgaagcggaaatgctccgcaccccgaacttcggccgcaagtcgctgaacgagatcaaggaagtgctggcccagatgggtctgcacctcggcatggaagtgccgggctggccgccggagaacatcgacgagctcgccaagcgcttcgaggatcactactgagcggatggcgaatagggagtggcgaatggacgattattcgccattcgctactcacaactcgctttcaaagggcgaacgcaggcagcccacctgagcaacatgtccgacgaaccgtcgcggcagttttaacgtaaaggactactcacatgcgtcacggcaaggttcatcggaagctcaaccgcacggccgagcatcggcgcgcgatgttcgccaacatggcggccgcgctgatcaagcacgagcagattgtcaccacgctgccgaaggccaaggagctccgtccgatcgtggagaagctggtcaccctcggcaagaagggcggcctgtccatgcgccgccaggcgatctccgagatgcgcgacaaggatcaggtcaagaagctgttcgacgtgctcgcgccccgctacaaggaccgccagggcggctacacccgcatcatcaaggccggcttccgctacggcgacaacgccgcgatggccgtgatcgagttcgtcgaccgcgacgtcgatgccaagggccaggattccggcccggtgcaggagacggaagccgaggcggcgtaagcccgccggcatttcgatctgacaaggcggcgctctcgcaggcgccgctttttttgtacaggtggatgcgcattcggcgaaccaccttgcgagcaccgcgccactcacgcgtgagtgagcgccgattgcactccatcgaacgcgcccgatatctccgccatcatccatggagacatcgtatgaagatcgacctgtccggcaagaccgctctcgtcaccggctcgaccgccggaatcggcttcgccattgccaagggcctcgccggctcgggcgcgagcatcgtgatcaacggccgtggccaggacaaggtcgatgcggcggtgcgcaagctggaagggacgggtgccaaggcccgcggcatcgccgccgacgtctcgaccgcggcaggctgcaaggcgctcgttagggcagtgcccgagatcgacatcctcatcaacaatgccggcatcttcgagccgaaggacttcttcgatatccccgatgaggattggacgcgcttcttcgaggtcaacgtcatgagcggcgtgcggctgtcgcgcgcgtacatgaagggcatgctcgatcgcaactggggccgcgtcgtcttcatctcctctgagtccgggctcaacattcccgtcgagatgatccactacggcatgaccaagacggcccagctctctgtcgcgcgcggactggcgcagctcacccgcggcaccggcgtcaccgtcaattccgtgctgcctggcccgaccatgtcggagggcgtcgagacgttcgtgaaggatctcgccaggcagaacggccaatcggtcgatgaagccgccgccaatttcgtcaagcagcatcgccctagctcgctgctgcaacgcttcgccagcgtcgaggaaatcgccaacatggtggtctacgtcgcatccaaggaggcgtccgcgaccaacggtgcagcgctgcgcgccgagggtggcatcgtcaacacgatcgcctgagacgatgcgcatggcggcccctgtgatatcgaggccggggtgcgcgacagagctacgatggggcctaccgcacgctcgcggcgcagaccattgcccaatatggcggccgctatctcgcgcagggcgacgctgccgaggtgggggagggtggtccgccggccaagaccatcatcatcgtcgagtttccctcgatggcccgggcgcgcgaatggtacgcatcggcagaatatgccgatgcactgaagcttcggcagacggcgctcgagcggcaactgctattcgtggaaggtgtagtgccagcttacctgatctgcctactgggtgcttcaatttggcgcccggcaggctagaatgaacttctatgttctggcccctatcgacccgccatagacgtctgttcagcctgacatccgcgcggtggcggcggcaggcgatctttctgctcggtgggatcggagtcggcgccattgcggtggcgctagcgcaagttgccgacctcgcccagcacgcctttgcgttgctgctcgcgaaatcgcgctatgccgtgctggcggtgacgccgctcggcttcatgctgtcggcctatctgaccatccgtctattcccgaacgcgcagggcagcggaattccgcaggcaattgcggcgcggcacctgaccgatcagggcgcgcgagagagcctggtctcgatccgggttgcgatcggaaaggtgatcctcactctgttcggtctgttgtgtggcggctccgttgggcgggaggggccgacggtgcaggtcggtgcttccatcatgttcgcgctcggccgcgtctcgccgcgccgccagcccggattgatcctggctggtgccgcggccggcttggccgcggcgttcaacacgccgctggctggcatcgtcttcggcatcgaggagatgagccgcgcttttgaaacccgcacgtccagcctcatcattgcggccgtcatcgcggccggcctcacctcgctcgcgctcgccggcaattacgcctattttggcagcagcgcgacgacgctggcgcgtggagcggactggctcgccgttccactttgcggggtggccggcggcctcgcgggcggcctgttcagccgcatcgtcatcgcgatggcgcgcggcttcaataatccgctcggacgcgcgatcaagagccatccgctgtggtttgcattcgcctgcggtctcgtcgtcgcgatctgcggcctggtatccggcgataccatctatggcaccggttacgagcaggtgaaggcggcgctggagcacagctcgccgctgccgcaggatttctgcgccctcaagtttcttgccaccacctttgctgcgatcagcggcataccgggcggcattttctcgccgtcgctcgccgtcggtgccggcattggcagcaacatcgcctcgttcttccacgatgcgccgctcggcgcgatcatgctgctcggcatggtctcgtatttcgcgggcgtggtgcaggcgccgattaccgccttcgtgattgtgacggagatgaccgacaatcacggcatggtcgtgccgttgatggcggcggcgctgatcgcgcacgcgacttcgcggatgatctgcgaggagggcatctatcacgcgctcgccaagggattcatcgaacgggcgacgcgtccgcaggaaaagatgcagtagggtgggcagagcgaagcttgcccaccactgacttgtttgccctacgaagttcgcctaccacccctccagcacgatcttgccgcgcgacttgccactctccagcagcgcatgcgcgcgcttgaggttggcggcgttgatcgtgccaaaggtctggtcgagcgtggtgcgcagcacgcccttgtcgatgaggtcggagacgtcattgagcagatgatgctgggcgatcatgtccggcgtctggaacgatgaacgcgtgaacattgattcccagtgcaccgagatcgccttgcccttgaaagtgctcatggtgaactccgggggatcgtcaatgaggccgaacttgccctgcggcgccatgaactccgcgatcgccttgtagtgctggtcggtgaaggtgaggcttgccaccagcgcgaccggcggcagcttcaaggcctcgatctgctccttcatcggcttgccgtggtcgaccactgcatgtgcaccaagatcgagacaccacttttgcgaatccggccgcgtcgccgtggcaagcaccgtcagaccggtgaggcggcgggcgagctggatcaggatcgagccgacgccgccggcgcctcccgtgatcaacagggtgcgcggatcgacgctcttgcccggtaccgcgccgagacggtcgaatagcaattcccaggccgtgatggaggtgaggggaagcgcggcggcctgcgcgaacgacaggctctttggcttgttgccgacgatgcgctcgtcgaccaggtggaattcggcattggtgccctggcgcaggatcgagccggcatagaacacctcgtcgcccggcttgaacagcgtgacgtcaggaccgatagcgtcgaccacgccggcggcgtcatagcccaaaatcttggtctcgccttcggacggggcagcgcgcttgcggaccttgtagtcgaccggattggccgagatcgccttcacggcgacgcggatgtcgcgccccttgggttcgggctttgcggtctcgaaatcgatcagggactctgcttcctcgataggaagcgatttcttgtagccgacggctttcatggcttgtctccatcagatggcgtgttcgcctgccgctctaactgtcgccctggcctccaattggcaagtactgtaaatttggggatatagtccctgtttggatactattgggaaaacacgaatgaaacggcgcgattttgcccgtcgtccgggttgttcggtcgaggcgacgctggaccttatcgacggcaagtggaaaggcgtgatcctctaccacctccagagcggcacgcagcggttcggcgaattgcgccgccggatgcccggcatcacccagcgcatgctcacgaagcagctgcgcgcgctggaggaggacaagctcgtcatccgcaaagtctatgccgaggtgccgccgcgcgtggagtattgcctctccgaactcggcgagagcctcaagccggtcatcgacatcctgaaggcctggggcgagagccaccaggagcggctgtcctgcgcgtcgccgccggtggtcgtgaagaagccgcggcgcgcggcgtagagcttccgggagcggatcgcaccgctcccggaaaagccggctgtgtcagaacgcgaactgggtgcgcatcgcgaccgcgtcgaacttcgagccgacatcggcggtcgatacgggcgaagcctgtcgcgataccgtgccgtgcagatagtccagcatgaagcggacgttgccgttgacgtaccagttgagcgccagcgtgtagacggtctgacgtccgccggcaacgccggtagccgttgcaagctgatcgttgaggtcgatcgtcgagaagcgtcctgcgatctcccacgcaccccagccgccgccatcgagcgagaacggatgtgccggtttgacaccgtgataggcggcgttcgccgcattgtaggtccggccttcgcccgtcagcacgtagccagcctgcgcatagccgccctggaatttcaggcttggtgcgccggccagcggcacgctggtgttggccgtgcgatcgacgttgtaccagaagtactcgccctggacgatgaacggaccgtaggtcgccgcggcttcgacgctgtagacctgcgcacccgagacgttggcgatggcgccggtggagatcagcggtgtcgggtcgaggcgcaattccggacgatcgctcagcgtgacagtctgcgtgttggcgatcagattgcgcggcggctggatcagccattgcgcattggcgccgatatgcaccgagtagtccttggcgctgatgggattgccagcgactcgtgccacggcgccatattgctcgctcgtgcccggcggcgagacgctcgaagcggaatggatcgcgcccgtcgtggggcccgtgacatagccgccgatccagagctggtcgttgaaccagcgcgcaccggctgcggagcggaagtcgccggcgccgatgttggtcgcgatcacgcctggcgaggcgcgctccatgaacatgatgtcgttcgagctcgtggcctcgtcgagagtgtatggcagatccatgatgccggcctcgatcgccatcttgccgccgaacggcttcaggccggtatagctgagataggcgttctctacgccggagaggccaccgcccggaagcgatcccggtgcggcgccgccaaatccgtccgacgagccgccgaaatcgtagatcagcgcgaagttccagtcgtggaagaacttgccggtgacaccgatgcgtgcgcggcggacgttttggccgctatcgagcttctgcggcacagtcgccgccgtattggggcgatagtcgtagccgccgacatcccagtgcaggcggctggtgatgccgacgcagtttgctccatcggcggtgcagatggtcggccggttgttcggcatcgtcacgacgacaccggatgcaggtgccggccctttgaccgggatcgccgcgttcgcgttggccacggccgccttcgcctccgaccgcgcctcggctttcgcctcggccttggcttcggctttggctcttgccgtggccgccgtattcgccgcggtttggctctgaagcctgtcgagcttctgctcgagcaacttcaactgctgcttcaggagcgcgatctcctgctcgctgctgcttgccgattgggcctgggcctgcgaggccgccagcgcgccggcgagaccaattgccgtggccgcaattcttgttctgctcacgtacgcctcccatcgtttgacgaactttccaagtcgcgaacggagagcctaggtgggatcgatgactgccccgcgacgctgcgtccggttgtgcggttcccactgatgccaattcgccgcaaccgaatcctgcgtcactccacaatgctggatgacacgcatcatgccaatcgatcgctcaggcaaattgccgaatcgcacgctgcgcttgcatgccgggtacagcgggcacgggccgaatattgccctccggcgcccttctattgcgggacgaacgcgcctatattccggcgtcttttccaagaggtaggaatgtttcgatcgacctggagcgccgtcgttacggcatcgtgcatagtcttttcggcccatttcaatccggctgccgcgcaggaccgtcgggtcccggcgtcgccggtcgagctgcggctgtcctatgcgccgatcgtgcagcgggtgcagccggcggtcgtcaacgtctacgccgccaaggtggtgcagaaccgcaatccgctgctcgacgatccgatctttcgccgcttcttcggcgtgccgggccagcagcccgagcagatgcaacgctcgctcggctccggcgtcatcgtcgatgcctccggcctcgttgtcaccaacgtgcacgtcattgagggcgcggatcaggtgaaggtgtcgctgtcggacaggcgcgagttcgaggccgagatcctgctgaaggattcccgaaccgatcttgccgtgctccgcctgaaggacaccaaggagaaattcccgaccctcgatttcaccaattccgacgaactcttggtcggcgacgtcgtgctcgcgatcggcaatcccttcggcgtcggccagaccgtgacccacggcatcatctcggcgctcgcacgcacgcaggtcggcatcaccgactaccaattcttcatccagaccgatgcgccgatcaatcccggcaattccggcggcgcgctggtcgacatgagcggcaggctcgcgggcatcaacaccgcgatctattcgcgctccggcggctcgcaagggatcggctttgcgattcccgccaacatggtgcgcgtcgtcgtcgcctccgccaagagcggcggcaaggcggtgaagcggccgtggcttggggcaaaattgcaggcggtgacgcccgagattgcggaaagcctcggcctgcgctcgccgaccggtgcgctggtcgcaagcgtggtaccgactgggcccgcagcgagggccggtctgaaatcctccgacctcatcatcgggatcgatggccagaccgtggatgatcccaacgctttcgactaccgcttcgcaacccgtccgctcggcggcaccgcgcagatcgacgtgcagcgcggcagcaagccggtcaggctcacggtggcgttggagaccgcacccgatacggggcgcaacgaactcgtcatcaccgcgcgttcgccattccagggcgcgaaggtctcgaccatcacgcccgcggtggccgacgaactgcgtcttgacgccgataccgagggcgtcgtgatcaccgatatcggtggcgatactgcggccgcgagcgtcggcttccagaagggcgacgtcatccttgcagtcaacaatcagaagatcagcaagaccgcggacctcgaaaaggcggcaggcgagcgaccgcgcatctggcgtatcacgcttgtgcgcggcggccagcagatcaacgtcacgctgggcggatgagtccgaggcgaccacaggacgcgcccaccctgttcggtgctggggggctcgaccgcgacgctccgcatccgctgccggatcggttgcgtccacgcgtgttgtcggaggtcgtcggtcaggatcatatcctcgggcccgatggtgccctgacgcgcatgctggagacgcgctcgctcggttcgctgatcttctggggccccccgggcaccggcaagaccacggtggcgcggctgctggcggacgcgacggatctgcatttcgagcagatttcggccgtgttctccggcgtcgccgatttgaagaaggccttcgatgctgcgcgcgcccgccgcgagatgggcaagggcacgctgctcttcgtcgacgaggtgcatcgtttcaatcgcgcccagcaggattcctttctgcccgtgatggaagatggcaccgtcgtcatggtcggcgccaccaccgagaacccatccttcgagctcaacgcggcgctcctgtcccgcgcccgtgtgctggtgtttcgctctctcgatgccgccgcgatcgaaaagctgttcgcgcatgccgaggctgtggagggcaagaagctgccgctcgaccccgaggcacgcgcggtgctggtgcggatggccgacggtgacgggcgcgcctcgctgacgctcgccgaagaggtctggcggtcggcgcgggcggccgagatcttcaatgccgcgcaactgcaggagatcttgcagcgccgcgcgccgatctacgacaagtcggccgatggccactacaacctgatctccgcgctgcataaatcggtacgcggctcagatcccgatgcggcgctgtattatctcgcgcgcatgttggacgccggcgaggacccgctgttcctggcccgccgcgtcgtgcgcatggcagtcgaggacatcggtctcgccgatccgcaggcgctcgtcgttgcgaacgcggccaaggacgctttcgacttcctcggccatcccgaaggcgaactcgcgatcgcccaggctgtggtctatctcgccaccgctccgaaatcgaacgccgtctacactgccttcggcacggcaatgcaggtcgccaagcaggcgggctcgctcctgccgcccaagcacatcctcaattctccgaccaagctgatgaagtcggaaggctacggcgcagcgtacgaatacgaccacgacacgccggatgccttctccggccaggactacttcccggaatccctgggccgccagaccttctacgacccgcccgaacgcggcttcgagcgggagatccggaagcggctcgattactgggccaagctgcgcaaggagcggggcggcaagtagccgaagaacgcattatgccggcgcgatgagttacactttacgtaatccgtaaatcatgctagggaaccgcatgatcgtcagctaccgtgacaagcgcacggagcgatttgccgctggccagcacgtcaaggacttctcggggtttgccggtcaggcagagccccgcctcgatcgattgggcgcggcaacaagcctagcggacctggcggcattgccgggtaatcgtctggaagcctttaggggcgatcgtgcaggacaattctcgatccggatcaacgatcaatggcggatctgttttagttggccggaagggtcgtctggcccaaccgatgtagagatcgtcggccatcagtgaaggaagcttatgccccgcacgcccatccatcccggcgaacaactcgccgaagagctgcgcgaactcggcatcacggccgcagagctgtcgcgtcagatcgacgtgccggtcaatcgcatcactggcatcatcaacggacagcgcggcatcaccgccgatacggcgctgcggcttggtcactggtttggcaccagcccgcaattctggatgaacctgcaacagcaatatgagctgcggctggcggagaaggaggtgggcgcgcaggttgcgtcgctgccccgccgcgccaatgcgcagtcgacacgaaagcttggaaagaccgcatgagccgccgcatcaagagaatgaatccaaaaccgcgttcgcgtgacgagcgcgacaactcgcgcccgcatcaggcgcatagcgcgaagagggccgggccacgtcctagtggcaagcccggcagcaagccaccgcgctttgcgggtgagcgcgccgagcggcgtgcgcccaaggtggaactggaaaggtccgcgccggcaaagcctgtcgaagcattgctgccgaccaaggtgcagaccgtcaccgtgacgtccgacgagaacaacatgcgcgtcgaccgtttcctcgaagcgcgctttcccggcctgtcgttctcccatattcagcgcgtcgttcgcaaaggcgagctgcgcgtggacggcaagcgcgtcgacagcaaggaccggctggaggaggggcagagcgtccgcattccgccgctgaagctcgacgccccgaagggcggcggcgagctctcggaggctgcccagaagacgctcaaggcgctgaaggagatgacgatctgggaggacgacgacgtcctcgtgctgaacaagccggccggccttgccgtacagggtgggtcgggcatgacgcggcacatcgaccagatgcttgaggtgatgcgcgatgccaagggccagaagccgcgcctcgtgcaccgcatcgacagggagacgtcgggttgtctcctgatcgccaagactcgcttcgccgcctcgcacctgaccggcgcattccgctcgcggtcggcgcgcaaagtctattgggctctggtaccgggcctgccgaagcccaagcagggccgcatctcgacgttcctggcgaaggaggagggcgaggacgacaccatcatgcggatcgcccagcatggcgatgagggcgcgagccacgcggtgacctattatgccgtggtcgagaccgctggcaacaagctgacctgggtgtcgctgaagccggtgaccggccgaacccaccagctccgcgcccacatggcccatatcggccatcccatcgtcggcgatcccaagtatttcaacatcgagaactggcagttgccgggcggactgcagaatcggctgcatctcttggcacgccgcatcgtcattccgcatccgcgcggcggcgtcatcgacgccaccgcaccgttgccgccgcacatgcagcagtcgtggaacctgctcgggctggatgcaaccagatttgatcccatcgagaacgcgcctgaggaatagccgggttgaacgggcgcggccggtctacgacatgtccccgatgactcggctctcgatctgttttgtgctgatggcggcgctctgcacggagcaggctgcgcacgcgcaatatgtgtcaccgggcgcctcgcgcctcgctccactatcgccccaaccaccgccgccgccgaagatcgaggcaccgaaggttccgcaattcgacgcgccaccgcgatacaattaccagccgcttccgcgcaattcgttcggcgatcgcttcacaaagtgtctcgacgccgccgcggccgcgggattgggcccggccgatcgcggtacgtatgcacgcagttgcgccaactagcggcgctcatcgtcgtcctggtgaagtctcgacgacgcaggtgatttgactgacgaaggatcgaagaagcagatgcgcgaattgttcgaagaggcagcaggccagcccacgccggatccccgggcatcggcgcgcgcgtccgcgcgtccgccgcagcgcaagcgcttctacaaggaggcgggcgttgctgaggccgagggcggtttcgccgtcacgctcgacggcaaggcgatccgcacgccaagcggccgtcaagtgctgattccggcgcggacgcttgccgatgccgtggccgctgaatgggcggctcagggcgaaagcatcgacccggtgagcatgcccctgacgcgcatcgccaacagcgtcgtggaaggcgtcgtcgaccgcgtcgaactcgtcagcgacgacctcgcgaaatatttcgaatccgaccttctgttctatcgcgctggccatcccgaaaggctggtcgcccgcgaggccgcgcattgggatcccgtgctgttctgggcggcggaggcgctgggcgcacatttcatcctgtccgagggggtcatgcatgtgaagcagccggacgaggcgttgaaggcggcccgtgccgccctgccgcaggatgcctggtcggtcgccgcgctccacatggtgacgaccctgaccggctcggcgctgctggcgctggcgctggctcatgacgtgcgcgatgccgggcaggtctgggatgccgcccatgtcgatgaggactggaacatcgagcaatggggggtggacgaggaagcggccgcgcgccgcgccacgcgcctcagggatttcgaggccgccgtgacggtcttggcggcggcaaaggcgctcgcggccaaaggtccttaacgagaggtttacgacgccggccttagggtgggggcgtgctccctggggccttttgcgatgccgacgccggtcacgtccattcttcccgtcagtgccgccagctccctggctgatgcgacgacgcccgacctcgtgcttcaggcgggcagcgtcgtcaatgccagggtggtcggcgtgatggccgacaatctggtgcggatcgcgatcgccaacctctcgatggacgtcatgtcggaggtcccgctgacgccggggcagaatctccagctcgcggtctcgcagaacaacggcaccattcggctcgcggttctgggtggggcaggcgaagcggctgccgatcagatcacgctgacgccccgcgcggcatcgttgctggaaagcccgccacttgccccgtcggcgggcgcttcgcgcaacacgctgacgccgttggagcatgctgctgttgcggtggcttcggccgatgccgcgaccagacagggcagccaggccaccctgtttgccaatctggcctccgtcgtcaccggcagcgatctgcccgcgggcttgaagcaggcggtgctggacgtgctggcacagcagacgccgctcaacaccgggctcgacggtggcgatatcgaatccgccttccagaagtcagggctgttcctcgaggcctcgcttgccgcgggggcgccgtcctccggcacgatgcccgatttgaaggcggcgctgctggtgctgcgccatgcgctggcgacaatcgggactgcggtaccatcgacgcaagccgaagcgacgactccggcagcagggggagcggcgcaggccgcatcgccgtcgaccgaaaccgcccaacagccgcaagtgccgcgcggcgccaattccgcagctgccctgcccgccgagatcgctggcagcgcttcgcagccggcggcactgcgaaccatgtccgccggccttgcggcgagcttgctgcaagaggtcgcgcaagagctgccgcgtctggccggcaacgtgccggggtccagcaagggcgtgccggatggccgcctcttcgaggccgccacgcagccgacgcccccgccattccgcggagcgctgccggcgccgcagtccatcgccgcgccatcgctcgcgccggacacgccgcttgccgcgaccgtggatcgcctgctcgacgacactgatgctgcgatcgcgcggcagacgctgttgcagattgcttcgctgcccgatcgcagcggtgcgaccgggcaccggatcgatccggccgtgccgcagtggaatttcgagattccgttcgcgaccccgcaaggaactgccatggcgcagttcgagatctcgcgcgatggtggcaatgaggccgccgatcccgtcgcgcaggcttggcgtgcacgcttctcgctgaatgtggagccggcgggccccgtccacgcgctgatcacgctcaacggcgacaagaccttcgtgcggatgtgggccgagcggccggcgacggcgcagcagctccgtgccggcatcggtgagctcagccaggcgctgacgcgcgccgagctcaagccgggcgacatcctggtccgcgacggcacgccgccgcaaccggcgccggcccccgccggacattttctggatcgcgcgacatgagcgattcaaccaagctcgcgatcgcgctgcactacgagaagggcaccaacgccccagtcgtcgtggccaagggcaaaggcacgatcggcgagaagatcgtcgagatcgccagggcgcacgacatcccgatcgaggaaaacgaggtgttggccggcgcgctctccaaggtggagctcggtgaagaaattccgccggacctctacaaggccgtggccgaggtgctggtgttcgtgctgcggctgtcgggccggggaaggcaaggatcaaccgtcatcgtttcaccacgtagcggctgcatggtcgcgccggttctccatgctcacggatatcgcttttgctgacccgtcgttctaccctcggtcttctcgctgcagtctcggccctgccatcgcgtgcgcttgcccatgtcgcgccgccgcgcaatgaaatacgggagggcatcgcaaagcgcttcaccgacctcggcacgtcaggcacctttgtcggctacaaggtcgaggactatctcgttgtcgcaagtgacaaggagcgatcgggtgagggcaagctgccggcctcgaccttcaagattccgaacgcgctgattgcgctcgagaccggcgtggtcactgatcccgacaaggacgtgtttccctgggacggcgtcaagcgtccgatcgaggcctggaacaaggatcacacgctgcgcagtgcgatcgcagtcagcgcggtgccggtctatcaggagattgcgcgccgcatcggccaggaacgcatgcagaaatatgtcgacgagttcgattacggcaatcgcgacatcggcggcggcatcgaccagttctggctcaccggggctttgcgcatcgatccggtcgagcagatcgacttcgtcgacaggctgcgccgccgcgcactgccggtgagcaagcgcagccaggatctcgtctgcgatatcctgccggtgaccaaggtcggcgacagcgtcattcgcgccaagtccggtttgctgggcgccgagcgcggcgagccgtcgctcggctggatggtcggctggaccgagaagggcgagtcgcacacggttttcgcgctcaacatggattgcaaggagccgcgtctcgtcggtgagcgcatgccactgacacaggcctgccttgccgatatcggcgcgatctagctccatccgcagccgcgtctgcgaacgcaggccgagcagttctcttgcagccattccgcctcgccgtgaaatcctggctcccaggcaggcaagcccggccatggcgatcttgggtgcatgttcattgagcccgtggcaccggtcgcgggcgggaagccgatctggtgtcctgttgccgccgagcgcgcgagcggggtgaccccggccgatccatgctccattccgcctcccaggcaaaactttgtatttccttgcgcttttacgctgctcaaggcagccctgcaggcccgaaagccgcttcccggcccgcaaaatgccgtgttagaaccccggcatcgcgtaagacttaagaactggcgggagcaaatgaagcacatcctggacgcccttgaacatcgtcgtgccggcgcgaagctcggcggcggggagaagcgcatcgaggcgcagcacgcccgcggcaagctgaccgcgcgcgagcgcatcgagctcctgctcgacaagggatcgttcgaggagttcgacatgttcgtcgagcaccgctccaccgagttcggcatggagaagaacaagatccccggcgacggcgtcgtcacgggctggggcaccgtcaacggccgcaagacgttcgtgttcgccaaggatttcacggtgttcggcggctcgctgtcggaaacgcacgcgctgaagatcaccaagctccaggacatggcgatgaaggcgagggcgcccatcatcggcctttatgacgccggcggcgcccgcatccaggagggcgtcgccgcgctcgccggctattcctacgtgttccgccgcaacgtgctggcctcgggcgtgatcccgcagatctccgtcatcatgggcccctgcgccggcggcgacgtctattcgccggccatgaccgacttcatcttcatggtgaagaacaccagcnnnnnnnnnngacatcgagcgcgtcgacatgtcgctcgacacgctgatccccgataatccgaacaagccctatgacatgaaggagctgatcctgaaggtcgtggacgagggcgacttcttcgagatcgcggagagctttgccaagaacatcgtcaccggcttcggccgcatcgcggggcgcaccgtcggcttcgtcgccaaccagccgatggtgctcgccggcgtgctcgactccgacgcttcccgcaaggcggcgcgcttcgtgcgcttctgcgacgccttcaacatccctatcgtcaccttcgtcgacgtgccgggcttcctgccgggcaccgcgcaggaatatggcggcctgatcaagcacggcgcgaaactgctgtttgcctattcgcagtgcaccgtgccgctcgtcaccatcatcacccgcaaggcctatggcggcgccttcgacgtcatggcgtcgaaggaaatcggcgccgacatgaactacgcctggccgaccgcccagatcgcggtgatgggcgccaagggcgcggtcgagatcatcttccgctcagacatcggcgaccccgacaagatcgccgcgcgaacgaaggaatatgaagaccgcttcctgtcgcccttcatcgccgccgagcgcggctatatcgacgacgtcatcatgccgcactcgacccgcaaacggatcgcaagggcgctggcgatgctgaaggacaagaagacggaaatgccggcgaagaagcacgacaatctgcctttgtgagatggaagtggcccggataagcgcagcgacatccgggcccttactcaggtcccatgttgctttgctcatgcgggctacaggtccctctgatttggcatcctggatgcaatgaccgaagacgatccggctgacgagatttccgatatcgaagcgcggatcgaggcgctcgccgaaatcgccgagcgctgccggaagtacattctcgcgtccaagatcgcgatcggcggcggggcgacgctgttgttggtgacgatcctcggcctttttggcttcggtcagaccgccgccttggcatcgatcgcgctggtgctgggcgggatcgtctcgctcggttcgaacgtcagcacgctgcggcagacggacgaggccatcagtgaggcggaggcgcggcgttcggcgttgattggcagcattgatctccgcgtcgttgccgatgcgccgctgaagctggtgtgaggcgcaccagcacgcttcacgcggcccgcttgaacgtcagctccgacaattcggtgcggcactcggctgcgaaggcttgaagccgctcggcggcctgccggtcgaggatggccttggccagccgctcggcgcgcgcaatctgttgcttgagatattcgatgcggggcatgtggcacctttcagaggagttctgcgacgaatggcttcgttccagctggggcgactctagtccgagtgcctgatttattgtgtgaggcagatcacgccccgcgcctggcatccgccatagcaaaatgtgccatctgatcggcatgagccttggcgaaggcgggacgggcggtggcgcgcgcgaggtaggcgcggcaggccggatggtccatcagcccgtcgaagccgtcggcagggcgcagcacgtccgccatcaggatgtcagcgacggagaaggagcccgccagccattcgcggctgccgagcaccggctcgaggtgcttcagccgaagcttgaggaagtcgtcgacgaatttccacgccggcgtatcggtcggatggcccatgaactgcgacattgcccagggcaggctcgccatctccaccgaattgagcgcagcgaacacccatttcatcgcttcagtgcggccgcgcggatccgtcggcatcagcttctcgctcagtccgccgagatgcagcaggatcgcgccggtctcgaagatcgaaatgtctccgtcggtcagccacggcacctggccgaacggctggtgcgcgaggtgggcaggcccgcgatcctcgaaaggcacgctcgcaacgcgatagggcaggccggcttcctccagtgcccagcgcacgcggaggtcgcgcacgaagcctcgcggcgcgtcgggaacccaattgaaggtggtcagggtgaggtcggccattgctgtctccgtgtgtttcgggatcgaagcgaaggacgatcgaaggcggcccgttccgacaccggcacgaactcttttgtcgccgctcgccgaagcggctatcctggctcaaacaatcaggaggaaatccgatgcccgctgccttcttcgtcgttcgcgccatcgtcaccgatcccgccaagcgcgccgccttcgaccggtggtacgagagggaacacctgcccgacgcggtgaaggcgttcggtgtggccaaggcttggcgattctggagtctggatgacccgtcgattcaccaggccatgtatgaattcgaggacgaggcgaagcttacggctatgctcgagggcgatgtcttgaagcagctcgtcgccgacttcaatcgcgactggcccgacgtcaagcgcacgcgagaaatgctggtgctggcgcaggcgtttgcgaggtaagccgaagacatcttctgggcgcgataaatctgaatgcacgattcagcctcggttcatgccgtcacggcgacactccttctgcatcacaggcacgatgatccaagaaggaagaagccatggagcgccggagttttttgaaacttgcattgggattgacggcgggcgccgccgccttcgccgcatccgcggcgcaggccgcgccgctgtcaccgcatccgctcgctgatcccgcccgcatgccgcaaggcaatcccgacgctcaccccgcagtcaccacgggggaggaagccgccgagctgacgcccgagcaggtccactggcacgggcatcgccgccacgcgcatggccatcaccgccactggggctggcaccgccgtcattggcgccggcatcgccgacgctggcaccgccgccatcattggtaaggaatccaagtcgaggactggatggggatcgccactggcggtcctctttcgattccgacgcgcgtcagttcaacggcggatgggccgtgggccgcacccacaaaaaaggccgcgcaggctcccgccgcgcggccattctgcaacgaaaatggagggatatcagaacgggcggcagcgaccggcgtaccagcggaagccgtaggggcacacgcgggcgcgcggcaccacgacgaccggtgccggggcgatcaccacgggtgccgggcgcacgaccacagcgccacgcatcgggcggcaattaccgtaaggaccgcgatagaaccctcggccgcagccttcagctgcgctggcagcttcgctgaaaccgaccacggccgcgcttgcgagcatgacggcggcaaacaggtatttcattgaattcttccttcttgtcctttgaggcaggcacaggggcatggcgcttctggcgcacaatgaatcaagcgacacgattcgacacgttaaaatcctgcaacatgccgacacgtagcgatccaaacctgccaatcatgacctgaatgcggcatgaacgttctccgcatgcggcttcaggcgacgtcggcggcgctagcggccgagaaagcccagcaccagctccctatacctctccggcgcctcaaggaagacgagatggccggtgtccgggattacctccgcccgcgcattccgcatcgtcgcggccagcatcttcgccagttcagcgttctgccccatcttggcccgcagcgcctccggcgcgagcggccggccgggagcattgtgatcgtcggcgcccatgatgaacagggtcggcagcgcgatgagcgggatctcgtgcgcgaccggctcgcggtagatcatctggccggagctgacgaaggcgcgcagccagcgcggataatccgggctgcccttgatgttgaagcgggcatcgatgaacggcgtgattgcgtccgccggcagcttgatcgcgtagttggtctggagttgcttccggtagccctccgccgtgagcttgtcctcggtctccatcatcttctctgtcggcgtcggcggcacgtagaggcggtagtcctcgagtccgatcggcgcggtcagcaccagatgggcaacgcggttcgggtaggcccgcgcgatgcgcacgcccagcatgccgccaagcgaatgggcgacgatctcggctttgtcgatcttgagatgatcgagcagtgccatggtgttgcgcgccagattgtcgaagtgcagctcgcccgccggcttggaggatttgccgaagccgatctggtccggaaccacgacgcgataacccgcctcgctcagcatctcgatcacaggcgcccagtagctcgatgggaaattgcgcccatgcagcagcaccacggtgcggccgttcggctgagccgcggcgacatccatataggccatgctgagaggctcgccgtcgttgacgaccgggatgaaatgcacggggtagggataggcgaagccttcgagcgcgatgccatagggctcgcgaggcttcgtatcggcggcgtgggatgcaagcgggatgctgaagaggacggcagcaagtgcagtcgagaagatgcggttcatcaaaatctccgtcatgcccgggctcgtcccaggcatccacgtgccagccgcaataaagacgtggatggccgggtcaagcccggccatgacgagaggaggagttcacacgggattgtgtgccgtcgcgagggctcgcgtgatcagtcccgcccattcccgaacagcgcggcgaattgcttctcgccgatacgggtgaaattcaccacgcggctgcccggcgtggcatcgcgcgtggcccatttcagctcggcaaagcgttgcatcagggtcgcgcccagcatgccggcgagatggtgacgccgctcgctccagtccaggcaggccttgcaaaccgggcggcgcgggtggctgagcatgtcgggggagatctgcagatgtttggcaaggaaacgcgccccctcggtggtgagctcgatgtccagtttcttctgcctgaccagctgccgctgtcgcagcgagtccagcatctgcacgccgagatcgccggcgaggtgatcgtagcaaatccgcgcgcgccgcagcgccgggtccttcggtccggtacgcacccgcatgtggccggtgcgcgcggcaagtcccgcaagcccctcgagcacgccggcgacgtcgtcgtcggtgaggcggtagtagcgatgccggccctgcttctccggcgcgacgaggccgcctgcctccagcttcgaaagatgcgagctcgcggtctgcggtgtgatgccggcctcctgcgccaactcgctcgcagtgagcgcgcggccgttcatcagcgcggtcagcatattggcgcgggcggggtcgccgaccaacgaggcgaccatggcgatgtctgggcctgctttcatagttcgatgataggcgaagcattgtagcgaggcaagcgcgtagtcctcactcaagtcgtcattgcgagcaacccgtgacagaattgccaagcaattttgcactggcgacgaagcaatccagactgtcccagcggagggattcctggattgcttcgcgaagcctgtcatcgggccgcgcttcgcgcggacccgttggctcgcaatgacggagcaacgaggagaaccccatgtccgttaccgtgttcatccgttaccagctagatcccttcaagcgggcgcaattcgaggaatattcgaagcgctggcttaccatcatcccgcgatgcggcggcgacttgatcggctatttcatgccgcatgagggcaccaacaacatcgcgtccgccctgatctcgttcgaaagcctggcggcctacgaggcctatcgcaaacggctgcgggttgatctcgacggcatggcaaacttcaattttgccgagtctgagaaattcatcctcgccgaagagcgcacattcctgcgcaaggtggtattgtaggccaaccaacagcaggagacgcctatgatcgccgtgatcttcgaggtctggcccaagccggaacatcgccaggactatttcgaccttgcggcggatctgaagcccctgctgcaaaccatcgacggctttatctcggtcgaacgcttcgagagcctgagcgagaagggcaagattctatcggtgtcgttctggcgggatgaggcagcggtcgaggcttggcgcaacacgatggagcatcgccgcacgcaggcgaaaggccgtgccaagatcttctcggactatcatctgcgcattgcgagcgtcgttcgtgactacagcatgaccgatcgtgagcaggcgccgaaggacagccgcgcggtgcacgatgcgcactagcgcacttgaaaacgcgcgcctatgtctgcgcggccaacgagggagagattcatgcatgtgacaactgctgacaagcgcgcggcgttcaggaagatgcacgagagcggctgcttcatcctgcccaatccggtcgatgtcggcagcgccaaagcgctgcagcatctcggcttcaaggcgatcgcgtcatcgagcgcgggctttgcctggaccatcggcaaggccgacaatcacgtcaccgtcgaggacgtctgtcagcatctggcagcattgagttcggcggtcgacattcccgtgaatgcggatttcgagggcggctttgcggttgagccggacagggtcgccgacaatgtcgagcgctgcgtgcgcaccggtgtcgcgggcctgtctatcgaagattcaaccggagacaagaacaatccgctctatgaccacagtctcgcaaccgaacgcatcaaggcctcgcgcaaggcgatcggcgacagtggcacgctgttggtcggccgatgcgaggcttatctctggggtgtcaccgaccttacgctcgtcatcgatcggctggccgcatacgccgatgccggcgccgactgtctctacgcgccgggtctgaagagccgcgaagacatcgctgcggtggtgaaggcggtacatcccaagccgttcaatctcctgatcggcgcgtccgggctctccctgcaggaagcccaggatctcggcgtgcgccgcatcagtgtaggaggctcgctcgcccgcgtcgcctggggcggcttcatgcgcgccgcaaaggagatggccgagaagggaacgttcaccgagcttggcagcggctatcctggcggcgaactcaacaagatgttcagctaggcaaacgaaaagcggcgggaccttgcatcccgccgctcacccatctcactgaaactgtcacttcgcgccgtcaggcggcgtctgcgactccggcgccggggcagccggcctgctcggtgcagcacccgtcgttacgcccggctcggtgttgttccgcggcgtcacgtctcgcatgccgggaggtgcagccggattggaaggcgcctgttgagcggtttgcgaggccggcgtgttgctggcctgattggtcgtgctggtattgttcaggccgtagaacacggcgcccagcaccagggcgatcgccactgcaaacaccgcgatcttgccgctggaagcagggccttcgccaagttggggatcggcctgaaggtcggtatcccggcgcgccgtgcgagaatactcatcatcggcgaggttcgggcggtacggatcgttgggaaaacggtcgtcagccatcgattggatctcctcgggttatgacggcaagacaacccttagctgcgacattccgttccgcgccaccttatgctttcgtcgcatgttgctgatctgtggggaatcgggaacccgttcggcaggaactgcgcccaagttccatgtccggagaaggggaacaaccgatgtggagcttgccgccgaccgacagcgtgctgcatgttctggcactcgtcgccatcactgcggaggggatgacggcggcgctcgccgcgggccggcgcagcatggactatgtcggcgtttctcggtcactatccgctggtctgggtggccaatccaatctacctcgcactgccgggtggagcggcgctgctgaccatcctgatcgcgcggctggtgcatcggctgcacctcgccttcatcgtgctcgatgccatcgggctcgtcgtgttcaccatgatcggctgcaacgtcggctggtagatggatgcctcgctgccgatcgtgatcgtctcgggcatggtgaccggctgcgccggtggcgtgttgcgcgacgtgctctgcaacgatgtgccgctgctgtttcggtccgagctctatgcaagcgtctcggtcgtgacagggttgttctatgcgacggcgttcggcctcaatctcaacgccgaactctggacgattttgaccttcgtcctcggcctcagcttccgcctgctcgcggtgcgctacaaatgggaaatgccgaaattcgtctttacgggagacgagcgttagcgcttcgctcacttggaatgtcggagccatgccatctacagcgtcatggcggtttcctcctgccatccgcgacctctgcaaccgcactgcacaacgtcgggcccgcaagcgccaagctagtcagaatcgtccggtcgagggaccttccctgcgaccaatcgccgtcacccgcacgatggggatgtccgttcatttcgcggcggcgggggtattgtgacacaaactgaaaacgcccggcgtgtttcgggccacgaagttgcgatttttgcccggcgcgtccttcggtccagatttgtggtgcggatcatgaaatatccgacatagagtggcggcggtggtcggcgcgccctagctaaaaacaacgggaaggcaacggcttaagtcggcaagacttgaacagggcggtagcgaggacagcatgggcataaaccagggtccgatcagtctcgatcaaaaatacacccagcagacgggacacgtcttcaccaccggcatccaggccctggtgcgcttaccgatggcgcagatccggcgcgaccgcgccaatggcctcaataccgccggcttcatctccggctatcgcggctcgccgctcggaggctatgaccaacagctcttcgccgcgcgcaagcacctcgaacagtacaacatcaagttccagcccggcgtgaacgaggatctggcggccaccgccgtctggggatcgcagcagctcaacctctcgcccggcgccaagtacgacggcgtcgtcggcatctggtacggcaagggccccggcgtcgaccgctgcggcgacgtgttccgccacggcaatgccgccggctcggccaggaacggaggcgtactgtgcctcgccggtgacgaccacggcgcaaagtcctcgactgtcccgcatcagtccgaccacgccttcatgtctgcactgatgccgtatctctatccctcgagcatccacgagatgatcgagatgggtctgctcggcatcgcgatgtcgcgctattccggctgctgggtcggcatgaaggtgatcacggagacggtggagaccaccgccgagatcgatctcagcgacgagatgaagcccttcatcatcccgaccgacttcgagctgccgcccggcggcctcaacctgcgctggcccgacgaccgtttcgagcaggaccgccgcctgcaggactacaagggctttgccgccatcgccttcgcgcgcgccaacaaggtcaaccggatcaccatggattcgccgaacgcacgcttcggcatcatggcgtcgggcaagagctacgaagacgtccgccaggcgttgcgcgagctcgggattaccgaggaggtcgccgccaagatcggactgcgcctctacaagatcgggatgccctggccgctggagccggaaggcgtgcatcaattcgccgtcggtctcgaggagattctcatcatcgaggagcgccgcgagatcgtcgagaaccaggtcaagcaggtgctgttcaactggcgcgacgacgtccgcccgcgcatcgtcggcaagatggacgagcacgacaagcgcttcctcaccttcgccgcggagctcagcgtcgcttcacttgcgacctcgctcaccgagcgtctgctccggcttgatctcaaccccgagattgcggagatgcttcgcgccaaggccgattggttcaacggccgtcaggcgtcgcagatgatcccgactgcgcccgtctcccgcacgccgtatttttgctccggctgtccccacaacacgtcgaccaaggtccccgaaggaagccgcgcgcttgccggcatcggctgtcacttcatggcgctgtggatggaccgctcgacggagaccttcacccatatgggcggcgagggcgtgccgtgggtcggcatcgcgcccttcaccaacgaaaaccacatcttcgccaatctcggcgacggcacctatttccactcgggaattctggcgatccgtcaggcggtcgcctccaaggccaatatcacctacaagatcctctacaatgacgccgtcgccatgaccggtggccagcgccatgacggcgatctctcgccgcaacagatcacccatcagctccacgccgaaggcatccgcgagatctatctggtctccgaggcgcccgatgcctatccggccgataccattgcgcccggcgtgaagaaatatcatcgcgacgagctccagaacgtcatgaagatgtgccgcgagttcaaggggacctcggcgatattgttcgtgcaaacctgcgcggccgagaagcgccgccgccgcaagcgcggcctgatggaggatccggcgcgccgcgtcatgatcaatcccgcggtctgcgaaggctgcggcgattgctcggtgcagtcgaactgcatttcggtcgagccgctggaaaccgagtttggccgcaagcgtgccatcaaccaatcgtcctgcaacaaggattattcgtgcctgaagggcttctgcccgtctttcgtcaccgtggacggaggcaagccgcgccaccgcgcacccgcggaactcgccgacatcggtgagctgccggagccggcctcgcggcccacactggacaagccctacaatatcgcagtcggcggtgtcggcggcaccggagttctcaccatcggcgcgctgctcggcatggccgcgcatatcgagggcaaggcttcgatgatcctcgacatgtcgggcctggcgcagaagggcggcgccgtgctcagccatgttcgcctgtcggatcatcccgcggaggtaacctgctcgcgcatcgtcaccggtacggcggacctcgtgcttgccgcggacgaggtggtcgcggtcgccaaggacacgatctcgctctgcgacaccagccgcacccgcggcatcatcaacagccatgtcattccgaccgccgacttcgtcctcaaccgcgatttcaacttccagactcggaagctgcacgcgctgctggagaccgcgctccacaaggactccgtcttcttcgacttcaccaagccggccgagcagctcctcggcgatgccatcgccaccaacatgatgatgatggggtacgcctatcagaagggtctcttcccgctctcggcggagtccatcgagcaagcgatcgaggtcaacggtgtctcgatcaagatgaacaaggaagctttccgcctcggccgcctcgcggtcgccgatccgaagcgactttccgacatgctcaaggggacggacgaggtggtcgcgcccaagaccctggacgcgatgacgctggatgaggtcatcgagcatcgcgccaagcatctcacggcatatcagaacagccgtctcgccaggcgctatcgcaagctggtcgaccaagtccgagatgccgcggtgaagggcggctatggcgacgcgctgccgcgcgccgtcgcggtgaactatgccaagctgctcgcctacaaggacgagtacgaagtcgcgcgtctctacaccgacggcgccttcgaacagcagctccgcgagcagttcgagggcgacttcacattcaacttcaacctggcgccgccgatcctggcgcgtggcgtcgatgccctcggccgcccgaagaagcgcaccttcggcccgtggatgctgaacgttttccgcgtgctggcaaagttcaagttcctgcgcggcaccctcttcgacgtcttcggtcgcagcgccgaccgcaagctcgagcgcgacctcatcgccggctacgagaaggatgtcgccaccgtgctcggcctcctatcgccggtgacgatcgacaccgcggtcgaactgctctcgctgcctgatcgcatccgcggctacggcccggtgaaggagaaggcggtggcggatgcaaaggctcgctacgcccagctcgcggcggacttggcaaccccgccgcctgcgcccagacagatcgcggcggagtagggcagtctcgtaggtgggttagctccgtagacagccacttctccgtccacgcggaaagccaagaggtggtcacgccttcagctaacccaccgaagaattcccgtgtgaaatcaaccaccgttctactgtgcatggggttgttttgcagaatggatgatcggcggctccgttcgcaatgacgacgcggaggccggcgagaacctctccacttgcgcccactcgctgccctctcgcggggcggaatatttccacgcttgccaatcagcccaccgcggttcagaaaaaccacgcaacaagaaacgcgagcggagacctgaagtttgaccatcaagggcaaggcctacatcgccgggatctacgaacacccgacccggcatgcgccggacaaatccaccgcccagctccacgccgaggtcgccaagggcgcgatcgaggatgccgggatcagcaaggacgacatcgacggctatttctgcgcgggcgatgcccccggcggcgcctggccgatggtcgattatctcggcctcaacaccaagaagctccgccatgtcgattccaccgagaccggcggctgttcctacatcatccatctcggccatgccgccgaggcgatcgcggcgggcaaatgctcgatcgcgctgatcacgctggccggcaagccgcgcaccggcgcgatgccgccgcgggcgcagggcgccgaagccgatttcgagacctcctacggcgcgaccacccacaatgcctatggcatgtgtgccatgcgccatatgcacgactatggcaccaccagcgagcagctcgcctggatcaaggtcgcggcctcgcatcacgcgcagtacaatccgcatgcgatgctcaaggacgtcgtcaccgttgaggacgtcctgaattcgccgatgatctccgatcccttgcatcgcatggattgctgcgtcgtctccgacggaggcggcgcaatgatcgtgacgacgcccgagatcgccaagagcctgaagaagccgctggtgcggctcatcggtcacggcgaggcgatgaagggcccgcgcggcggcaaggacctcgatcttacatactccgccggcgtctggtccggcccgcgtgcgttcgaggaagccggcatcacgccgaaggacatcaagtacgcctccatctacgacagcttcaccatcacagtcctgatgcagctggaagacctcggcttctgcaagaagggcgagggcggcaagttcgtcgccgacggcaacctcatctcgggcgtcggcaaactgccgttcaacaccgacggcggtggtctttgcagcaaccatcccgtcaaccgcggcggcatgaccaagatcctcgaggccgtgcgccagctgcgcggtgaggcgcatccgaaggtgcaggtcaagaattgcgatctcgccatcgcccacggcactggcgggcttctcggtgtccgccacgccgcgtcgacggccattctggagcgcgtgtgatgagcgaagcaaagaagtatccggccccggtgacgaatccggagaccgcagcgttctgggacgccgccaagcagggcaagttcatgatcaaacgctgcaccgcgtgcggcgaagcccattacttcccgcgttcgatctgtccgttctgctactcggacaagacggtgtgggaggaagcgtcgggcgagggcacgatctacacctacagcctgatgcggaagtcgccgaccggtccttacgcgatcggctacgtcacgctgaaggaggggccgtcggtgcagaccaatttcgtcgactgcgatctcgaaaagctgaagatcgggcagaaggtgaaggtagtgttcaagccgaccgacggcgcgccgctgccgttcttcacgccggcctgacgcgaaaacaaggtgtaaccctctccccttgtgggagagggtggcagccgaaggctgccgggtgaggggtctctctcaacacgagaagtgtcactgcggagccaaccgtcacccgagtgagtttgttgcaagggcggtgcggccctctcccacaaggggagagggcacaatcaacgggcatcgccgcctgcggataagaaactcggagaggaagacaaaacaacatgtccgccagatatgaagaactcaagggcctgaagaacatcggccagaaatatgcctacaccgaccgcgaagtcatgctctacgcctacggcatcgggctcggcgccgatccgatggatgagaaggaactcgccttcgtcaacgagggcgcctacacgccgcgaccgctgaaggtggtgccgacatttgcgtccgtggccgcctggggctcgggtccgggcgagatgaacctcaaccgcgtcatggttgtcgacggcgagcgcgacatcacctttcaccagccgctgccggtggaagcgaatatcaccgccgattcctccgtgctcgaagtctacgacaagggcaaggacaagggcgtcgtcatcgttcaccagaccgtactgaagaacgagaagggcgagaagctggcaacgctggtcgcctcgcgcttcgcgcgcggcgatggtggcttcggcgggccgaacctgacgcagccagatccgcacaagattccctcgcgcagcccagacaagaccatcgatatcacgacgcgccccgatcaggcgctggtctatcgcctttgcggcgaccgcaacccgctgcactcggatcccgagtttgccaagaaagccggcttcccgcgccccatcctgcacggaatgtgcacctacggcattacctgccgcggcgtgctccagacctatgccgactacgatgccagcgctttccgccagcacgtcgcgcggttttcttcccccgtctatcccggcgagaccgtaaccatggacctctggaaagacggcaacgtgatctcgttcgaagccaaggtagagtcgcgcggcgtcacagtgatcaagaacggcaagacggtcctgggttagcgctctccgccattccggggcgcgcgatgcgtgaactatggtgcgcagtgcgcacccgagaatctcgcgctaatagttccggattccgggctcagccctgcgcgatcccccggaatgacaaagaaaacagggagaaaccaccatgggactactcgacggaaaggttgcgctgatcaccggcgcgggtggcgggctcggcgaagcctacgcaaagctgttcgcgcgggaaggggcctccgtcgtcgtcaacgacctcggcgggccccgagacggctccggcgccgacaagtccatggcgcagcaggtcgtggacgcaattacggcggaaggcggcaaggcggtcgccaacggggccgacatctccaccatggagggcggtcagtcggtgttcgacgatgccattaagcacttcggccgcgccgacatcctcgtcaacaacgccggcatcctgcgcgaccagacctttgccaaggcctccgaggccgattgggacaaggtcatcaaggtgcatctgaagggcaccttctgttgcacccttccggtgtttcgctggatgcgggagaacgggggcggcgtcatcgtcaacacctcttcgacctcgggcctgatcggcaatttcggccagaccaattacggcgcggccaagggcgggatctggggcctgtccaacgtgttggcgatcgaaggccggaagtacaacatccggatctggacgctggcgccgggggccctgacccgcatgaccgcagacctgccccgctataaggagaaccccggtgcggcgctggggccggacggcatcgcgccggccgtgctatacatggtcagcgatttgtcgggtgaccagaccggcaaggtgctgggcgtctccgggccgcgcggcgtgcgcgagatgcggatgatggaaatggaaggctggaagccgccgcattcgggctggaaggcccaggacatcgtcgatcacgccaaggagattttcttctccgaggagcagatcaagatgggggcgaggcggttttagctttcccgtcattccgcggcgtgcgaagcacgaacccggagtatcgagattccgggttcggctcttcgagccgcccggaatgacgaacattgagatagggaagacgatgaaactcaccgccgaggccaagggcactttcgcaatcgcgccgacgccgttccacgacgatggccggatcgacgagcgctcgatcgaccgcctgaccgacttctacgaggaagtcggctgcgacggcgtaacggtgctcggcattctcggcgaggcccccaagctcgatgctgccgaggcagagcaggtggcggtgcgcttcgtcaagcgcgccaagaagatgcaggtgatcgtcggcgtctctgcaccgggctttgccaccatgcgctcgctggcgagggcttcaatggatgcgggcgcggcgggcgtcatgatcgcgccgccgccctcgcttcgcaccgacgatcagattgtcggctacttcaagcaggccgcggaggcgatcggccccgacgtgccctgggtgctccaggattatccgctgaccctgtcggtggtgttcacgcctgccgtgatccgcaagatcgtcatggacaacccgaactgcgtgatgctcaagcacgaggactggccagggcttgagaagatctcggcgcttcgcaacttccagaaggacggatcgttgcggccgctctcgatcctctgcggcaacggcgggctgttcctggatttcgagatggagcggggcgccgacggcgccatgaccggttacgccttccccgagcttctgatcgacgtcgtgcggctgtcgaaggagggcaagcgcgacgccgcgcatgatctgttcgacgcgcatcttccgctgatccgctatgagcagcaacccggcgcgggccttgccgtgcgcaaatacgtgctgcagaagcgcggcgtcattgcctccagcgcccagcgcaagcccggcgcgacaatcacggcggcggcgaaggccgaggtcgagtacctgctgtcgcgcgtcgcccgtgccgacaagcgcgccaatctcggcccgcaatccagcgccgcaggttagttgcatggccgagacatcagcatcacgcccggcctccacgatcctcctgcttcgggacggcgcggcacacgaaatcgaggtcttcatgatggtccgccatcatcagatcgaattcaactcgggtgcgctggtgtttccaggtggcagcgtcgatgctggcgacaaggagatcgtcgcccgcgccggcctttactcgggcggcgaaggcttgagcgaagcggaccgcggttttcggatcgccgcgatccgcgagacgttcgaggagagcggcatcctcctggcgcggtcgaaggataccggcgcgccaatcgatgccaggcgtgccggcgagattgccgacgcgcaccgtgttgcgctgaacgaacacaagatcggcttcctcgacattctcgccgacaacggtctccagctcgcgctggacacgctcgtgccatacgcgcactggatcacgccggagggcttgccgaagcgcttcgacacctggttcttccttgccgccgcaccgccggaccagctcggcgcgcatgacgggctcgagtccaccgattccatctgggtctcgccgcgcgaagcggtggaggggggcgagagcggccgcttcaagctgccgttcccaacgacgcgcaatctgatccggctggccaagcagccaaacgtgagcgcggcgatggagcacgcccgcggcctgtccatcgtcacggtgatgccggtcatgaccaagactgaaaccggccgtcagctccgcatcccggccgaggccggctatgacggcgaggtgttcgaggtaggggcagccggctagtacacctctgtgaagccaaacatccggagccggagggcggatacgcccgagctttggccggacggtctggccttggcgtgcgtcctctcggcgtcaccgccatggccaattcggccggcagcccgccggcgtcgacctgtcgtaaggcgcgaggctgaaggagcggcaagcctcgatattaaggatattccgcgccacgaggcatgttccccctgggcggcaatacgtcgtatattgggtttccagcagcccggtccttaaaccaccaatgtccgccgaattgacgccgtccccagagaaaaggcgaacattttcgctctccatcggccagctcaccttcggcagcttcctgttggtgctggcggtgatcatcgttacctcgaccgcgagcgtgatcgcgatccggcacatcgacaccaccttcgccgagctgcagaggctccagagcgtcggcgacctcgccgaggatatcgaccgccgcatgaacgagttgcgcctcgccgcgcgtgactttgtcacagacccaggcgccggcattcagttccagcaggtgggcgaggcggcctcgaccctgagcgagatcctgaagaagacccgtatcgagctcgcgcccgagcagcaggacatgctcgacggggtcaccgagcggctcgccacctatcgtaccggcttggagcggatctcgacgctgatcgaccgccgcgcccagctgctcgccggcctgccgccgctgcgcgagcaattcgatgcagctgtcgccggcactgcggaccgggagctggcgtcgcacctctccgaagcgcagagccggatcgcgctcgggctgctcgcgcgcaacccctccgcggccgagcaagcggcgcagagcatgcgaacgatgggcatcgccgatcccaggctcaagtccgcggtgaacgactacgccgaggcgatcatggcggtggcggtccggggcggcagatcgccgacattgatcgcgaggtcttgggaactgagggccgattgatcggccgcgtcaccgaattgctgcgcgaagtcagctcccggcgcggacacgtgctgtcgcgcgactttgcccgaaccctgaccgaggcgcgatggcagagcatcgtgctcggtacggtcggcgtgttgatcggtatcggcgcttcgttgttcgtggtgcgcaggacggttcgtccgctcgcccagatcgcacgatccattcgcgcgcttgcggccggccggaaagacacctcgattccatccgccgacctcgacaacgaaatcggcgacatcgcgcgggcggccgaagtgttccgccgcgcgctggaggaggccgacaccgcgcgcgaggcggcggtgcgcgctcttaccgagcagcgcctcgccgaggagagctaccgcaagctgttcgagggctcggtcgacggcatctatgtgacgacgcccgccggtgacctcctcaacgccaatccggcgctggcgcggatgatgggttatgacagcccacagcagctcatcgacagcatcaacgacatcgcccacacgatctacgtccatccagaggcgcgcgccgaataccagcggctgatggcgcgcgacggcatggtgcgcgagttcgagtaccaggtgcgccagcgcagcggcaatatcctgtggctctccgacagcgccacggccgtgcgggacgagcagggcagtatcgtccgctatgagggcacgctgcgcgacatcaccgaccagaagcgcgcggaagacgccattgccgaaggccggcgcctgctccagcaggtcatcgacaccgtgcctgcggtgatcaacgtcaaggaccgcaacctgcgctacgtgctgatgaaccgctacatggcgggcattttcggcatcgagccccgcgatgcgcttggccgcaccaccgcagacttgatgtcgcgctacggcgcggcgaagaccgacgagaacgacaagcgcgtgctccagctccgcaaagggctcggtttctatgaggaggagtacaaggacgcggcaggcaacatgcggcaatggctggtcaacaagctgccgctgctcgatgccgagggcgagatcgagcggatcgtcaccgttgcgctcgacatcggcgagcgcaagcgcggcgagcaggagatgcgcaaggccaaggaggctgccgagaccgcgttgcgcaatcttcgcgagacgcaggcctcgctgatcgaggccgagaagctcgccgcgctcgggcgcctcgttgccggcgtcgctcacgaggtcaacaatccggtcggaatcagcctcacggtcgcgtccgcgctggagcgcaagaccgcagtgttcgccgccgaagtcgagcggggggagctgcgccgctcgacgctcaacgatttcctcggtacaagccgcgatgcatcctcgcaactcgtctccaacctcaaccgtgccgccgaactgatccagtctttcaaacaggtcgccgccgaccgcaactattcggaccagcgcacattcgatctcggcgacctcaccgagcaggtggtgatgagcctgcggccgggcctgcgcaagcacaatctgacgctcaacgtcgagtgccagccggacctgaccatgaacagctatcccggcccgtacggccaggtgctgaccaacctgtttctcaattcggtggcgcacgccttcccggatggcaggccggggaccatcgagatccaggtgcgcgaatccggcaaggacaatgtcgagatcatcttttccgacaatggctgcggcatgtcgctcgacgtccgccgccgcgccttcgatccgttcttcacgacgcggcgcgaccagggcggcaccggtctcggcctgcacatcgtctacagtatcgtcaccaaccggctggggggccggctcgatctcgattccgagccggggggcggcacgcgcatccagatgatcttgccccgggtggcgccgctggagcaggcggccgaatagctaatcgacgtccgcgagcttgtgcagcgtggcgccaaagatctggctggccttgccgaccagcgcagtcccggtcatctccccgcgcgtctcggtgaagctgccggtgacgccgatgccgacgggggcggggccgccgaacagtgggttgtcatcgccccgaggcgtcgtgtgccgttgcaccagcacttcgcctttgaaggtgctgttgtccttcaccgtgtagctgccggtgtaatagaggtaggcgtcgccgccaagaatcttgccgtcgcggaacagaatcacgccgctgcccttgccgactcgaccatcgagcagggtcacgtgaattgaataaaggccgttcttcataacgtcccacgggccggccgccatcgcccaatggcgtaaccggtccagcttttatgccaaagcccgtcttctcgcgcaacgcggcagtttgccggctgggcgcgggagcacggcgcgcgtcacgtcagctatacttcttgtcgcgctcgagcagctcgatggagatgccttcagggccttggatgaagcaaatgcgtacgccgggccggatggtcgtcggctcacgcgtaaaggtgacacccttggccttgatctcggcggccacggcgtcgatgtcctgcaccacaaggccgaaatggtcgagaccctgatgcgggtgcgggggcggcgggttgacgtcgctgtcgccctctagaggtgcgatgaagatcctggcgccgccgaggttcacgtcgatccgtcccggcgcgcgagcgatctcgccaccaaggatgtcccgcagccaagccgccgtggcctccggatcggggctgcgcaggtggacatgatcccaagtgacggcgaatggcattacctgttctcccaacgggctgcgatgttgcagcgcatgttaacgggctcggctggtgcttaccatgctcctggccgactcgcatgaagcggggaaccttagttcgttgcgcgaattagggtaagctgtggccgagcccatctccatggtgccttggccgcaattggtaatgcaccatgaacgccaggctcgaccggatcggatttgggcgcctcgccgggaccggcgaacggctggcacgggccgtgacgatcgccagtgtctcgtttggccgcagtcttctctggctgctggcggcgatcatcctgggttgtggtgtctggattttgctacctttttccagaggcaatagtgctgagccggcgacgccggagctggcctctgttgaggcgcttccgtcggacgatgcgtcggtagacgtgcggccggcatcccaagctcaggcgccggcgagggcagaactcggtcgtctcaggatctcatcgcagacctggcgccgcggcggcctcggttcgaaggccctggtgacgttcacgctccgaaacgacaacgactatgccgtaaaggatgtcgagatcgtctgcgccttcacgcggcatgacggcagtcatcttacgaaccgcacccgcgtggtggccgatccggtcagcatgaagagccgcaagacctttgtacgtgtcctcgtcggcttcgttaacgtgaatgccgatcatgcaaattgctcgctggttgcagcgcgccgtgtctaaggcgacgcgatcgggtagcggaaaagttaccctcctcggtgcttgggcaaaaaaccatgcatcaccatttgaaccgagcggctgggtcatgaaccaattgagagatcgcctgttgaggcggagagcccacgcggggatgcggggggcggagcgcggccaatgcccatctttaggtatttcattttcgtcggtggagccttgctcgcactgctgttcgcggcggatttcgttctcccgccggcgccggtcacgcaagccatcgcaaccgccggcatcgatcagcccctgatccgaatccggtccaatcggcacctgcctgaacgcgtggtgctcgacaccagccagccgacgatagccgcgcccgcggtgcagaccgccgctgttgcggcaccggagcccccggcgcaggagagcctaacgccggctttggccgagatgtcggccaagacccgggtgcgcgagaccttcgcccagttcacgccggcgccgaggaccgagactgccgcgaccaggaagaccgagacgaggaccgagccgagatcgcaagctcgtcagcttcaggctgctcaggctcaaacttctccggcccagcccaagcgcaaagttgccaggacacctccgccgcagcccggtcgtcccatgatgctggtggcccagcagccgcatttcggccttttcaacaacacttggtgacagacgcctgcgaccccgcttcgatgaggcgggaagggctttttattggccggcctctctgctaactcgaagcagtccaaacgccgtttgctgtgctggcctgatcgccagcgccggtgaggggatcttggtggcccgtcaccccgggctcaggcgctcgtagctcagctggatagagcatcggatttcgattccgagggtcggaggttcgaatccttccgagcgcgccagacctcgccttttctaaaggtctagagaaactgtacgcatgctgtgtgggccggcgggagggctcctacgtccgcgggctagcgtgtcggagggcgcctcctggaagatcgcgcggtaggccgcggcaaactcaccgagatgatggaagccctgggctcgcgcgcaggtggcgacggtgacgccgccgcccctaagcaggcgggcgcgagtcgcccacagcctcttcaggcgaatatactggtgcaagctcatgccgcgcaccttgctgacggcgccgccgagcgtccgaaccgagacgccaaactcgccggcgaggtcggccgtatagatgggtgctgtcggatcggccgccaagaagtcgtcgatccgctgcacgagcttgatcgctcgctggctctggaccgaggcgatccggtccgacaacgattcgattcgaaacaggtcgtcgagcgcgagcagcaagccttcctgaagatgggccgcagcctctgtgctttcgaacaggcccggctgcactgacgccgtgcgtaggatgtcgagcaggagttgccgcgtgtggagcagtgcgggccggttcgcgacatgggcccgcaagtcgtcggcattgtcgaaccagccccggtctctcagctcgggagagaagatgatcatggcatgatgattggattggggttcgacgaaatggcactcgtcgttgccgcgcagcgcagcgaagaagcgggcgtcgatatccactcccttgaaactggcctgaacgtcatcggtcatggacaggatcaccatcccgcccggcatgcgataggcggtatcgagaatgcgcgcgaacgatttcatcacgatgatgcggcacgccggcagggcgacgacagcgcggaccggcgcgaagttggggatgtcgagcggaatgcttctcgcatcctccatcgtctcgatcggccgaaatgaatcgacgtcagaaaagccgatcagttgaagcgcggaggagggagcaaggttgtcgaacaacatggtttctgccagccgctgaaatgtacaatcaaatgaatgtcgaagcatcgccatcaatgacggaaccgcgcgtttcagtaaaccgaatttcaggccgtagtattgcggacatcatgctatgaagtccgtcggctcaatgtcgcgcccaacgttctgcacattcatgcctgacgaccaccgggcgggcaattaactccttgttaaaggatgacgaggtcggctgattcatccttgatctagatcagatcggctcccagtgcggtggcaccgcgcaagacatgagctcgccaaaaagcgaaggggccccgagagccccttcagatgtcaccagcggcgatagccgtaatagccatagtagcgcggcccgtaatagcgcggcggcccgtaatagcgagggcggtaatatggccgaggcccgtaatatccatagtagttcgggcgccaccagcactgcccccacgcgttgcagaccatccgcacctgctcgacgccggacatctgcggtgtcgcgggagccggcgctatcggcatggcggacgccgcctgcgatgccgcgagggcgccaaccaacagggacgcggcgacgaggccagtcttgagagtcataatgtcttcctccgcttacgcgatgcagaatatcgaagttgttcggatcaaattgtggcggaaccgaaatgtaatgctgatgaacaagccttcaccaagtcgaccggccctgatgccggctcgaggactggcctaggccgcaggaccatgccgtgccggagaccttgatcctgcgcaaatcgcaagtgtgccttggctcttactgtcgtcgccgtggcagcggcgtggtgcatgctgccgggtaaggttagctggatgcgaatcattccaaatctgtcgatctcgccggagaaggtcttcttcgtcatcgcgaaatcgcgccgctccgatagcgaagcggccggaggcggcgtcatcctggactcaggtgacgacgacatgagctacggacgcggcggacgtggcgaaaccaccgaccgtacggagttggcgggcttcatccgcgatctcaacgttgacgagcagatcgatctggtggcgctgacctggctcggccggggcgacggtgatctctctaattggcgcgaactgcacgcccaggccgcacaggcgcacaatcagcgcactgcttcctacctgatcggcacgccgatgcttgccgattatctggaagaggcaatggcgcagttcggcaagtctttcgaggaattcgaagaacacctctgatgccggacgcggggtcgataagtttcaaggagaagttgcaatgaacaagatgagaatcgagaagggtgactggctggtcgtgtgcgacgggcgcaaggcgctgattctggagaacgtcggcgacgagatgtttcccaatctacataccagagaagtgcacgagcagcccaacccctcgaccgccgcgcaaggtagcgatgcgcccggccgcttgcatgcggcggtcggtggatcgcgcagttcggtcgagcagaccgattggcacgatgaggcggagcgcgccttcctgcgcggacttgctggccggctcgatgctgccgtcagctccggcgagaccaaggcgctgaccatggtggcctccccgcgcgcgctgggcatgatccgcgccgactattctgacacggtgcgtaaggcgctccagggtgaagtcggcaaggacctcgtcaagctgccggtctacgagatcgagaagcaattgttgctgtcgggcgccgcgaaatagaggcgccagccggaaggacgcgcgcggcgcctcagtggcaggggtgccgccgtccatcctggccgatatacgcggccgcgctgcgatagcaatggttggtcgacgggccgtcgtaataggcaaaggtgccgggggtgaggcccggtccgtaattgtgcagatagctgatcggatagggcagcgggttggcgtaagagcggtgataccgatggtgtccgcgcgcttccgcaaggccgggagccagaactgcagccgtcagggccacgatcgcggctacaaacgtcaacttgctcatctcgattctccgaagcccgctcaaacagatcaaccattttatagccatttcgggtggtctggcatcgctccggaggcccaaaatcaggtgcaatcccgcagatttccggggtgtgtgacagaattgtcggacttggggtcaaaagctgcccatttttggccttttcgggatgcttaacgaattccccacacaactatgaccaaagagtatttcggtaagaatcctgtcgccggcgccgaggatcatttctctgggtccctggaagtcggtggtattcctgaaggccgtcgccgtcacctcgccatgcgcatcacgcttctgagcctgctgttgctctgcctcgccgccgtaactccggcgcgcgccgaactgcgcatcacccgcgaccatggcggctatgtcgaggagtacaaggccaagtacaagcgggtgcgcgagaagggcgagcgcgtcatcatcgatggcatctgcaattcggcctgcacgctcgtgctcggcatcgtgcccatgaacaagatctgcgtgacgccgcgcgcgagcctcggtttccatcaggcctattacgacaaggcgttcaccttcggcatcaaggtcaccagcgccgaaggaacctccgatctcatgtcctactaccccgacacggtgaaggactggattcgccgcaatggcgggctcaccaccgacatgaagaagatcaagaacggtgtcgagctctggaggattgtcaatccctgtccggaagaatggtgaccggctgagctgggccgctgtgggctgacgcagcgcagcatcgtcagaacgaaattcgcattgccgcatggcctccggtggggcaatgagggcggcaatgaaccataaccaagaaatcctggccgcccgcgccgcgccgatcctgttcgtcctgctctggagcaccgggttcatcggcaccaaatacgtcgtcaacaatgccgatcctttgacctatctcgccatccgcatggcgatcgtggtcggcctgatggcgatcatcgccgggattgcgcggccgaaatggcccgaccggatcgggctcgcccacagcgcggtcgccggcatcctcgtccatggtttctatctcggcggcaccgcgatcgcgatcgcgcattcgattccggccgggctctctgcgctgattcccggcctacagccgatcctgacatcgaccatcgccaatcgctggctcggcgagagagtgacgccggtgcaatgggccggtctcgtgctcggtctcggcggcgtcgtgttgatcctgcacaaccgtcccatgaccggcgaagccggacttggctggctggcctccgtggtctcgctgatcagcatcacgctcggcacgctctaccagcgccgctactgcaatcacatcgactggcgcgccggcaatctcgtgcaatatgtcgccgtcaccgtcttcttcgcgatcggagcatttctgttcgaagaccgcgtggtgcactggacacaggaattcgtgctcgcgctcgcctggctcgccgtggcgctctcgataggctcgatcgggctgttgtactggctgatccgccacgctgcggcgacctcggtcgcgagcctgttctatctggtgccggccgtgacggcgctgatggcctatctgctgttcggagaaaagctggacgcaattgccattgccggaatggcgacgtgcgcggcggcggtcttcgtggtcaatcgacgctcttagcactgtgcgcagcactgacgtccgttgaccgcgtcgtgctagggtggagcattcaattccacttcttttgtcagcgcggctgtatcaatgaaggcgaggcgtgcactgctccatcatggttcgagccgttcgcgcatcgcaacggcaccaagttcgatcatccggggtcgatgaaggctccattcacgatgaccgcgggcgcaacgtgatcaagaaggtcaatggccagcgagtgatcaagcagttcggctcatcggaaaagcggaagcgcttcaacgccgaggaccgctcgttcatcgcagcgatccgcaatcccaaggcaagcaccatccgggccgacgggcagccaggcggtgaggatagggcggcgccgtctccgggcgcgcccgcacccggagacctgctctgaggattgcgatcagcgcttcgccttcttggccttcttttttgttttcgtggttttcttggcggccttctttgtggatgtcttgccagccttctttgcagtcttcttggctgccttctttgaggatttaccggccttcttcttggacgtcttctttggcgctactttcctggcgaccttcttggcggcgcgtctgacctgcttcacggccgtgaccgccgcgtccttggtcgcttccacggcgctggtgatcgtgtccatcgcctgttcggtgatcggcttttcgtcgtccatctcatcccccgcggtttgacaggagtcatgacgatagcgggtttcgaaattgtgtcaaagccgcgctcaacctccgcggatctttgcgaaggcggcgagcgcacgctcgcgtcctccggcatgatcgacaatcggctcgggataggtcttgcccattgtgatgcccgcggcggcaagctcaatgggcgttgcctgccagggccgatggatcagcttggcgggcatccccttcagttccggcacccagcgccggacgtaggcgccatccggatcgaacttctcgccctgaagcagcggattgaacacgcggaaatagggtgccgcgtcggccccgcagccggcgacccactgccagttcgcgggattgctcccggcgtccgcgtcgaccagtgtgtcccagaaccaggcttcgccttcgcgccagtcgaccagcaggtgcttgaccaggaaggaggcgaccaccatccggacacggttatgcatcacccccgtgtgccagagctcacgcaggccggcatcgacgattggatagccggtgcgcccgcgctgccaggcggcaagcgccttgtcgtcgcgcgaccacgggaagccatcgaagttcgtctgcaggttttcggtggcgaggcccgggttgtcgtggaggaggtggcggcagaattcgcgccagccaagctcgctgaggaatttttcgacgccgggtccgagtgccggatcttccgccgcggcgaagcgcgcggcgtgccagacctggcgcgggctgatctcgccgaaccgcaaatgcggcgacagccgtgaagtgccgtgccgatccgggtggtcgcgatcgccgacatagccgcgcactgtgtgcttcaggaagtcgcgcaggcgctcgcgtgcagaggcttcgccgggagtccatgcttcgcgcaggccggccgcccaatccggcttgctcggctcgagcgtccagctctccagtcgatcgctggcgatctccggcgctggtcgcagctccttgggcgcgggcaagggccttggcggggtgccgagcgacagcacccgccgccagaatggtgtgaacacgcgcaggccccggccatccttgttgcggattgccgagggcggggcgaggaggtcgccgggaaaactttgcgagtccgctccgagctttgccaacgccgtttcgagctgtcgctcaaccgcttgatgcggcacctgcgcgatcccattccagtagacagcgcgtgcgccactctcgcgcgccacttcagggatcaccttggtcgccggtcccctgcgcaggaccagcgatccgccgcgtgcggcgatctcggtcccgagcgcccgcagcgactgcgccagccaccagcgcgccgcgccgcccggcgcccgccccacggattcatcgagcacatagaggcagatcaccggcccgccggtcttcccggcggcgtggagagcggggtggtcagatagacgaaggtcctcgcgaaaccagacgatgaccggctgcgggtttggcatgatcgggagcgcatctcgctgagcaggttctcaatatacgagacgcacgcgccgggtttcatcagcaaggtcatcccgaggaataagtgcccccgggatgatgcccgctgctcaacggcggaattatttcggctgcggcacgatgcggaggtagggcttcggctccttccacccctgcgggtagatcgtcttggcctcttcgttggagaccgagcccgcgatgatgacgtcgtcgccctgtgaccaatcggccggggtggccacacgatgcttggcggtgagctgcagcgagtcgatgacgcgcaggatttcctggaagttccggcccgtggtcatcggatagaccagcaccagcttgatcttcttgtccggaccgatgatgaaaacgttgcgaacggtttgattgtcggcggccgtgcggaccaggggatcgcccgaaatggcggccggcagcataccgtagagcttcgagacgttgtaatcggtgtcgccgatcatcggataattcggcgccgcgccttgggtctccttgatgtcctccgaccatttggcatggttgtcgaccggatcgaccgagaggcccatcagcttgacaccgcgcttgtcgaattccggcttcagcttggcgagagcaccgagctcggtcgtacaaaccggcgtgaagtccttcggatgcgagaacagcaacgcccagctgttgccgatccagtcgtggaacttgatcttcccttcggtggtctcggcttcgaagtctggtgcggtggcgccgatcggaagtgtcatgattttacctcatcgcattgaatttgttgaagaatgcgtctctgccgtcgcgggcagtataaggggcttgcaagaccaagtgaacgccaactgaaccggctcaagtaaaatgtgaattccttcccggaagagcccatttctcagcaacttattgttacggccgtccccgccgcgaaacgtctcttccggggtcacacggtctcgctcgccccgataatgccttttatgacttccatcacgctcctggggcgcgccctagaaccaaatcagtcctgacagcgaccaattggcaaccatctggacaagtcgcgatccccatatcgaatcattaaccacccctttacgccggcatgaaaatgctggccggtcagaagaaatctggaagtgaactatgtctgccgctgcgcccaaacccaccgagtcatcgtccctcgaaccgtcctgccgcgataccgcggctcacgcgctgagcgtggtgcgcgacggcataatcacgggagaaggcccgaccaccaagggaagggtgcatttctcccgttcgctcgatgctgatgacaccgcatggtgcatccgcatcctgacggcctccgccgtgaacgatcagccggtgagccgcgccgaggccgaagtgctgttcgagatcaacgaggccgcgactgagcgcaccgatgggggccggttcgacgatctgctcgccaaggcggtcgcccattatgccgcgagcgcttcgggcctgaaggtgccgccgcggaacatggcgctgtcggccgacaccgacatcgagagctgggcgccgtcctatgcctccaaggtgaacagcgagatgctggagtggatcgccggccagatgcgcggcaagcgccagaacaaccgccggctgatggccatggtggcgaccttcctcggcgccaccgcgttgcctctcgccggccaattgccgaacgtgttcgacattggcatgtgagatttcggatgcgtgagatcttcgccgcctgatgacggggagacgtggcggcggggctctttccccgccgttttttgtctgccggcgtccggctcaagcccgggcgcggtaccgggaaaaccgatggcgtcggagcaacggcattgctcattcaagacgcatcgtcattgcagacacgctttggcgtcctcgcggctgatctcgcccgagccttgctttgtggcctcaccctctgaaatgaaagagggcgcannnnnnnnnnnnnnnnnnnnnnnnncgggccgggttgcggcgatgaatacgtcttttccgaatttctgtaaagcggaatattttgtcggctgcgtattgacctaggactcgcgtgtcttgctgactggcagcgcaaggggtcgtggcaggacacccagcccggcgcggtctgccgcccgtgaatcctgtgcaatcgcctgccaaggctttgttgccgcgggataacgttcggctttggcgatgtcacgactgcttcgcgggtagctgggtcgctgacgcacgaaggcccaccatccctgcgaacggtgggcctcacgtcgcgctgtgttaccagcgatagcggccggtcagcgtgccgttgttgttgccgccgggaccgacgtcgccctgtgtcgaactcggtgttggatggttggtgccgttcagtgcgccgtagggtcccgcgacatccggataatatgcacgcggttgaacgggttcgtaggagggcgcggcgcggtcccaacccatgcgcggcccgttccaatcgtagccttgcgccgaagcggccgcggtgcccgcgataagggatgccgtgatcaggcacaggagtttcgatttgttctgcattggagatgctcctcgcttgtgtcgggggccaacggttgcagtgcgggagcgttccgggccatcggccggcgagcaatcaactccgatcaactggttatgagatacgttccgcggaacgaagtgccctgagatgagacgggatgccgggcgttctgccgcacccggttccctgttaatcccgtgccttaaccaataattaattatacgtttgcgggtgggcgacagcccggcctagcctctcgcggggagccgctatcgctaagccaaacgagtgtggtgcgtatcatgattgccagatcacatggggcgttgttcgcctcgctcagcgcagccgcgctgctccttgctgcaaatgacagctctgccggacctgcagtcgccgcggcgcccggtgtcgtcaccgccaccgcgccgccgattggagcacatccgccggtcgcgcctggtgcccggttccaccgccgcagcgctccatgggtctattggccgggcggcggcggcttcttcaacgaccgtgccggctacatccagcccttcgccgatgtgagccagtcgctctctgccgacgtgcgttacacctacacgtatgatgtgccctgggactggacgcatcgctttccgccgaacgtcgtcccgtcgaaccggccctatgtgccgagctgcccgacagagcaggtgacggtgcccggccgcggcggcagcgagcacaccgtgaacatcacgcgctgctactgaactagcctagttcgaagctggtcacgccgaagaggcggtcgatgcgcagcggcggggtcggccccgtatacatccgcgccgtctcgaacactggcttgaggccaagggattccgcgagcgcgatcgcttcgccattgacggcgggagcgtcgaggaagatttcaccgccgcccgtgcttgccagcaaggcctgcgccaccgcttccgcagcggcgcgatcgtcggcgacaagcggtccgatcttgtgcccggtgcggcacggccggatcacgccccatgcggtcagcctgccatcgcgcagcagcgcgcggccgacatgctctgatgtgtggatccaggcgcgcaggaaggcgctgcgcgcggcagggaatacggtggcgtcatcggcctcaacacttgcaaacggaatcccggtcaaggcgaccatgtctacgggcgatttcgacggtgcggccacgatgccgccatagcggacattgccatgggcaagccgaaagcctgatttcctgtagttgtcctgctgggcgaccacgccgtcgagcccgatcacgcgggcgcccgcatgcgcgatcgccgcgttccagatgcgcagaccgtagccgctgccgcggaaacgctcgcgcacgatgtagaagccgaggaaggcgaaacggtcgtcgtaattgatgcaggagacggtcgcgaccggctcgccatcgatctcgccgacgaagaagccttgcgcgtcggggatcgcaaagcagtccgcgtcggcaaggcccggattccagccctctgtcgcggcccattcgacggcgatggcgatttcgtcagggcgcaaattgcggatttgcagatcgctcatctcgaaccgctcatgatggacgccttggaccatggacctggcgacaggtctggctgtagaaggcccatgataggccgagcttgcggctcgcctcaacacgggatgatctgtcatggcagcagagaaggtcgcgctcgttaccgccggcggcagcggcatgggagcggaggctgcgcggcggttggccgcggacggctttcgcgtcgcgatcctgtcgtcgtcgggcaagggcgaggctctggcggccgaactcggcgggtgcggcgtcaccggctcgaacacgtcgaacgacgacctgaagcgccttgtcgacgctgcgatggcgaagtggggccggatcgacgtgctcgtcaacagcgccgggcacgggccgcgtgcgcccatcaccgagatcaccgacgatcagtggcacgccggtctcgagacctatctcctgaacgtgatccgcccgacgcgactggtgacgccgctgatgcaggcgcagaagggcggtgccatcatcaacatctcgacggcctgggccttcgagccgagcgcgatgttcccgacctcggcagtgttccgcgcagggctagccgccttcaccaagatcttcacagacacttacgctgccgacaatgtccgcatgaacaacgtcctgcccgggtggatcgacagtttgccgcagcaggatgcgcggcgcgacagcgtgccgatgaagcgctacggcaaggtcgaggagatcgcggcgacgatatcgtttctggcgtccgatggcgcggcctacatcaccggtcagaacatccgcgtcgatggcgggctcacgcgctcggtttgacgccggccgccgcgcgtcgacgaaacaaattacttagcttttgagctaacaatcattgacgccgcctcgcggcgcctctatagttagcttcatggctaaccaatcgtcccgcctcgaccagatcttcgcagcgctcgccgatcccacgcggcgggcgatcgtgatgcggctctgcgacggcgaggcgtccgtcggggagctcgccgatcccttcgacatggcgctgccgagcttcatgaagcacatccatgtgctggagacgagcgggctgcttcagtccgagaaatccggccgtgtgcgcacttgccgcctcagcccggacgcgcttctcggcgcggaggattggttccagcggcagcgcgcgatctgggaggcgcggctcgaccggttcgaagcctatgtgatgaagctcaaggaagagaaggagagggcgggtgccaagcggccgtcccgaacaaccaaacggaaaggttccgagtgatgtcaagttctgccaatcccacactgtcgcaatggtcgctcgaccgtgagatcgtgatgtcgcgcgtgatcgacgcgccacgcgatctggtgttcgaagcgtggtccgacccgaagcacttgccgcaatggttcgggccgaagggattcaagatcgagacgttcgagatcgacgtccgcgtcggcggcgtttggcgcttcaacatgatcggtcccgacggcacggtctatccgaaccgcatgcgattccgccgcatcgagcggccatcgctcatggagatggatcatggcgccgaccaggaccaggatcccgggatgttccgcttcaccgtcactttctccgagcagagcaacggcaagaccgtgctgatgttgcgccagctgacttccagcaccgagcagcgcgacggcatgatcggattcggcgccgtcgagtacggctaccagaccatggacaagctcgcggcgtacgtggccggcatgacgaggtgacggatcgccgtcattccgggcgcatacgtcgaagcgcccggaatgacagagcgaggttgagctcgtctcgtcagaccgtcacccgaatggcggttcgcttgccgacgctcaggtgagcgcgttcgtgacgggtggctcctgcatctgctccacctgcgcggcactgtccggccgtgccggaccgagcacgggctcgtcgccgagcggttcgaatccagggcggaaactgaattcgccgcggccgtcgagcgacgggccttcacaatagcggcctggctgcagcggcgctccgttgcgttcggtccccatgaacatgtagctgaactcggtcgcctccttgctgcgatcgaagctgttcggaatcggcagcgaggcatctccgcccaactcctcgatcacggcgagccattgctgctgatgcatgctgtcgcgcgcgatcagatagctgagcatgtcctgcatgcccggatcgctcgtggagttgtaaaggcgcaccgccaatgtccgaccggtagcttcggcggcaacgttgcaatacatgtcggcggcgaggttgccgctggcatagacgtgcgaacaatcgaatggaacgccgtcggagttggccggaaatgccgccatgcccgtcgaaaggatatgccgatgcagcatgccctcgatcacgtgccgcggccgctcgccgccggacatcacggcgccgacgatcggattgccctgaatgctgctctcctgcatcgtcgccggagcgttctctaggttcaatgcgactgcggtcgacagcatctcgatgtggctgatctcctcagttgcggtgttgagcaacacgtcgcgatatttggcgggaccacgcgcgccccaggcctggaagaagtattgcaggcagacgcggatttcgccttccacgccgccaatcgcctgttgcagctggcgggcgaagatcggatcgggtttctcgaccctgaccgggtattgcagccgcttgtcgaagtagtacatgcgcaactcctttttcttggcgctaggtgcaatggcgcaatgagacggtggaggttgcgttcctaaacatttcgcgccgcggcttggacgctttctaaataccttcggcaatccggatacgaatgcggccccggcggaggaaaaatccgccgaggccgctttcatgcgcacgactagaaaaaagatggaccgcggacggtgatcgccgccgcctcaacgccgggtcgtgccatccgatcgtggggtggtctcgttgcgcatgcccggggggctcgaggcgccttgtccgccacgctccacatgcgtgatgccaccgccgccaccggagcccgcgcccgcgccgccgctgcccgagcctgcgccagctcccgcacctgcgcctcccgctccgcctcccgcaccggcgccggcacccgcaccgccgccggctccgccagcgccaccaccgccagcaccaccaccgccggcgccttgtgcgaacgctccgccggcggtagcgccggccagtaccgcagccgtaaagatcgtcagaactgtcttacgcatgttgtgtctccttggggtttgcaatgaacaaccaatcccgctggccgaggaccgttcctatgcttgccgatcaggaggcaccgcgacctcatcgaatcgttcggcgagggcattgagcgccgtgcgcatttccgcgccctgcatcgccgcaccatggccggtcacgacgatctcgggagcgagtgcggcaagttcgcgcactgaggttttcgcgctcgcccaatccggtgtgaagtacatcggcggcccgtgcatctccggcgtttggctcatcgccgcgtagacggattcctggcgcgtcgtgatgaacgcgtctccggcgatcaggacgcggtcgcgctcgcgccagagcgagacatgaccgggcgtatggccgggcgtcgggatgcatcgccagtcctgcatgaaggggacgctgtgatccgagggaagatcgtagaggtgcgatgcgacgttgaccggccgggtcggaaacagcggagagagccgggcgatcagcccgcccccgacgctgggatcggccggcggataagactgggtgccgtcgagatagggatgctcggcgtgatgtgcataaaccggcacgtcccattcgttagccagcgtttcgagcgccccgacatgatcgaaatgagcatgggtcatgacgatgcaggccggacggccgtgcccgccaaaccgagcgccagcggcggagcggatggcacgggccgagccgggaatgccggtgtcgaccagcacccagttgccatcaccggcgccttcgacgccgacaaagatcacgttgaccatggcaagctgccggtaggcgacatcggcgacgatctgccgcgtgctgtcgttgcgatcgagatcggattgcggatgttccgcttctgctgcggtggagaggggaatttgtgtcatgtccggcctcggtgcgttcagctatctttcgatcgtgcccattcgccggatcttctgctggagcagcatcaccccgtagagcagcgcctcagcggtcggtgggcagccgggaacatagatgtcgaccggcaccacgcggtcacagccgcgcacgacggaataggaatagtggtagtagccgccgccgttggcgcatgatcccatcgagatcacgtagcgcggctcgggcatctgatcgtagaccttgcgaaaggcgggagccatcttgttggtcaaggtgcccgccacgatgattacgtcggattgccgaggcgatgcccgtggcgcgaacccaaatcgttcggcgtcatagcgcggcatcgacatctgcatcatctcgacagcgcagcaggcgagtccgaacgtcatccacatcagcgatcccgttcgggcccaagtgatcagctcctccgcggtcgcggtgaagaatcccttgtccgcgaggtcatcgcggatctgcatgaaatatgcgtccgaactgttgtctggctggccgtgtccaggacgcgggggcaggagatttccggaagcggtgggatcgtcgatcatcattgtctcggacttcgggggcgcaacttcgcgacactaccccgcgctgctgtgaaccgcggagcgtcggtggcgttccagacgtcgacgcctgttctgcgtcttgctatcgcaggttagcgccgggtccttcgggcggaacgcgcgtgagatcgttggaccctcctgttggcaattagtacggcctcttaggaacaatggcccttgcttgcctgttgcgggagggaagccagtcaacggaggacaggaatatggcgaatgcagcccgcgatacgttcgtggtgggactacgaaatgcgcatgcgatggaagtgcaggcgcgcgaattgatggagcgccagtcggagcggctggatgactatccggaggtcaaggcgaagctcacggcgcatcttcaggagaccaacgagcaactgcggcggctggaacaatgcctggaagcctgcggcgagagcacgtccagcctgaaggacacggcgcagtcgatgatggcgaacatgcaggccatggcgcacgccgctgccggtgacgagattctcaagaacaccttcgcgaacaacgcgttcgagaatttcgagatcgccgcctacaagtcgctcatcgcactctgcggcgctgccggcatgtccgaggcgaaggcgccgctcgagacgtcgctgaaggaggagcaacgcatggcttcctggatcgactccaatgtcgagaaggtgacgatggagtacctgacgcaccagcgccaggcggcgtagttcacgcgatccttctatcgaaccaccggcgcaccagggccggtggttttttcgtgtcgcagccgggaggcatcaagtgccaggaacgattcccaggaacgatcgcgtgccgtccggctttgcctgtcatgacgcacatcatcttcagtgactatcgcaacccggccgcggagcaggcttacgagatcgcctgggactttctcgcgcgtacgggcgccatccgcgacgagttcgaggcctgcgtgttcctggcgcagcgcatcaccatgatggtcgaggaggggcagacgaaccggatccgcatggccaaccgcgcgatctcccaatatcagcggcatgtcgacgaaagcgacgacctcgtccgcagcggcggccgccgtgcggaaggttgagtgcggacccgcgaccctcaagcgcaacgagatcgggatgaatccccgtcgcgcttagatccggttcgagcatgactccgcgcaaacgcgttccgcgtctgctctggccgcctcactccctggcgtcgtccgtcacgatcccgccgagcttctgccagcgctggccatcgaactgcaccatctggaactgcttgttgacgcgatagtccgtcggcgtggtcgtgaccgagatacccggaagcgtcagatcgagctcgacgttcttgaggctggcggcttgtcgcatcacgttctcgcgggtgagatcgtcaccgcattgcttcagcacccgcaccaggagctgtgcggtgatgtagccgtagacattcaggttcgagtccttgtcgccgtccggatagtacttggccatgaaggcgaaatagcgcttcatgccggcatcgtccttccattcgggatcggcagcatccttgacgtaaccgacgctgatgacgcccttggcattgtcgagtcctgcgggcttgagcacggcgctgacggaggaggcattgatgtcaatgatgtggagcggcttccagccgatttcggccaccttcttgatcgcttgcgccgcctgtttcggcgtcgtcgcgctgaacagcacgtcggcgcctgcgtccctcaatctcagaatctgggaatcgatcgtcggctcggtgatctcgtaggacgtctcggccacgaccatgctcgccttgtcgccgaggccggccttgaggccggcgagataatccttgccgaggtcgtcgttctggtagagcacgccgatcttcgcattcgggtggttcttcagcaggtattgcgcgtagatgcggccctcgacgaggtaggacgggttgaagcccatggtccagggaaagttcttgggatcggtgaagcgcgccgcgccggtggcggcaaagagttgcgggatcttcttggcgttcagatatttctgcaccgcgacgttcggcgctgtgccgatgatctggaacgtcagcagcacctcgtcgctttcgaccagcctgcgggtctgctctacggtcttgggcggcgaataggcgtcgtcatactggatcagctcgaccttgcggccgttgatgccgccctggtcgttgatcatcctcatgtaggcggcctgggttttgccgatcaccgcgtaggccgaggccgggccgctgagcggcacggtctgccccaccttgatcgcggtgtcggaggcgccgggatcatatttcttttgcgcttgcgcggccgcgatcgagagcgtgagaaagagcgtggacgccgcgaagcctttgatgagattgttcttcatacccagtgttccccctattcgttattcgcccttgaggccggcatcgcggatcaacttggtccacttctgcgtctcgttgtcgatgaactgggcgaactcggccgcggtgccggcgcgcacctcgaggccctgggccgtcagcttgttcttgatcgcgggttcggcgagcgcgcgcagcacttcggcctggaacttgtcgacgatcgaccgtggcgttgtcgccggcgccatgaagccgtaccagccggcggcagccacgttgggaaagccttgctcgcgcagggtgggcgcctgcgggtagagtgcgctgcgctcaggcgaggcgacgcccagcacggtgaacttgccgctctggatgtaaggcagggcggtcggcagcgccgtcagcgtggcatccacgcgtccggcgagcagttcggtgtaggaagccgcatcgccgcggaacgggatgttcagacccttgacgcccgcatcgcggaacaggagctctccggcgagatgaggctgcgagccggcgccgggagaggcgaaggtcagtccgtccggctttgatttgccgtaggcgatcaactccgggagggtcttgaacggcgcattggtactgatgatgaggaacagtggcgcgatcaccaccattgccaccggctgcagttccttgcggtcataggtgagcttgccgaacaacgcctcggctgtagcgtagggggccgcgacgtacaggaaggtgtagccgtcgcccggcgcatgcgcgaccatgtcattggcgatacgggtgccggcgcccggcttgttctcgacgatgaactgctgacgcaggctgcggccgaattcttccgcgagcagacgcagcgagatgtcgttggatccgccaggtccgtagggtgagatcagccggaccaggcgcgacggccaggcgtcctcggcatgtgccgtcatgccagatcccgctgcgaggccgccggcaatcgtgcccagcagagttcggcgtgtgaccttgaacgatgccactgttgtcttcctccctgttgttgttgttgctcttctgttgttgatttgccgagatcagatcacctttcgttgggtgagctgctcgatcctggcgtctgacaggccgagccaatcccggtaaatctcgttgttgtcctggccgacgtcgcccgcggcatggcgcaagcgcgcgggatcgacggtgaagcgcggcacgacattggtcatggcgaccgtgccgaagtcccggtcggcaacgcgggtgatcacttcgcgcgcctccacttgcgggtcctcggcgatctgatcgatcgaatagatcggcgccagcgtcccctgtgcggcattgaagctcgcgaggacctcgtcgagtggatgcgcggcgcaccagccggcaaagatgtcgttgagttcggcggcgtgcttgacgcgctcgtcattgctggcaaagcgtggatcggcaatgaggtcgggccggccgattgcgcggcaattcgctgcgaagagggtgttggtcgagcctgcgagcgtcacccagtgatcgtcgctggtgcgaaaaacagcggccggcgccgaatagccgttggcattgccgatgcggctgcgaacggcgccgagctggtcgtgctctatggcgaggacgtcgagcaggcggaacacggcctcggtcaaggcgagatcgatctcctcgcccggcgcatgcgggtcgcacgcccgtttccaaagcgccgcgagcacgccgacggcgccgaacaggccgccgatcgaatccccgatcgggtatccgggatgggtcggttcgccgtcgctctcaccggtgatgtaggtgagcccgcccatggcttcgaagatgcgggcgaagcccggacgctcgcgataggggccgttctgcccgaaggcggtcgcgcgcagaatcacgaggcgcggctggatcgaccacagcacctccttgggaaggccccagcgatcgagcgttcccgggcgaaaattctcgatcagcacgtcgaaacgtgggagaagctgcttgaacaacgcaagtccgtccggcgtgcgcagatcgagggtggcgaacttcttgttgcgattggcggccttccaccacaacggcttgccgtccttgaacggcgggaacgatcgcacgccgtcgccctgtccgggcatctcgatcttgaggacctcggcaccgtagtcggccagcagcgtggcagcgaacggcgcggcgatgatggtagcgatatcgagaaccttcagtccttcgagcggtccagccatgtcatgtcccgacgcttgtggttttcttggttttgcgcggcggcgtcgtgagttcggcctgcccgatgatggcgcggatgctgtcggcgagcgcggcaatgcgcggaccgatctcaccctcgagctgacctggctggagccggaaagcggggatgccgcaattgatcgagaacgactgtttcgattcgctggcatgaaacaacggtgcggcaacggcatggatcgaagccatgtactcgccccagcaggtgcaaaagccgcggcttttgcactgcgcaatcccggcgcggtatttgtcccgcatcgctgaccacagcccggaatcttcggcggcgatgttccgctccagccggtctgcgtccgcaggcggcaaggtcgaggccgcggcgcggcccatggcggtcaacacgacgggaatgggcatgccgatgtcgggcacgtgcgggccgacatcgccggagcgcgcagtctcgacatagatcatcgaggtggcgtcgagcaggccgatcgagaccgtgccgcgaacgctgtgcgccagctcctgcatcatggggcgcgccacctggcggaattgcattccggcgagcagaggatgtgccatccgcagcgctcgcgcgccgacgcggtacttcgcccgttcggcgtcgtagcggagatagccgagctcggccagcgtatgggtcagcctcgccaccgtcggccgcgggatgcccgtcaaagtcgacagctccatattgccgagcagcgtgctccccgccttgaacgcttcgagcacgacgagcccttttgcgagcgtcgtcgcgaatgcggcgtcctcggagctgaccgccaacacggctgcggcagaggagggcggatgtctgggcttggatgaaccggtctggaccatttctggatatcagacgcaagcggcgcgaatgtccaatagattcgaaatacaggtgtaaattgtccaatatgtggacgcaatgacgcatcaatttccgtcgggggacagcggtggaacgaccgaacacacagatttttgtcgtgattgcatgtcgtcttgtgacaggattattacgacgacgtgtcagatcgataattttcggagcgggtcatgttgcagtggcaggcgcggtcaaatcctctcgcatggtggtggggatccctcacgtttgtgagcagcgccaacgtcctcgtctggttcatgctgtaccgcgagttctacccggcggcgtcgggcagcctgagcggcggatccgacatagggctgatgctgctgctgtgcgccggctatgtgttcggctgtgcgttccgatcggtcctgccgcgagcggacgttcagcgcatctgcctgttcgacacctggctatcgagcgtcttcgtcggccgttcggtcgcgacggtcgccgaggtttgcttcgccgcccaatgggccatcattctgcaccagctcggcaccatgaccggcgccgagacgacggtgaacatcgcttgggtgatcgtgccggtgatcatcatcgcggagtgtttctcctggtacgcggtggtgaccaccaactatctctacaatgcgatcgagaattcgctgtgggccgtgacgttcttcctggccgggatcgcgttgtgccgcctgatgccggagttccagggcgtggtgcgctgggcgctgatcgtcggcgtcgtcggcatcgcctgctttctggccttcctgatcaccgtcgatgtgccgatgtatctcagccgctggcgggcagggcatgccgagggcaacgaattcctcggcctcctcgaaggcttgcatgacgtcgcgacgcgctgggtggtgacgcatgacatcgcgcattggaggggcgagctgacctggatgttcctgtatttcagcgccgccgtctggtcgagcctcgcgctctgcgcgctctacgccatggaaggccatcttgcgcgctatctggcttgagcgcgagagcaccgttccgatggacgcggacggtgctctggactgatgcgttttcgtcgcgcgaaccggtctccactccgcctgaaaacgccctacttgccgaccaggctgcacttgctgcggtcaagcggacggaatgcctggtcgggcgggatcgttgcgaccagcttgacgaaatcccaagggccttttgactcctggggcgtcttgacctgcaccagatagagatcgtgcaccatgcgctggtcctcgcggatgcggccgttggtggtgtaggcgtccgataccggcgtcgccttcattttggccatcacggccgtgccctcgtcggaatctgtgtccttcacggcttgcaaatagtgacgcacggcggaatagacgccggcctggatctgcgagggcatcgcctttcggcgggcatagaacgcatcggcgaatttccgggccgccggcgagacgtcctcgaagaacgaggtgacgatgagatcaccgcgtgtggccttcaagccgacggcttcgatgtcgacgttctggaacgacatcggcacgatcttcatgccctgatcggtgagcccgaactcctcggcctgcttgatcgcagtcgcattgtcgccggcgacgttgatggccaggatcttggcgcccgacgactgagcctggagcagaaatgagctgtaatcgggcgtaccgagctgcgccttgacgctgccggcgactttgccgccgagcgcggcgatgcggtctcgcgcggtcgcctcgatcgaatggccgaaggcgtagtcgccggtgatgaagaaccacggctccttgctggtctgcatgatgccggagaccacggcggtcgccgtggaataggcgtcctgggtccattgcacgctggttggggcgcacgcttcatccgtgagctggtttgcaccggcgccggagatgaggaatatcttgccgttgctgcgcacaagctcctgcaccgccagcgccgagccggagctgccgccgtcggcaattgcctggacaccatcgctgaaccatttgcgggcgagcgatgcggccaggtctggcttgttctggtgatcggcctgcaaaatctcgatcggcctaccgttgatcttgccgccgaactcctccgccgccatccgcgccgcctcgaccgagcccggacccatggcggtcgcgaacacgccgttcatgtcggtgagaacaccgatccggatggcgtcgcccttgatgtcggcccgcgcagcggaccccgcgagcgcgagtgtaatgagcagggtggctgcggaggtggcgcgggtcgtacccatggcggttcctgagtttatcgttgattgatcgatcctgacggtcaggccggttcggcgatcaccgtgttacgcaaggtgccgatgccggaaatctcgacatcgacggtgtcgccgggacgcatccacagcggcggcgtgcgtttggcgccgacaccgcccggcgtgcccgtgacgatgacgtcaccgggcacggagcgggcagatggtggagatgtaggcgatcagctcgggaatggcggtgatcaggagatccgtcgtggtgtcctgcacgaccttgccgttcagccgcgtctgcaaggtgagctttgacggatcgggaatctcgtccgtcgtcaccagccagggaccgaagctgccgctttcggcaaaggtcttgccggcgaggaattgactggtgtggcgctgccagtcgcggatgctgccttcgttgtagcaggagtagccggcaatatgatcgagcgcccggtcggccgggatgtgccggcctcccttgccgatgacgagcgcgagctcgccctcgtagtcgaagtcgtcgctcaccttcggcttcacgatcggctggagatggcccacctggctgcaggcgaagcgtgcaaacagcgccggcttctcggtgacggtgcggcccgtctcggcgacgtggtcgcgataattgaggccgacgcagatgatcttgccggggtcggggatcacgggggcgaagctgatcttgtcgagcggatgatcgggcgcagcggaggcggtcagctttgccgcctcggcgaggcgaccggcttcgagcagctggcgcagcgtggtgcagcccgccatccgggcgccgagatcgacgacgccgttgtccttgacggcgccgaaggaggggcgtccgcgcacaatgaacgagatcagcttcatgagatgtccttgagatggttcagtcaggccgcggagggcacgtgggttggaggcgcgatggcggcaatgagccggtcgagctcggcttcgttgcaggccgtcccgcgcacgtagcggtcggggcgaacgagcgcggcgacgatgccgtgctcgcgcagccagggcccaaggctgctggcatcgtcgctggtcaggatcctgattccctgtgaaagggcctgtcgcgatgacggcgccgccgccgtctcgacgagcagcacgtggctgtagccggtcctgtcgtcgcttgggctgccgtcgctcaaggtgaattgcggcgccagatgtccggcgagcggcagatcccttgatacgagcccggggccgagcagaggcttcttcacctcgagcttcacgggcgcgttctcgcgagcctcgccggcggcaagtcccgcttcggtcgccttggtgttgatcacgccgcccagccgaatggcgagctcgatgaattcgcgcacatggggcaggcgttcgctctgataggtgtcgagcacaccggaatctgcggcgccccgtatgaccgcgtcgagcttccaggcgaggttcgcggcatcgcggatgccggcgcacatgccttggccgaggaaaggcggcgtctggtgcgcagaatcgcctgcgagcagcaatcgaccgttgcgccattgttgtgcgatcacggaatgaaaggtgtagaccgccgcgcgttcgagctcggcatcctcaggcgtgatccagcgtgacagcagctcccacactttcgccggctgcgccacgtcgttcgaatcctcgtccggcagcaccgtgatttcccagcgccgccgcgcgccggtgccgcgcacataagtcgccggccgcctgggatcgcaatgctggaggctgtagtcgccgaggtcatcgcggtcgcgcttgagcaggacgtcaatgaccagccagcgctcgtggaacccgaggtcgtccatgccggagccgataaagcggcgcaccagcgagcgggcgccgtcacagccgaccacatagccggcccgaaccccgcagagcctcccgttcgtgaggtcctcgtagcggacgcgcacgccatcctcgtcctgatcgagcgcgaacacgtcgcaccggttgcgcaggctgacgtgtggccagcgggcgagccctcgggtcaatacgtcctccagatccggctggtggaagcggtagctgagatgccagcccatcggcgttagcgtccgtggacgggaccaatccagcagcatgcggccgtcggcatcgagaaagagcatccccgggctgagaatgacgtgcggcagaatcgcgtcggcgaggccgatcgtctgaaacacgcgcatgcattcgtcgtcgaaatgcaccgcgcgcggcagatgataggtccgcgcctcgcgctccagcaccaacgtccgcacgccgcagaggccgagcagattggcgagcgtggcacccaccgggccgcggccgacgatcacgacatcaaattcttcgagggcggatttatcttgcatggggttatctctttcccagccggtgccgccccttcaatgccggcgcgccaagtgtccgcccagcggacgacctccgccacatccggcttgtccgccagccggacatttccgcaatggcgctacttcgggcctgcctgccttggctacctaacgtcaggaaaaaaagtgcaggttgtcgatcgaggcagccgcagaggaggaacgatgctgaaatgcgcgggagtggcgtgccttgcaatccaaatgttcatggtgtcggcttctgccgcggacatcaacgtgggaatcctgctgtccacgacaggtccggccgcagcgattggaaatgcggagcgcaatgggaccagctttggcccacccgaaatcgcaggccacaaggtcaactacctgtttctggacgaagcctcggacagcaccgcggccgttgcggcgatgcggaagctgttccagggcagcagtatcgatatcctcgtcggtccgaccacgacgcccggatctttcgcggtcatcgatcccgcggtcgaataccggcttcccgtgatcacgcttgcccccgtcaacgctctggtggctccggtcgacgcgcgaaggcgctggatattcaagacgaccaccaacgacgatcacgaagcggcgccgttgttcgcgcacatgaagaagagcggggtcaagaaactcgccctgatcggtttcggcgattcctacggtgacgcctggagcaaggtcagtgcagagatgtgcgcggcggcgggaatcgcgctcgtcgccgacgagaaatatgcacggaccgataacagcgtcgtcgggcagatcctcaagatcgttgccgccgacccggacgccgtcctcattgcagcctccggcgcgcccgcggcgctgccgctgcttcagcttcgcgagaagggatttgcagggaaggtgtacggcacgctcggcgccacctttggagatttccgcaagctgacaggcgctcaaggtgacggcatcttcgtgccgctgagcccggcagtcggcgcggcctcgttgccggatgagcatcccgccaagaaggccgcgctggatttcattcagcgctatgaagccaggtttggtccgggaagccgcaatatctttgcagggtccgcctatgatgctctgctgctgatcgagcgggctgcacccgccgcgctcaagaagggcgcgcccggcaccgccgattttcgcgagggccttcgcagcgcgatcgaagagctccgaggcgtggccggctctcgcggagtctacaattacggccccaatgaccacaccggcctcgaccagagtgcgctgacgctcggccggcttgagaagggcgaatgggtggccgtgcgctaaggcggacttcgggacgcgagggagaatagaggatgccggcaattcccggacaaccggtctacgacgtcgatctctacagcgatgaggtcttgctcgacccatacccgcactacagagcccttcgcgagctgggcgccgtcgtctggttgccgcgtaatgagcttcatgcggtggcgcgattcgacgacgtgcgtgccgcgttgcgaaacccgaccgtgttctcgtcggcacagggcgttgccgccaacgaccacgtcaacgacatctcgcgaggcacgacgctggcgagcgatgcgccgctgcacgatcggctgcgcgggatcatcgcggcgccattgatgccgcgggcgctggaggagatcgcgccccagatcaggacagaggcccgccggcttgtcgacgatctggtcgcccgcggccagttcgatgcagtgtcggatctggctcagcacctgccgctgacgatcgtctccaagctcgtcggtctggaggatcatggccgcagcagcatgctgcgctgggctgctgcgaccttcaacgtgctcggcaccatgaatgcacgggcctgcacggcactgaaggacgttcaggagatgcgcgcctatctcggcggggaagaaatcaggagccgtctgcggcccggcagctggggcgaccgcatcttcgctgctgcggaccgaggcgaggtcgagccggagcgctgtccggtgctgatgagggattatctcggcccgagcctcgatacgaccatcttcgcaacggcgaacctcgtgttgctgttcggccgtcatcccgcgcaatgggatctggtccgcaacgatccggccctgatcccgaatgcgatcaacgaggcgctgcggctggaatcgccggttcggggattcacacgccatcttgcggccgatgcgacggttgcagacctgaccattccgcgcgagagccggctgctgctgctgtacgcgtcggccaatcgcgacgagcgaaaatggcacgatccggaacgtttcgacgtgaggcgccgcgccaacgatcatctcggattcggcaacggcacgcacatgtgcgcgggccttcacctggcccggctggagatgacggcactgctcgaggtcctggtggagcgagtggcctctttcgagatcggggaacccgtgctggcgctcaacaacgtgttgcgtggcctggcttccttgccggttcgggtgaagcacgcatagccggcggtcgtcgcctggtgtggtcggagatctggagcagcttcagactccgacgtcgatagctgccgcggcgctgcgcatcggatcgacaaaggttgcgacggcttcctcgatccccagcgccgagcggatccagatgatggagatgcagccgaacacgacgccgtcgcgcacgatcgagacagcgatcgaggccgtcttggggttgtattcgccttcgccgcggatggcgtagccgcgcgcctgcgtctcggccatcatccggtcgaggcgggcttcgtcgaggaacgggcgatcatcggcctcatcgatgcggcggagatgattgacgatcagatcgcgttcacgcgcggggcaggcggcgagataggcgcgacccgcagacgtgcgcagcatcggcagacgcttgccgatcatgccgcggtcgatcgagagcgggctgcgagagtgagtggtctcctgcaccaccatcgccgcgttctcataggtggagagatcgaccggccagactaatttcttgctcagatcggcgagataaggcgccgccgcctggcagattaccacgccgggatcatagccgtcgccgagactcagtgcgcgccgggtgacccgaaatcggtcgtcgctggcgctgcgggcgatgtaaccgagttcctccagcgtttcgaggaggcgatagacggtgggccgggggagatcgagcgcgcgggcgacgtcgccggcgcggatgccgccggagcggttaacctcatgcagcacgtcgagcccccgcttgaaggcgcggacgccctcggactgccgcggcctgccgttctgcgtccgctccttggacacttctcatttcctcccttgtggctcatcgcggcgtgtctatcgtcattgcgaacgcgaagcgattgcgggacgccaccgtaggatcgcgcgcggccggtatcaagtcgccgcggtgcggccaacgtgatgccttccggaggaattcgatggaaatcacagcactcggctatatcggaatcagttcatcccagctcgatcagtggagccggatggcgaccgggctgctcgggatgcagcaggtcgatcgcggcggcaagatgcgcgccttccgcatggacgaccgcaagcagcggctgatcgtcgacggtggcagcgatgccggccttgcggtgatgggatgggaagttccctccacggccgagctcgaccggttggcgggacgcctggaaagccatggcacgaaggtggtccgaggctcgcgcgcgctcgcggacgagcggcatgtcgccgagctgatcgcgttcactgaccccgccggcaaccggctggaggctttttgcaacccggagcttgcgagcgagccgttcaggcccggccgcccgatctcgggcttccgcaccggcgcgctcggcatggggcatgtcgtgctcaatgtggaggatgtcgagcagctcctgccgttttatcgtgacgtgctcggctttcacgtctccgatttcgggctgaagccttacgggctctatttcttccacgtcaacggccgccaccactcctttgcgatggttggctcggggcggaaggcgatgcatcacttcatggtcgagctcggcagtctcgacgacgtcgggcagggttacgacctcgcgcagctggacgaggggcgtgtcgcctacacgctgggccggcacaccaacgaccacatgacctcgttctacgtgaatacgccgtccggcttcttcatcgagtacggctggggcgcgcgggtcatcgatcccgagacctggcagccgcacgagacctttgatggtccctcgctgtggggccacgagcggctccatatgcccgaagagcagcgcaaacgattgcgcgacatgcggctggatgcagcggcgcgaggcgtgcgcgtccctgacccgcgcgtgccgccgctgaactgcgcctggctggattcggtcgtcgcgcgcgaatgatctgcgggccaacaatcaacgacgcggactcatcgacgcgcagccacagccgaatcgacgcaaattggaatagttctcggcgtcgtagcgcatcgccactcgacaatgatcctgttgaagaaccgcccgctcccagcgggccatatcagtgacacgcacgaatctgatcaggtagaaccacttctcttgggccgtccgcagcttcttcacgagactggcgcatcggagcgcgcaaatcccagatcattcagcatgactcgcttgattccagcgagtagagctcgatcgcgatttggcttgtcatcgcattcacagtgcctgattgcggatttgggcctgagcaaacgtaggaggggcggttatttcgcggctctcggcgggacgagcgcaggccatgccgcgcgccacaacattttcaggagcaatgcgagcaccgtcatcatggcgaagccgccgattgcgggcgcgaaatgctcgttcaagtctaccctctgtccaaattccatcgcgagccgtgctgattgcagcaatccatagccgccagccagcagaatcagggcgtagatggcactgcgctcggtcgggctggccaccttgccgagctcgggcagcaacagagcaagtccgacgccgagcatcgatagatcgtagtcatatgcatatggactaatcatcgccgacactattgtggcggtgcctaggagaaatcgctgcgaaaatccacgggtcgcaannnnnnnnnnnnnnnnnnnnnnnnnnnnnnnnnnnnnnnnnacggcgatcacgaggtgtggcttgatcgccatgacgccaagcgcaattccagcgagcagcggtcgtcgttcgatattgaggcagatgaggccgatcagtcccgccgtgagaaagccgttctgcccgcagccgatggtgactgaaagcgcgggaaagagaaccaccaacacatgcgcaaaatgatcgcgcgccagtgcgcgcagcgtcgcaatataaaacgcgagagttgacgcggtgaacaggagatagccgactccgacgggaaggaaggcgaacggcgctatcagcagaccatattggggtggataggtccaaggcatgaagctgggcgccgctcccgcgaccgcggcctgcatcttcaacaacgtctcgaaatgatagacctgctcgagatcgccaatccagacacgctgcgcgacgatgtgaaacgcatcgaagtcggcaagctcgcggctggcccagccgccccagcgtccaaaccagaagctcttggccacgatgatcgcggccatcgccgcaagcacaaggcgggcgtagatcatccgctttgcgggaaagagccgcacgtgttccagtgattcggcgagcacgcgaaatgaccccattggactgctctcggaggaaagcgactggtcatccagcgctctcggactgcagttttcctgagcaggaaccggttgttgcaaccgagaggtacatgtggaaaattaaggacttctaaatcaatgcgggcgatgcagggaaggaagcatcttccgcggctcaacccggcggcgacggcctcggatgcgaatcgcaatgataatcgaggcgagatagtcgatgccctcgcgggcgttgcggataacctcgtgtcctacattgtagcccactgctgacgaggtgctcgaccgcgatccctggcctgggctcacgcagagggccaaggaagcccgcgcccgacgttccccgggggccgctgatcctgcggacccgcactgcttacaaggagccgttgctcgtcggccgtgacatgatgtcgttcaggatcggcgacacggtggcggcgttctcgcctgacggagcgaggctgaagccgtaagccagcggcaatcagacctccgttaacaatccctggcgaagcgccagccggaccagttcgatgtcggacccaacgccgagcttgtccttgatgagggaatgcaggtttgccaccgtcttcgggctgacatgcagcatctgggcgatctcctccgtcgtgttctcggcgagcagcagccgcagcacctcgaattcgcgcggcgtcagcacgtccgcggccgagcactcgccgccgatgcggctgagcgcaagctcgtggtcgatatcgggactgatggcgatcttgccggcgagcacgtcctttaccgcgcgcaccagggtctcgggcgggctggtcttggtaacgtaccccctcgcaccggcgcggatcgcctgcacggcaaagccggcattctcgtgcatggtgaagacgaggattcgtgcggccttgtcccactgcctgatccgcctgacggcctcgatgccgccgatgccgggcatgctgaggtccatgatgacgaggtccggcgcttcggacttgtacagccgataggcttccgcgccgtcggctgcctcagcgacgacgcgcaggccgggctgcttctggagcacggagcgatagccctcgcggacgacggaatggtcgtcgaccagcaggatggtggcatcggctgcgctcatgcggcgtgctccagggcctgccgatcggccgcgagcgggatgaacacacgcaacgtggatccatgagggccggtctcgaagctcagccggccgcgaagcgcggcgacacgctcgcgcatgcccagcaggcccatgccggatttgacggcagtctcattcgggcggccgtcgtcctcgaccgcgagggcgatctcattgttggccattgtcagttgcaggctgacccttgttgcgccggcatgcttggcagcgttggtgagcgcctcttgcacgatgcggtagagagtggcgctgatggtgccaggcacgctctcgaaggcaccgtcgaaccggatttcgaaccgggtctggccgcgactgcggccgttccaacccgacaccagaccttcgaggcttgcgacgaggccgagctcgtcgacgtccggtggccgcaaccggaacagcgcgccacgcagcgtctccatcatgccagtcgcggtccgggcaatgctgtcgcactctccgagcaatccggggcagtcctgcgccgcggtctggcgggcggatgcggcaagcgcgcggatcgcggcgagcgactggccgaattcgtcatgcagctcgcgcgcgagatggcggcgctcctcgtcctgaagcgcgatcagcttccgtgtcagctcgttgcgttcggcaagcgcgatatcgaggctttcggcgagttggttgaagacgtcacggatggcggagagctcggcgagatcgaatggcggcagccgcgtcgtgaggtctccggtggcaatgcgctcgaggcctttgccgatcagccgggtggggcgcagggcgcgggcgagtgcggcatagaccagtgcgcagagcagcggcagcgcgattgcaagcgcgatcatcagtcgccccgcctcgtgccaggcttccgccgtctgtacggccggatcgaccgaaaccacggtctcgccgaggttcgttccgcgcacaatgaccggtcgtactgcctcccggccgggatcgaacaggctccgatagaaggcgacgaaggcttgcggcggcgggctcgcgggggcaggcgcgccactgcagaagcgctggaggatgtcgcctctcgtgccgcggaatgccagacacaggccgggtgtcatcacataggccgaaacaggatcgaggttcggaaagtcggagcgcgggttggccacccactgaaccttgccctgttgcaactccagcgatttcgccacgatggcggcgatgccgtcgatgcgcgcatgcgcggcccggtcggccgatacgaggaaataggcggagatcgcagcgaagcagacggccgatatcccggccacgagcaacgtcagacggaccttgagatcgaacctcgggcgattccacatcggcaggcacctggtgcgaacgggtttgtcgctttccgcattaaagggcagaacgcatgcggcggaaagcgttcccgctgtgccgcactgcagcgtcgtgaaattttcccggcgcttgtcgggacggttgcggctgcgtcgccctcagtgcccgatccagatttgcggccgtcccatcctgcgaggtccgttcatgcattgctctcgcctgattctctccgcctttctcctcttcgtcctttcttgttcgccggccgatgccgagagcgctattggcgtagccatggatgatttcagctataccgatacttcgggcgagccgaccaaccagaccgccgctcacgagcggcggctggccgcgttcatggccgcgcttcgaagggacatcgctgcggactcgcgctatcggctggtgccgtccacccgggacggcgcggcgttcaaggtcatcggcggcattcagaagacgagcacgctggtgcaatgggccaaggtcgccgtgatcgacgtcggcgccaagaagctcgtgatggacaagctttacagcttccgcggcgacaacgatgaatcctgggagcgcgccgagatcttcctgtcccgcgagatactggccgcgctcgcaacgccagtgccggtcgcgctggcggtgttcgatttcgagctggaggatacgaccggcgcgtcggcggaggcatcggcgacttcagacgcgtcatacatggccgaggtctccggcagcgtacgcgaagcgctgggtcaatccggccgctaccgcatcgtcgatgtcagcggcgtgcgcggcgaggcggggaaggggcgtgccttgcgcgactgcggcggatgtgaggcggcgattgcgaaagagctcggcgcggatcagtcgctgatcggcgtggtgcggcgggtcagccgcaccgaatacacgctcggcttccaggtgcgcgatgccaggactggggcggtgctggcgcgcggcgacagcggcctgcgcttgggcgcggactattcgtggaagcgcggtgcggtgcggctggtcagggaccgattgatcgaggggcagcaggtcaacgacgctcctagaaagtaagctgcactttcatcgactgcgcgcggtcgctggcgagctcaaaggccgcgaccgcattctcgaacgtcatggcagccgtgatcaaaggtttgacgtcgatcaggccttctcccatcagccgcaccgccagctcgaactcccgatcgaagcggaaggtgccacggagctgcaattccttcgcgacgattgaatcgatcggcagcgtcatctcgccgccgaggccgagctgcaccagcgtcgcgcccggcctgagcaggtcgagcgcggtgcggagcgccgcctgattacctgaagcttcgaacagcgtgtcgaacacgcccttgccggcgcgccacggatcgagggctgcgccattggccgcgacgttgatggcgtcggtggcgccgagcttcttcgcaaccgcgagcggcgcttcggcgacatcagtcgccacgatctcggacgcgccgccgaagcgcgagaccacaatcatcagcgcgccaatcgggccgcagccggtgatcagcacgcgcttcccgagcagggggcccgcctgcttgccggcatgcaggcataccgccagcggctcggccaccgcggcttccgcaagcgagagcttgtccgcgatcggcacggcctgcgtcgcgtcgaccgtgatgaattcgcgaaagccgccctgcacgtgggggaagcgcatcgcgctgccgaggaagcgcatgtcgaggcactggttgcgcatgccttcctggcaatgcaggcactggccgcatggtctgctcggattgaccgcgacgcgcgtgccgggcttcacattggtggcgccgtcaccgacatcggccaccacgccggcgatctcgtgccccagcgccatcggctgctggatgcggaccacgccgaagccaccgtgatgatagtagtgcaggtccgagccgcaaatgcccccattggcgattttgacgcggacttctcccgggccgggcatcgcatccggataattgtcaatccggagatccttcggtgcatggatgacgacggcgcgcatggcttgctccctggacttcgagattacatcgcggcgatcatgccgccatcgacatagatgatctggccgttgacataggtggacgcgtccgatgccaggaagatcgcggcgcccaccagctcgtccggcttgccccatcgtttcgacgggatgcggcccatcagccagttgttgaagtcggcgttgttgaccagcgcctcgttcatgtcggtcagcatgtagccgggcccgatcgcgttggcctggatgccgtgctgggcccattccaccgccatcgagcgggtcaggttcctgatgccgcccttggccgcggtgtagggcgcgatggtgggccgcgccagctcgctgccgagcgagccgatattgatgatcttgccgtgcttgcgtggaatcatgcgcttggccgcctcgcggccgatcacgaaggcgctggtgagattggtctcgatcaccttgcgccactcgtcggtggtgaattctaccagtggcttgcggtgctggatgccggcattgttgacgacgatgtcgactgcaagaccttcgcggtcgaaacgctcgaaagcggcgaggatagccggctcgtcggtgacgttgaagggcgcgccttcggccttgtgccctgcgctgcgaaactcggcgacggcctgctcgacgcgcttgggaacgacgccgtttacaatgatcctggcgcctgctttggccatgccttcggcaatggcacggccgaggccacgagaggaaccggtcacgagcgcggtgcggccggaaagatcgaagagggacgtgctcatctggcgaaatcctcagacgttggagcggcgcacggtgagatcgctgcgctcgaagacagcaggcaggaggtcgacgcccaggccgggtccttccatcggatagacgtagccatccttgatggcaggcatcgtggtgacgagctcattgtaccagcccttgtagaaggcgcgcaccgattcctggatcaaggtgttgggctggctgaacgacatgtggatggcggcgatgaagccgatcgggccgatgcaatcgtgcggtgcgaagggtcggtgataggtctcggccatggccgcgatcttgcggccctcggtgaggccgccggtccagcaaagatccgccatcaccacgtgcatggcgtcgcggtcgagcatgtccttgtaggggaagcgcgagcccagcgtctcgctggcacaaacccagacgtcggtcgagcgcgcatactcggcgagcgcctggggcgagttcatgcggatcgggtcttcgtaccaggtcggcttgtagggttcgagagcgcgcgcgatctgcttggcagtcggcagattccatagcgagtgaagctcgaccatgatctccatcttgtcgccgacggccttgcggatcttctcgaacggctcgatcgcctgcttcatctgcgctgcgctgatgtagagccccttgttctcctgtgcggccggatcgaacggccagatcttcattgcggagatgccactctccagcaagctctcggccagcgcatcggcgcgcgtcatgaatgcatcgagatcctcgtaaggacccttggaggcgccgagattccagttggcaaccgggctgatattggtcgagcggacatattgcgtgccggcgcaggtgttgtagatgcgctgcttgtcccggcagaggccgccgagcatctggtgcaccggctggccgcagaccttcccgaacagatcccacagcgcgatatcgatggcggaggcggcacggtactcgacgccggtcgacgactgcgccatcggcaggttcagcatgtcgcgatgaatcgcctcgatgtgcaggggattgcggccgagcagccggcctgcaaaggtgtcgtggatctgcgcctcgactgcgcctgcgccgtaaaaggtctcgccgagtccgatcatgccggtatcggtgtggatgcggacccagatgacgttggagaactcttgcgtgcgcagtgtctcgatcgacgtgatcttcacggcaacaaccctcccgtcggggcgcataagcggcccttgtcgtcatttccgcgccatcagttgcggctgatcgcggagtcttacgcccgcttgtaatatatcacaacatgttttaaggggcgccaacagcgcactgtccacggtgcgtcgcaacgaaaacgcgggctgacgggaggatgagatggcacggcgcaagcgcgcactccaggtggtgaggaacgagggtgacaccggaggccggccgtcccgtagcaaccgtctcaacttcttcgagttggcctatcagaggatcgaagagctcctggttcattgcgagctcaagcccggccagttcatgaccatgctggaactgcagcaaatcaccggtttcggccgcacgccggtgcaccacgccgtcaatcgtctctcggccgacacgctcatcatcatccggccccgtcatggcctgcacatcgccccgatcgatctggcgcgcgagcgcatgctgctcggcctgcgccgcgacatggagcgcttcgtggtccgccttgcggccgatcgtgcgaacctgtcgcatcgcaatcaggcgctgcacatcgaacgtctgctgcgcgagcgtcgcgccagcctgaccctcgatgaattcaacagcctcgaccgccgcatcgacgcgctggtgctggaggctgccggcgagcccttcttggtgcatacgatgcggccactgcacacgctgtatcgccgcatcggctacatccatcaccgcttcatgccggggcaggcggatctgtcgggcacgatcgatcatcatctcgccattctcgcagctgtcgccagtcgccgcgtcgaggaagcggtcaaggcgagcgatgccctgatcgactacatgggcgaaatgttcacgggcatggaggcgggcatcgatccgcgcttgctcgattgcagcatcgagccgctgctcggcgcgtagtgagttttgcagagaggacaaaaaaatgtcaacgatggcggtgccacaaccgaccccgagcgaagccgcggtccgctacctcatcacgaactacagccccaagggcaacaaggtcggctggctgatgatggcctcgatcctggtcgaggcctgggatctctactcgatcgctttcgtgctgatcttcatcaaggaacagtacaatcccgatccgctgatgctcggccttgccgcagcgggcacgcaaggcggggcactcatcggcgcgctgctcggcggctggttgtccgacaagatcggccgccgcgtcatgttcctggtcacgatggtgatgttcatcgtgctcgctctggcacaggccttcgtgcctgatgtcgcctggctggtcgtgatccgcttcctgctcggaattccgctcggttcggacatctcgaccggctacacctacatcatggaatccatggccaagggcgagcgcgaggtcatgggcaatcgctggcagttcatgttcgcggttggcgaggttctgacaatcggcgtcatcgtgatcttcctcctggtcgacatgaaccacgagatgctgtggcgcgtgacgctgggtctcggcgcggtgccggcactgatcattctgatcatgcgccatgacgtgccggagacggcggtgtggctggtgcagaagggacgctaccgcgaggccaagcaggtcgcgcgcgagatgttcaacgacaatctggatatgctcccggatcgggatgtcgtggttccgaagaccagcacccgtgcgttcctggccgatctcaagaaggatccgatccgctggcgtgccacgctgtacggctggatcgcctgcttcgcgcaggcgagcgagttctcgacgttcgcgttctacctgccggtgctgttcgccatggtgggcgtctcgacgatcctcggcaacaatctggtcacgatggcactgttctcttttgctgcgttgtcgggatgggtcgggccgctgctgacgccgaagatcggccatcgcggcattgccattgcgggcttctcgatcgtgctggtctcgctgctggtcgccgcttttgcgctttacaccggcaacacgatgttgctgccgtttgcagccgccggcatgctctgggggcactattgggatgcatcgaactgcatgacgattccgaccatggtcgcccggccacaatatcgcggcaccgccagcggcttcgcctacatgttcgtgaagctgccgtcgttcctggcgatcttcctgttcccgacgctgttcgcggcgatcggacaggccaacgccaccctgttcgttgcaatcttcccggtgatcggattgctcgccgcgatcttcatcctgccggaagtctacggctacgagaacgactgacgaggcagggagtggtcgcggcgtcatcgccgcgaccggggggtatccaagatttcgcgccggcgattacgggctcaggaagatcgggtctataccggtcccatggccgagcagtccgatcgcctgcagctgagcgctgtggagatcgatctccacgatcgcgagcagggtgagcaagaccattgcggacacgaccagcagaggatgggccgtctggatgtggatctcgggcggtccggtgaggttccgaagcgcgcggcgcaagagggagctccgcgccaatgccttcgattgaatctgcatgacgaaccttccttgccgcgccgtatccacccgattggtgaccttcgcgataactgcagatcctagccgcagcctcgccggaagcattgacccaccgcaaacggctttacttggctccgaaagctgcgcttcggccgccactacctgatggccgctgccaacgccgcgatcagggcaggcggcgtcaccagcaggccgagcttgaggaacggccaggcgccgacctcgatcttctcccgccggagcgcgaccagccagaggatggtggcaagcgatccggtcaccgacaggttggggccgagatcgacaccaatcaggatggcgctgacgaccgatgcaggcagatgatcgctggcggcgaccgaaccggcgacgaggccgacgggaaggttgttggcgatgttgtcggcgagcgccgtggcgatgccgacgctccaggcggcctggggcaccgattgcgcgacggcctggtgcagcagggcgctgagctgtgcgatcacgcccgtcttcaccagcgcttccaccatgacaaagagcccaccgaccaacggcagcacgctccaggacacgccgcgcagtacgggcaaaggcgattgccgactgatcagcagcacgatggccgccgtgaccacgccgcagatgaaggtcggcaggcccagctgcttgtcccgcgcagacgcagtgacaagcacgacgccgatcgcaacgatgccgatcgccgtcagcttgccgccgcgcccgagttccgggtgcggcacgctgcgcgcgatcgtctcttccttgagggcgcggtgctgggtcaggcgcagcacgacataggtcagcaggatcgacgccgccgagggaagggcgaacaggcgcagccattccgtaagctgcggcatgcgcgcgccgaatacgacgagattggccggattggagatcggcagcacgaagctcgcggcattggcaatgaacgcgcagacaaagagatagggtaggggttttgcgccggccgcgcgcgtcgcggcatagacggccggtgtcagcacgatcgccgtggcatcgttcgagagcaacacggtcacgaccgtgccgacgagatagatcagcaggaacagccgctgcggcgagccacgcgcatattccaccgcaatcgcggctaggtaatcgaacaggccttcgagccgcgccagctcggcgatcagcatcatgccgatcaggaagagataaacgtcaacgcctttctcgatgcctgtcagcgcgtccagccagggcagcaaaccaaacagcagtagcgagccggcgccgatcacggcccagagcgcctcgggcaggcgaaatggccggacgatgacgcctgcggtcgcgatggcgatgatgctccaggtccagatggcatcagagggcacggtcggcaagtcgatctccagaatccggccctgactaacgcgtcccggggtgaaccgccagcatcaagacggcgacgtccatgctgtggtcacgacctgccaaacactcggctgtcgtgccggacaagcgcaagcacagattcgggacgacggcattttgccttgttcacattcaccgcgccactgacagcttctccgtgatcgccttgcgcaatatgcgcgagagcgactccacggaatagggcttctggatcagctcgaagccgcgatgggcgctttcggcgagcacgttgctgtagccgctggtgagcaccaccggcagccccggatagcgctcgcggataacgccggcaagctcgacgccgttcatgccgggcatgatgacgtcggagaacacgaggtcgacggcgaattcgttctcgccgaggatcgccagcgccgcattggcattggcgacccggcggacgacatagccgagatcctccaggagttcggtggagaagcggccgacctcatcgttgtcctcgacaacaagcacgcgatagccgcgcccggtggtcgccgcctcgtgggtcagcgatgcgacctccttgtccgtcgcggggctttgtgcttgcggcagatagatggtgaaggtggcgccttcgcctggcacgctcatcacagcgatgtcgccttcggactgttttgcgaagccgaaggcctggctgagaccgagcccagtacctttgccgacctccttcgtcgtgaagaaaggctcgaagatcgattcgagatgttccggcgcgatgccgctgccggtatcggtgatcgagatcgcgacataatcgccgccgcgcgccggttgcgcgcgcaggctcgggattccagagaccttgcgcacggcgatggtgaggtgcccttcgccatccatggcgtcgcgggcgttgattgcaaggttgatcagcgctgtctcgaactgggcgatgtcggccatggtgaagcagtcggcgtcctggacctccaccgcgatctcgatgcggccgccgaccagcggccgaaccagctgcgccacgccttcaacctggctcccgacgttgaatatctgcggcttcagcggctgccggcgcgcgaacgcgagaagctgtgcggtcagctttgaggcgcgctcgaccgtctcggagatggcgtcgacatagcggcggcggcgctcctcggccagctcgcgacggcgcaggaagtcggtcgccgaccggatgatggtgagaagattattgaagtcgtgcgcgacgccgccagtgagctggccgatcgcctccatcttctgcgactgccgcagcgcttcctcgccgcgacgccgctcggtgatgtcgaccgcctcgggcaccgcgccggtgatgttgccgtggcggtcgagcaccgggcgcatgccgaactcgaaatcgcgctcgccgacgggaaggcgcaggcgcatctccagccggaccgcttcgcctctcagcacggtgtggaaggcctcgcgcaccagtgcgctcatgccttctgtcgcgctgaaccagggcgtctcccacaatggctttccgatcacatccgaagagcttgccttgatgccatccagcgcggtcttgttggcgtagagcagttcacccttgaggttgacgaggccctggtactgattgctggtctccaggatcgcgcgcagccgcgcctcgttcgattcgagctcggcggtgcgttcggcgatgcgctgttccagcgtttcgttgagctgccgcagctcgatctcggcctgcttggccacggtgatgtcgtgggcgacgccgatgaagccgatatgcttgccggtcgggtcccagcggggctgcgattccgatcgcagccaccgccactcgccgcttgcattcctgtagcgcgcttccagcacgaaaggcttgagggatgcttcgccttcgacggattgctggagaacgcgcggcaggtcgtcgggatgcagcaccttgcgccagtcgaaatcgatggcctgttcgtagggcaggccgacgaaatcgacataggcccggttggcgaaggaccgcttgcggtcgagcttggtgacccagatcggcaccggcgcgctgtcggcgatcagccgaaaacgctcctcgctctcgcgcagcgtctcgcgcgccagcgcctggtcggtgatgtcgatatgggcgccaacgaggcggatggctcggtcgtccttgtcgcgctcgatcttggcgaccacccggatccagcgggtctcgccgtcgctggggcggacgatccggtattcggcgctgtagtcttcgctcgccccagcgagagcatcgaagaaatgcttgacggtggcgtcgcggtcgtcgggatggatacggttgacccagtcttcgtgcgactcgtcggcggcttcgggcggcaggccgtggatgatcaaatactcgggcgagcgacggttcttgaagccttcgcggaaatcgacctcgacgccgccgaccttgccaatgcgctggatgcgcgccaactcggcttcgcgctcctgaagtgcgcgataggcattatcgcgctcgcgcgcgacgtcttcgaggtgttggcgcagcctttcggcggcgacggtctcgggcaaggagtctttcaaggcatcggccgttgtgatgcggaagcgcacgtgccagaccgatattcacacagacggagcgtgatagccattgccgagaggacgtgtgtggcgggaaaaagcggatttgcaggatcggctaaagtacggcttaccaacgccggtccgtcaattttgttccaggaactggaacgaacagccggcggatgcgtcttcgcgaggcgcaataccagcttccatgaagctcccctttccgaagaggctaaatcttgaagctctttgtctgccaggcctgcggcaacgtcctctatttcgagaactatgcctgcgaacgctgtggccatcgggtcgccttcctgccggagaaggagacgatgtcggcgatcgagcctgacggagaggcctggaggatattggccagcaacggcgaaagccggatgctgtgccggaatgccgagtacgatgcctgcaattggttgatcgacgcggccgataccaccggctgttgccgcgcctgccgccacaatgggatggtgccgaacctctccgatccggcgcaactcgccggctggcgcgagttggaggtggcgaaacaccgcctgttctattccctgatccgctggcggctgccgctacggacccggcaagacgaccccgagcatggtctgaccttcaatttcctcgccgacgatccgcacagcggcgagaaggtcatgacgggccacgacaacggcctgatcacgatcgcgctgaccgagaccaacgatatcgagcgcgagcggcggcggctggagatgggcgagccctaccgcacgctgctcggtcacttgcgtcacgaggtcggacattatttctgggacgtgctggtgcgcgacggcggcaagcttgccgaatgccgcgcggtattcggtgatgattccaccgactacggtcaggccttgcagcgtcactatgccgaaggcgcgccggcggactggcagcaaaactacgtctcggcctacgccaccatgcacccctgggaagacttcgccgagacctgggcgcactacctccacatcgtcgacaccctggagatggctggcgagtttggcatggaggtgcggcccaaggtggaccgcgacggggagttgacggcccggatccggttcaatccttacgaggccagagacgtccaggcgctcatcgacgcatggctgcccttcacctttgccatgaacagtgtcaaccgcgccatgggcctgcgcgacctctatcctttcatcctgtcgccagccgtggtcgcaaagctgggcttcattcacacgttggttcgggacgtggctaagtccaagtccaacgccgggatggcgtaggcttccggggtcgccgcccggtcccaagcccgtctcggtcttgcgctggcacgctggatgcgggccggatttagaccgttgcctctggcccattttgatgtaccacgggagctacacggccatcccatgggcccaacggccaggggaatggtcccgcccaaggtcgagactcaagaaaagcatgttcaaacgcattctgatcgccaatcgcggcgaaatcgcctgccgggtcatgaagaccgcgcgccgcatgggaattcagacggttgcggtctattccgaggccgatcgcgacgccctccatgtcgaaatggccgacgaggccgtgctgatcggcccgccggccgccgccgagagctatctggtgatcgagaagatcgtcgaggcctgccgcaagacaggcgccgaggcggtgcacccgggctacggcttcctgtccgagcgcgaggcgtttccgcgcgcgctggaagccgccggcatcgtcttcatcggcccgaaccccggcgccatcgccgccatgggcgacaagatcgagtcgaagaaggcggctgccaaggcgaaggtctcgactgtccccggctatctcggcgtcatcgaagacgacaagcacgcggtgcggatcgccgatgagatcggttatcccgtgatgatcaaggcctccgccggcggtggcggcaagggcatgcgcatcgcgcattccaaggccgaggtcgctgaaggctttaatctcgccaaggccgaggccaaggcctcgttcnnnnnnnnnncggcggcaagggcatgcgcatcgcgcattcgaaggccgaagtcgccgaagggttcaacctcgccaaggccgaggccaaggcctcgttcggcgacgaccgcgtcttcgtcaaaaagttcatcgtcgatccccgccacatcgagatccaggtgctgggcgacaagcatggcaacgtgatctatctcggtgagcgcgaatgctcgatccagcgccgcaaccagaaggtcatcgaggaggcgccgtcgccgctgcttgatgaggccacccgacgcaagatgggtgagcaggcggtcgcactggccaaggccgtgaactacgactccgccggcaccgtcgagttcgtcgcggggcaggacaagagcttctacttcctggagnnnnnnnnnncggcaacgtcatctatctcggcgagcgcgaatgctcgatccagcgtcgcaatcagaaggtcatcgaggaagcgccgtcgccgctgctcgatgaagccacccgtcgcaagatgggcgagcaggccgtcgcgctggccaaggccgtgaactacgattccgccggcacggtcgagttcgtcgcagggcaggacaagagcttctacttcctggagatgaacacgcgccttcaggtcgaacatcccgtcaccgagctcgtcaccggcgtcgacctcgtcgagcagatgatccgcgtggccgcaggcgagaagctcgcgatcgcgcagaaggacgtcacgctcaccggctgggcggtggagtcgcgcctctacgccgaagacccgttccgcaacttcctgccctcgatcgggcgcctggtgaaatatcgtccgccggcggaagtgagcaagggcggcatcaccgtgcgcaacgacaccggcgtgcaggaaggcggcgagatttcgatccactacgatccgatgatcgcaaagctcgtcacgcatgcgccgtcgcgcgcggcggcgatcgaggcgcaggcgaccgcgctggattcgttctatgtcgacggtatccggcataacatcccgttcctgtcggccttgatgcatcatccgcgctggcgcgagggtaatctgtcgaccggcttcattgccgaggaattccccaagggcttttccgtgcgtgtgcccgaaggcgaggtcgcgcggcggatcgctgcggtctgcgccgccatcgatcacgtgctcggtgagcgtaagcgccagatctccggccaaatgggtggccgcgtcgtgcagcgcgaacgccgccgcgcggtctggctcgaccgccaggagattctgctcgaggttgcccgcgagggcgaagcgatcgcgatccgcttcgtccatgccgatggcgaggtcggcaatgcccatctgttgcagtcgccctggaagccgggagatccggtctggcagggcaccatcgatggccacttcatcgccgtgcagacgcgcccgatcgccaacggcattcggcttgcgcatcaaggcgtcgaggtgccggtctatgtctggaccgaagcggaagccgcgtccgcgcggctgatgccggtgacgactgcgtccgacaccggcaagaagctgctttgcccgatgccaggccgcatcgtctcgatcgcagtgtccgaagggcaggaggtcaaggccggcgagacgttggccgtggtcgaagccatgaagatgcagaacgtgnnnnnnnnnntctccaggtcgagcatcccgtcaccgagctcgtcaccggaatcgatctcgtcgagcagatgatccgcgttgccgccggcgagaagctcgccatcgcacagaaggacgtcacgctgacgggctgggcggtggaatcgcgcctttacgccgaagatccgttccgcaacttcctgccctcgatcggacgcctggtgaaatatcgcccgccggccgaagtcagcaaggacggcatcaccatccgcaacgataccggcgtgcaggaaggcggcgagatctcgatccactacgatccgatgatcgccaagctcgtcacgcatgcgccgtcgcgcgcggccgcgatcgaggcgcaggcgaccgcgcttgattcgttctacgtcgacggcatcaggcacaatatcccgttcctgtcggcgctgatgcatcatccgcgctggcgcgagggacgactttcgaccggattcatcgccgaggaattccccaagggctttgcagtgcgcgtgcccgaaggcgaggtcgcacggcggatcgccgcggtcggcgccgccatcgatcacgtgcttggcgagcgcaagcggcagatctccggacagatgggtgggcgcgtcgtgcagcgagagcggcgccgcgcggtctggctggatcgccaggagattctgctcgaggtggcgcgcgagggcgatgctatcgcgatccgcttcatcgattccgacggcaaggctggcaatgcgcatctgttgcagtcaccgtggaagccgggcgatccggtctggcagggcaccatcgacggccacctcgtcgcggtgcaggcgcgcccgattgcgaacggcgttcgcctcgcccatcaaggcgtcgaggtgccggtctatgtctggaccgaagccgaggcgacgtcggcacggctgatgccggtgacgacggcgtccgacaccggcaagaagctgctctgcccgatgcccggcctcgtggtctcgatcgcggtgagcgaaggccaggaggtcaaggcgggcgagacgctggcggtggtcgaagccatgaagatgcagaacgtgnnnnnnnnnngcgcgccgagcaggacggcacggtgaagaagatccacgcgagcgccggcgcgacgctcgcggtggacgcgctgatcttggagtttgcgtaggctccagactgcaatagtcgaccctcaccctgaggagccgcccctgcgcggcgtctcgaaagggcgaggccaccagccgggccttcatccttcgagatgcgcgcaacaccgcgctcgtcaggatgaggaattgaaagtgaggcaagtatggcctttcgttcccgccgcgagaaacttcgctcagtcctgtcggactcaaactgcgtccaccccggctcggtgtatgatgcgatctcgatccgcattgccgaggacctcggctttcccctcggcatgttcgggggatcggtcgcttcgctcgcggtgctgggcgaccccgacgtcacgctgatcaccctcaccgagcttgccgagcagatgcggcggatgtcgcgtgccgcaacgctccccgtgttggtggatgccgatcatggctacggcaatgcgctgaacgtgcgccgcacggtgcaggaactcgagatggccggcgcggccggcctcaccatcgaggacacgctgttgccggctgcttttggcgagacgaagacccagctgatctctctagaggagggggtcggcaagatgaaggcggcgctgggcggccgcagcgatccctctctggtgatcatgggccgcaccggtgcggccgcgatcacgtcgatcgacgatgcgatccgacgcgccaaggcttatgaagcggccggcgtcgatgcgctgttcttcaccggcatcaaggcgcgcactgagctcgaggcgatcgcatccgccacgagcctgccgatcgtgctcggcggcgtgccggaggagttgagcgcgctcgattaccttgcgagccagcgcgttcgcatcgctctgcagggccatgcgccgattgtagctgcgacgcaggctgtctacgacacgcagaaggccttgcgagagggcgcggcgccgaaaagcctcaagggcttggcatcatcggagctgatagcccgtatcatgcgggagagcgagctcagggcgctcagcgccgatgtccttggatcgaagaagtgaaccgggcgattctccaggtggtgatctgcgggcgcgtgcagggcgtcggctatcgggcttgggtcgagcagcaggcgaggacgagcggcctcgaaggctgggtccgcaaccgccgcgacggcagtgtggaagcgctgttcgctggtgcgccgagacacgtcgccgacatggtcgcgctgtgccgccacggcccgccgtcgtcacgcgtcgacagtgtcaccagcgagaccgccagcgcggatgacctgaatctgcgccgggccggagagatgttttcggtgctgccgacggtgtgacgctcgcaagaggattgaatcctcaccgtggcagcttggcgattgcttcgctcagctcgtggatctcatagggcttgcgcaggatcgggaaatcgccgcgcacgccggcggcgacatcgctgtaaccggtggcaagcaggatcggcagaccgggacggatctgccggaggtgatgggccaagctgagtccatccatcttgccgggcatgacgatgtccgagaacacgaagtccacggcgtcgttctcgatctcgcgcaatgccgcctcggcatcggcgacccggcgcacttcgtagccgagttgctccagaagaccggtgctgacgagcgcgacgtcgggattgtcctcgaccagcagcaccgtgccgctgccgcgaaaggacatcgcttccgcggcgtcccgtaccggcgcatccatgccgcgcggaagcagtatggtgaaagtcgtacccttgccgagttcgcttgcaaccttcaccgtgccgccggcctgatgcgcaaagccatgcacctgggagaggccgagacccgtgcccttgccgatcggttttgtggtgaagaacggctcgaagatcttgtcgagaacgtcggagggaattccgaggccggtatcggtgacatcgattgcgacgaagtcgccggcgaggggcggctcgttcagcacgacattacgcgcctggatcgtcaccgcgccaccgtccggcatcgcatcccgggcattgatgacgaggttgagcagggcagtctcgagttcggaaacgtcggccttgatcggccacgtgtcggaatgaatgtcgaaggcgagacgcacggaactgccgacccctgcgtcgagcacctcgcggatggcgccgacgcgttcggcgaaatcgatcgcctgcggattcacgctctgccgccgcgcgaaggtgaggagctggttcgtcagcgcggcgccgcgcttggtcgcggtctcgatcgcggacatggcgcgctcgagcttggggtcgctagtggcgctcttcttcaggatgtgaaggctgccactgatgatcatcaggagattgttgaagtcgtgcgcaaccccgccggtgagctgtccgagtgcatcgaatttctgcgactcggcgagctgcttctgcatcgcctcgagcttgagttgggcattgcgacgttcggtgatgtcgcgcgtgatcttggcgaagccgatcagctcaccgtcctcgtagatcgggtcgatcacgacgctggcccagaagaacgtgccgtccttgcggacgcgccagccttcctcctcgtatcggcccttttcccgcgcaataccgagcgctcgcgccggcttgccgttggcgcggtcggtttcggtgtaaaaccgggaaaaatgctggccgaggatctccccgggcgaatagcccttgatgcgctcgccgccaatgttccagctggtgatggtgcccttgggatcgagcatgtagagagcgtagtcggcgaccccctcaaccaacagccggaaactgcgctcgctttcgaacaagtctctctgttggttgagttttttcactattccagaccccgcctcgaccggaagaaacgctctggttggcgaaatgttcccgcgctctgggtcatttttgggcaacaatcgcgagcctgtacactggccgccggggaccaggctcagcggactgctagcgccgctgcgctccggaacgtcgcgacgatcgcccgcagcgccgcgagcttggcgggatcgctgaccttcgaatgcagcatcaccttcgagctgccgagtttcggcagcctgtgcgccggtccgatgtcgaccagcccgggcagtgcgatccgccgcgccagcggcgcgattgcgaggccggcgagcgcggcggcaaccaccgccgtgacaccgccgcccacgaaacgctcgcgccagccgatagcggccttgtcgagcgcgcgcacggccacggcgcggacgccgcagggtggggcgagtgtcgcaagcggcagcggcgctccctttgccagcgtgaagcgccgggacgcgaaccaaccgaactcgtcttcaaccagcttctcgccgccccggcggctgccttcctggcgaacgatcaccgcgtccagttcgcccgcgtcataggcatcctgcatctcgcgcgagaagccgatggtgacagcgagagtgaggttcggcgacatcgcgtgcagccgctcgagaagcggcaccagttcgggacccgccgcgtgatcggagatgccgatcgtgagcgagggcgcgactgaagcttcgcccgacagcgcgcgatcatgcgcctccaacagcgcgcgggcgcgatcgaggaaggcagcgccgtcggcggtgagccggactgcgcgcggcgagcgctcgacaaggcgtctgcccagcaacgcttccagccgctgcagcttcaggctgacggccgcctgcgtcgtgccgagcgcttcggcggctcgcgtaaagctctggaggtcggcgaccagcaggaatgcctggaccgtagcgatgtcgagggtcatggtcattatgatcgattatcactgatatcgtcatcgataaggtaccaggatgaatccggcaggtctagcttctcgccaacgccgcaagtcgcgcgacatctcgaggagaaccgccatgcccctgatcaccgtgtcctacaccacgtcccgccagtcgccatcgctcaaggccgacatcgcgaacgccgtgtccgagctgaccgctgagatcctgcacaaggatcccagggtcaccgccatcgtcgtgaagtcggtgaatgccagcgattggttcgccggcggcaggtcgctcgcggagcagaagctcgcaagctactggatcgacatccacgtcaccgagggcaccaacaccaaggacgagaaggcggcctatctcgctgccatgttcaagcgtatggccgagatcctcggcccgctgcatcccgagacgtacctgcatgtcgacgacgtcaagggcgacgcctacggcttcggcggccagacccaggagcggcgctatatcgccggcaagcttggcatgtccttcgaggcggcgtgatggctgtcgtcgcgggtgaggaatctcacccggtacctgaaccgtgtggagcgcttccaagagcgcggaagctcagaccacagcttcaggcgccggagctgtggtcggtccgaacagctgctcgaatgcctgccggagtgcgatgtcaacatcggccatggtcgcgagctggccgaggtcgaccagcgaggtgacgccgtagcgggcgtcagtgacgccgcaaggcacgatgccggcgaaatgcgacagctccggctcgacattgatggcgatgccgtggaaggagacccagcgcttcagtcggacgccgatcgcggcgatcttgtcctcgtgcccaggtcccttgtcgggccgcttcacccaaactccgacgcggtcctcgcgccgctcgccgcggacgttgaaggcggccaacgtgcgcagaatcagctcttcgaggctcgcgacataggcgcgaacgtccggccggcgacgtttgaggtccagcatgacataggccacccgctggccgggcccgtgataagtgagctgcccgccgcgtcccgtcgcgaacgtcgggaatcgggcctcgagcaggtcggattccttgcctgaggtgcccgaggtgtagagcggcgggnnnnnnnnnnnnnccggggcctcgcccgccgcaatcgcggcgacgcgggcctccatggccgcgaccgcctccgggtaggggacgggcgcatccgagatccgccactcgactggctcgccgcccgaggcggaaaacgaggtcaggtccagcgcttcacgccgatcctggctggggttcttgggggaattaaccattggctaaccataacgtggtgatgatcgcaggcgcaaatgccagtcttatgttgcgacggtcctgacagtgcccactctcgataaagtcaccgtggatctcatggtcgtcctggggacgaccaccatgccgatccatcaggtattgcgtctttcccgcggcgccatcatcgaactggacgcaactgaggcggacgaggtcaaggtgttggcgaacaatctgccggtggcctccggggtcgtcctggtcgaccgcaaccggatcgccgtcgaggtcaagcagatgctgccgcgctcgccggggacccggtaaaagcccagggcacgcggtggcagcctttgcacgggacaccggcttggtcacgagcaaatggccaattgaggcaggggctggaactttcctgcaaagcttgtggaattcagggcctctgcaggcttgtacccctctgatggatttgttagatcggcgccgttgatccggccggccttcaagcctcaagccggcatccccaaagcgctcgtggcggaactggtagacgcgctgccttgaggtggcagtgagtaaaatcgtgggggttcgagtccctccgagcgcaccaccggcctgtatttcggttgaaatcgtcgcgatgcccggtcggcgtgcggaacgcaggcctgcgttcagtgcgaattcctcggtctcaaacgctcgccttgggcgcgcgctcagccgccctctgcgagctagttgtgatcgtttcgtgcgaccttcgaacgccacctgcattccgtcacggctccctgtcagccagagggtggatcgacgtcctcggctcggtctgatcatcgtcttgcacgccggcgctggtgaccggtgggaatatgctgtcgtagatggcgcgagcttcgcggatcaggcgctcgcgttcgagctcggatttcgatacgaatcgaacgacgttttccatgggggtctcgctaggcagcgtccgcacggcgccaaatcgggaatgggtccgggagctttgcccaatccgcgatgttcatggcaggtcttccaggcacgaggcatgcgtccaggcgggagcggatcgagtcctcgtccatgttggtgccgatgaacacgatctcctgacgacgatcgccatagatctcgctccagttggcgcgcagccgcgtccgccaggctggatcgtccggccatcgttccgttggcacgctcgcccaccagaaaccgagcgcctcagtgcggatgatcgagcctgcctggctgatttcgccgagccattgcggtcgggttgccagccagaaatgtcccttggcgcggatcacccccggcccgggctgtttgatgaattggtcgaatctggcgggatcgaaggggcggcgggcacgatagacgaaatgcttcacgccgtattcctcgctctccggcatatgatcggcgaagccatacagctctttgaaccagagcggatgctgctgcgccttttcgaagtcgaaccggccggtgtcgaggatgcggtcgaaagggacgcggccgtaattggcttcgatgagatcggcctccggattgagcgcgcgaatgatcttgcgcgccgcctcgcgctgcgccggggtggaatcatcgactttgttgagcacgatgacgtcggcaaactcgatctgctcgaccagcagatcgaccagcgtgcgcttgtcgttctcgagcgcctgcccgcgttgttcgagaaagtcgctcgacgaatagtccttgagcaggttcaccgcgtcgaccaccgtgaccatggcgtcgagccgtgccacgtcggagaggctgtcgccgtcttcgttgcggaaatcgaaggttgccgcgaccggtaacggctcggagataccggtcgactcgatcagcagataatcgaagcgcccgtttgccgcgagggggcgtacctccttcaggagatcgtcgcgcagtgtgcagcagatgcagccgttagtcatctcgacgagcttttcgtcggtccgggacagcttggcaccgccatcgcgaaccaggtccgcatcgatgttcacctcgctcatgtcgttcacgatcaccgccaccttcaggccgtgccggttgttcaggacgtggttcagcaaagtggtctttccagccccgaggaagccggacaaaacggtgacggggagtttttgcatggagatcaaagagccttttcaaggggatacggcgtcggcgctgggactgaggcatcgggaccgaagttgttatgttataacataacatttgctggctgccagtctgtcaagtcgcattcgaggaaccatcccagcatggtgactggtcgctacccacttcagccacgccaagtctttcccgatccggcgagcgagggtccggattgtgcggtccggcacgtttgggcggcgaagccttcgagcaccgcgcgcgctgagaatgtcagggtggggaagcgcagcccggcgtgaaggcgcacggggcaaattccgagtctgccgctgcttcgccgcggttcggaaccaaagcctccgtaagcgcattcgcaacgggtcgcaaaatgcgcctgacggtggaggacgatgagggacagcacgtcggaggtggccccaatcagggaggccgttcacctctgcatcgacatgcagcgcattttcgcccccggcggtctgtgggcgacgccctggatggaacgggttctgcccacgatcgcttcgatcgttgcgcgccatcaggaccgaacgatcttcacgcgcttcatcactccgcaggatccagaggatcgccggggccagtggcagagctattttcggcgctggccgcaggccacccgcaggcatctgccgccatccgctcttgagcttgtgccggccttggaccggttcgttccgccggccgccgtcatcgacaagccggcttattcggcgttcagcaatcccggtcttgcaagcctgctcgttgaaaagaaggtcggcaccgtcgtgatatcaggcgcagagacggacgtctgcgtgctctcgacggtcctgagcgccgtcgatctcggcttcaggatcgtcatcgtcgaggacgcgctgtgcagttcgtccgacgtcgggcacgatgcgctcatgacgatgtatcgtacccgctttcatggccaggttgacctggtgacagcggaggagctggccgagttctggcgggagtaggaagcggaacacgatccgcgatcgcagaggcgcgcaacacgctcccagcgttcaagcgaccgcgacgtcagcagtcatcgagttcgcgtgcggcagccgcgcatcgtccgtgccggatcgaatgctcagataggccgggtcgaagccggcgagccgaaccaagcccggccagtccgtgatcgtcaaggtcctgccttgccattgcagcagattggcgcggcgcagctcctggatagtgcgattggcgtgaacgggggagatgctgcaggccgcggcgaggtcggactgggtgaagggcgaagacaatctgaggtctctggcaaggccgacgatttgcagccgcacggtgatctcgcatagcagatgcgccacgcgggtcagtgcgtcccggctgccgaggttcaccgtccagttgcgctggatcgcgtgttcggcgaggagcatcaacagcatggcctgcgacatcgccggcgaacgcgctgcgacttcgcggaagaagcggtgcggcacgagggcgacgatggcgggtccgagcgcgatcagattgccctcgatgcgcgggcgatggagggtgtgcaggttggcgatgtcgccgggcacgcagatcgcggtgatctgcccatcggcgctctcgtggttctgccaggacagatatccttggagcaacaggcagcaatgggtcgcctcgtcgccgtgccgcaggatgatctgatgcgtgccgaaatgcgcaatgctgctcggcatgtccgcaagcaggtcgagatcgtcggtcgtcaattcgacgaggctcgtcagccgatcggcgagtttcgagaaagcaaatcctgcctgcatgtcacgtccgattgccaacccccgtgtgcgacattgaccgaggagggggacaggaggcattaacctttgatacgtttgctccgaatgcgagcggcggagcgagacaaacagccggaactcgcaatgcccgcgcggctcgcccacccaaatctctcaattgacgttgtcgccgaacatgttgcgaaccgcggtggtaacggcggcaacgccgcttacgccttgcatcagcccaatctcgccttgctgctcatggcgaatggcgtgggccatgacgcgcagacgcggatcgccgctgcttcgccacatctggtcggccatcctgactgcaccccggtgatgcctgctcattatctcgacaaacagcgcgtcgaactggtccggcggcgcagtcctgatctgtcgcatctcggccggcaccagaaagccgggcatcgccgcacgctcctccgtgctgcagtctggcatctccgtgtcgaaccagctcagccaccagttctcgaagatccggttctcgccgctttggctcgcgaccatcatcatcgcgagctttcgcaggtgcgggtcctgcgcgcgctccgcgccaacccgcgccagctcgatgccctgggcatgatgcgcggtcatgtgacggatgtaggtctggtcctgatccctgtcgcggcccatccatggcagctcgtgaccatgactgccaaagaatgcgatggttccgagcactacaaccgcagccagcgcgccggtgatccaggcgttggtgaaccgcacgtcgcgccgcggcgcattgccgtgtctccagcgcaggcgggcgaacagaggatacatcacggccgaggagccatggacaagcaggccgatccagtagggctgctgcagcgtgaacagcggctgccagaacggaaacagcggcaccagcacgaaccattccatgccggaagagaatacggcccagggcagcgcgagcaacaggatcgtcatcggccgcaagtctgcggtccagcgcccgagcacgccgaagaaaaccagagcccaggaaaaatccgcccattggtgaaaggcgatcccggtcaggatcgtgctccaggatggctcggagctgatcgcccagtcgcgcgcgggaatggcggcgaccgtcatccagtcgaccgcggcgtcgcggccgatgcgggcggcggagagctggctgacgatggtggagaaagtgctgctgatcaggccgagctcggcggcggcgatccagctcgaacgccgccgctccccggtagcgggtcgcggtccactgccaattgctggtcgcggctccgcgttcacgtcagctgcttgagcttcttcagcggattgagctcgctcggcttgtcctgttcgtcgcgcccgcgctcggcttgcgccttgccctcatcgtggagatcctggtcgccgatgatctcgccgacagcctgcttcgtcttgcctgcgatgcgttgctgaagacccttggtcttgcccatgagctgccttccgatatgtctgcctgcgggctcacgccgctggccccggcgcctgaacgggggcattgggcaccggggctgcggtttcgtccaaattgcctccggcggcgggggagacgccgaaggcgttgatcagacgcgctggcgcccggatggttcctgcttgcgatcaccgaggctcgagcgcgatgatcacgccttcgttgcctcgaagcaggatcgaagcgtcagccgacggcccggacggccggtccagatgcgtcgacatcaccaggcgaccgcgaccttgccaatggagttttcgcggctcggctgcgatgttgagcgcgaccagaatttcgttgcggccgtcgatgcgtttgtaggcgaggacatcgttctgcgagcgcagcggttcgtaagcgccgcatcgcaggccggcatgctcgtgccgcaaggccatcagcccgcgaaacagcgccaggatcgaccgctcgtcgcgctgctgtacggcaacgttggccgcgccatcgggtggctccagcggcagccagggatggcccgtggtgaagccgccgtcgcggctgtcatcccatcgcatcggcgcgcgttcgggatcgcggcacaaaccatatccgggcacgagcttctcgaagggatcgcggacgcggtcggacggaatggggacgcgcttgcggccgatctcgtcgcccatgaagaagaacggcgttccccgcagcgtcatcagcagcatcgccacgacacgcatctgcggctcgccgatcttgctcgcgatccgctgcttgtcgtggccgccgatgacccagaccggccaggcatgatcgggaatggcactcagataggcatcgatcgtcgcctgcagcgacggggcgtcccattgtgaatcgagcagggcgaaattcaggggcaggtgcaaccgcggccggtcgtttccgtagaagtgcccgatgcggtcggtcttgccctggacttcgccgcacagcatgcgcccaggataggcgtcgatcacctcccggatgaactcgatgcagtccatcgtttccggtctgtcgtcggtgaacacgggtgtctgccgctgcggcggcggcttgccctctgcttgcggattcggcggattgtcgcgcagcagctcgtccttgatcaggacggcgctggcatcgacgcgaaagccgtcgacgccgcgatcgagccagaagcgcatggcatcggcgatggcggccctcacgtccggattgcgccagttcaggtcgggctgctcgaccagaaaggaatgatagtaatattgtcgccgcggctcgcaccattcccagccgctgccgccgaaccggctcagccagttgttgggcgggccgccgttctcggcaggatcggcccagatgtaccaatcggccttggcgctgttgcgcgagctcgagctctcgacgaaccatgcgtgatcgttcgcggtgtgattggggacgaggtcgagaacgagccggatgcccgcggcgtgcagcgcctcgaccaggcggtcgaactcctcgaggccgccgaaggcggggtcgaccgagcaatagtcggagatgtcgtagccgaggtcgcggaacggactcttgtagatcggcgtcagccagaccgcgtcgacgccgagccacttcaggtagtcgatgcgcgacatcaatcctgcgaggtcgcccttgccgtcgccgttcgagtcctggaaggagatcagcgcgatctcgtagatgacggcggattcccaccacgccgtttcgtcacgggacgcgacgctcatcgccttgcttcacctcgctacgaccggcatgcgctgcgatctgccttgccgcagttctggcgttctcgatgcccttggggaagccgctgcggttcgggtaaagcttgcgccgtgcatcgcgagccgggcgtcgcggcttggtgtcctgtgcggcccgatagtcgagcacggcgataccgccgaccatcagcagcgccagcgcgatgttgcccttcttgggattgtcagccgtcagccccgatagcaacgcggcggcatcgaggccgtcgccgccgacgcgggcccacaggccggcgttcttgtcgaccgagagcgacatcacgccggccaggatctcgcgcacgccgaaagcgcggaccagcgtctcatggccttccatgccgaccgcttccgtgacgcgtctcggcgcaaacaattcgaaggcgccgaggccgatgctgaaccagccgagcgcccgcgcgagctggtcggcggactgcttcaggctcggcccgccctcgacgatcttggggtcgcccttggtgcgtacgatgttggagaaatgaaacatgagtctgctcctcagggcttcagcacgaccttgacgcaggaatcacgcttgtcgcggaacacctggtacatctccggtccctggctgagtgggacggtatgggtgatgacgaaggacggatcgatttcgccttcttcgatgcggcggagcaggtcgtcggtccagcggttgacgtgggtctggccggtccgcatcgtcaggcccttgttcatgaacgcccccatcggaagcatgtcggacagaccgctgtacacgcctgccaccgagatgatgccgcccggcctgcagacatagatcatctcgcgcagcacgtgcggccgatcgctctctgccatgaccatctgcttggcgcggtcgagtagcgtgtcgggcagggacggcatcacgtgcgattccatgccgacgcagtcgatgcacttttccggccccttgccgtcggtcaattcctggagccgctccaccacgctttcggtctcgaagttgatcgtggtggcgccgccggcttccgccatgctgagccgctcaggcaggcagtcgatcgcgatcacctggttggcgccgagcaggagggcgctgcggatcgccatctggccgaccgggccgcagccccagatcgcgaccgtgtcggtcggctcgatgtcgcattgcacggcggcctgccagccggtcgggaagatatcgctgaggaacagcaattgctcgtcggggattcccgcgggcaccttgatgtgggtggcatcggcgaagggcacgcgcagatattcggcctggccgcccggatagccgccggtcagatgcgtgtagccgaacaggcccgcggtggtgtggccgaacaccttgtccgccaaatgacgcttgcggttggtggtctcgcaaactgaaaaattaccgcgcttgcactggtcgcattcgccgcaaatgatcgtgaagggcacgacgacgcggtcgcccttcttcagcttgccgttgacgcccgagccgacctcgaccacttcgcccatggtctcgtggcccatgatgtcgccgggcagcatgccgggaatgaagttatggaagagatgaaggtcggagccgcagatggcgcagctcgtgaccttgatgatggcgtcgcgcgggtcctggatctccgggtcggtgacggtgtcgcaccggatgtcctccttgccgtgccagaccagcgccttcatctccgtcctcccgtttgaaccagctggcttctaagtccgggaatgaacgatggttgctatcgtcccgcgcaaattattcgcactgcgcaaaataggaacgagagggcagggcagcgattggaggtcatcacctcgattctaggaatgtgcgcatgcccgccaatcaactcgccatcgtcacaggcgcctcaaccggtatcggcttggaactcgcaagatgctgtgcccaggcaggttttaacctcgtcgtcgccgcggacgaaccgcagatcgagcgggtggccgtcgatctgcgccgcctcggtggaagcgtggagcctgtcgaggccgatctcgctacgaccgagggtgtcgacaagctgtgcgcagccgtcggcgaccggccgatcgatgcgttgctggccaatgccggggtcggcctgggcaaggcctttctcgaccaggactttgccagggtgaagcacctcatcgacaccaacatcaccggcacgctgtatctgatccaccgcgtcggcaacgggatgctccgccgcaatgccggccgcatcctgatcaccggctcgattgccggctttatgcccgggagtttccaggccgcctacaacggcagcaaggcattcctcgattcattctcgttcgccctgcgcgaggagctgcgggacagcggcgtcaccgtcacctgcctgatgccgggtccgacagagaccgagttcttccgccgcgccgagatgatggacactaaggtcggcaccgaaaagaaggacggcgcctacgatgtcgccaaggtcggcttcgatgcgatgatgcgcgggcaggccgacgtcgtcgccgggatgaagaacaagatccagaccacggtcgccaacgtcacaccaaacgagatgctggccaagcagcaccgcaagatggcggagccgggcacggcaaagtcataggtttcgtgcgcgctttggcggcgttcgccgcggcggcagtctcgaattcgttcaggtagggagagacgattcacacagcttaatgcgcagcggtccggtagcggtcacattttgaccgatggagaaagggggcagcgatggctatgaatcgtgttgaactggcctttatcgcgaccgctatcacgggtttcctcgtgatgctggcggcgctcgtctggatgatgatgagctgacttggggaggttgccgccttgcgcgtcgcgctaccttacgccgcagtcatcctgtgcctggtcgtgacggcctggcttgccttcgcgcatttgttctgatcgtaggtcggcggactcggggccgcgggcttgtccggtcgacggcgcgagcgagctgcgcagatcgagcttccttctattcttgtgctgcgatgcaggccaaatgacacgcctcgtgcttggtcacaccctgggctccgcgatgagcccagtcagcttctgcgccatcgcgggaagatcgatcggcttttccatcagcggcacgtcctgaaactccggaccgagcgcgactttgtcgtaccccgtggtgaagacgaacgggacgtttcgcgctctcaattcgcgggcgatcggaaagaccatctcgctgcggatgttgacgtcgagcacggcggcatccaggacgctgccgtcgcgcaggaccctgagcgcgtcctcgaaatcaccgaagggccccgcgatctccgcgcccattgcccggaatgtcttgccgatgtcatcgacgaggaaatactcgtcctcgaccacgaaaatgcgacgccccgcgagcggtgcgccccggtgcgaccatgccgtcatgctgtcaacctcctaggaacataaaacggcgctccgccttggtgcaaactgcaaacgatgcaatcggaggcgagttccatgagcaaccgtgacatcatagtcatcgggggctcggcgggagccactgcgccactgaagcagattttgggccgtctgcccgccgacttgccggccgccgttttcgtcgtgctgcacatcccggcgcaaggcatcggcattctctccaccgttgccagcagagccgggccgcttcccgtgcgccaggcacagaacggcatgaagatcgcgccgggccggatctatcttgccgcgccggaccatcatctgctgctgtccggggatcacattttcctcggccgcggaccgcgcgaaaacatggtgcggcccgcgatcgacgccctgtttcgctccgctgccctctaccacggaccgcgcgtgatcggcgtgctcctgagcggactgttgtcggatggcgcggccggcctcaacgccatcaaacgctgcggggggatggccgtggagaaggaccccgcggacgcaatctcagaggagatgccgcggtgcgcaatggaagcgacgacggtcgacctctgcgttcccggcgccacaatgggtgacgtgctgtccgaactcgtcagggagccggccggcgccgccctggccatcccgcccgagatcaggctcgaggtcgagatcgcggccggggagcgcatcggcagcgacaatctggtcgcggttgcggaccctgtcgggctgacctgcccggcgtgcggtggcgtgctttcgaaagtcaaggacgcgcgccccatgcgcttccgctgccaggtcggtcacggcttcacggccgatgcgctcgccaaggagcaggagggacgcgtcgacgaagccctgcgcgtggcgctgcggatcatcgaggagcgggcagaactggtgcagcggatggcagccgatggtcggcgcagcggtcgcgctgccgtggccgagatgtacgaggccagggcggtcgaatatcgcgaatacgccgacatgatccggcgcgtcgtgctgaagtcgctcgaccgtcccaacggcgaacgggaagcttgaaggcttgctatggccgtctcccttgccgaacgcaccgcacagctcgaagccgagcgaggtctgctggtgaaggccgatcaggacatcgaggagggctggcggcgcatccacgatcaggaagatcgggttcgtgagctcatggctggcggccacgatacgtgccaggcggagcggctggtcagcctgctcaagcaaaccgtggtggagtgggagcggcaccgtgttctgatcgcggagcgggtcgaatatctccgccaggaggtcgcggcgggatagcacgcaaaggcatctctcctgaactctgtgctcagctcggatatggcgttgagctgccattccgctactggcgccagcgctcgttctccgccagcaggcggctggcgtctgcgttggcgcgatcggcgcgcctgatcagatcggcaagctcctcccagattggcattgcgggttcctccgctagcgccggcgagtttggacgcggcaacggagctgacgacgccccaagttcagggacatttttgcgtttaatgtgttgggataatatcgtttcctgttatttgcagaggccggggcgccattggtcccggagcgaacgagagccaccagagccatgcatgacgtcggcgaccagccggtccagggagagcgccagatcaagactccgctgatcataggggtgggcgcctcgcccggcgccctggacagcatcgagcgcttcttcagcaggctgaccatcggatccgatcaggcgatcgtgctggcgcttcagaaccatgaagccttcaacgagcggcaattgcgcgagatcgtgcaggcgtccaatggcggcaagctcaccgatatcagtgacggccacccgatcgaaggcggctcggtctatctctgcccgccgtcgatgatcaccacgatccagagcaaccggttcgcgctgcgcaaggcagagcaggcgcccggcgagcgcgcaacgatcgacagcttcctggtctccttggcggaggagcgcgccgagcaatcgatcggcgtcgtcctggccggcaccggcggcgatggtacgctgggcaccgcggccctgaaagaccacggcggtcttgccatcgccgagaaagtcgcagggcttgatgagcctgagcacctgcgcgacggcaacacgcccgccgcgatcgccgactatgtgctgccgccggaggatatcccggagcatatccaggtctatgctcgtcatctcaggcgactggacgagaagcagggcttcgacgaggttctggcaaccgccgcgacctcgctgttccgcatcgccgatatcctgcgcagcaggaccggcaatgatttccacggctacaagcagaacacctttctgcgccgcgtgcagcggcgcatgcaagtggtgcggatcgacgacatcgctgcttacgccgatttcctgcgcaacgacaacgacgaggctcagcacctcttcaatgacctcctgatcggtgtcaccgaattcttccgggacaagcgcgagttcgaggtgctggaagaccagatcatcccgaagatattcgagggcaagggagcgggccagcaggtgcgcgtctgggtactcggctgcgccacgggcgaggaggcctattcgatcgctattctcctgcgcgagcatatggcgcgcatggattccgtgccgcaggtccaggtcttcgccaccgacatcgatggacgcgcgcttgcgaccgcccgcgtcgggcgttatcgcaccaatatcgaggcggatatgaccggcgaacgcctgacgcgctggttcgtgcgcgagggcgacacttatagcgtagtgaaggagctgcgcgagatgtgcatcttctcgcagcacaacgtcatcaaggatgcgccgttctccaggctcgacctcgtttcgtgccgcaacctgctcatctatctcaatgccgagttccagaaccgggtcatcccgctgtttcatttcgcgctgctgccggagcgctatctattcctcggcaattccgagaacgtgacccggcaccccaagctgttcgcgccggtcgaccgtcgcgcccggatcttcaagaagctggagaccggaacccggctgccgcctgaatttccgattacgaccgcggccggccgggtgccggtcgaggtgccggcaatacgctcgttcggctccgacgtcggcctggagcggcgcgcgcagcgcatcgcggagcgctatgcgctcgcctatgtcattacggacgacaatttccaggtccagcatttctcggggcgtaccggccgctacatcgagccgatggcaggcgctgctacgctggacctacttcagctcgtgcaccgcgatctgcgtctggagttgcgtaccgcgctctgcagcgccgccgaaacgaacgagcccgcccatgccgagcaggtgcaactcggagtgaacggtcaacgccttctggtcgacatcaccgtcgagccgatccaggacggcggcggggaccagcgcaatttcgtcgttctgttcaaggaaggtccggtgcgaagcgtcgaagccgatcagagcggcaccaacgcgttggtgcgcaccgagcaggtggagcgcctcgaaaacgacctgcgcgccacgcgcgagcgccttcaggcgaccatcgaggagctcgagagcaccaacgaggagctgaaatcctccaacgaggaatatcagtcgctcaacgaggagcttcagtccgcgaacgaggagctggagacctcgcgtgaggaattgcagtcggtcaacgaggaactgacgaccgtcaacggcgaactggcccaccgcgtccaggaattgacgcgtgctaccagcgacctgaagaatttcctcgaaagcacgcagatcgcgaccgtattcctcgacaatgatctgcgggtcatgaacttcacgcctgcgattacgcagatcctccaccttgtcgagaccgacactggccggcccgtcggtcacatcaaggcccgcgtgccgatcgaggagctctatgatgacattcgtcgggtgctgcgcacgctcgccagcgtcgagcgcgagctgagcgcgccggacagcggcacgcgctacatcgtgcgcatcctgccctatcgcagcatcgacaatttcatcgccggcgtcgtcctcaccttcatcgacgttaccgcaatcacccgtgccgaagagcgacagcgcctgctgctggccgagctccagcaccgcgttcgcaacacgctcggcgtggtgcgctcgattgcgcgacgctcggcggaaacgagttcgaccgtggaggagtatgcctctcatctcgatggccggctgaacgcctttgcacgcacgcaggcgctcgtgactcgagatcccgaaggcggcgtcgatctcgaatatctcgtgatcgaggagctgcttgcctacaatgcccgggaaggcgagcagatgcgggtttcgggaccgaaggtgcgcttccagcccaaggcggcagagactttcgcgcttgcggtccacgagctcgccaccaatgctctgaaatacggcgccctgagccagcccagcgggcggatcgaggtaacttggcgtgtggacgagagcatcgagccggcggagctgctgttcgaatggcgagagcgcggcgggccacccgtgagcccgaggccacggaaaggattcggtaccgagcttctggagcgtacgctggcgttcgagttgaaggggcagaccacgatggtgttcaatccgttagggctgcaatgcaccatcgccattcccctgagcaagcgcgccttccatacaccggtggttgccctctgatgccgttgtcgacagccgatcgcagcgttttggagccggtcgttcgccggctgggcgcgctcaggacgttgtcgaccgaggctcgggcatcgctcgaacttgccgttctcgacggtctccagcgggccggctcgggcgaagacctggtaacggagagtgatcccgtcgatagcgtccgggtcctgctgtcgggctggcttggccgctacaagatgctggaggacggccgccgccagatcgtcaacttcatcttcccgggcgagagctgcgatgcgcacgcctacctgctgggcgagatggaccattcgatcatgaccctgacgccggtagtctatgccgagataaagcgcgctcgcttcgagagcctgctggcgaaaaacccgacgctgtctgaggctttctggtgcgagacgcttctcaacaatgcaatccagcgcgaatgggccatcaatctcggccgtcgtgtcgcgctcgagcgcgtggccaatctgttctgtgagatattcgagcggctccgccccgtgggcatgatcgaccgcaattcctgcatcatgcccgtgacgcaaatggatctcgcggatgccacgggactgtccgtggttcacctcaatcggacacttcaggagttgcgtggggctgggttgatcgtgctgcgcgagcggacactgaccatcccggaccttgatgcgctcaagaacgcggcgttgtactcgccgagttatctgcgactgtatcgaggggctgaaatgacccgatgagcccggcgtccttcgcgcgggtttcgtcgccgcaagttggtccggccggaagcgtccttacacgtcaccacgttttgcgacgctgctctcctggtgatcatcaccttgtccgtttggtaagggctcgtgagttctccggccgagaaacgtatccggcaggggaagctccagagcttttcgtgcctcgcgaatggcgtcgcgaacctgctccacgtgcttctcgtccgactgcaacggaaaatggatttgcttcgccatcaggcgctccccgagttacgcaggcgggagcaccattggtctctcagccaccggcgcctacgggcagagcctcagccggtgatggagtgaccttataccagccgtggcgtttcggcgagcggaaacggggcgccgcctggcaattcgcatcccggtcaccggctcttggttgaagaagcgccgcacctgttgcaagcacttgatctaggttagttctttgagctttttgagccattggctcgctttgagtaacctatgcaagagaacgcaagcgagactcgtcgcacgatgcgggatgcctgatgccctgtttgcacgctccgcacgcgctatcgaagagagccgctccctccgggagcagcacaggcgagatgcggaccactaccgcgagaccgtgaacgatttgcgtttggcgatcatggacagcgcgatgcttcgctccgagctcaaggcgcaccgggacaacgagaaaccgtgaccctggtctttttgtgtggatgcgcaacccttgtccgtctcgcgacgttgattgctcgtacggccgtacggccggcgcctcatcgacgtcagcacgcagtggcgcgctcggcctcaagtcccaggagaacgcctgatgacgcgacatcgattcaagcaagtcgagaatttagagacgcgcttggccgcggaagctgagcggctacgcgaggaagccaaggcgcttccgcccggcgcggcgcgggacgccacgttgcgcaaggcgcgtcaggcggaaacggggtctcagatgagcgaatggctacggtcaccgggcctgcagccgcctcactgagggcgggatgcccgcagcacgcggcgggaacgggttagatctcggcgcgtaacgatgcgctgatgtcgtgggcagaaacctgaaaatgagcgccacgtccatcgtccccgttgcgtccggttgtcgccccggcggtgcgtcggtcagcgccgtttcgcggctttggttcgccggttgtacggcgagcggttgacgggtctcagagaaattccttcgcgttgcgccttgctccgaatggccgcgaccgggcgttgaagcttgatgctcatcacgccggttggcgtgttgcctttcgcaagctgcttaagcttgctcacgtccgcaggagtccaaggctgccgcgcccgacgcttgtacgcgggatttgccttgcgcggtcccttgcggccgatcggtgagcccggccgtttccatgctgcttttgccatgatgatcctccttcaagtcgttcttgaacatgcgaatcagcatttcggttccgccgtatctggtgaccgagagccaagccttctcctcggcaaaatctcgcgccgttaacttatggaaatgctggaaccggaagtcgcggcggaagctacaaacgcgcttccggaactgggccgccccgaccggcagcgcctttgactgacaagcgacttggggcccggcgccaacctcctgccgggccagctttcttcaatcccaaatccaatgtgaaagcccgatgaccgccaaacgtaaccgcaggaaacagacccaatcacttcaggagcggctggccgcattcgccgagaacgcccgcgaacgagcgcgcagcctgccacccggcagggaacgcgagatgctgctgcgacgcgccaagcagaacgaagtgacctcgaacctgacagagtggctgagcggacccgtgtccccaagacgtggacgatcatgatggggagcatcaagcattaccgcgcgttccagatcgatccggacgggcacgtgttcggatgcatcaatctggtctgcgacgacgacgagcaggccaagcgcgaagcggccgcgctcgtgctggtccaccgcatcgagctgtggcggcttgatcagcggatcgcgaaattcgatgcgccgcaggagattgctcgccagtagagccgtgggaactgcgcgctgcgtcccgggttggccgaatgatatcgacttgcggaccaaatcaaagatgaccggcgcaccgccacttgaatgcctgatcgttggcggcggcccggccgggctgatggctgcgatctatctggcgcgtttccgccgcagcgtctgcgtcgtggacgcgggcgcgagccgggcggcgctgatcccgcgcagtcacaacgtcccgggcttcgtccacggcctgtccggcaccgaattgatcgaacggatgtcggcccagctcgatgatctcgccgtcgtacgggtcgaagcggaggtcacggcattgcagcggcaccgatgcggtttcgaagcgacgtggaacggtcgcgtgcatcaggcggccaccgtggttctcgcctgcggcatcgtcgatactcatccgccattcgcggagtggcgcgcggcggtcgcggacggactcctgcgctactgccctatctgcgacgctttcgaggccgcaggccgccgcatcggcgtcgtcgggccgcttgatcgtgcggccggcaaagcgcttttcctgcgtggctacgcgcgcgacgtgacgctgcttgcgaccggcgcggacgacccgaaggccgcaacgtcggagctgtccgaggcgggtgtcggaatcgtgttcgcgcccgacctgcgcctgacgcgacgagagggcggcgttggagcggacttcgcggacggacgtaccgcgcagttcgacatcgtctatcctgcgatgggcgcggaggtccgctctcagctcgcgacggcgctgggcgccgaccacgcctcggacggtcatctgaaggtcgacgatcatcagcgcacgtcgatcgaggggctctacggcattggcgacgtcgtcaccgatctgcaccagatctcagtcgccttcgggcacgctgcaaatgccgcctgcacgatccacaacagtctgccgcggcgcctggcctgagggaacgaagtgcgcgccttcgtcttgactgggcggacgcgagggaagagcccatgctggaagagaagctcaaggaagccattgtcgacgagttgaagcgccaggctgctgaccggccgcaatcgctgcaggtccagggcgcggcagacgcgaagggctcggaggagctgaccgtcaacggcaagatcgacctgggagcgctcgccatggtgatcgctggatcggtcgccggcggcccctagccgggtttcctgcatcctcacaacattcgtgcggagcgccgcaacgactgcggcggctgaccgaatgctcggatgaaggcccggcgcatccgctcggggtcgcgaaaacccgtggatcgcgcgacacgctcgatcgtctctccggaggactgcacccgctcgcgcgccacctcgacgcgcaagcgctcgaccgcctttgtcggcgtggatccggtttcggcgatgaaggagcggacgaaatgccgggagctcagccccgcgcgctcggccagcgtctcgaccgtgagcggtgcatccaaattctcgcgcatccacgacaacaagctgccgaagcggccgttcggcgtcttcagctcgagcagactcgagaactgcgattgcccgccgctgcggcgatgatagagcacgagctggcgtgcggttgcctgcgaaatctcctcgccatggtcctccgcgatcatggcgagtgccagatcgattccggccgtgatgccggccgacgtccatacgccgccgtcgcgcgtgaagatctggtccggctcgagcctgaccttcggatagcgcccgatgaagtcgcgggtgcaggaccaatgcgtcgttgcgcagcgtccgtcgaggaccccggcttcggccagcagatatgcgccggagcaaacgctggccattcgcacgccgcggcgcgccagccgttgaatgaaggcgatggtggccttgcagcgcgccgcagcttcgacgccctcaccaccggcgacgaagagcgtcgtgaccgagcttgccgatcgcaggctgcgcgccagcatctcggtgcccgacgagctgcgcacggcaccggccttcgccgcgacattgatcacgcgcggtgcattccgcgtgtggcgtcttgcgatctcgaacaccgagatggggccggccgcatccagcaactggaattcgggaaagatcagaaagccgatcatggatgcgtccaaaaatgagggaattacgccgtttccgaccataaggccaacatggcaggcttgcatcgtcaagcgcgatgtcgaggtggttatgtcggacccgttgcagatcggtcttctggtttttcctcgcgttacccagctcgatctcaccggtcctgcccaagtcttctccagcctgcctgacgcgacggtgcatctgatctggaagcgcatcgagcccgtgccgagcgattccgtgatcgcgctgacgccgaccgtcaccttcgccgattgcgcgcagctcgacgtgatctgcgtccccggcggttacggcaccgacgaactcatgctggacgaggaggtgctcgcgtttctgcgccggcaggcgggcagggcgcagtatgtcacgtcggtctgcaccggctcgctcgtgctcggcgcggccggcctgctcgagggatatcgtgcggccacgcactggacggcgacagacgccttgcccttcttcggggccgaggtgtcgcgggagagggtgtgcatcgaccgcaaccgcatcacgggcggcggcatcaccgccggcatcgactttgcactcacgctggtctccatgttgaggggccgcgcggctgcggaattgatccagctgcgcatggaatacaatcctgcgccgcctttccaggccggctcgccggaaacggcgccggccgcgatcgtcgcagcgatgaaggaacgggttgcgccggcgcaggcgcggcggctggagctcgtcaggaaggctatccgccaggaatgatagcgcggcgatttcggggcaatcatcggcgacgatcgtcgcgatgtcagagcggaggggaagatggtggatcgggcaggggcgtcacggtcatggcataaccggctttgccggtcggctttcggtttcatcctggcgctgggtccggtcgcattcgccgaacgaggccaggccgccgatttttccggtggcgcgatccggatcggcatcatcaacgaccaggcgggacccttgtcggatcttgccggaccgggctccgtcgtcgccgcgaagatggcggtcgaagactttcagaaggccgcgcccgggctcaaggtcgacatcatcgttgccgatcatcagaacaagccggatatcggtgcccagatcgtccgcaaatggttcgacgtggacggcatcgacatggtggccgacgtcggaaactccgccgttgcgctcgccatccagtcgatcgcgcgcgacaagaacaagatcgtgatctactcggcggtcggcaccaccgacatcggcggcaagcaatgcgcgcgcaccggtctgatgtggttgcacgacaactacaatctggtcgccggctcggttcgcaagctggtctcgcagggatacgacagctggttcttcatcgcgtcggactatgcgttcggacgcaacatggtggatgtctcccagcgcgtgctcgcagcgaccggcgccaagtcgctcggcgcggtttttcatcccttgggaaatgcggattacagctcgttcctgctccaggcccaggcgtccaaggccaaggtggtcgcgttcgccaatgccggcgaacagctcgtgacctcgatgaagcaatggaacgaattcggaatgcatacggggcctcagaaggccgtcgccgagctcatgttcctgaccgatgttcacgccatgggtgccgagaccgccaagggcctcacgacggtcaccgcctggtattgggccctcaacgaggcgacgcgggcgttcgcccagagattctacaagctgcacaacgccatgccgaccgcgccacaagccgccgtctattcggccgtcctgcaatatctgcgggccgcggctgccgcgggcacggatgaaaccaatgctgtcctggagaagatgcggtcgatgcccgtcgacgatttctatgcgccgggcgcgcggctgcgcgctgacaacaagctggtgcacgatttccatctggtcgaggtcagaaagcctgcggacgtaaaagccccctgggactactacgacgtcgtcgagactatccgtgccgaggacgcctatcttcccctggaccagagcgaatgcccgctgctgaagacctcgcaaaagtagagcatcgcgccgcgtcgaacttgcggctcttgaagcgagccactcagccatactcctcgccgatgccgtattcccggtagatctgcagcgggtcgagctcgggaaacagacggcatttggcctgggcgaggtgcaggctcaccgccgccggctccttgccgtttgcgagcaactttcggatatcctccatatgcgcgttcggctggtgctttggctcgagctgctccagcgcgaccagggcggtcgcgagcgcctcggtcagaacccagtcgtcgtggcccgtgattcccttcttcggcatcggaagaacctcacatgtggcggtcgcagcttaccgcgacttccgccaaatcgccattgagaggttgcgggcgtgctgcgggggcgcgccgattggtcatgcttcggcttgccttgcggccgcgtgcggctaaaaggcgaagagttgcggggcgatcgtatctttgttgaaacgaacttggcgtagacgggccgctgccgcttccagactggccgttccggtctgggtcccgatcccgaaatcgcaacgccgttgggtggcgccccgcaaggttcgagccagcatggtcttcctcagcttcgtctaccgcttcctcaccaatttcgccttcatggcggtggtctatttcagcctgaacttcatggagaagtacccgaaccgggcgatcctggcgatcctggtgctggtctatgccgccatgcgctcggcctcgactctgcgcgcgttctacttcttccagaagatcgagaagctggaagccgagaccaggcgcctgcaggcgcccatcaatgacggttcatgcggaaccatgacgcgcaagcaggtcgtcgccgacgttgcgcggctgcggcgcgacggcgagctcaagtcgtatatggacctgttcttcctggccctgatcgtgctgctctgcgtcgccgccatcctgcggcagtgaggacttaagcgcgcttcttcaggctggcgacgcgggtcggacggggcgcagtacccttggaggccgcgcccttggggcctccgctcttcgtgtcggcgctcttgggtgcaatatcgaggggctgtgcggcatgatccgttgccaccggcgccgcatgagccgtacgccgtagctgcggcttcttcgctggcttgccttgcgctgccttgtccttggccgcatgaaaggcctgggcggccgtcgccagccgtgtcgcggcacgccgcgaaagagtcgtcgacagcagcacctcgaccgaaccttccggaatcgcgaagagcgcgcggcccggcaccggcagggtcgccgcgacattggcctgtgccatcgtccggcgcggcagtagcggctgatgctcggcccgggcattgaggtcggccagaacgggagccggcagcatccgggtctccgtgaacacgaaatgtggcacgcgcggccagcgcgcgatcggcgtcgtttcggtcggcggacgcagcagccattcgacttgcgtggtcggtgtcgccgggcggtcgggcgtggcgggcaccacatgcacgatgcgatagccgcgcgccttgaggtcgcggatgatcttcggcagcgccgccacggtgcgggcctggatgtcgtgcagcagcaggatgcccttgcccttcgcctccagccgctggatcgcgagctggtagacgcggtcggatgacacatgccgccaatcgtcggccgggaaatcggcgctccagacctggatgccgcgcgagatcagatggttctcgacgccctcggcgcgcatcaggccgggaatgcggaagaacggcgcgagctgggacggatcggtcatcgcagccgacgtccactcgatcccgccgttgatctccgcctcggccttttcgatcggcatccggtcgaaggtcagcggatgatccatgctgtgggtgccgacggtgtggcctgccgcgaccagcttgcggacgccttccggattggccttggcctggttgccgacgatgaagaaggtcgccttgatgcattcgtcggcgaggatcttgagcacctggttggaatatttcgggatcggaccgtcatcgaaggtcagaacgacttcatggtccttcaacggcagcgtctcgcgatactgcatggtgcc

SEQ ID NO: 304 - DNA, 2463 bp, Bradyrhizobium colbertium
cgaactgcatcaaaagtgagtcagagccaaatttgaacgccgattgacaatctgggggttgcgctcttcacccgcacgacccggtcgctggcgctcacggcggagggtcgcgatctgcatgagcgagcgctgcggctgctgggcgaggcggaagcgatcgagcaggcggcgatgagcgcgcgctcggagccgtctggcaccttgcgggtggcggcgtcgctgccgatcggactgcatgtgatcgcgcccgctctgcctgcgttccgaaagcgtcatcccaaagtgacggtcgatctcagactgactgaccggattgtggacatcatcgaggaaggcatcgacgtcgcaatacgcatcggcgatcttgcggattcgcgcctgttgtcgcggagccttgccccgtatcgactctgctgctttgcgtcacccgcttaccttgcggcgcgcggcgcgccacagcaccccgacgatctggcggggcacgacctcgtcaacctccgctatcagaacacgggtcagagcttttggtggcccttccagattggcggcgaggagatcgaattggcgcccaccgccggcatcgtcatcgacgtgagcgatgcggtcgccgtcacgctcgcggccggcggcggcatcggcatcagcgcgaccttcatcgcagcgccttatgtcgagcgcggcgcgcttgtccctgtgcttgccgcctttgcggtcgagcgacacaacatcacggccgtgtggcccgaaagccgccgcgcaaatcctgccgtgcgtgctttcctggacctgttgcaggacgttttccaagagcggctgacggccacggcgagcctgtcggaagaagggcgccacgctgccggcccacaggcgacagcgaacggttcttagggacgaacatcgcgatagacgctaacccctactgcggcccacatgggtatactgctggacgggtagcccagcactaccggcttggttatccacgactgcgaggagcaggccgagcgcctcgatggatcccggcgctcgcttttttgcggcctgctcgggagcggtgttttgttcgcaaagctgtcaggcgacctcccgtctcacctcggcctcgtcaaggcgatgtaaccgagccgtcgggcacacgcgttgaacgatttcgcaaaggtgctggtgatgcgtgaggtaaatcacctggccgacctgggccatttccgcgaacaagcgaaatgcctcctccgcgcggaaatcatcgaacgtctccatgatatcgtcggcgacgaacggcaccgaactgcgagcgcgggcaaactcgtgatagccggcgacgcgtagcgcgaggtaaagctggaagcgcgtgcctttcgaaagcttatcggcggccttcgaaccgccctctgctgaaatcgcaatcagcgtatcgccgtccttgccgggctgggcgatgaggccggtataggcgccgcggctgatggttcggaacgcctccgacgcacgcgccatcatcgaactgcgatggcgctcgcgatagctggcgagcgcctgctgcgtggctgagatgccggcacgtagttgcagatatcgcgtggcgccatcctcaatctcgagcagggtcgtccgtcggcgctcctcgatgatggcgaccctggcgtctccaccgatcgcctcgacccgatcctcggcggcggacttcgccgcgaacagttcatgacaacgcttgtcctggtcttccgctcgggtcgtcaattccgtgagctcggcctcgagtgccggcctgtccgcttgatcgagcgccgcctccgcacgctggatatccgatgcacgaagagcctcgatgatatccttttccgcctcacgagcttggttcatgaggtcggttcgtcgctcgatatcggacagcttccgggacacctcctccagagagccaaccgcgaaaaacgccgtcatccgctgcttctgttcgtcatgaacggcttgcgattctgcaagctcacgctggcgcgcttgtgcctccccggtccgctgcgtcaggctggagcgctggtcgcgggccgccgtggcactccggaccgtttcgacgacacgctgggccagctccaggacggcgtcgggacccggttcaatcccgagaagccccgtgagtgccgcaacctcctcgctgaacgcgagctggtcccgttccatcttgtggatgcggtcgagaagggcagcacgcttctcaatggtcggggaaagctcagtgatcgcggcgagcacctcgcgcactgcgccgaccgccggggtctcgggtccctcgccgagccagcatccacggcattccgccgcccacgcctctgcccagcccttctcgtccgatgtggcacgctccgcggcgcgttcccgcgcaacaacatctcggcgacgctcgtcgagctcgacttggagacggcgcagttcggcttcccgatcgagcgaggtttgggccatcccgagcac

SEQ ID NO: 305 - DNA, 1564 bp, Bradyrhizobium colbertium
ctcgttaacgagttccaggcgcggctaaacagcgagcaggaggcgcgcagggctgtcacgcgactctctcgtgcgattgtggacgcatgcgaggcttatccagagcatgctgtgaggtggtcggaagagcttgagcgcgtaaagggacttggcctcgacctggaagaagaggccaaggcgctagaggaagtgcacatcgggattgtggctgaagtcaccgacgaatatgtgcagcatgatatgtcagccgagggtgacatgagggtcactcctaatattaatacaacccctcaaaactcttttgaaagtaaggaaaagcggcctcgctctgacgagcgagaaatttcccactcagcttacgaccgctacgcggtcgatgcttcaaccgaaaaaaagtctgagctgattcggctggaggcgcacgcttcgaccggacgaaatcggaccggttcggtcgatgaaattcaatcttccgtgctggcgtcggtttcggttggattgctgcgcgccgcgtgcccgcaggcctgtgagatggcgggaaaagaattcagaagttggcccgaactcgccgcagccgcgccggtgatgcgggtaatgatcggtctctcggaggcgggatgggtggatggcgcaggcagggttgggcgatacgccgcagccgcaatcctcgccaccgtgctcgaaaagtcggctcgattgccggatcagatatcgagtcccggcggctacttccgggcaatgatcgatcgcgctgtggagggccagttgcacctggaaaagagcttgttcggactggccgatggcgccttcaagcgaggagcggggggcgcgcaatgagagaggcgtcgagggttacagttgttactcttccgctaccgggtatggtatatggcggaacttcgccgacggctgagcgcccgcgggagatagaaataaccgttatttcaagtggttggcagaaaggggtaacaactgtaatccctcaaatggcaaggtccgcgaagctcggcataatttcaggggtacggcatgccccgctatgacatcgataagctcaaagccaccgtcccgtgcccagcgcttctcgaaacgaatgggtggaaggtcgatctgcgggagagtacgccaaaagctatcaaatatcggcgcggtgaaggcgaaatcatcatagtcgtccatcaaggaagagggtggtttgacccgacttcggaagccaagggcgacgtgttttctcttgcccagcgtctcggctcgccggacttcgcttccgctgcaaaggcagttgctgagctggtcggctttgagccatcagctccggcctggcagcgaaagtcgaaacaatattcgcccgaggccatcaccagtcgatggtcggatcgcgcgctcccgcgaccgggctctccggcgtggtcctatttgaccctcactcgagccatccccgaagcgattgtgtcagcagcagtcgctgccggccgactccgtgaaggccctatgggatccatttgggcggggcatttcgacgcctccggcattgttgtgggctgggaggagcgcggtccaaatt

SEQ ID NO: 306 - DNA, 3515 bp, Bradyrhizobium colbertium
  misc_feature (1194)..(1213): n is a, c, g, or t
ctaggtgggtgcctcatgccgcttacgaacaaatcattcgtggccggcgcgccgcctcaaaccaacgtttaagaaacatgctgatcggatacgcccgcgtctcaaaagccgatggctcgcagtccctcgacctgcagcacgacgacttgcgcgccgccggtgtcgaacaggacaacatctatgaggatcacgcttccggcggccgcgacgatcggcccggactggccgcctgcctgaaatccttgcgcgacggcgatgtgctcgtggtctggaagctcgatcgtctcgggcggtcgcttgcccacctggtcaacactgtgaaggatctgtcggatcgcaatatcggcctgcgagtgctgaccggaaagggcgcccagatcgacaccacgaccgcatccggccggatggtgttcggcatcttcgcaaccctggccgaattcgagcgagatctgatccgcgagcgcaccatggccggcctcgccgccgccagagcgcgcggtcgcaaaggcggacgaaaatttgccctcaccaaggcgcaggtgcgtctcgcccaagccgccatggcgcaacgcgacacttccgtttccgatctgtgcaaggaactagggatcgagcgcgttaccctctatcgctacgtcggtccgaagggtgagctcagggactacggaaagcgtgtcctcggcttagcgtaggatttcgccccctcccgcaaacgaccccacctcggcaaatccgaccgggaagcggccggcgtcctctcggccgcgcagcgccatacccatttcctcgacagcccccgcatggtcgcggtcctcggccgatccgatttccgctttgccaatctcaagcgccgcaacgcctcggtgttcctcgtcctgccgcccgatcgcctcgccacctattcccgctggctgcgtctgctcgtcgcgcaaagcctgaccgacatggcgcgcgaccccgccaagccggccgtgccggtcctctacctgctggatgagttcgccgccctcggccacctcgcccccgtcgagcgcgcaatgggcctcatggccggctatggcgtccagctctggccgatcctgcaagacgttcaccagctccgcgccacctacgggcaacgcgccggaaccttcctgtcaaacgccggcgtcctacaggtgttcggtgtcaacgatcacgacagcgcccgcctcnnnnnnnnnnnnnnnnnnnngagcaacacacggcccggccgctgctgacccccgatgaggtccgcaacctgccgcagcatgtcgaattgctgttcctcgccgggcaacggccgatcgtcgccggcaagctcgcctattacgccgatgcagaattccgggggctgttcgaccaagcataaaggatgaaaccatgaccgacaccgatgcgcccgaatggcccgatcccgccgacaaggcccatgccgttgaacaggccaagcagctccgtgaccaggccgccaagggcggcttgcggtttgaagcctatctgccgccgtcgctggccctgtggctgctcgatctgatcgaacaggacacgttccatgatccgtccgaagccgtgttcgtgatcctgggcgagcataaggagctggcaccccatgccgatctgcgccgggaactactcaagcgccgcatacaggtggcggccgatgattcccgaccgggtatttcgatggaagaaatgaaagccctactgcgcgaaaagcgcgaagcccccctgcccgagccggccagatgggaaaagcggtcccggcgctgacgcaccggggcttctctcttgcggccctccggtcacttcggcgctatgtgggagcgcgttccctccgggccggggccggctgctcgccggcatcgctcaaccaggccacacccgcgacgctagcccccggccgtcccgctctcatcatctagggccgtagggacggccgggggcgggatgcaggcagacaacttgccaaattgcttgtttgccaacttgccagcaatcaggcaatcgcctcaaggccccttttctgaataacggtcagcagccgcagcgccgggccgccgggcttcttcaccccacgttcccaatctgacaccagccccttactcacgttgagatagcgggcaaagacaggctgcgagatacgctcacgctcacgaatagaacggatttcctcgggggtcagcggctcaacggttgtcagacacccctcgtcaaattcgcgcatcgtctgcttgtcgatcgcgccggactcatagaagccttccatcatctcatggacggccgccagagcttcactcttgtaagtcttgctcatcgcaattcacctcgaacattcgacccgcagcaacttccgcgtccatctgcgcatctgcaaaccccaagaccagctttgcggccttcttcaagtaggcttcttccgcatcatcaaggttcgccatatcgctcttggcaaacccgaacgcgaaaaccgccctcgtctccgcgcggaagaaaaccagcgttcggaagccgccagactttccagcgccgggccgcgctactcgttgcttgataaggccggcccctagatcggcgtcgatctggccgcgctcagcccgctctacagcctcacaaagcatcgcgtcagagattttctcctttcgggcaaacttgtgaaaccggctgtttttgaaaaccctcacgcgacttcctcgcccctgaatgtatgacacatagcgttacacttcaaggcccttaccgcatcgccgctttgctggcaatcaagcactatgttttgccagcaagtcagcaagcgcctcgcgcatgaggtcttcaatggagcggtcggtgtcggctgacagccgcttaacccggcgatgttcctccggctcgaccacgactgtcacccgcttcattccggcccgcgtggcggcatggtaacgcttaccctcggcacgatccggggtcggcgcgggggcggattccgcgataggcgcaacaggcggcgtggtctgcgcgcccacggccttcatgctcgcggctaaactcggtcttttcgacatggttttatcccatcaaactgccagtttgccagcaataccattatgccttattgctggcaatacagcttgccgtcaaatcagcaattggcctctaagccaggtcagcaattcggacacttcctcgctggctttgccggccggctcatactccggagcggttttgccggccgtgagcgcatgtccgaaagccgcccgctgctggaaggcgacgggggcaacctccaagccgtgaacctgaacggcttcccgcgcatcggccagaagctgcgtggcacgcggcggcacggcgttcaaaacgacaaaggccggcttttgggcgagtttcaccagctcggccgtgcttccgatcgcgcgaagatcgaggattccggctcggcacgggatcaacaccatgtcggacgatcgcgttgccgccattgcggccgcttccgagtgcggcgcggtgtcgatcacgaccagctcggccccgcc

SEQ ID NO: 307 - DNA, 87470 bp, Bradyrhizobium colbertium
  misc_feature (67148)..(67157): n is a, c, g, or t
cagcaccgcattgctgttgtcgagcgtgaagtgccagcccagcgtagcaccgttgttggtgtccacgttggattccaggaccgacggatcgatcgtgaaggtgccgatgttcgcgttggcgccgaaccccggcagaggggagctgacggacgacgaggtgaacaccgcttgcgccgtgtgggtgtcgatcagatccagatcctggatcgccagcgtgccgccgatcgaaagggacaagccggcgtcctcagtgacgcagcccttcgccgcgtcttcatcgctggtgatggtcggggcatcgttggtcccggtgatcgtaattgtgacgtcctgcgtcaccatggcattattgttgtcgatcaccgtgacggtgtagacctgggtgatggtctggccttcggccagcgactgcagcaccggatcgtcattgtcgagcgtgaaggtccagccgaccgacccttgcgaactggcgccgggactctcggtcactgccgtcaatgcgaacgtgccgacatgcgaggttccgtcggtgaagccggggagatgcgcgctcgacgtcgtcgacttcacgacgaagcttgcggtgtgagtgtccgtgagatctggatcgttgaacgtgatggtgccgttcgcctggagcgcgaccgcatcatcctcggtcaccgcgccggtcgtatccgtctcgtcctcgacgatcgtcggcacgtcgttggtgccctcgacattgacgtcggctccattgatggagaccgtgagcggcgtgctgacgacgccgccgtgcccgtcatcgacctgcaccacatagttgaggatcagcctctcgtcctcggcaaggaagtcgaagagatagtcgggaacactgtaggtccaggtggccgtcccgttgttgccgtttccagcgccctgaaccacggtcagcggcaccttgacggccgcgatcgccgcgagctgctccggggtcagcgtcgcggtgatgtcgttgccctccgcatcgagatacttgaacggctgggtcgacgagagctcagcgctcacgatcggccggtccgtcagatcgacgtccgtgaaggtgaccgtgccggtgatgatgtccagagcttcgttgcccgtgcccaccttctcgatcagggtgccgcccgatgtagcaacagtcggcttgtcgttcgttcccgtgatcgtgatggtgatcgggatgaacctggactcggggtcgacggtgaagttggtgtcgacgcggaccatgtaggtcagcgtcagggtttcgccggccgcgaggaagtcgaagaccttgtcgggaatcgtgtaggtccagactgccgagccgttgttctcgttggtggggtcggcaatgacactgatctggatctgcgtcgccgcgatgccctgcttctggagcgcggtgagcgagcccgtgacgtcctgctggccggcgttcttgtagacgtagttcggcgcctccgcgaggctcaccgacaccgtcggccggtcgccgaggttttgatcgacgaatcggatgaggccgctgactgtatcggcctgggtgtcgccggtggtgtcggcgcgttcggtcagcgcgaacgccgtcttcacattgccgccgaggtcgaaactctgtgcaatcggctggccgggaatgcggatggccggcggcgtcgagacttggggagcatcctgtcccggcggactgaggttgacgaatgtcgcgactgcagtcaggccggatcccgacttgaacaccacgtcctgactgaacggcgtgatcgtgtcggtaaaattcgtggtcagcttggtgttggtgttgttgtccgtgaacttcagcgtgaacacgtccgtgatcagcttctgcacctccggggacatcagcgcattggagatcgagacgttgccgccgctgatctggatcatctggccggcctggttgaccgtggcgatcggcagcagcgtgaccttgtcgaacaggatgtaggagccggtcgtgccgttcggctcgaccagcacctggaagctcgcctgcggctgcggatcgccgccgccggcgggaacgacgaagttgatctgggtcagcaccgccgtgccgcggatgcccatggtggcgaccggcgtgtcgaccttcatgtcgccatgcttggcggtctcgccggcgacgaaggtgatggtgcccgcaaccaggctgagcagcgaggagttgctcgacccgttggggtcgtagaccatctcgttcagcaccatccgcgcattcgacgacaggccgaacacggtgccgtcgatgaaggtgatgccgagcgtcgaatcggccccggtcgagaccacgtcgcccttctcgacattgtcgccgttgttcaggatcaccgacacgccgttgcggatcgcggtcgcgctgccggaaagtttggtgacgtgaccgatgacctgcgcggcagaggcgccgggcgcggcctgggcgacctggacatggccggtgagggcgttgacgatgtcgccggtgaggtgggcgccgtccggcgaggcgatcgcggcacgcttgtcgcccctgaaataatcgtgaaccacgaactcacggccgtcgtgggacagcacgagatcgaggccggcgcgcttgaactcgccgttgaagatcagattggggtcgggaacaacgaacgcaccatccggcacatggccatgcgcctttgcgatgaagggcttggccgcaaaggagtcgaaatggacataggcgggcgagttggaaccctggccgtccaagaacgtcgcggcgtcaaatttgccagcgtaattcaaccgggcaccgtgaaaagggttaaaatttaagtaagtatcgactgcctaagcttgcttagcattaccaagtccttagcgaaaccatctattgcttgtgtgatttcgcgtcacttggcggcaagggcctccagggaagagctcccatccagaggagttgaagtaaagctgaaagtactcgcaagtcgaattcgacttattcgcgcccatttccactcaccaaaagtaatcgatcgtaaagttgcggaacggatacttgcagcatctttccctggcagggtcccggaacatcctgcggcaattgcggagttaaatctgtgaccgaagtaacagaaccccatgaaatgggggtcgttagccaaaaggcccgattcggcactgcacaacttgtgcctgcaataaggttcatttcgcggcatcaggacacctcgtagcgcgccaatcgtaaaattttacgcaatttggccagatccgcttcagcctgtcctctggtttccggaccccagccggtcgcattaagcagaacaaaacggcccgtctcgcactatctgcccgaaagcaacaaggcccagcacgtcgagatcgagaaggtcccgcgaagcctgggaaggggatgtcagatggagaccgcagctcgctcgtgcacctttcgcgcaatcctcgtcctgtgcggcctgatcctgctcggatcggccgccgagcttcgcgccggcacgctgctgtcgccgggcgcgggcgtcctcgtgcgcaaatccgccgagccgttcggcgtattcgtcttcgccatctcgtccggcggcttgcagcagaaatggtccgcactaaaagacaggctcgatgacgacatggtgcagctcgcgctgtgcgacggcgaccgagacaattgcgcatcgccggcagccctgaagctgctcgccatcgtcgaccaggcccgcgcccgcgagggccgcgcgcgcctcggtgagaccaaccgcgccatcaatctcgccatccatgccgtcaatgacggcaccgacgacctctggagttcgccgctcgcgaccttcgcgcgcggcgccggcgattgcgaggattatgccatcgccaagctcgccgcgctgcggctggcgggcgtgccccctgaagacctccgcatcgtcgtggttcgcgacatccgcgccggcgaggagcatgccgttgccgctgcacggctcgaggaccactggctgatgctcgacaatcgccgcatggcgatggtcaaggatgacgcgacgcggagctatcagccgctgttcgtgctgcaacaggcggcggtgatgaagtatgtcgagccggtgcaggcttcggtggcggtcgccgagacgcggtgactgctcgcagcttgttgccacaagccagttcgccccgcaattgcctgaagcgcgacgagatccggatcaatcgtcatcgcgcttcggattgtggttgagcatgatcattccggaaaaccgctgcacacttttccgtaatcatgctcccggcgcccccggcaccgccgggacaagcggttgctttcaccctcgctcgaacgagggtgaaagcgaaccgatcagaacaccagattgtccttcacgagcacccagcgaccgcccttgacctgctgcacctgggtaatggtgttggcgaggtggtcggtcttggagaacttggtcggcggtgagttgaagatgtcgaggaatttttcgcccgactcgagtgcttcaagcatcttctgaccggtgagatccttgcccgccttgttcgcgtagaacgcaaacgtcatcattgcgttgtacccgatgatcgcctgcgtgttggcgtctgcgttgaacatcttcttgtagttgacgagccagtctttcaccttgcccttcgcggtgtcctcatagggaatctcgaagccgcttgcggcatagagcccctcgaccgcttccttgcccagcgcaggaacctccatcacgttggtgggggtcgcgccgaggaaggtgacgtcccagccgagcttcttggcttcgctcatcgccccgatggtctcgcgaagcacggtgccgagcaccacgaggtcgcagccgtcggatttcatcttggcgatctgcgcgctgaagtcggaggcaccgcgcttgtagctcgtgatcgaagccggctgcgccttcatggcggtgagctgctgattgaagccgtcgagcacgttcttaccgtactcgtcgtcctggtgcatgatgcagggcttcttgaagcccttccactccatcatgtacttcaccgcggcccgcgtgctctcgacatagggaagcaggttgttgaacttcaatcgttcctgcggcttcgccggatcgaacttgaaggtgaactcggcggccgtcagcgggaacagctgcaggacgccggcgtcgaacaggatgtcctgcgcggcgagaacggtcggcgatcccatcggtcccaccattgcgaagatcttgtcgcgctcgatcagcttctgcgacgccagcacggccttcttcggatcatagccgctgtcctcgacgaccagtcgaatcttgcggccgtggatgccgccggcggcgttgatctcctcggtcgccattttcatgccgtttgcgaccggcacgccccaccccttgatcggacccgacaggtcctggtgagtgccgacgacgatctcggttgccgagatgccctcgttggtcaccttggtttgcgctgcggccggcagacaggtgagcacgacggcactcattgcaaggccgaatgcgctgaacgatttcgacattgacgtctcctctcctaaaggcccgtgttggacgaagggcgggggccacagctccttcgctttctcgaatcgccggactcgtcacgccaccgcacgctcgcgatacatcgcttcgatctcggcggcgtagcgcttgttcacaaagccgcgtttcagcttcatggtcggtgtcagctcctcgtcttccggcgtgagctgacgctcgatcaggtagaacttcttgatggtttcgacgcgggcgaaattgccattgacctgctcgatctcgcgcccgatcaggtcctggatctctctcgcccggcacaggctggcgtagttggtgaaggggatgtcgtgatcctgagcgaacttctcgacgttctcctggtcgatcatcacgaggcaggtgagatagggccgcttgtcgccgatcacgaccgcatccgagatgtagggcgaaaacttgagctggttctcgatctcggacggcgtgatgttcttgccgccggaggtgatgatgatgtctttcatccggtcggtaatgcggacgaagccttcattgtcgatggtgccgacgtcgccggtgtgcagccagcctcgggaatcgatcgtctccgcggtcttctccggctggttcagatagcccatgaacaggaagtcgcccctgatcaggatctcgccttcgggcgacagcgcgacctcgccccagggcaccgcagtgccgaccgagccgagcttggtcctttccgccggcatcatggtggcgaccccgcagttctcggtctggccgtagacctcatggatgtcgatgccgagcgccagataccagcggatcagctccggtgcgatcggggccgcaccagtgaaggcaatgcggcagcggtcgagcccgatcatgcggcggatgttgcggaaggcaacctggtaggcgatgcggttggcgatccgcagcgacagcggcggcgtctcgccctcgagccggtactcgaccatgcgatagccgatgccgatcgcgcgccgatagacccattgctgcagcggcgtcgcatccttcagcgcgatggtgatcgcggagtagaacttctcccagattctcggcaccgccagaaagacggtcggctgcacctcgcgcagattgtccggcacggtctccggactctcggcaaaattcatcaccgagccgagggcgaccgagatgtaatagccgccgatgcgctctgcgacatggcagagcggcaggaagatcagccggtcttcatcctcccgcgccgggatgaagtcgttggcgtgccgcatctggtgcgtgacgctgcgattggcgtgcatcgcccccttgggcgggccggtcgtgccggacgtgtagacgaggatcgcgagatcgccggcgctgcggctgtcgatcatctcctgccacagcgcctcgcggccgaccatgtggttgcggccgagcgcgcgaaactcgtcgagcgacatcaccatgtcgtcggtaaagccgctgagtccttccatgtcgaacacgatgatcttctgcaagctcgggcagcgcgcgcggcaggtcaggatcttgtcgagctgctcctcgtcctcggcgaagatcaccttggtgcgggaatcgttgacgaggtattcgacctgggatgaagaatccgtcggatagattccggaggagacgccgccggcgcacaatatgcccatatcggcgtgcacccattccggaacggcattggcgatgatggaggcaacgtcaccgggcgcgaagccgatggcgtgaagcgcataggcgatctctttcgagatctccagccattcgcgccagctggtcggctgccagatgccgaacttcttctcgcggatcgccggcttgtcgccccgcgtctcggcggcgcgcaagaagctctttgcgatcgtatcagcgaccgtcagcaccgccggtcgggccatgcgcctctcctccctcctcgtcgccagcctccgctgcctgccttgtcggcggtctatgttgcggatggcaagctcatcttactgccagctcgtcctcaccgccacgtcttcttcttcttccagcgccgctcgccgcgcgcgcccgcttccttggcgccaaggtagaattcctggatgtcctgggaatgcatcaagcggtcgcaggtgtcgttcatcacgatccgcccgatctccaggacgtagccgtaatgtgcggtctccagcgccaccttggcattctgctcgaccagcaggatcgacatgccctgctcttcgttgacgcgacggatgatggtgaagatttccttcaccagcagcggcgacaggccgagcgagggctcgtcgagcagcagcagcgccggccggttcatcagggcgcggccgatcgcgagcatctgctgctcgccgccggagagctggccggccggctggttgatgcgctccctcagacgcggaaaatagccgtagacgcgctccagatcttccgcgacgccgtccctgtccttgcgcgggtaggcgcccatcatcaggttctcgcgcacggaaaggaacgggaacacttcgcgtccttccggcacgtggctgaggccaagccgcacgatccggtcggcttccatgcgctggatcggcttgcccaggaactcgatcgtccccttctgcgggtcgaggatgccagagatcgtcttcagcaccgtggtcttgccggcgccgttggcgcccagcagcgtgacgatgcggccgcgcggcaccgccagcgagatgccgcgaatcgccatgataggcccgtaatagctctcgatgttgctgagcttgaggatgatatccggggtcgtggcggcatccatgcgtcaggctcccagataggcggcgacgacgtcggggtgctgctggacctcggccggcgagcccatcgccagcacccgcccgtaattcagcgcaatgacgcggtcggagacgcggttgaccagcgacatgtcgtgttcgaccatcagcaccgtgatgccgagctcgctcctcatgtcgcggatccagaacgacatgtcgccggtctcctccacgttgagaccggaggacggctcgtcgagcaggatcagcttcggctccgagcacaatgcgcgggccagctcgatcaccttgcgcacgccgtaaggcagacccgagatcagcttgtcgcgatacggctcgagatcgaggaattcgatgacctgctcgacccggcggcggtgtaccttctcgttggcccgcacgctcggcaggaacagcagttcctgccagagctgcgtcgtcgagtgccggtggcggccgaccagcagattggacagcacggtcgcattctcgaacagctcgatgttctgaaaggtgcgcgcgatgccgagcttggcgatgtcgtagggcggctcttccgtaatgtcctggtcctcgaagaagatgcggcccgaggtcggccggtagatccgcgagatcaggttgaagatcgaactcttgccggcgccgttgggcccgatgatcgagaggatctcgcccctctcgaccgcgaacgagaccgcatcgacggccttgaggccgccgaagtgcagcgacaggttctcggcgcgaaaatagctcatcgattgcgctccgacttcacgtagatcttctgccgcttgaaggtggcgcgcttgtagagcgggaacagctggaagaagagcttgatcttgagccagcggccgtagagcccgagcggctcgaacagcacgaacaacacgatgatgatgccgtagatcgcgcctttcaggccgttgagcgatgcgaaggccgcgacgctcgactggatgcttcccgcggtggccggcccggcgccgaatgccgcggcgatacccgcgatgatgccgggcatgtcgtccttgagataagtcaggaacggatcgatcatcacgatgaagatcgcgcccagcaccgcaccgtgcaggctgaaggtgccgccgatcaggatcacgatgatgaactcgatcgagagctgcagcgtgaacatctccggcgagatgaaggagagcttgtgcgcgaacaagacgccggcaaggccggtgatcgccgccgagatcgcgaacgacttcaccttgtagagcgcgacattgacccccatgctgcgcgcggccgtctcgctgtcgcggatcgcgacgaaggcgcggcccgtcggcgagcgcagcagattgagcgtgccgacgatggtcagcaccagcacggcaagacaaagataatagaaggtcgggctgtcgcgcggcacggtaacaccgagcagcgacagcgccttgacgcgcatgccctcgttgccgtgggtgacgctctcccagcgcgccaggatctcctcgacgatcagggcaaaggagatggtggcgatgacgagatagatgccggtgagacgcagcgcgggaaagccgaccatcgcgccgatgatgccagtcaagagcccggcggcgaggaagtagaccgggaacggcacgttgtattcctgcaaataggccgcggtgtaggccccgatcgcgaggaaggcggcgtgcccgagcgaggcctggccggtgaacccggtcaggatcaagagcgccacgccgaccgtcgcatagatgcagacgaagacgagctggctcatcaagtagctggagagcgcatagggcgcgaccagcagcagcgcgagcaggatgccgtaggagacgacgtagcccgaatgcgggaacagcttgatatcgtcttcatagtcggtcttgaacaggaagcgcatggcgttcagaccttcttgcggacgtggaggccgaacaggccctcgggcttcaggagcagcacggtcagcagcacgacatagggcgcgacgtccttccagccttcaggcaggtagaagccggccatgctctcgatcacgccgatcaggacgccgccgaccacggcgcccgggatcgagccgaagccgccgagcacggcggcaggaaatgccttcaagccgagcacgaggccgacattcgagtgaatgaaggtgatcggcgccagcagcacgccggcgcaggttgcgaccgccgcgctgatcgcccacacgaccgacaccacacgcttgaccgggatgcccatgtagtaggccgccagcatgttctcggagctggcgcgcatcgcggtgccgagcacggtcttgttgaagaacagccacagcagcgtgcacaggatcatcgtcgccgcgatgacggagagcttgtcataggcgagcaccagggagcccatgcgcagcacgccctggctgaacggcgtatcgatcttcaaatcgtcggtgccccagatcatgccggcgaccgatcgcaggaagtagccgagcccgatcgtcgccatgatgatcgagaactgcggatagccgaggatcggccgcaccaccacgcgctccgccaccatgccgaacagcgccatcgccgccacggcaccggcaaagccgatccagtagttcaggcccatcatgccgatgaaggtgaaggcgaagaagccgccgagcatcatcagatcgccttgggcgaaattgacgacttcggtggccttgtagacgagcacgaagccgagtgcgatcaggccgtaaacgcagccgagcgcaacaccgctgacgagctgctgaacgaaatccagcatcgacgcgcatcctcccgatgcgaccggcggttcttgatgaccgtttgccgcatcttgtgtccagtcgctacgcggtcgtttcgccgcgttagctccatttgtccggaatcaattcagcctgaaccgccctgcgctgtcaacaaacggtgacactcccttggtccgccggatgacggaatttgcggcagcgcgattcacggtgccgaaacatcttgcggtcatggtcgcgggcaatgcaaaaccggatggtgtgacccgtcatgaagccggaccacgcggcgctggaagtccgagggttaacgaagcgttttgaccgtctggcggtcgacggcctcgatctcaccattcacgcgggcgagttttatgcactggtcggcccgaacggcgccggcaagaccaccactttgcgcatggtggcgggcctgttgcgccccgatgccggcgcggtctcgatcttcgggatcgatgcgctggcggaccccgtcgcagccaagcaggcgatggcttgggtttccgacgagcccatgatctacgacaagctgagcccgctcgaatatctcgagttcgtcgcggggctctggggcatcgcgccgtcggtctcggagccggtcgcgcaggagctgctcaactccctcgggctcgaggcgcaccggcacgagcgctgcgagggcttttccaagggcatgcgccagaaggtcgctctcgcaggggccctggtgcacgatccccgcctcatcattctcgacgaaccgctgacggggctcgatgccgtctccgcacgccacgtcaagggcctgctcggcgaacgcgtccgcgccggctgcaccgtcatcatgaccacgcatattctcgaggtcgccgagcggatggccgaccgcatcggcgtgatcgcgtccgggcgcctggtcgccgaaggcacgctcaccgagctgcgccagcaaaacggccatgccgataccagcctcgaagaccttttcatcgcgctggtgacgcttcaggccgcggcatgagctcggcaaccgcgctgtcctggtttgcccgccacgagctgcggctcgcctggcgcgaatggttcgccatgatgacgggcggacggcgcaaacgcacgcgcgctgcggtgatcggcctgctctgcttcgccgcgctgctgcacctgccggcctgggcggtgatcggccgtttcgccgatctgcagctgccgctcgacaagtccgccctgatcgtgatcacggcgacgatctttctcgcctggaccttgatgctgtcgcaggcgatcgaatccgtgacgcgggtattctacgcgcgcgccgatctcgacctgatcatgtcctcgccggcaacgctggccaatctgttctcggtccgcatcgccgcgatcgcgctgaccgtcacggtgctcgcgctgctgttctcgacgcccttcatcgacgtgctggtgctcggcggcggcgcgcgctggctggccgccttcggcgtcgtcgtcgccatgggcctgtccgccgcggcgatcgcgattgcggtgaccatcctcttgttccggctgatcggcccggcacgaacgcgcctgattgcccagatcctcgccgcgatcatcggcgccggcttcgtgatcgcgctgcaggttgcggcgatcatgtcctacggcacgctgtcccgcttcaccatgctgacctcgggcagcctggcggcctacgcgcccgacatcgacagcatctggtggtggccggcacgggcggccctgggcgacagcgaggcgctgctgctgcttctcgcgctggccctggtgctgctcggcagcgtcatggcgatcttctcgcaccgcttcgccgataccgcgatcgatgcggcagcttacggcacgtcgggccgcacccgtggcaaggagcgcccgttccggggcggatcgcgccagcaggcgctgcggcgcaaggagttcgtgctgctgtggcgcgatccctggctgatctcgcaaacattgatgcagctgctctatctggtgccgccggcgctcctgctctggcggaattttgccgacagctccgcggcgctgacgctgatcacacctgtcatcgtgatggcggccggacagctggccggcgggctcgcctggctgacgatctcgggcgaggacgctcccgatctcgtcgccaccgcgccgctgacgccctccagcgtcatccgcgccaagatcgaggtggtgctgatcgccgtcgccgcgatcttcagtccgctaatcgcggcgctggcctgggcctcgccgtaccaggccgcgatcagtgccggcgcgatcatcgtcagcgcggccgcggcgaccgcgatccagctctggttccgggtgcaggcgcggcgcagccaattccggcgccggcagacgtcctccaggcttgcgaccttcgccgaagctttctcctcgatcggctgggctgcgagcgccgcactgctgctcgccttgccgctcgccggcctcatcagcggcctgatcaccgccggcctggtcgccatcacctggaagctcagcccaaagcgcgactagaggccggcccaaaggtgcgacgctgacgcgctgttgatcgcggcccattggccacgcactgccttgcacgctagactttccctgacatcatcggggacggatccatgcggcgactgttttcgacggctctggcgctgttcggcgcgctcctctcacctgcgctggcgcagcagccacagcgcagcgaatgcctggcgatggccaatgcggcgccgcgggtcatgtccgtcgcgtatcggccagcggccggctcggccggggtagagatcacctatgccggacactccacttacttcatcgacacgccgggcggcctgcgcatcgcgaccgattacagcggcgcgtaccaggtgggacggctgcccgacgtcgtcaccatgaaccgggcccacagcacccactattccttgtatccggacaagcgcattccccatgtgctgcatggctggagcgatgacggccagccggcgatcgtgtcgcagcgcatcagcgacaccttcatccgcaacgtcacgaccgacatccgccgctatatcggcgacgatctcggcagcgacatgatccgggacggcaattccatcttcatcttcgaggcggccggcctctgcatcggccatctcggccacctccatcacaagctggacgacacccatttcgcccagatcggacggctcgacatcgtgatggtgccgatcgacggcacctacaccatgtcgttggacggcatctccgagatcaccaaacggctgcgcgcctccgtggtgctgccgatgcatcgcttcgccaccccgctcgaggacttcatgcggcggatcggccagcacttcgagatcgagcgccgcctcgagcgctcattccggatgtcgcgggatacgctgccgaacaagccgatcgtgatcatcctcgacggcgtctgaggcgcaattttctccaagccggccagcggccgatcatgctgatctcctcgcaacaggagatcgacatgagcgactttgcgcgattgttgcacgcggacgcagccaaccccgagcatgccgaggcactccagctctatggccgcttcgtcggcgactgggacgccgagatcaccgcccatgggaccgacggaacgaggcacaccgcccccggcgaaatccattttggctgggtgctcgaaggccgcgccgtccaggacgtctggatcattccccggcccgcgagcgcgccggcctttccgatcgccggcaactggtacggcacgacgctgcgggtctatgatcccgccatctcggcctggcgaatttgctggttcgatcccgcgcgctgcgtgttccgccagcagatcggccgtccgcgcggcaaggacatcgtgcaggaaggcacgaccgaagccggcgagctgacgcggtggagcttcacggagatcaccgaccagtcctttcactggctcggcgaatccaaaccgcctgcggcagccgactggcggctcgcggtcgacgtgagggcgaagcggcgcaggagctgacgaaggccgctgtgctcgtgatgacggaggcggttgcagaacacgcgctgctgcctgacgagatcagatgctaggctcctccccaacaatgaacgaagggagcgaacgccgatggccgcaagcggtctgcctagcaacaccagcgggctcttcgtcgagccgcgcgaggactggctcgcgttgcatcgcgaggagatcatcgatcccttgcgaccgatcgtcgatccccaccaccatctctggaatcgcggccatcgctacctgatcgaggaaatggcggccgacatcgcatccggccacaacgtcgttgccaccgtctatgtcgattgccggtcgatgtaccgtgcgcacggccccgaagcgttccggcccgtcggcgaggtcgagttcgccaacggcgtcgcagcaatgagcgccagcggagcttacggcaacgctgcgatctgcgccggcatcgtcagccacgccaatcttctgctcggcgattcggtaaagccggtgctcgaagccgagatcgcggcgggcaacggccgcttccgcggtatcaggcattcctcggcctgggacgaagaccctgtggtggcggggatgtacgcgaacaggccgaagggactgctgcgggacaggaccttccgcgaaggcttctcctgtctcgcccccctgaacctcagcttcgatgcctggctattccatccgcagatcggcgagctgaccgagctggcgcgcgctttccccgacaccagggtcgtgctcgaccattgcggcggcccggccggcatcggtcgcttcgcgggccggcgcgaggaggtgttcgcgcaatggcgcgcctcgatccgcgagatcgcgacatgcgggaacgtggtggtgaagctcggcggcctcgcaatgtgcctgctcggctacgacttccatctgcgcgagaggccgccgtcatccgaggacctcgccgcggcgtggcgtccctatatcgagacctgcatcgaggcattcggcgtgaagcgggcgatgttcgagagcaacttcccgccggacaagggccagtgcagctaccaggtgatcttcaatgcgttcaagcgcatcgcatcgtccttgagcgaggcagagaagacggcgctgttctcgcaaaccgcggccgacttctaccggctcgagctgccgtcatgacgacaagaggggccgggatgctgatcccgacccctcttcgtcgtggccgctgggaagcgttcttgaaacttgatcgtcggaattctagccggcgcccatcagcgaggccggacggcgctcaccgctggaggcgaacattttcttgagcttgttgacgacgcggatcaggaagccgatcatcacgggattggtcttgcggcagaacgcgatcttcttgacgtggccttcgacatgccatttggcgtgcgccccgtcgcggaagaagatgacgtcgccgggaccatagcgcttgggcggcatgccgtcgctttcgagcacgatcgatccttccatgatcatgatcgtctcgtcgatgtcgtagtaccagttgaagcgcccttcggtgcattgccagatgatggtctgggcggtgccgtcggcgctggtcgacaggacgcgcgagcgggagaccggattgccctcgatgacccaggacggctcgatcggccgcagttcgaggtcaacattgcaactaccgacttcaatcaatgccatttgcttcctcgggaaatgatatttgcggccgatcccggccgggagtgtttcgaaagatgttcggacgctagtagcccgtttttaattctttcttacagccatttcgagaatcagccggaagcgacaagtgcaaacggttaacgtcgcaattcccttgcaaatccgcgcacatgccgcggtcctttcccgggtgcgacaaaacgcgcgaaggcgccggcgcccatataccattgcgcacgcaaggaatgagcgcacggatctgccgccgcacccaccccgccctgaagagaggtacgccggctacttcgcccactcgcccttgcggaaaaccgggaccttgctgccgtcggccaaaatgccgtcgatgtcggtctcggccgatccgatcatccaatcgatatggatcaggctctggttgccgccttgcgcggcgatctgctgcggcgtgagctgcgcgccgttgacgaagcatttcgaatagcactggccgagcgcgatgtgcgaggctgcgttctcgtcgaacagcgtattgtagaacaacaatccgctctgcgagatcggcgaggaatgcggcaccagcgccacttcgccgaggcgccgcgcgccctcgtcggtgtcgagcaccttgttcagcacctccgcgccgcgcgaggcctttgcgtcgacgatcttgccgtcctcgaagcgcacggcgatgttgtcgatcagcgtgccctggtaggacagcggcttcgagctcacgacatggccgtagacgcggcggcaatgcggcgtggtgaagacctcttcggtcgggatattggcgttgcagctgatgccgttcttggagagcgaggcaccgccttcccattcgtgaccgtcggcaagtccgatggtgaggtcggtgccgggacccgaatattgcagcgcgcggaagcgctggccgttgagccaattggtgcgctcgcgcagcaccgcattgtggctcgcccaattgcccatcgcgtcctcgtgatcgacacgggacgctgcgaaaatcgcatccgcaagcttgccgaccgccacgtcctcaggatcatcagggaataccaacctcgcccaggacgggcttggataggcgatgatgttccagttggtgtcgaaattgacgatcttctccagcgcgggctgataggccatcgaatttgccttgctggcgcgcgccactttggacggatcctcgcccgacagcagcatggggttgtcgccgacgatcgcgagccgcgcggtgttctcggagaatgccttggccatgccctcataaagccagccggcggcacgatcgaaactgtcgtcgtggccgtgacgatagcgcgccagcgtcatctcctcgtccgacaggatcggcgtcacgagacctgcgccggccttgtaggcatgcacggcgatccgtcgcaccagcggcagcgcgaccgcgggcgccgtcagaagcagatcctgtcccggccgcaagcccaggcccaccttcaccgccacctcggccagacggtcgagcttcacgggatcgatgggagtggaggtattgcgttgatcagtcatgccggaccctctgccgaactctctcagtcaatctaagtctagcaccgccagacacaagtatgcgagcgccatgcggcacatgaaagatacgcggtttcacgcatttggttttcaacgcgttgccgatttcagcacccgatcgaccatggcaggcgcgaggccgaggtaatttttcggtgaagtcagcgcctcgattgtggcgcgattgatgcggcttgagatgcgcgaatctgctgacagcgcatcggcaaggctcattcccttctcgttggcctgacggcaggcgtcatagaccacgtcatgcgcctcctgccggccgatttgcggcgcgagccccatcatgaccgcttcggccacgatcaggccgcggctgatggcgagattgtcgttcatcttcgcttcgtccacgatcagaccggcgagcgcaaacttcgcctggtgcagcgcgccagcggtcagcacgaaactttcagggatcgccatccattcggcgtgccacggccctgtggcacgctcgaaatcctgcaccatggcgtcgagcatcaggccggcatgctggcgcaccgctttggaagccgcgagcatcagttccgacgaaatcgggttgcgcttctgcggcatggtcgaggaggcgccgcgccccttgacgaaaggctcgtagacctcggcgaactcggtcgaggccatgatcatgatgtcgagcgcgatcttgccgagagagccggtgaccagcgcgaggaagttcacggcctcggcaaagccgtcgcgcgcgacgtgccaggtcgaggcgggaacgccgagcttcagctcggcgcagagcgcctcctgcacctcaaagcccttgtcgccgagcgaggccagcgtgccggcggcgccggcgaactgaccgaccaggacgcgcggcttgagctgcgccagccgctcggcgtggcgatcgaacatcgcgagccagatcgcggtcttgtagccgaaggtcaccggcagcgcctgctggagatgggttcggcctgccatcgccgtgtcgcgatggcacttcgacagatcggcgagaattctgcgcagctcgccgatgtcgcgttcgacgatctcgagcccggcgcgcaactgcagcaccacggcggtgtccatgatgtcctgcgtggtggcaccccaatgcacgtagcggccggcctcgccgcattgcttcaccatctgatgcaccaaaggaaggatcggatagccgacgatatcggtctcctgcctgagcaggtcgaaatcgaacgcggcgacgtcggtccgcgccgcgatcgctgccgccgcctcctgtgggatcacgccgcatctcgcttccgccctcgccagcgccacctcgacttcggcatagcgcgcgaccgtcgcgacgtcggagaacacctcgcgcatctctggcgtgccgaaggcgtcgcgaaacagcatggagtcgagcacggtggtggaggcggggaaagctggcatgggcgtttcttcgtggttgaagtcttgtgtgtgcggcagcttacgcaggttgctcggcagagcaatccgacattcagggttcatcacacgttcggtgccgtccgatggttctcgcaagcctttttctcggtgactccgaggcctgtactgcgcatcgccccttcaggacggaccgcggccatcggccccggagcgcaacattcgagcttcggttgtattcccctcagaaaacggcatggcagccatcacgcaatctcgatgaaccaaggggcctcttcggcagacacacgattttcgacccaaatttccttttgtcattttattcgcgttattcgcgttatttcgcaatgaggcctgagttttcgacgtgcagtttctgttccgggaccaccttctcgacactgaccggcgcgagctgagccgcgagcaggttcccattgccgtggagcctcaggttttcgacctggtcgttcacctcatgcagaaccgcgaccgggtcgtcagcaaggacgaactgatcgacaagatctggcacgggcgcagcgtctccgaatccaccctgaccagccggatcaacgcggcgcgcaaggcgatcggcgatgatggcgcgagccagacgctgatccgcaccatcacgcgcaagggttttcgcttcgtcggggacgtccagacacaatccgccgccgtcgcgccggaaccggtccgtatcgcccagccccaggcagccttcgcgctgccggagcggcccgcgatcgccgtgctgccattcaccaatatgagcggcgaggccgggcaggattatttctcggacggcatcagcgaggacatcatcaccgcgctgtcgaagctgcgatggttcttcgtggtcgcgcgcaactcctccttcgtctacaagggccgcgccgtgcacatccaggaggtcgcgcgggagctcggcgttcgctacgtggtcgaaggcagcgtgcggcggagcggcgagcgggtgcgcatttcggcccagctcaacgacgtctcgaccggcagccatctctgggccgaacgctacgatcgcgagctcgccgacatcttcgccgtgcaggacgagatcaccgaggcgatcgtcgctgccatcgagccgcagctctacgcagccgaaagtttccgagcccagcagaagccgccgggcagcctggatgcatgggacctcgtgatgcgggcgctctcgcattattggcgcagcccccgcgagggcaacgccgccgcgcaacgactgctggaacaggccgtcgcgatcgaccccgcctatggcaaggcgctgggcctgctcgcgaccagccatatgttcggcgcgcatatgggctgggccgacatggcggcgaccatcccggtcgccgaacgcgcggcgctcgcggcggtggaggccgatcgcgaggatgcctgggcccatcacggcctcgcttacacctatctgttccgccgccgctttgacgacgcgctggcagaattcgagttggccttgaggctcaatccgaacttcgcaatggcgcatgccttccacggcgtgacgctgtgctacgccggccgatggcaggacggcgatgcggccgcgcgccgcgcgctgcggctgagcccgcgcgacccgcttgcggcgatctattgcggcgttgcggcctatgcccggttcgtcggccgcgactacgagggagccgcacagatggcgcgggaatcgctgcgccagcgcgcagatttcgtcggcgcgcaccgcgtgctgacggcggccgccggcatgctcggcgatcccgcgctcgccgcttccgccctggaaaacctgcggcgcgcccagcccgaggtctcgcttgagtggatcacgcgcgagttgccgatgctgcgggatgaggaccgcacgcattatctcgagggcctgcggcgcgcgggcatgacgtgacaccggcgcaatgacggcgcatcctctcccctgaagcacgaatcttgcaggcgcccgcggcatcaatgtctgggcggagtgctcttcaaatgtacgacacgatcatcgtgggcgccggctcggccggctgtgtgctggccaaccggttgtcggccgatccgggccggaaggtgctggtgctcgaggccggtcgtgccgccccgcccgcctcggacattccatccgattggccgacgatgttcaataccgcggtcgattggggctttcacacggagccgcaagcaggctgccggggacgtcgaatcttctggccgcgcggcaagatggtcggcggctccggcgcgatgaacgcgatgatctatatccgtggcctgccgtcggactacgacggatgggcgcaggcgggctgcgcaggctgggcctggaaggacgtgctgccgaagttcatcgccttcgagaacaacgcccgcttcggcgacgatcctctccacggcacccgcgggccgctgcacgtcgccgacgtaccgttcgtcgatcccaacgaattgaaatggctggaggcagcgcaggccgcggggctcccgcacaatcccgatttcaacggcgtcacgcaggagggcgccggctttttccagttcgtcatcaggggcggcgagcgtttcggcaccggcaaggcctatctgcgcccggcgctggcgcgtcccaatctcgtcctcaagaccagcgcacacgtcacgcgcatcatcatcgagcgcggccgcgcgatcggcgtcgcatatctcgataatgggcagccgaagagcgcattcgccgccggcgagatcgtgctcgcctccggcgccatcggctcggcgcaacaactcctgctgtcaggggttggcccggctgacgaattgaagctaaccggcgtcgaggtcgtgcatgatttgcccggcgtcggcagggatctccaggatcacatcaacattcccatcaccttctacacgaaggagagaatcggcatcggagcctggaccgaggagagtctcgcgacgagccttgcggaatggcaggcgcaccgcagcggcccgcgcacctcgccctgggtcgccgccggcgcccatgtgcgcagccgccccgatgtcgagcccgatctccagctctatggcgcgatcagcccgcaccgcgactatgtccgctttctttcgtccaagccgggcatcaccctgcatgcgaccttgcagcggccgaagagccgcggccggatcacgctgcgctcggccgaccctatcgaagaccccgcaatcgatcccggctatttcgcatcggacccaagcggaagcgatatcgcaaccatggtcgaaggcgtacgcatcaaccgtcgcatcgccgcgcagtcgccgctcaggaagatgatcgagtgcgaggtcacaccgagtgcagaagcgatcaacgatggcgagattgccgattacatccgcggccattgcacgacgctctatcacgctgcctcgacctgccgcatgggcatcgatgatctggccgtcgtcgatcccaggcgattgcaggtgcgcggcatcgacggcctgcatatcgccgacgcctcggtgatcccgatcatgatctcaggcaacatccagacgccgacgatcctgattgcggaatgcgcagccgcggcgatcctgggctaggcgctaatcgtcgtcgggcccgaacaaccgaacctgcggaaagccgctgcgcggccggtcggcgtagtcgcgcgcatccgaatcttcgcggatgttgcgggccacgtcgtcccaatcggtgcggccgcggctgccgcgcggctcgcgggactcgtgataatgtcggcgctcggtccagcgctcccggcgctcggctcggcgccgctcgctcgccgcgcgcttcacatcggaatcccttgccctggcataggcattattcgacgacgacgatgacggctcggtcgaagcctgctgctcggcaggccttgccgcctgcggtgccgatggcggcgccgccttgggcggctcgactgcggccgcttgcgagggctgcgccgccggcggtccgtcattcgcctgggtagattgcgtatcaggctttgcgggctcgggttttgcttcggcctgcgccggcgtggcaatcatcgcgccgaaggcttgcgagccggtgagatagttcacgcgctcagagggagcatccggtgccgccggcgggccggcagcctccgtacgctgcgccatcttgcttgtgtccgggccctgcttgggcgcgaccggattcatgatgttgccggcaacgataccgccgccaagaccaatggcgatggccgcgacgatggttccggcaccgacaaaataggctgtcgaggcgcgcattcatccactccctctttggagcgggcaacgcgtggggattgccagatgttcctgatgggctgcggctcctcgaagaggaaccgcacggatcagatttgctgcgcgaccttctcgagcccgataaggcgggcgagcttgcgcacttcttccttctggtcgtcacggagctggaacagcagcggcatcgcggccgatttcaactgctgcacctcgtcgcaattcggatcgatctgcgcgctgggcggcgcattcggattcgacaacttgttcgcctggatcttgcgggcgacgttgcgcagcgcggtctcgacggaaggccagtaatattcctgcgacgacgacagtctcaggcgatccctgatgcccgcgatctgcacgtcggacagcagtgaataggacttctgcggctgcggcttggcgacagccttcggcttggccggaacttcgacggcaggaacctccgtcacggcgggcgcttcgtgagcgctccgcttcggcatcgggaaatcggagggcgtagccgccgcaaaggcctggcggagcggctcggccagcacgggcgcctgcgaaagcttgtcggcggccacctggaccggctcaatcgcggccgaagccagcgcaagcgtcggaatcagacgatcggccttggcggcgcggttggtcgcaggcggcttggccgggggcgtctgggcgatcatctcggcgctgacgcttggaacactgtcgcgaccgagaatggcggttgtggcggcgccgagaaccaggaaacaggtcagcacgacgatggtgatggctttggacaaacgtctctccgcgcccagcttcaagtccacgtgatcagtgcccggaaactgggcggtaattaaggcttaaccgtgccgttgcggcggcaatcgcgcggactgcggcgacatcggccggaaaactcagtcaatcaggcggcggccgccagctcgtaggcgtcctggatgtcggcgacgatctcggaggcctcccagaccgcacgcggctcgaccgattgcagcgtcaccgtccagttgccgcccctgcgggtgcgagggacgctgacgatgtcgaaacggacgttgcggcagagcgggtgccgggccagggcgtgagcaacgcggatgcggatttcgtccatcgtcgcggacgtcttgctgttgagataatcgaagtccatcgcctgtccctctcgtcccgattggcggccgtaagagggattcttggcgggcgatggttaatccgccgttaaatgaggggagcggaagagcgcgggactaacgtgatctcggcgctgagcttgccatatcctcataccgggcttggctcggccatcccactgacaggatcacctgccgccgcgcgcgtcacgatactcggcgagcgtccgcccgatgagatcgtcgaccgcgagcacatccgtcacccccgatacggagtgcccggcgctccagatgtcacgccagcgctttggccggttctcgcgtgcggcaacgtcgatgtccttggcgatgtcgatcgcaccgcgcgccggcagatcgtccggatcaagcccggcggcgacgatcgacggcctcagcatgctggtctgcaagcccgtgaacgcggtggtgagcaggatgtcgtcggcgctactctcgaccagcatccgcttgtaacggtcatccgccatgctctcgcgcgtcgcgatgaacttcgtgcccatataggcgagatcgcagccaagcacctccgcggcgtgcagcgcatggccatcgctgatgccgcccgccatcacgatgatgccgtcgtagaatgcgcgcaccgcgcggacgaaggcgaatggattaagccagccggtctggccgccggcgccggcactcagcagcaccagcccgtcggcaccagcttcggccgcgcgttcggcgtggcgtatcgaagcgacatccgcgagcaccagtgcgcccgcgtcatgcagcggcttcagcaccggcgcgggcgagccgaccgaggtgatgacgatctccggctggtgccgcagcagcaccgcgagatcctgctccaggcgcgtattggagcggtgcacgatcaggttcggacagagcggtgcggccttccggccggtttgatcttcgtgctgccgcaaccgcgccgcgatcccggcgagccattcatcgagttgttccgtgttacggcaattcgcggtgggaaaactgccggtcaccccattgcggcaacatgcggccatgagctcgacgcccgacaccagaaacatcggcgccgcgatcagaggcagggcgagacgatcgccgaagcggtgcagtcgatccgatggcatgcatgcctccctgcgcgggctttgtcgtttcctcccgcagtctctgtgctagcgtcatcagcaacattggcacgccagaagccggtgacaaagcaacgaggaaacatatgtctgatcggctccacgcatcccctccagcttgtgcgcagacgctacgggcgctgtcgcgctatccggatcgtatcgcgttcgcctggcctgggggatcactgagctatcagggcaccatcgacctgatcgggcggatccagggcgtgttcatgcggctcggcttgcagcccggcgcgcgtgtcgccttcctgaccgcgaaccgcgccgacacctggtgcgccggtgtcgcggcgcaattggcccggctctgcatcacctggctgcatccgctgggatcgctggaggaccagctgtttcagctcgaggattccgaggccgagatgctggtggtcgacgccgccgccttccgcgatcgcggcggcgagctcgctgcgagggcggcccggctgaaggcggtcttcaccatgggaccggccggctacggcgccgatctgctggccgcgatcgaagatgccggacatgcgagcccgctgtgcctcgccggccccgacgatctcgccacactgaactataccggcggcaccacaggcaaatccaagggcgcgctgcgctatcaccgcgagaacgccggcgccgccggcgcgatcctggccgacttcgagatccccgaggctgcgcgctatcttactgtcgcgccgatcagccacgtcgccggcacgaaggtgctgccgaccctgatgcgcggcggcaccgtgcacatgctgaaaggtttcgatcccgaagccgtgctggccacgatcgcgcgcgaacgcatcaacttcacgctgttcgttccgaccatgatctatgtgctgctcgatcagccggcgctgggcaggaccgacctctcctcgctcgagctcgtgctctatggcgcttccgcgatgtcgccgagccggcttctcgaaggcatcgagcggatcggaccggtgttctcgcagctctacggccagaccgaatgctacccggtctcggtgctgcgcaaggccgaccacgatcccaagcagccggagttgttcctgtcctgcggcttccccatcgcggcatgcgaagtcaagatcctcgacgataaggacgaggaagtgaaaacgggcgaggccggcgagatctgcgtgcgcgcaccgcacgtcatggcggagtactggaagcgcccggatatcaccgccgagacgctgaagaatggctgggtccataccggcgacatcgcgcgcagggacgagcgcggctacatgttcatcctggaccgcaagaaggacatgatcgtcaccggcggcttcaacatcttcccgcgcgaggtcgaggacgtgctgtcgcaacatgccgacgtcgccatggtcgcagtggtcggtatccccgacgagaaatggggcgaggccgtcaccgccatcgtcgtgccgcgtgaaggcgcaaggcccgatccggatgagctgatcaacctggtgaagacgcggaaaggctcggcgcatgcgccgaagcagatacagttcgtcaagcagctgccgatgaccggcgtcggcaaagtcgacaagaaggtgctgcgcgcgggcttctggagcgggcgggaccggatggtgggataaaacccggaattctacggtgtcgttgtggcccagacaccacaacgcgcaacggagtgggtggcggtgcggcccacgcaattgccggcgaatcagggaatcacctagaccgctgatggggctgggaagcggagagtgagatgagagtcgcttccctggaaagtgcagtcgccgcgatcaccttgatcacggctatcatcgtggtgctgtgggggatcaagatcttctacggaatgtgaacaggcaggatggcgagcatcccttccgcggcggcggaagtctgccgttcaaatcggctcccggcggccatgtcgcccaccatcaccgtttctcgatgacgaggctctgcatcgcgcggccgaaatagccctgccggtccgcaagccgcgacatcgcgaggcccgctccgtccggaccaatccaggattcaccgtcgagcaggatccattcgcccactggctggcgcgacaggctcacggtgagatcggcgttgatgtaggtccaggcgcgaaagtcgagcgttgaagcggtgccgttggaaaagtcggcggcgaccacggcgcgcatcgcctgggatacagcctcgccttcgaccagcggatggtcgaggcgaaaccagatcgcgccggggccggccttgccgaatcggccgagcgcggcgcgcatcgagaccatgccggcgaacgggctggtcgcgccatgcccgtcctcgaccagcgaatcctctggtgacggcagcgtgacgggcagatccttgacctcgtccggcagcgcctgcgtctggcgtctgatctttagcacggtggccccgaccacctgcacgccctcggccagcagcttgatctcgcagagctggatcttgcggccctcgcgcaggacctcgctttcaatcgtcagcggcgccaccggcaccgggcgcatcagatcgattgtcacgcgcgcgacatccattggcgccggtgcagggatgcgctccgccgcccacgtcaccagtgccgacggtgccgagccgtgctgcatgcggcggtcccacgggcccgcggcctccgggctggtgaggacgctattgccgtcgacgcggtaaatggcgggcatggcgagcgcgatctcgaagcgatcacaacggcggatcgatcgcttcgtcatactccttcttgaaacgcgcgatcagctcggccgccggcacgaccttgtcgatgctgccgatgccctggcccgagccccagatctccttccaggccttcggcttggcgcgctcgccggaggcgtcggtgccgaaattcatcttggaggggtcggaggtcggcagattgtcgggatccatgccggccgcgacgatcgagggcttgaggtagttgccgtgcacgccggtgaacaggttggaatagacgatatcgtcggcgctcgagcctgcgatcatctccttgtacttttcgaccgcgttggcttccttggtcgcgatgaaggccgagccgatataggcgaagtcggcccccaggatgcgtgcggcgcggatcgccttgccgttgccgatggcgcccgacagcgcgatcggtccgtcgaaccaccttcgtgtctcggcaacgaaggccagcggcgagatggtgccggcatggccgcccgcgccggctgccaccaggatcaggccgtcggcgcccttctcgatcgccttgtgcgcgaatttctgattgatcacgtcgtggaagacgatgccgccccagccgtgcacggcctggttcagctcctcgcgcgcccccagcgacgagatgatcatcggcaccttgtacttggcgcagagctgcatgtcgtggtcgagcctgttgttcgacttgtgcacgatctggttgaccgcgaacggcgccgacggcctgtcgggatgggcgcggtcataggccgcgagctcctcggtgatccgcgccagccactcgtcgagcagctccggcggccgtgcgttcagcgccggaaacgaaccgaccacacccgccttgcactgcgcgatcaccagatcgggcaccgagatgatgaagagcggcgagccgatcaccgggatcgacaggcgtcccttgaacaaggcaggcatggacattgcggagcgatcctctcttggcgctgaaatcgaaggttggccgtcataccaacaaggcaatctttccactgtcaagtattgcgttttgacgccgcggcgggttggggccggtgcaattccaagcagcggaattcggccccgtcattgcgagcgaagcgaagcaatccaggctgtctccgcggaaagattctggattgcttcgtcgcaagtgctcctcgcaatgacgtggagggagcggcggattgcgaacacttacccgatcaaatccggattgatcagccgctcgaacgagaacatctcgtcccacttctcctgggtcaaaagcttgcgctcgaccacgacgatctggtgcagcgacttgccgcttctgtagccctcgcgtgcgatctcggcgcaaagcttgtagccgagcagcggcttcagcaccgtgacgatgccgagcgagttcagcacgatgttgcgggtgtgctcctcgttggcggtgatgccgacgacgcagttctcgcgcaggctgttcaccgcgcgctccatggtgcggatcgagaagaacagcgcgaacgatatcaccggctccatcacgttgagctggagctggcctgccgaggccgcaagcgtcaccgtcgtgtcgagaccgatgacgaggaagctggtctggttcacgacctcggggatgacgggattgaccttgccgggcatgatcgaggagccgggctgcagctgaggcaggttgatctcgttgaagccggcgcggggacccgaagcgagcaggcggatgtcgttgcagatcttcgtcagcttgctggccgtgcgcttgaggacgccggacagctgcacataggccccggtgtcggaggtcgcttcgaccagatcgccggcaagcacgaagtctacgccggtgagctcaccgaggtgccggaccgccagctggggatagccgacggccgcggtcacggaggtgccgatcgccgtggcgccgagattgatctcgcgcagcagagcacgcgcttccgagatgcgctcgacctcctcgccgatggtggtgccccagcccctgaactccgcgccgagcgacatcggcaccgcatcctgcagatgcgtgcggcccatcttcagcacgcggtcgaattcgcggcccttggcgaagaaggcctcctggagctggcgcaacgccgtcatgtagctctcgagccgcaggatcaacgccaggcgaaaggccgtcggataggtgtcgttggtcgactggccgtaattgacgtgatcgttggggctgacgtgctggtagtcgcccttggcaaagccgagcgattccagcgcgagattggcgatcacctcattggcgttcatgttggtggaggtgccggcgccgccctggatgaagtccgtgacgaactggtccatcatgtccccggcgataacgcggtcacagccgaggatgatggcgtccgcgaccttggcatcgatcgcgccgagatcgcgattggccatggcggcggccttcttgacgtagccaagcgccttcacgaagtaaggctcctggttcatcggaatgccggtgatgtggaagttctccttaccccggatggtctggacgccgtagtagatgtcgtcggcgatctcacgctgtccgaggaagtcctgctccgtccggctcatgggcgctccttgttgcttacgcgcaaggcccacgtcagttcaggcacagcgcgctggtcacgaacgtgtcggtacggcaatcgtccggcttgcgcggccgtcccggaatcaggaccttggccgagcatttttcggcggaatcggcattcaggctcttgccttccttgtagcccttgctctggcagagctggtcggccgcctgcttgcagtcgggcgctccgttcgaggaggccgggcaggcgatgcggcccgacaccatggtcgagggcttggccagccgcgacagatcgttcatggtctcgctcgggcttttgatcggcggcaggatcgagggcagcttctcgaacagcttgcccatttcattgatcaacccggaattttccccaggcgccggtgacacggatggcgcaggggacgacggcgctggcgcggcccgaatatcctgcccctggatcccgagcgcaggcggggcggattgcgtctgccccgtcccgccgccgagcaggagcagcagcgccgctgacatcaacgttccgaaccacacggccggattgccggatcgaaccatcatgatggcaaccgtagccgaagccggcgcggcggcaaagcgccgcggctctagatcagcttgatggcaatgacgaagccgagcaccagcacgatggcgcccagcgcaacccacaatccgagatgccgttcgatcctgacccggatccaatcgccatagcggttgagcaggatcgcgaccacgaagaagcgtccgccgcgcgcgacgatcgagcacaggatgaacaggatgatgttgtagccggcgaagcccgaggtgatggtgacgagcttgtacgggatcggcgtcagccccttgagcaggatgatcaccgcgccccattccgcataggaggcgcggaaggcgtcgaccttgtcggcgaggccgtagacctggatcagccattggccgaccgagtcgaacagcagcgcgccgatggcatagccgacgatgccgccgagcaccgaggtgacggtgcagaccgcggcatagagccaggcgcgctgcggacgcgccagggacatcggaatgagcatcacatccggcgggaccggaaagaaggagctttcggcaaaggacacgatgcccatgatccagagcgcgtagggcttgtgggcggcgtcgatacaccagtcgtagatacgtttcagcatggcgccgcgatgaagcaccatgggacggatttgtccatgccaggattgaggcgaatgatgaggattctagtggcgcttgcgcgcgccgcggccctcgagcgcgacaattggccgcctggcagcaacacgtggtgacgcgactttgggcagcttcatcggtgatttcggcagcttctcggcaatgccgagcaggtcttcgcgccgggtcatctcgcgccagacgtcctcgggacgtaccccggccgaggcccacagcaccgtgagattgtagagcaagtcggcgctttcccggatcacggcctcgctgtcgccattgaccgcgtcgatgacgacttcgatggcctcttcggccagcttcttcgccattttggacggcccgcgctgaaacagccgcgccgtgcgcgacgttgccggatcaaggtctctggccgcgagcacagccagatatagccgctcaagcgaatcactcatggtactcgaaactactctaaacaaatggcgggcgtgttaacgcacgacaagaaaagcggaaaacgggccggcgcggcaagcgcgacggcctcttgttcggggcaggtccccgtcgcccgccgctcagtagcaggtcgaaatgtagccttggccgccccgcgcagactggtaggggccgccgcaacgatggaacgggcgcgggccaatataggagtcgccgccgtagtagacgggaccgtcggcgtagtagaccgggccgccataatagggagcatcgtaggcgtaggcgttccgagtggcggcgatcgcaaggccggtgccgacggcgccggcaatggccgcgccagcaagagcagcgccacccccgccatgccaatggcgaccgcccgcaaacgacgcggtgggggcgacggtgctcagcgccagcacggcagcggttgcgagaatggccttgcggccggcaagcttcgaaaatctgtcgaacatgttccggaccctccttggggctgaatgggtgcctctagacaggctcatgtctttcaaacccgcaccacccaaattgggttccccgaccccaacagaagctgaacggggttgcgtaacgatgccgcaacgccgctcatccgccgttcatgttggcgcgcgcacggtcgtcgccggccggcgctgcaagcgtcacgaaatcacaacaatgcgggaccggcgcaactgatgtcaggactcaagaccgcccttcacggcctcctcgctctttcgatctcgcttgcagcactgattgcaagcgatctcagcgcggccgaggccaccacgccctccgttgcgatccacttcaccttcgaccgggcgccggacgcgagcatggcgccgttcttcctggcggcgaaggacggcaggttcggcgccgagcgtctcaacgtgtccttcaacagcgcaagcggatcgcaggaagcgctcgcgcgcgttgccaagggcgacagcgagcttgcgctcgtcgacatcaatgagctgatccgctttcgagacaagcaagacgccgcgccggtcaaggcggtgttcgcgctgttcaaccgcacgccttacgcgatcatcgcgcgcaggagccgcggcatccaggtgctgcccgatctcgacggcaagaccgtgggcgttgccgatggggatctgtcaatgcggctatggccggcgctggcgcaacagaacggcatcaaggcatcgcgcgtcaaattccacaagatcagtgcggcggtgcgcgagccgatcctgtccgcgggacaggtcgatgctgtcgccggcttgagttatctctcggcggtgaacctgcgcgatcgcggcgtccccggagccgatctcgtcgtgctgcgctttgcggactatggctgcgaggcctatggctttgccgtggcggtcaatcccgttttcgccgcagcaaagccggccgccgtgaagggcttcgtccgtgccttgatggctggcgtcagcgccaccgtcagggagccggaacgtgcggcggaggaggcggcgagccgcatcgacggcggcgaccgcaacctcgagctggagcgcctgcgcgcggtcctcgtcgacaacatcctgaccgaggaagtcagacgcaacggcctcggcggcgtcgagccggcgcgcctggagagctcgatcgatcagatcgcgcaggacttcaagttccgcaagcggcccgcggcgggcgatatcttcgacgatcaatacctgccgccggcggcggagcggacgatcaactgagccaaaccgaagctggcgctgtatctcggggcgttccctgcttagaatgtgggccccgtcgccgccgagtccctcgcccgaatgtccatcctccgtctctacacccgcgttctcgaattgctcggcagcgaggcacggctgggctggctgctcgcggtcgccaatctcctgctcgcagggtcgcaattcgccgagccggtgctgttcggccggatcgtcgacgtgctctcgggcaagaccgtggcgggctccaactcggcctggcccttcctggccgcctgggtcgcgttcggactcttcaccatcgcctgcagcgcgctcgttgcctggcaagccgaccggctctcgcaccgccagcgccaggccgtgctgactgactatttcgagcacatcctgcaactgcccctgaccttccattccggcacccattccggacggctgatgaaggtcatgctcaacggcacggatgcgctgtggcggctctggctcgggttcttccgcgagcactttgccgcaatcctctcggtcgtggtcctgctgccgctgtcgctctacctgaactggcggctcgcgattctgctgttcgtgctctgcatcgtcttcactgcgctcaccactttcgtggtgcgcaagaccttcggcatgcagatggaggtcgaggaacgctacagcgagctctccgcgcgcgcctcggacgcactcggcaacgtcgcgctggtgcagagtttcgtgcgcgtcgagtccgaggtgaaggggctgcgttccgtcgccgacgagctgctggccgcgcagatgccggtgctgtcgtggtgggcgctggtcacggtgatcacgcgcgcctccaccaccatcacggtgctcgcgatcttcacgttcggcatcgcgctgcacgaccggggattgacgtcggtcggcgagatcgtgatgttcgtgagcttcgcgacgatgctgatccagaagctcgagcaggtcgtcagcttcatcaacagcgtgttcatggaagctccgcgcctgcgcgaattcttcaatgtgctcgacgcggtgcccgcggtgcacgaccggccggatgcaatcgacgccggcaggctgtcgggcctcgtcgagttcaacgacgtcacgttctcctacgacggcaagcggccggcgatcgaggacctcactttcaccgcgctgcccggccagaccattgcgctggtcggtccgaccggcgccggcaagtcgaccgccattgcgctgttgcatcgcgccttcgaccctcagtccggcgtcatcaaggtcgacggcatggatgtgcgcggcgtcacgctgacctcgctgcggcgaaacatcggcgtcgtgttccaggaagcgttgctgttcaaccgctcgatcgcggagaatctgcgcgtcggcaagccggacgcgaccgaggccgagatgcgcaaggcggcggagcgcgcccaggcgctcgaattcatcgagcgcagcggcggcttcgagaccaatgccggcgagcgcggccgtatgctttccggtggcgagcgccagcgcctgtccatcgcccgggcgctgctgaaggatccgccgatcctgatcctggatgaagccaccagcgcgctcgacgccgtcaccgaaaccaaggtgaatgccgctctcgacgaagtgatgaagggccgcaccaccttcgtgatcgcccaccgtctttcgaccatccgcaatgcgacccgcattctggtgttcgagaacggacgcgtgatcgaaaatggaactttcgatgaactcgtggccaaaggcggccatttcgccgcgctcgccagggcccagttcatggtgcaggagagcacacgggccggcgtgacggcggccgagactgctgcgacggcttccgaatcaccctagcaagccctcacagcatcgtcgaaattcggcctatttcatcgcggaataccgcaccaatccccctattctcgacgcatcaggcggtataggtttgcgacgccgcaagcggcggcgctggatctcaaaaccgaacatcagatcacgagacccgccccccgggcggatctccaaggaccggaaatcggatagtgcacgcccttcgcccgctgcttcgcagatcgctgttcaacctgttcgccgcgggcatcgcatgtaccgcattgctcgcgccgcgcgcggcaagtgccgaagcgctgctgctgatcgaggcagacagcggcaaggtgttgcaagcggacaacgcgaccattccctggtaccccgcttccgtcaccaagatcatgaccgcctacgtgaccttgagggcggtcaaggacggcaggctcacgctggactcgctgctcacggtgtcgccggttgcagcctcgcaatcgccctcgaagatgggcttcccgccgggaacgcaggtcacggtcgacaacgcgctgaagatgatgatggtcaagtctgcgaacgacatggccgtggtcctcgccgaaggcgtcggcggctcggtcgacggcttctccgcgatcatgaacgacaccgcccggaagctcggcatgacgcagacgagctacgtcaatccgaacggcctgcccgccgacggccagatcacgtcggcgcgcgatctcggcattctggcgcgcgcgttcctgcgggatcttccggaatacgaatacttcgtgcacatcccggcaatccgcttcggcaagcgcgtcaccggcaatttcaacaagctgatcggccgctatcccggcgccgacggtttcaagaccgggttcatctgcgcctccggatataatctcgtggcatcagcgacgcgcaacgggcgccggctgatcgcggtggtgctcggcgccagttccggcaccgcgcgcgccgtgaaggctgcgcagctgctggagcgcggcttcactcaggacaatctcacctggctgaggccctcgctcggcaccgtcgacaatctcgtgcccgtcgacgccacgccaccgaacctgcgcgacgagatgtgcggtccgcaccgcaagcggccggccagcgacgacgacggtgcactgattgccgccaatggcggagcgcccggatcggcctcggccaccggcggcgaggcccaggtcacgttcttcacggcaggtctgcagccgccgctgatgagagcctccgagctgatggcctcggccccgacgccaaccgagcccgtgctggtctatacgggcccgacccgcaccggcacggcgctgatcgccgcagtcgcggccgacgccgacaagcaggcagcgtcgaaaccacgcggcaagaagtcgcgcgtcgccaacaagcccaaggatggaggcaaggacggaggcaaggacgccggcaaggacaccaagacggcggcgacgaagccggataccaagctcaagcccgaagccagatctgaagccaagtccgaagcgaagagcggcgccaagggtgacaccaagggtgacaccaaggccgcagccaagccggcagcgcccaagcatgccgcaaccaagcaggatgcggcggcgaagcccgccgagaagcctgcggcgagcgatcaggcggcgaagcctgccaagcccaaggccgcgacgaagcccgccgctgccgccaagccggccaacaacagttaacgccgcccagaaataaaaaccgcaggctgcctcgcacccgcgcagctacggtttgtgacgattccagtagcgacgccccgacctttgccctaagccacaacggcttgccacccgttccggcaggctggatactggcggcaatgaggcaagcccgagacacaacgggctctggtcaatgaggggagtcttccatggagcgcatctggctcaaacaatatccgcccggcgtgcctgccgatatcgagccgacccaatatgcatcgctggtcgacctgctggaggagagcttcaccaagttcgccgaccgcaaggcattcatctgcatggacaagtcgatcagctatcgcgacctcgaccagatgtcggttgcgctcgctgcctacctgcagggccgtggactccagcgcggcgcccgcgtcgcgatcatgatgccgaacgtcctgcaatacccggtcgcgaccgctgccgtgctgcgcgccggatatgctgtcgtgaacgtcaacccgctttacaccccgcgcgagctcgagcaccagctcaaggattcgggcgccgaagccattatcgtgctggagaacttcgcgcacacggtcgagcaggtgatcgcgaagacgcaggtcaagcacgtcatcgtcgccagcatgggcgacctgctcggcttcaagggcgtgatcgtcaacctcgtcgtccgccgcatcaagaagatggtaccggcttggtcgctgcctggctccgtgtccttcaatgacgcggtctcggccggccgcggcatgaccttcaacaagccgaagctgtcgccgggcgacgtcgccttcctgcaatataccggcggcaccaccggcctctccaagggcgccaccctgctccaccgcaacatcgtcgccaacgtcttgcagaacgacgcctggctccagccggcgctcgcggcgccgccgcatgtcgatcagctcatggtcgtgtgcgcgctgccgctctatcacatcttcgcgctcacggcctgctacctgctcgcggtacgcgccggcggctgcaatctcctgatccccaacccgcgcgacattcccggattcatcaaggagctggcgaaataccaggtcaacagcttcccggccgtgaacacgctctacaacgggctgatgcagcaccccgatttcaagaagctcgatttcaccaagctcaagatctccaacggcggcggcatggcggtgcagcgccccgtcgctgaccagtggaaggcgatcaccggttgcttcatcgccgaaggctacggcctgtcggagacctcgccgaccctgacctgcaatcccgcgaccgcgaccgagttttcgggatcgatcggcattcccgtgccctcgacctggatctcgatccgcgacgatgatggcaacgaagtcccgctcggtcagcccggcgagatctgcgccaagggtccgcaggtgatgtcgggctactggaacaggcccgacgagaccgccaaggtcatgacggcggacggctatttccgcaccggcgacatcggcatcatggacgagcggggctacaccaagatcgtggaccgcaagaaggacatgatcctggtctccggcttcaacgtctatccgaacgagatcgaggaagtgatcgcgagccatccgggcgtgctcgaatgcgccgtcatcggcatccctgattccaagtcgggtgaggcggtgaaggccttcgtggtgaagaaggacccgaacctcactgccgaggcggtgatcaagttctgtcacgagcagctcaccggctacaaggtgcccaagcacatcgaattccgcaacgacctgccgaaaaccaacgtcggcaagatcctgcgccggcagctccgcgacgagaagaaggcggaggcggcgtaagtctgccctccggtccatgaccgacccggacgacgttggcccggccggcattctcgcgttctggcgcgaggccggccgcgagtgttggtacgcgcgcgatgaggctttcgacgcggaaatcaggcgccgctttctcgcgctctggcacaaggcggtcgccggggaactggcggcctgggaggcgagcgacgatggggcgctggcactcgtcattctgctcgatcagtttccgcgcaacatgttccgcggcacgccccaagcctttgccagcgatgcgctggcgcgcgacgttgcccgtcgcgccatcgaacggggcgccgatcgcaggatcgagccggccctgctcgaattcctctacatgcctttcatgcattccgagcacctggcggaccaggagcactgcgttgcgctgttcgaacgcgccggcgacgccgagagcctgaaatacgcccgggaccacgcggatatcatccgccgcttcggccgctttccccaccgcaacagcattcttggccgcgagacttcgccggacgaacaggctttcctggacggaggcggctttgccggctgacctgaccgtgaacgccggggcgccccttgctgcttccgcggcaggcaatattgtgcaggcccgcttcaaggtctaaaacgcgggaccgatttccagggagagtgacgatggcgatccagattggcgacaagctgcccgaggcgaaattccgcgtgatgacggcggaaggtccccaggtgaagaccaccgacgatatcttcaagggtaagaaggtggcgttgttcgcggtgcccggcgcctacaccggcacctgccacaagatgcatctgccgagcatcttcctcaacgcctatgcgatgaaggacaagggcatcgacaccatcgccatcgtctccgtcaacgacgccttcgtcatgaacgcctggaagcgcgacaccgaccagcgcgacgaggccgtcttcctcgccgacggcaatgccgacttcaccaaggcgatcggcatggagctcgacgcctccgccaacggcctcggtatccgctccaagcgctattcgatgctggtcgaggacggcgtggtcaagaagctgaacctcgaggcgatgcccggcaaggtcgaggtctccggcggggatacgctgctggggcagctgtaagactctggtcattccggggcgcgcgcagggcgagccccggaatgacacctactccgtcacccgctgctgcaaccgcgccatggctatgccgtcgcgggcgagctggtcggcccgctcgttctcggggtggccggcatggcccttgacccagtgccagcggacttcgtgctgcttcagcgcggcatccaggcgctgccacagctcgacattcttcaccggcttcttgtcggcggtgcgccagccgttgcgcttccagccgaagatccagcccgtgatgccttgtcggacatactggctgtcggtgtagagatcgaccgtgcacggcttcttcagcgcttcgagcgcggagatcgccgccatcagttccatctggttgttggtggtatgccgctcgccgccgttcagctccttttccttgtcgccgaacttcaggatcgcgccccagccgcccgggccgggatttcccgagcaggcgccatcggtatagatcgtgacattgggacgctcgctcacgccaccagccccgatggcatcagcccatagtcgcgtgcgctcgccacgctctggtggaagcgcaatttgcggacatattccagaggatcctttggcttgaccagcgcgcccggcggcacgttgagccagtcgaccagccgcgtcagcaggaaacggatcgcggcgccgcgcgccagcagcggcagcgccgcctcttccgccgaggtgagctttcgcacgcggccataggcgttgaggaaggcgcgcgccttggtgacgttgaaggaatgatccggctcgaagcaccaggcgttgaggcagatggcgacgtcataagccagcatgtcgttgcaggcgaaggtgaagtcgatgatccccgagagcttgtcgccgagaaagaagacattgtcgttgaagagatctgcgtggatgacgccttccggcagatcggtgggccagatcccgctcgagagatgatcgagctcggcggcaagaaagtcgcgcaggcccggctgcacctcgtcggcgcggttcgaagccgcatcgaacagcggccgccagccggaaaccgagagcgcattggcgcgccggattgcaaaactggcgccggccagatgcatccttgccagcccctcgccgacgccggcgcaatgcgccgcattcggcttgcgcggccagacgccttcgagaaaggtgatgatcgcggcgggccggcctgcgagctcgcgcagcgactcgccgtcgcgtcccttcacgggcagcgggcaattgacgccgtgctcggcaagatgcgtcatcagcgccaggaagaacggcaggtcgttcttcgccacgcgcttctcgtagagcgtgaggatgaatgatcccttgccggtgtgcagcaggaagttggaattctcgacgccctcggcgatgcccttgtaggagagcaattcgccgagatcgtactgtttcaggaaatccgcaagctcgtcggcggcgacgtcggtgtagaccgccatgaacgatcactcggcggcggcttcggggcgcacctggcgcggaagcgggaagaactcgttttcttccgcggccgagaccgtctccacatgcagcgtgaagcgctcggcgaaggcgtccatgatctcctcgacgatgacttccggcgccgacgcgcccgcggtgatgccgaggctcttgatgttctcgaacctgctccagtcgaggtcggttgcgcgctgcgccagcaccgcgatcttgcagccctctcgctcggcgacttcgcgcaggcgctgcgagttcgacgagttgggcgcgccgaccacgatcagcgcgtccaccacaggcgccaccttcttcaccgcgagctggcggttggtggtcgcatagcagatgtcttccttgtgcggcccgttgatgttcgggaagcgctccttgagcagcgcgacgatctccgcggtgtcgtcgatcgacagcgtggtctgggtcacgaaggcgaggttgttggggtccttcggcgtgatggtcttggcgtcctcggcggtctcgatcagggtgacggcgccgggcggcaattggccgagcgtgccgaccacctcgggatgatgggagtggccgatcaggaagatctcgcgaccccgcttgaaatggatcgcggcctcgcggtgcaccttcgtcaccagcgggcaggtcgcatccagtgagaacaggttgcgggactgggcgtcggctggaaccgatttgggcacgccgtgcgccgagaacaccacgggagcgctggtgttttccgggatctctgccagctcctcgacgaagatggcgcccttcttcttcaacccgtcgacgacatacttgttgtgcacaatctcgtggcgaacatagacgggggcgccgtatttatcgagcgcccgctccacggtgtcgatcgcccggaccaccccggcacagaagccgcggggagaacaaagcacgatcttgaggtctggtttggctgacattgagcgatctcgtgaccgaatcgcccgtttcgccttgtggcagggggcggtcgatggatggattggggcttaaaactgtcggcttgaaccttacagcggttcaaagggaattgggccccctttcgggcggtgtcaaggcactatctatagcggaaccattgcgtggctaccccctcccggcttatatagcgcgaattccctgtcatcgttgatgactaccggtttcgcctccagaggggtgggcgaagcacaaaggagatttgccatgagcaacgcacctctgatgcccaaggcgaccgccgtctggctgctcgacaacaccgcgctgaccttcgaccaggtcgccgatttcaccaagatgcatcccctcgaggtgcgcgcgatcgccgacggcgacgcggcccagggcatcaagggcatggatcccctctccaacggccaattgacccgcgaggagatcgagaagggtgagaagaacccggactaccggctccgcctccaggagagcaaggtggtgctgccgccccagcccaagcgcaagggaccgcgctacaccccggtgtcgcgccgccacgagcgcccgagcgccatcctctggctgctgcgcaaccaccccgagctcaaggacgcccagatcatgcgcctggtcggcaccaccaagagcacgatcgctagcgtgcgcgaccgtacccattggaacacgtcggcgttgaccccgatcgatccggtcacgctcggcctctgctcgcagatcgagctcgatttcgaggtgcagcgcgccgccaaggaaaagccgatcgacgcggcctatggcggcgccaccctgctgccggcctccgagaccacccgcaaggacgagtacgagcccgcggagaagtccagcgacgacctcaacgtggacgccgtattcgccaagctgaagacgctcggcggcaagaagcacgaagacgaggaggagtaaggctcctcttcattcgcatcgaaggcaaagaaaaaacgcggcagggacaccagccgcgtttttgtttgtgcgccctggttcgggcgtcgcgtcagaacttatacgtcacgcccgcgccgaccagccacggatcgatgtgcgcggtgccggtgaccggcaacccgctgacggtcgcgctgtagttcggacgcagccagagcttcttgacgtcgacgttgagaccccagtgccggtcgatcatgtaatcgaagccgaactggacggcgccgccccaggcgttgctgacgtgcaggttggtggtggtggcgacgatcgcggggggaccggcgattgcggcaggcacattcgcggcggaattgttgaagaacacggtgtagttcacgcccgcaccgatatagggcttgaacgcgccgaaattgtcgaagtgatattgcagcgtcagcgttggcggcagcagcgtggtcttgccgatcggcaggttcgccagcgagccggtgccgctgatcgaatgccgggtcacacccaggatcagctcggccgcgatgttcttggtgaagaaatagctgatgtcgagctcggggacgacctgatcgctgatcgagaggccggaattgggtgacgagagcgaaggcacgcccgccacggtgacgctgctgccgccgccatcgggcaacacgcccagcgcgcgcaggcggatcatccacggattgaacgcctccaccggcggcggcgccttcttgtagaccggcagatcggcagcctgcgccgaggcaagagtgcccacgagcatcgcgccaattgtggcgagccgcgccaggtttctcgtcgttctatgcatttcaatccccttcagccatctctcgcgcatcgtcgcgcgacacgagcgtcagagcagaaaggggggcgtgaaggatttgacgccgatcaaatcaggacaagcgcgccacgatttggccgcggcgttgcaattgtgtcacggaaagcctgacgaatgggcgcgtggcgcagcaccatagtgccgcggctcacatcacggccgcacgggattgttcagcatgtattcgccgagatcgcgctggcggcggtcggcgcgggcgacggcggcattgcgctggacgtcccgatccttccggcaggccacgtattccggcgaaccttgcgcatagccccggccctggcagaccgcgtcatcgtcgtcgccgcccaccgccaccggcgtctggtagcgcgcggagcaggcagcgagtgcgagggctagcagggagattgccccatactgcgcgagcttggctgacattggtcgtcccgtctcattcatcattgccgggcttggcccggcaatccatcgaaatcaaggcaattgcttgctcattgatggatgcccgggtcaagccccggcatgacggaagagcaaactcacacccgccccttcagggcctccccgatctcctcgagcgccttggggtcctcgatcgtcgccggcatggtccaggactcgccgtcggcgatcttcttgatggtgccgcgcaagatctttccggagcgcgtcttgggcaggcgaccgacggtgatggcgagcttgaaggcggcgaccgggccgagcttgtcgcgcaccaatgcgatgatctccttctcgatctcggcgggcgcgcgtttcacgccggccttgagcacgaggaagccgcagggcacctcgcccttgatcgcgtccttgacgccgagcacggcgcattcggcgacgtcgggatgcgaggccagaatctcctccatgccgccggtggagagccgatgcccggcgacgttgatgatgtcgtcggtgcggcccatgacgaagacatagccgtcgtcgtccttgtagccggcatcggacgttttgtaatagccgggaaattcgctgagataggcctccttgaagcgctcgtcctgattccacagcgtcggcaggcagcccggcggcatcggcagcctgatgacgatcgagcccatggtgttgggacctaccggcttggccgcttcatcgaccacgtcgacctggtatcccggcatcggcaccgtcggcgagccgtgcttcaccggcagcatgccgagcccgaccggattgccggcgatgcaccagccggtctcggtctgccaccaatggtcgatcaccggcaccttcagctgctgctccgcccattccaccgtcggcggatcggcgcgctcgccggcgaggaacagcgtgcggaacttggtgagatcatattgccggatgaattttccttccggatcctctttccggatcgcgcggaatgcggtcggcgccgtgaagaaggcgacggccttgtgctcgctgatgacgcgccagaatgcgccggcatcgggcgtgccgaccggcttgccctcatacatgatggtggtcgcgccgtggaacagcggcccgtagacgatgtagctgtggccgaccacccagccgatgtcggagccgcaccaccagacttcccccggcttgacgccatagaggttgaacatcgaccatttcactgcaacgaggtgcccgccattgtcgcgcacgacgcctttcggaatgcccgtcgtacccgaggtgtagaggatgtagagcggatcggtggcggcaacgggaacgcagggagccttcttgccgtcgttcagcgcctttcggcgcaggctcgcccaatcatagtcccggcctgcagtcagatcgcaggtgagctgcggacgttgcagcacgatgcaggccttcggcttgctgccggccagcctgatcgcctcgtcgagcaacggcttgtactgcacgatgcggcccggctcgatgccgcagctcgcggagagaataagcttcggctgggcgtcgtcgatgcgagtggcaagctcctttgcggcgaagccgccgaacaccaccgagtgcaccgcgccgatccgcgcgcaggcgagcatcgcaaccaccgcctcgggcaccatcggcatatacagaatgactcgatcgcccttggcgacgccaaaatcgtgcatgatggcggcaagcgcctgcacctcgttcagcaactccgcgtaggtgagctttgtgaccgaattggtcagcggcgaatcatggatcagcgcgagctggtcggcgcggccgcgttcgacatggcggtcgagcgcgttgtagcaggtgttgacgacaccgccggcgaaccagcggccgtaggttccttgcgaggggtcgaagatttttttcggcgactcgacccagtcgatctccttggccgcctcggaccagaatccttcgggatcggccagcgaacgcgcgtggaccttgtgatagagactctcgccctggacgttcattcccgcgctcccattcccttttttcgctggccttgacctgacgaccggacgaacgtcccgccatgatcaggatcaattgccggcttctttggcgggtattttcccgggaatgggccgcggttcaagctgaaagaacgggtcatctccctctcccggttcttacggggcgagggacaagaatcggccctcagcttcccacggcgttcagccgctgcaggcgatcctgcatgatcttcttcagatcatagccgggacggccgaagctggcgttgcgggtggcgatgaaggcgcgctgggtcttgcgcaggtcgcccgcggaacgtcctttcgaggtcctcagcacacgttcataggtctcggcgatctggcggtcgagcacgcccagctgcggatcggcacagatcgccttctcgacctcgcgtttggccgtggcgcaatcgaacgacgggccgctatcgtccgccgagcgcgcatgtatcggacctggcgttgccgcgccgaacttggcgatctcggcgatcatgctgcggcggccgttcgcggcattctcgttgccggggtccagcttgagcgccgtctcgtagtcggccagcgccttcttgcgctcccccatcttcttgtagagcacggcgcggttgttgtacgccttggcgaagttcggatcgagtttcagcgcagcctcgtagtcgctcagcgcagccccgagctcgcccttgaactggtaggaatcgccgcgattggtcaggaagttggcgcgctgctcccgccggatcgcctggtcgtaatcggcgatcgccttgtcgtactcccccatcgcagcataggtcaggccgcggttatcataatattccggcaccttcggatcgagcctgatcgcctccccgtcgtcggcgactgccttgtcgagctggccgagcttcttataggccgcgccgcgattggtgtaggttcgcgcgcggctgggatcgagccgcagcgcctcatcgaaattcctgatcgccttctcgttgtcgccgccgagataataggccacgccgcggtcggaccaggcctgcgcatcatccggcctcagcttgatcgcctgatcgtaatccgccagcgcccggtcgagtcggcgctgactggtgtagacgacgccgcgcgtctcataagcctccgcatcctcgggatcgagctcgatcgccttggtgagatccgccgcagcgcgattgagatcgccgccggcctcccgcaagatgtcgccgcgcaggcgccaggcctttgcattcttgccgtcgagcgcgatggcgcgatcaagatcgcgcagcgcccgcgtgaggccacccgaggtgcgcgcgttggcttcggcgcggacgacgagagccgcgctgcgatcagtggtcggatttgaggcctggtcgatgatgacgctgcatgccgagatcagctcggccgggtcagccttgctgcccagcacgcactcggtgctcgcagcggccggagcgagaacaagactcattgccgcgccaaggaagagggcgcgaagcgagattttgcgaggcggatgcgtttgcgcggaggctcgaatgccgcacatgttacagagctccatgacatcgggttctcaccattgtcgctgccggcaatggatgggttcaaagaggggttgtcagggtaccggcgcctctctccgtcgcccagccgcaggagaggcggcacacctcaatacccatccacgccgttgagccgttgcagccgctcctgcatggccttcttcaggtcgtatcccggtcggccgaaatcggcattgcggcgcgcgatgaactcatcctgctcgcgctggagcgccttcgcttcaccggcattgcgcgcctcgcggatcacgcgggcgttcgatgcaaagatctccctatcgaggtcggcgagttcgcgattgccgcagatcgccttttccaccgcccggcgtgctcgcgcgcaattgaaactgggcttgccggcgatcgccatctgcgcgccgatccgctcgagctcgcgtgccatcgccttgtgatttgccttggccttctcgtggttcggatcgatcctgagcgcagcgccgaaatcctgcaccgccttgggcttgtcgcccttcttgagccagagttccccccgcgcgttgaagacatccacaagggtcggatcaagcaggagagcacggctgtcgtcagcgacggcacggtcgacttggtcgtgccgcgcatagagcgcgccgcgcgcgatcagggccttgatcaggtccgccttcgccgtcttctcattgtcgatcacggcggcgcaggccgtggctgccttgtccaggtcgtcggccgcggtggccgcgaggcaggactcgagatcgacctgcaccaccgcaaccggctcgccgccggtcgcagcatcgaccgacgcaagcgagaggccgtagagcagccatgcgccgaacaagtggttgagaaaacgcatgctcgtttcaaatcggaaagttgtcttgaggtcttgcgtaagctctagccttgagttcttgccttgagctcttgccttgcagccgcatcatccatcatgcggccggattggtgctagcttgtggcgccgctcaaatcgggttcggggatcatcgtgtcgacattcgaatggatcatcgcgcttctgctcggcgccgttggcttatcggcgctggcgcgacggatcaaggtcccctacccgacctttctcgccatcggcggcgcgctgatcgcatttgtgccgtccagcccgtcctggacgctggagcccggcctggccttggcgctttttgttgcacctgtcctgctcgacgccgcttacgacacctcgctgcgcgatctgcgaaacaattgggttccggtctcgaccctggtcgtcgccgcggtcggcctgaccacggccggcgtcgccttcgtcgcgcaccggctgatgcccgacatgccctgggccgccgcggttgcgctcggcgcgattgtcgccccgccggacgcagccgctgccgtcgcgatcctgagccaggtgaagctgccccatcgcatggtcaaggtactggagggcgagagcctgctcaacgatgccagcgcactcctgatctatcacattgccgtcggcgccgttgccaccgagcatctgacctggggccaggttgcgccgaccatggcgctggtgctggtcggcagcgtcatcgcgggcctcgtcgcaggccggatcattccgctgttcatggagcgggtgacggaggcgcccagcgcgatcatcgtgcagttcgccaccacgttcatggtctggatcgccgccgagcatctcggcctctccggcatcctcacgatcgtggtctatgccatcacggttgcacggaccgcgccggcgcgcatcccggcacggctgcgcgtgccgtcctatgcggtctgggaaacgatggtgttcgtgctcaacgtgctcgccttcatgctgatcggcatgcagatgcggccgatctgggcgcggctggatgcggacgtgcgctgggaatattgcgtggccgccgcctcgatcctcctcaccgtggtgctggtccggctgttctgggtgacattctatcgcacgacgctgcgtgtgctggtcgctcaagggatctatcatccgaaggatccgaagcagattgcctcggccaagggcggcctgatcatctcctggtgcggcatgcgcggcctcgtcacgctcgctgcagcctttgccctgccggagagcttcccccatcgcgacttcatcgtcttcatcgcgtttgcggtggtgctgggatcgctggtgatccagggcctgacgctacggccgctgatcatcgccttccgcctcgaggacgacgatccggtcggcatcgaggtcgcgcgcggacgcgctgtcgcctatcgcgccgcgctcgatgcaattgaaggcgacccgtcggaagaggccgaaatcctgcggctcgaatatcgcgccatcctgatgcaggccgaaaacgatcccaacggcggcatcgccaatggcgagctgcctgcggatcccctgcgccgccgcgccatcgaggccgcacgcagatcgattttcgatctccgcgccaccgaggtgatcggcgacgacgcgtttcaccggctggaggaggagctcgatcgcgcagaattgagcgcagggggatgattctcgccggtccggcaagcacgcaacagcgcgcaacgatccgggacggcaccatacggtgaacggccggattgaaccaaagcccgccctcgcagactcaccccagatgacgaccctgatcgacgaccgtcgtgtccgcgcgcgagatgcgtcgcctgcacgatacttttatctgaacatgtccctggcctgcgcggccactgcgtttcttggcttcgcgccgacctattggatgccgctcgcccgtggtgcgctctccgcgagccccgtgattcattttcacggattcttgttcttcacctggacactctacttcgtgctccagacctggctcgtggcctccggccgcgtggtcaatcatcgcgcgctcgggatcgccggtgtctcgctcgccaccgcgatgacgatcttcggcttccttgcctcggtcagctcgatgaagaacgctgccgcgctcgggcaggccgacgccggcatcaccttctcgatcgtgccgatgagcgggatcgcgttcttcgcactggtgttcgtgctggcgatcatgaacacgcgaaagcccgatattcacaggcggctgatgctgcttgccgcggtttcgatcctggacgcggcgatcgcgcgctggttcctgaccttccttgcgcctccgggaccgcccggcccgccgccggtgccggtcaccatcgcgccggccgtggtcgcctcgcttctgctcgtcgtcgccatggtccgcgactggcgcaccgagggccgcgtgcatcccgtctatatctacggcacgctcgcattgctggcagtgaaggtgctgaactggccgatcagcgagacggcggtgtggcacgcctttgccggcggcatcctggcgctggcgcaatagctttcggtgtcgtcccggaccggcgtgcgcttgtggcgcgcttgtccgggacggcagcagagggtgaggcggtggttacgctcccgccttgcacgtgatcccgccgtcgaccacgagctcgatccccgtcacgtatttcgactcgtccgaggcgaggaacagcgcggcgttggcgacgtcgaaggcatcgcccatatgacccatcggcacctgcgcgtcgcgcgcacgccacatcgcctcgacgtcacccttggcgtagctggcggcgaggccggcggaatgctccaccatcggcgtcttcatcaggccgggcaggatcgcgttgacgcggacatgatgacgcgcgaactcgatcgcggtggtgcgcgtcatctggttcatggccgccttcgaggtgccgtaggtgacgtaggagatgcccatgtggcggatcgaggcgatcgaggagatgttgatgatcgagccgccgccctgcttcaccatgacggggatgacgtgcttcatggcgagataggcgctcttgaggttgacgttgaagacgcggtcccagctctcctcgctcacctcgaccacgctgcccatctcggcgatgccgacattgttgtcgagcacgtcgatgcggccataggccttcaggcactctgccaccatcgtctcgatctcggcgtgccgcgagacgtcggccgtgaacgggatcgccttgccgccttcgtcggtgatgatcttcgcggtctcctcggcggccgcgccgttgcgatcgacgcagaacacctgcgcgccctcgcgcgcgaaggtcaccgcggtcgccttgccgttgccccagcccggaccgatcgagccggcgcccacgaccatcgcaaccttgcccctgagccgatccatcgtatgtctccctgcttattcttcttgtagcccggatggagcgcagcgcaatccgggaccgccgcccccggatttcgctgcgctccatccggctacggttctttacagatgctcatcttggtgacgttagcaccaatgggatggccgacaatctccgaaagcgtccggcattgtccgtcaacgcacagccgccactcccccgccgcgcccgaattgccaagcacgacctccggcgtcggagcacgctgcggccgccattgaaaccagccgtcgaccagccgcgcctcggacggcggctccatgccggggccggtgcccttgacgcgggcctgcaccagttcgaggccggcgggcgtgacacgccagtcttcctgccaatcgacctttgcgatcgaatgcgtccatacaagcgtgaacgcggacatcgccagcgccttcacggagcctgccgttgcgaggcagaggctcacacggcctcgacgggcgccgacggacgctgccgccattgccacagcacgagcgcagcggcgagcacgaagcctgcagtgtcgctgaaggggaattcgccgagcaggcagaacgccccgccgagcgcgaccaggcgctcgatcagcgtcagccgtgtgaacaggaacccgatcgcgaccatgccgaacaagccgatcgccaccagcgccttcaggctcgccagcgccactgcgccatagaagccgagcttggccgccatgggatcgccagcctgcagcatcagggcgggcgaatagacgaagatgaaggggatgacgtagccggcgagcgcgatgcgcatcgcctcccagccgatcttgtctggattctccttggcgatcggtgcggccgcgagcgcggccagcgccaccggcggcgagaggtcggccatgatgccgtaatagaacgcgaacatgtggctcgcgatcaggggcacgccgagtttcgcgagcgccggcgcggcaagcgcggcggtgatgatgtaggtcgggatggtcggaatgccggtgccgagcagaatggacagcagcatggtcatgaccagtgccaggaacaggctcttctcgccgagcccgatcacccagccgccgaagatggtgccgacgccggtctgcgacatcatgccgatgatgacgccgacgatggcgcaggccatgccgaccgtgatggccgattttgcactctcggccagcgcatcgcggcaggcgcgcagcgccgcaaaacctccacggacgaacgccgtgatcacgatcaggccgaccacgaccgtagcaaccggcacgatctggaggccgtcgcgcgacagcgcggcgacgacgagcgcgagcccgatccagaagatgtagcggatcacattcgaggaggcgcccgtcgtgacggcggtgccgaggatcagcgtcacggtcagcgcaaggcccatgctgccggcatagagcggcgtgaagccctcgaacagcatgtagacgagcgcggcgagcggcagcacgagataccagcgcgccaccagcgccttccaggcgctcgggatctccgagcgcttcatgccgacgaggccatgcttgccggcctccagatgcaccatccagaaggccgaggcaaaatagagcattgcggggatcgcagccgccttcacgatctccgagtactgaacgccaagcgtttccgccatgatgaaggcgaccgcacccatcaccggcggcatgatctgtccgcccatcgaggccgtcgcctcgacgccggcggcgaaggcgcggcgatagccgaacctgatcatcaagggaatcgtgaactggccgacggtgacgacgttggcgacacccgaaccggagatcgtgcccatcatgcccgaggcgaacaccgcaaccttggcaggtccgccgcgggtgcggccgaacaggccgagcgagacgtcggtgaagagctggatcatgccggcgcgttccaggaacgagccgaacaggatgaacaggaagatgtacgtggccgagacgtagatcggcacaccgtagaagccttccgtgccgaacgacagatgggtgatgacctggtcgaaatcgtagccccggtgattgagcggcgacggcaggtactggccgaagaaccagtagaccaggcaagccccgcacatcagcggcagcgccgcgcccatcagccgccgcgtgccctcgaagatcagcaccgcgagcagcgtgccgaccacgagatcaagccgcgttggatcgccgtcgcgcgcgatcaggtcggcatagaagatccactgatagaggccgcagtagaagccggcgccgccgatcacccagccggccgcgcggcccaaatcgcttctcgcggtgaagtttgcgatcaggccgaaggtgagcagaacgaggaaaccgacatggacgccgcgcaccacctggctcggcagatagttgaaggcggcgacatagagctggaacaccgcaaaggcgatgccgatccaataggcgagctggccccacctgcccggaccaaagccttcggggaagccatgctcgaaattgtcaaactcgaccttgatgggggcctcggtagcctgtgcctgcgatatcatatttcccgcgccctgaaatcgtcatgcccgggcttgacccgggcatcgatcgaaagatgagtcctggaggatggatggccggggcaagcccggccatgactcctgtgctacttgatcagccccttttccttgtaatagcggatcgcaccgggatgcagcggaaccgggctgccattggccgccgtctcgagcttgatctccttgcccgccgcatgcgcgttgacgagctcgggcagcgactcgtagaccagcttggtcatctggtaggcgagatcgtcggacacggcggagttcgtgacgagataattgatcacggccgcagtcggcacgtccttgtcctggccgctataggtgttggccggaatgaccgcggaaacgaagggcgggccgatcttgtccaccgtctccttcggcaccgacaccaccgtgatcgggctggaggtcgacaggtccttcagcgaggcgacgccgagcccggctgattgcaacgtggcgttgagctgccggttcttcatgagatcgacggattcggcgaacggcagatattcgaccttgccgagatccttgtagctcatgccggcggcgccgaggatcgcgcgcgagttcagctccgttcccgacttcggcgcgccgaccgacaggctcttgcccttgaggtcggccagcgtcttgatgccgctctcggcggtggcgacgatctggatatagttcggatagatagcgccgatcgtgcgcagcttgtcgagcttggtcttgaagcccgcctcctcctcgccgttccaggcggctttcagcgagtcgcccagcgtgaacgccagctcgccgcggccctgctgcagcaggatcaggttctcgaccgacgccttggtggcctgcacctgcgtcttcacgttcggaatcttctcgccgtagatcttcccgatcgcgaccccgagcggatagtagacgcccgaggtgccgccggtcagcacgttgatgaaggattgcgcctgagcgcaaggtgccgacgccgccagagcaatagccgcggccacgccgaaaatcgtccgtttcatggttgttgtactccccaaaccggcggcgaaattggccgcatcaggggtgcgggtcaacccatccaaaaggcaaaacaggactgcggcaacgggccgatccggctcgaccttgggaacccgcggggtgcggcgaggtggcgcaggaaacggaggaacacctctcccgtttgctgggcagggatcgaggcgaggctgccccgtcgccgacgatcctactggaaggtcatgtccaggcacttggagatgtcggagccgagcccggacgagatgatgatgcagccgcgcaccttctgcgcgccgacgtcggcggcccagaccgcatagccgccgggaccgaagaacgagttggtgttcggcggctcggtctccgtggcgtcgaaatcgtacttgccgtcggtttcgaagatgcgtggctttttgatgcagccgccgtcggtctggacgttgatgacctccttgttgtcgcgggtcagcgccagcgagacctgacaacggaaatattccgaggtcctggtgttgaagagataggtgtaggatttgcaggtcgccgtgttcagcttgcccggggcaaggccgcggctgcacgagatgcgctggttgtgactgagctggtagtcatcggcccgggccgccggcgccagcgcggtcagcgacaccaaagcagcccagcaaagcttgaacacatggcgcatccgaatcatccctaccgataatcttgtcgagttgcgttctagacggaaagcggaacatagtcgcgaggggccgaagggaaaatcacaagctgctgggcaagtcgtgatgcgctgcggcgctttcgcaaattgacccggacatgtcgttcgtgatttgttcagggccggacgccccaaggacggggaggatcgatcatggcattttcaaccagcacatttgcacgcgtttcgggtgcgctcttgccgatgctcggcgcgttcgccgcgccggcattcgcgcagacggcgacaccgtgggagctcaggcccgacatgggctatgcctatgacagggacggcaagacctattcctacaagatgggcaccagcaacgccggcgagttgctgaagggcgccaagaaggtgccgaaaggcacgctgttcttcatcggccagaacggccagctctacatgcgcagcggcccgtatctcgagggcgacggcaagttcaagttcggcccggatcagtaaggcgacggcgagtgggcctcaatcgagactccgcggcccactggatgccccggtcaaggccggggcatgacagcggagcttggcgggcacagggctaaaacgccgccgccagctccctcgccccggctttgctgctgttcgcatccatccgctggtccgtcacggccagcagcttggccaccgtattgtggcggatcgcgaccgggtttcgctcatagccgccgcgctggaaaaaattcgaggtcggcacctgctcgcgcatcgcctgcggcatcgtcaccatgtcgaggcccgtgccgtcgccggtgaggttcatcatctcgagctcggccgcggagagcgggcgggagtggcccttggcgcgcgcgaacagcacagaggtcagcagcttgtgggtctgcagcatcggcccgatgtcgatgtcgaggaccatcgcatgcatggcccagccttggggagtcctgcccatcttctcgtgctccgaccaggtgtcgggcactgacttcgcgtgcgccaccattttcttgagcacggcgagcttgtgctccagcgcatggcgcgccggccccggggtccgcgtgaccttctcggagagcgcgcgaatgagctcatggccctgctcggccagcagctcgacgctgttggtggtgaggagctggttgtagcccatcgcggtcgagatcgcgcgcttgccgccatgctcgatgccggcctgcacgtcgtgagtgccggtgccgccggtctcgaacgcgtagacccgcaccgcctgctcgcgcgtcagcccggatgcgagggcgtagcgggcataggcgcgcttgaactcgacctcgctggtcggccgttgcggcgtgaaccggtaaagctcctgcgccgcgcgcagaaaatcggcggtcaccggaatcggtttccggggccgctccggcgtttcctccggctcgggattcaccggcttcttcggcccgttatagagcggcggatgctcgagaacgtaatcgtcgagcgtgatctgctgcccgctgcgccgcttggcgttgcgcgtcttccgcttctcgtagatctggctccaataggcgccggcctcagcgtcgaaggctgcgcgcgcggcctggtactccgcgagcttgcggcgatattcgagcacggccggcgaggcgccaccttgcgcgaaaaactgtgacagcagctgggcgttggcattgcggacggccggcggcagcacgtcggcctcggcgcgcgcggcgggcgagctcaggacaagcgcgagctgaaccagcgcaaggggaaccaatgccttgggctttcgaaaggaatgatgcatgcagctctcttagcaggcatcgggtaaccgttgcgttaacgcgccgtttaccatcgtcacttccaggcaaacaccggttgttccaagtctgtgacgcgggtctgccgacccgcgagcacctcgcggaactggtagatcagcgccgcggtcggggcgtggatcaggctcatctggtgatggaagcggatcacgcgacggctgctctcgggaattgcgacgaagtcgaaagcgtcctcgcgctcgatcgtggcgagcgcgatacgatggacggacgcgacctcgtccaggttcggcttgatcgcggcggcatcgggagcccacaccacgaccggcgtgatcagatagccggaacgcgtcggataatcgtcgagcgtgccgagcacatccgcattcgtgaggcgaaggccaagctcctcgtcgatctcgcggagtgcggcttcgaccggtgtttcgccagggtcgcagcggccgcccggcagcgcccattgaccgccatgcgcgcgcagatgcgatgcacgcaacgtgagcagtagcgccgtgtcgtcgccgtcgctcgcggtcagcgcgacagccaccgcggcacgcttcaatgccgccggcgcgccgtcctccggcaggcgcgcgaaggccgcgcaggcagccgcgatattccgtcttgtggcatcgtcgaacggtctcatgatgcttgactacactacgtccggcctcgatgaaatgagctcgcaaggcccgcacaggaatggacgacgacatgaccaacaaggccgccgcaaggctgaaatcggacggctggagcatcctggagcccacgggcttcctgcacctgatcggccccttgtgggaacgcaaggtcgacgggcatcacgagttcgcactcgcccccgaagacaagcatcacaaccgccgcggcatggtccagggcggcgtgatgatgacctttgccgatcgaacctgcggcatgaccgcccgctacgtctccggcaaggattacctggcaacggtgcagctcgacacccatttcgtcgaggccggccagatcggcgacgtcctcatttcccgcccccgcgtggtgcgctcgacccgcagcctgatcttcatgagcacggaggtgacggtggatggccgctgcatcgtcatggccaatggcgtgttcaagatactgaaggggccggggtagggatggtttggtcaggccgtcaccgtcgcagccacaccctccgctgtcgtccctcgactagccgggtgcccggtacgccgcagcctctcgattcaatcccgatcgtctctggaatgctggatcgcccgatcaattcgggcgacgacaccggctaaggggcatgagcgctccccacacgatcattgtgaggagctcttgcgacgaagcaatccagcatctttccgcggatgcagttctggattgcttcgctgcgctcgcaatgacgccgctggctggctatgctgccgggaccgaacaccgaggacagcccatgcaataccgccagctcggccgcagcggcctgaaagtgtcgccgatctgcctgggcaccatgatgttcggcgggccgaccgatgaagccgcatcgaagcggatcatcgccaaggcacgcgataccgggatcaacttcatcgatactgcggacgcctattcgaaaggtgcatcggaggaagtcgtggggcgagcgatcggcgacaatcgccattcctgggtgctcgcgacaaaactcgcaaatcccatgaacacggggatgggcagcgatcccaatcgcggcgggctgtcgcggcgctgggtgttgcaggccgcggacgaaagcctgcggcggctcggcacagatcacatcgacatctactatctgcacaaggaagaccacgcgacaccgctggaagaaacggtgcgcgcgatgggcgacctgatccgcgcgggcaaggtgcgctactttggagtctcgaactaccgcgcctggcgcgtcgccgagatctgcaacatctgcgaccggctcggcatcgaccgccccgcggtgagccagccttattacaacgccatgaaccgcatgccggaggtcgagcactttccggcctgctcatactacggtctcggcatcgtgccctacagtcccttggcgcgcggcgtgctcaccggcaaatacaagccagatgcagcgcccgacaaggagacgcgcgcgggccgcaacgacacccgcatgatgcagaccgaatggcgaccggaatcgcttcagctcgcgcaggagatcaagacgcatgcggagcgcaagggcatcaccgccggccagttcgcggtcgcctgggtgttgaactccgctttcgtctcctcggtgatcgccggtccccgcaccgaggagcaatgggacggctacatcggcgcgctcgactatcggtttaccgcagaggacgaggcgctgatcgacaggctggtggcgccgggccatccctcgacgcccggctacaacgatccggcctatccgatcgaaggccgccgcgcgcggacggcgtgagaacgggagaccacgatgacgctcgaagatcgctacggcctaccgctctccacctcttcgcacgaggcagcaagcgcctatcgcgagggcgtcgacctcatgctcgcgggctggaccggcacggcggagacgctggagcgcgcgattgcgacggacccggatttcgcgcttccccatatcgcccgcggccgcgtgcacgccttctaccagcagggcgatctcgcgcgcggaaaggcggccctggcgcgcgagctcgtggccaagcgcggcaccgagcgggagcgctcgcacgtcgagacgctggcgctcgcgatcgagggccggctgccggacgcgatcgctgcgatgcgcaagcatgtcgaggcatggccgcgcgatgcattggtgctgtcgctgccgctcggcgcgttcggcctgttcgccttctccggcatggccgaccacgatcgcgcccggcacgaactgtgcgagagcgtcgcgcggcattacggcgaggactggtggttcctcaccatgtcgggctgggccatgacggaaaacggcgacgtcgcgcgcggccgcgccgtcaccgagcgcggcttcaacctgcgccggcagaacgcccacgcagcgcacgcagtgctgcacgcgatgttcgaggacggatcgatcgaggcggccgaccgcctcgtcgacgaatggattccgggctacggccgcgatggaattctgcacggccacatccgctggcatcaggcgctcggcgcgctggagcatgacgatgcggcgcgcgcgctcgcgatctatgccgatgtgcttcagccggccgccacgaaggcgccaccgctcaacctcgtcaccgatgccgcctcattgctgtggcgtctcacgatctacggccataccgtgccgcaggcggtgtggcgggaggccgcggcggcagcgcaagagctgtttccgaagtcgagcctctcttttgccgacgtccacatggcgctgttcgcggcggcaacgcagaaccaccaggcgctcgccgcgcgtcttgcggtgatcgagcaacggctcgctgaaggtaagctgccggccggcgcggtggtgccggcgatctgccgggcgctcgcggctttcgccgaggaggattacgggacttgcgtacgaatcctcacaccggtcctcaccgaggtggcgcggatcggcggaagccacgcccagcgcgaattgatcgaggacacctatatcgtcgcgctgatgcgcggcggggagttgccccgcgcccgcgctctgctggacgcccgcttgcaccgccggccctccctgcgtgataagcgctggcaggcggcgatggcttgaggcaggatgcaaaaaaaccgaccggaggacacccatgaccgaaatcgttgcgcttgaggcgctggctgcacgtgtcgaatccggacagtcgctggccgtccccgtggaccgctccggcgtcgcgatggccgcgaccgccgcgatcatcgctgccggcatcgacaatcttcatctggtctgtgtccccatcagcggcatgcaggccgatctcctgatcggcgccggcgcaatcaagacgctcgaaaccagtgccgtctcgctcggtgaggccggtggcgcgccgcgcttcggtgctgcagtgcgggccggctccctgacgctgcgggacgccacctgtcccgccattcatgccggcctggtagcggcgcagcacggcgtgcccttcatgccgatcgccggcataatcggcagtgacctgctcgaagtgcggcccgactggaaggtgatcgacagtccggtcggcgagccgcgcaaggtcgtcgtggtgccggcgatcaaacccgacgtcgcactgtttcacgcgccggaggccgaccgtgccggcaatgtcaggatcggccgcttccgcgagctcgccaccatggcctatgccgccaggcgcacgctggtcaccgtcgaacgcatcgtcgaccgcaatttgctggagacggaggattccgccgccggcgtcctgccttcgctctacgtcgacgccatcgcggtcgccgagcgcggcagctggccgctcgcgctgtgggacgaatatcccgcggacgaggcggagatcgcacgctatacggcgatggcgcgcagcgaagacggctttcgcgcctatctctccacgttcctgtcacatcgcaagcaggtggcgtaaatgcagtccgagcacgagcgccgcgagctcctcattgccactatcgccgatctgctcgacggcatccgccacgtcgcggtcggcgcatcgtcgccaattcccgccgccggcgcgatgctgctgcgcgcgcggaacgcgcgcgacggcaagccgccggtgcgcatctcgattctcggctcgcagcggcacaatttcttcaccaatggcggcatcgagctgttcgactgcgccgcgcaaggccgcgtcgacgcgttctttctcggcggcggccagatcgacggcgaaggcaacatcaatctcgtcggcactggcgattatccgagaaccgacgtgcgctggccgggctcgttcggctcggcctatctttatcacctgatcccgcgcgtgatcctgttccgcgaggagcattcgccgcgtgtgttcgtgccaaaggtcgatttcgtcagcgcccgggcaaccacgccggaagtaccccgccgcggcggcccctacgcgcttctgaccaacatggcgctattcgatttcgatcgcgaggcgggcggcttcgccttacgctcggtgcatccgccctttacgccggccgacatcaggaagaataccggcttcgactatgccgagccggaggtcgtccgcgagacgccgaggcccgatggcgcaaccctggatttgctgcgcgggcagattctcgacgaactcgccgagacttatccggcctttgcgcggagcatgacgcaggcggcgtgaatcgtgcccgcatctgccacgaaaaaaacaccggcctagcggcaagtgccggcggacaggttgggcgatcgggcgaatcgccgttggggtgacgcggtggtattccaggctggtcttacagaacgaacgggatcgcgactcattcgcggttcgatggccgccggacgaagctttccggccgccacatcctattgtcgcacgagccgaaccatgcgcctccgctcagtggcgcttgccgccctcctcacgacgctggcaagcccttgttttgccgaggcttccaagcccatcccggtcaacaatccgcaggcccagcagaacgccttcatcgatctcctggctctgatgtccggccactgcaagacgctcaaggtcgcgggccgcaccttcgcgtgcaagaccgtggcctatgcccacggcgacaagggtcgggtcaacttcgcggtcgcggtcgacgacccctccgacgacagccatgtggtgtcgttctccggggagaacggcaagcgcgccgacgacaattcctacgagctgccgatcgaccgcatgctgctcaattccaaggaccgccccagggtcgacggcctgccggtgccggccgagcagacctctacaggcatctgccgccagaccggcaatttcgccgccaagaaggtgaacgacgtcacctgttcggccaccgacaaccagggtcgcaaatacgagctcttgttcgtttccgacggcacgccggtcagcgtgcgccgtatccgccagtcggcaccgtcgatccaggacccgttcaagtagtgatcacgtgaacgctttctccagcgtcgcgaagatcaccgacaacgacttgtcgtgccgcgtcaccggcggcaccgggcggtcgatcttcatgagctgatagaccgccatcnnnnnnnnnnaatgcagatcgcatcctccagcacgacgggatcgaagttcagatggccgcagagctccttcaggatctcggcaccgccgcaatccgacatcggcttggcgacgaaattgccgacgcggtcgggatgcagcgcgtagccccagaacacctgcacattcttcggctgacccgcgaaatgaggctggtgatagagcacaaccgacatcagccagttggagtccttgaacgtgacgaggccgccggtgccggccctgttgcccgagaacgcttccatccggtcgaagaaccggggatcgcggcaggtgacggtgaaggacagccaataggattcggggatcgaactgttgaataccgacgggttgccgaactcgggacgtccctgcgcgatcgtctcccacagcgaccagccctggctgtcggccttggtcaggcgcggtggcggctcggtcatcgagccgaggctcgaggcgtccgtcatcgagccgttctggaagaacacgatgtcgtcgtcttcgagccggacattggccgtgcggctgtcgcggtcgagcgtgagctggcgcacgcgcaagcgcgccccgtcggtctcgaacgccatgtcggtgacgcgcgtgccgcgcacgaactgcacgccctggcgcttgagccagtcggcgagcggccgcacgatcgcgtcatactggttgtagacggtgcgcttgacgccgccgagcgtctcgatgcgcggaaactcgttcatgaagcggtgcagataacgcttcagctcgatcgcgctgtgccagggctggaaagcgaaggtggtctgccacatgtaccagaaattggactcgaagaacccgggcgacagccagtcggtgatgcggctgttgccgagcgcctcctccgaagcttcggtgagccgcagcagctcgagccggtcgcgcgcggaaaagcccatatgcgagacgtcgatcttgaagcggttgcggtcgaccaggcgtgccctggagtgcgccgggttctccacgttgaacgcgaccgtttcgtcgcgcacgctgagaccgggatgctcgagcgagggaatgctcgagagcagatcccaggtgcattcgtagtggtcggtggtgagcatgcgtccgccccgcagcgaataggcgccgttcgcgagctgcgcgccgtcgaggctgccgccgaccagcggctgcgcctcatagatcacgatgtcgcgtcccggcagctgcgcatcgcgcacgaggaacgccgcgcctgcgagcgatccgatgccaccgccgatgaaatacgccttcatgacttgcctcgattgcagttcgaatgccgcagcaagattgcatcgtgcggcgggcgccagagttgcgctggatcaaggggaaggcgaggcgcaatcacgtcgacgttatcggggtcggcttcctggcgtagatctgctcgatttctgcggcgaagcggcgttccagcgcgggacgcttgttcttcagtgtcggcgtgagcaggcccgcggcaatggtccacggatccaacgtccaccatacagcacgcggtgtcgcataggacggataggctttcacggctgccgcaattctggccagcagcgcggcgcgctccgccgcgtcgccttgctcgccgcttgcagcgagcctttccttctcctgcgtccaggcttttgcattcagcacgaccagcgcggcgaggaacggccgctgttcgccgatcaccagcgcctgctcgaacaagggatcggcgagaatcgcagtctccagatccaccggcgcgatcttctcgcccgtggatgtcacgagaatgtccttgatgcgtcccgtgatggtgatgcgcccgttctcaatgcgggcctggtcgccggtgtgcagccagccgtcggcctccttcaccctgcgcgtctcctccggcttgcgccagtagccaagcatcacgctggggccgcgaacgagcagctcatcgagatcgccgagcctgacctcgagcccgtcgaggacgcggccgaccgagcgcggatcgttgtcctcgggcgtattgacggacacgaccggcgaggtctcggtcatgccgtagccctgaaggatgtcgagccccagcgcgagaaacagcccgatcacgggctctgcaatcggagcgccaccggagaccgcaacgcgcaggcgtccgccgaactgggccaagaccttgttggcgacgaaacgcttcagggccggccaggcgagccggtcgaacagcgacattgagcctcgcccctggcgcgcatcgaagcgccggcccccgacggcaagcgcaagatcgagcagcgtgcgctctgcgccgccggccgccgcgcggcgttgcatgatcagggcgtagatgcgctcatagatgcgcggcaccgagaccagtacagtcggccgcaccgtcttcaggtcttccgcgagctgctgcaccgagcgcgcataggcgacgcaggctcctatcgcgatcggataatagtagcccccggtccgctcgaaggtgtgcgagagcggcaggaaggacaggaagacatcgttcggcacggctgcgatgcgtcgcgcgacggccttcacattggcgatgatgttgccgtgcgacagcatcacgcccttgggccgaccggtcgtgcccgaggtgtagacgatggcggcaaggtcatttggctcgaccgtgacgtcagccagcggcgctcccgcgtcggcggcctgcgccagccagctgtcgagcgcgacgatgcgggcatcgacagcagtgagccccgtcccgtccgcgcagacgatgcgcttgagatggtcgagcggctggccggtggccgcgatcgcctgccagcgcgccagcgtgtcgacgaacagcagcagcgcgccggaatctgcgaggatataggcgatgctgtcggggttatccacggcatgcatcggcaccggcacgaggccgcgcgccagcgccgcctgatccatcgcaacatgtgcaatgccgtttggcatcaggatggcgaggcgctcgccgggcgcgaacccctcggcggccagtgcccgccgccagcgctcgaactccgcatcgatctgccgccaggaccggctgacccagcgcccggcggcaacatcgaaatggcgataggcctccgcctccggcgtcgcttgaacgcgccagcgcaggagctccggcaatgtcgtcacgtcagcgagtgactgcggttgaatgatcggcaccagcatggcgtcctttagttctgctccccgtgaggctcacggctagaatatcccctgcctaccattcgcaccttgatcctcagcaaggttgccccaccagcatggagcgcactcggccgaagaaatcatgcgatggtgtccgcattttcgcctggagacaccgcaagcgttaatcgcgagacgagacatcgcggcgggagaaacgcgaaacgccctgacgcgacatggacgcgcgtccgctgatcgttcacacacatgaacacgcgttcatcggaacccggtgtctgcgtcgtttcgacgcccgcgctaagcggaacgcccgacgcgcacagctgttgttgcacgatatccaactggagtgatgacatgaagtatctcattgtcgcgatgaccgtcggtgccgcggtgcttgccggtggatcggcggcgaacgcggccggcagcagcgcgagcggcaagcagaccgcgcaggaaagccagacgaccgaaataagcgcgcatcgcaggcatcatcgctggcacggccaccgccatcactggcggcaccgtcacggctatcaccggccccattacagaagctacggctattacccgcgccacggctattatggccgcgggcccgggtactacggcggcggtcccggcgtgaccttcagcttcggcggcggacgctggtaagccagacactggtacgacaaaaggcccgcagagatgcgggcctttacttttgctcttcccgcaacagcgtccccgccgtctccaggccactcgccagcgccgcctcgaccgtgcccatgtcgcggccgcgatagagcgcttcgccggagaacagcacggggccatcgtcggtgcgcgcaaggatcgcctgcgcctcccgggtccgcggtgtcgcccacgaataggcgccgcgcgcgtagcgatcatggctccagtttgtcgcagccgccgccatgagctcgcgcgcgatgtccccgcgcaccattccgaaaatgccagcgagcgaaccgagaccggcatcgatcagcccctgcgaatcgaggctgtccagctccgcgacacgcggccccccgatccagcccgtgagcacgggccgcaggtccggatattgcgtccaccacacagggatcgtctcgtcggacaacaggaaggtcatgttcgcgagctcttccttgcgctcgcgccaccacggccgcgcgaaacgcagcaggatcttgatgacattgccgaagccgatgtcatcggtcgccgcaagccttgtgcgcgcgctcgccggcagcgcgatctcccgcagcagcggcagcggcacggtgaggatcacgcgatcgcagctgtgcaggtcgccgccggcgcagcgaacgacggctgcgccgctctcctccgtgatagccgatacggcgcaaccgagatgaatggtgacgccgtgcctgcggcactcggccgccaggaaatcgatcatcgtgccatagccgccatcgatgcgcgcctgcagagcgtgcccgccgtccatccattccgcacgcagtgccagcgttgacgcgcgctcagggtcggccgcgtcgtaaccctcgaccatccgttcgatcgaacggcgcatcggcgcataatcatcgccggcaaaatgccggcgcaggaagtcggccaccgtgaggtcgtccttgagctccctcagcacggcccgaagctccgcctcatgggcttggtggcgatcctcgcgcgcgaacgttgtgccgtgaaagctccacggctcgccttcgatctcctggagcgacagcccggcgtcgcgcaggagtgcgcgtgtgaccggcgcctcgccatggacgaattcagcaccgccatcggcgggatagccgaactccgacgccggcaacggatgaatgcggccgccgcagcgctggcgcgcttcgagaattgttaccttgcggccggcgcgcgccagctcgcgcgccgccatcaggccggctgcgccggcgcccacgacgacaatgtgctcggccatgtcggacatcgccgcccttatcggctcacggcttgcggatcgtttttgatcagatagcgcagcagcaggacgccgccgccgagctcgcgcgtgctctccagcgtcatcgcggtgatcggcgcgcgccggtcactgtccgcctccgtcgagtcgaacacgaacggggcgcctttcgcgccgtcgatggcggggctgaggatcagattgaattcgtcgatgaggccggcgcgcaggaacgcgccgttggcgatgccgcccccctcgaccaacagacgcttcacgcccagctcgcgggcgagaatgtccagcgtcaacgcgaggtcgatctcggacgtgccggcaaagatgtaggacacgccttcgccccgcaggccgtcgagatgcgaatccggcacgctctcggtcagcacgacgacgatcggatcgccgccgatatccgagcggccccagccgatcttgccctctgcatcgaggacgatgccataggttttcgcgccgcgctgcgcgaaccagttttcgcgggggaagatcgcctcgctcgctggatagggcttgcccttggcgaactccgacccggtgacacggccgatcacccaggcatcgccgccgagctcgtcatgaatcttctcgaaccaatccgggcctgcacccttaggacgccagcggctgggatgcgtgcggccgtcgaggctggagtgcatgagacaaacgacataaggcttcatatggttctccatgccgcgctcaggccgccgatccggcgccacctgcattttccccggcgcgaccgttcacgatcaccgccagtggattgggcttcggcggtgtgacgagctggagcgtgttggtgtcgcgatgattgaacggcgcgccgcggacgaacaactcggtctggatcagataggtccagctgccgtcgtcgttgaaagtgatgtcgcagcggtaagcatcggtgcggaaggcttgctccaggaaatcggtcgagcagatcccgtaggcggtctcgccgcgcttggccgtgaccgagattgccctatcctccggcccgcccttgcccgaggccagcagcacctgcccgcgcgggatcgccagcgtctgcatgatcaatccggtcgccggctcccacagccagtagccgacctggtcgtggaaggtgatgtcttcctcgggcgtgttgatgtggatgtgatagcgcagcccgtacagaagctgcggcccgttggcctgcggatcgattggatccatgcggatgcgctcgatgaagatccgctgctccggcccttccgccttcggattgatgtcgatgcccttgtcggcctgccaggtcccggcgagacggcgaagcgggccaagattggcaagtccgtcgggcgagacgtcctcgggctcggtgaagatatcggcgggaatggggagcatggaggcctcgcggggattgcagaggccagccatatcacaggcaggcgtggcgtgaactcaagtgttgccgccggcaaagcgccggcggcatgcgatgatgctcatcgcatcccgcgcccacggtcgacgctgccgccagccggccgaccaggtcttcgaagcttcccgtgcaaccgcggaccggcctcacgccgcttgcgacgtcgatctcgcacgctgctcgagcacgccgatggtcgcgaccaggttatcgcgccgggcgcgaaggttggccgcgagtagcgggtaggtcggctggtgggggtcgaacaccccggcacgagcctcttcctcgagaatgtcggtgttgatcagccggacgcgccaccacagatcggcgatcaacgcgtcgagccggagttcatcagcagcaccagaacgggacacttcctgcatcgcttgcctcaacctgaaacggcctcttcgccgaggcctgggcttggtcttgactgagcaagcggagtgccagcacggccggcttcgcgggtatgcgcttgggaaccgagaattgcggattcgcggtgatctggcgccggttcccggtcgttcttagcctcagaggtcgcttgtcgaggcgctatgatcgctgctatccgggctttagacgtgccaatccgggccgaggcgggtttgccccggaggctcgaggcgcggctgtcgtttggtgcgagcagagggccgaaggcaaaggtggactgggctgatttgatcggacgcgttgcctctcgccaagaccgggaggctttcaagcggctattcgagcatttcgccccccgcatcaaggggctgatgcagaaagccggctgcagccccgacgaagcggaagagatcactcaaaacgcgatgatcgccgtgtggcggaaggccagcctgttcgacccggcaacagccggcgcagcggcctggatattcacgatcgcgcgcaatctgcggatcgatttattccggcgcagagcacgcgcgggccgactggaagacgtctctgagctgcctgatgcaccggaccccaccgaaccggccgatgcggtcatttcccgcgcgcaggatgccgcgcgcatcgagtccgccatcaagcaactctcggcggagcagattgcggtcgtcaggctgtcgttcattgaggagaaggcacaccctgaaatcgcaagccagctcggcatcccgctcggaacggtcaagtcgaggatcagactggcgatgaaccggttgagagatattttggacgaagacgcatgacgatcagccaccatccgcctgaagaacttctggccgagttcgccgccggcaatctggaagaggcccatcagctggtcgtcggcgtgcatgtggcgggatgcacgcgctgtgcccgtttcgtgcgagccctggagcagcttgcgggcgcggcgctggaagaggtcgagccggtgccgaccgcgccggatgcgttcgaccgcatcatgtcgcgaattgatgagcttccggaagacacaaaggcgcctccccccgcgtccgttacggacaatgatgttccgcccgctctccgaaactatcggatcggcaagcgccggcgcgtcgcgcccggcctgagcatgcggccgatcgagctttccggttccggcaaggcccgcgcctttctgcttcggtccgcgccgggctcgcgcatgctcgaacacacgcacaccggcaccgagctcactctcgtgctcgagggcagcttcagtcacgagggcggacgctttggtcccggcgacttcgactacggcgacgacgaggtcgagcatcgtcctatcgttggcgatgagggcccctgtgtctgcctggtcgcaatgaccggcgacctgcgcatgaacggcttgctcggccgtctgatcggcccgttcgtgcgactgtgattctcttgcgatctctcctctggagtgatccgggcctgcacctgaagcgttctgaaagaaacgcaagggagacagggcatggcctgttcgagcctcgcacgtcaggtgcagagcgaaaggttatccgaactgctcgcacgcgttgcctcaggtgagacgcgggctttcgcggagcttcacacgctgacacgaggcaggctgcgcgcgatcgtgctggccgcaggagcctcgcctcatgacgtcgacgacatcctccaggaaagctttctgaaagtctggcgtaacgccggccggtatgattccaggcgggcgccggtcacggcctggatgtccacgattgcccggaacaccgcgatcgatcatctgcggactcggcgacagccgaccttcgaactggacgaggcagtttcggtcccggcggcttccgacgcgtcacatgtcgaggacttcgactacgcccgcgccgaaccgatcgcgcggggggcactggctcgcttgccggaagatcgccgcaggctggtgaccctggcctacctcgaaggcgagagccgcgcgagcttgtcacgacgcttcggtgtgccggtcggcaccatcaagacgtggctgcaccgaaccatcgtggccgttcgcaaggattgcctcgcggcatcggctgccgcctgaatccggaggatgcgcgcatggccgcggagatcattgaattccccgagcgtaggcctcaggagagactcgtcttctcggtcgcacggctcgaagcgatggtgagagaagtcgagcgcgttgcagccgacgatcccgaagccgggctggatcgattgcttgctgccaccgagcgcatcggtcaacaattggtcgatctcgcaggcctcttgcttgacgaagtgacccggctgcaggcgcagagtgcatttgaatccctggccgagaagatcgcggaaaccagagaaaccttcgaccagctcggaggacgaaagtcgacctgatcagccacgcacggctttccgagttcaagtcagctctgcgcagatctatttcgcatgctcagtgggccagcttctgggcgaccaggtatccgatccaggaactgacgccggcgagcagcgatccccagcaaacgtccgcgagcgtaagcccggtcgaccagttccgcaaagtcgcctgattggtgaggtcataggtggcataggtgaagcagccgagcatcaggcccgacgtgaaagcgcgcaacgcgcttccgtcctgctgtgccggcagcaccgcgaaccagatcaaaccgacgggatagagcagatagaaaactgcggcggctcccaggttgggctcggcccgcaacatgtccccaagcaccggccggtaaagcctctcaaccatgatcctgagccagatcatatcgactgcaacgaaggtcacggccaccgaaagataggtgaagagaagattcatgtccgtggtccccctgcggttgcgtcaggccggttgtcgcgccggtcagaaaataacgtctgacgagccacaccggatcacgtccgcgcactcacctctgcttgcagcccggttcagcaacctgaacggcgtcgcgccgagacacggtttcatcacggcgcccgtcagggcggccatgggaagaatgcgttggttcgcgcctgataatcccggtacagatcgccgcgcgacttcagcatctgctcctccagtggcggtatccctgtcccatgcacgaggatccagtacatgatcgctggcgccgccaggctggcccaaccccaggcgtatccgggcgcgagcgcgatgaccgggtaagccagccaacccagccactcgaagaaatagttggggtgtcgcgaccaccgccagagccccatgtcgcagacaagtccgtggttgcatggggagagcttgaaccggcgcaattgctgatccgccaatccctcgcctgcgattgccactagaatgatgaaggctccgatataatcctgcagccgcaatccaggttcgggagcgtgggcggcgaggaagatggcgaacggcagcggcactgaaaccagcgcctgcgattgcaggaacaggaacatccggcgaggggccgccgccccccactggcgcgcatagttcgcgtagcgtggatcgtcgatgcctgccgcggcgcggcgcgcgatgtgcgtaccaagtcgcaccgaccaaagcagcgcgagtgtcgcgacgagcacacggcgttccggcgtgccgtcctcaaaaggccacagagcggcgaccgcaccaacgaggccggtcgcgtaggaccagatcgcatcaacccatccggaatttcccgtgcgctgctgaacgacccaggcaagtcccatcaggatacaaagggccagcgcaatgccgccgatcgcctgcacatgcacaagaaccatgccgtctccaggttaacttctcttcggtacgtccgctgcgggaaccggtttcgcattcggtggcaggcctgcgggtaaagggtaaggtgatccgcatcattccgccaaacgtttccaaatcgattgtttcacgaccgtagctgacggtattgcagtgggggcgacaaggaatgcgtttggccgtgatcgggacgggaattgccggcaatgctgccgcgtggctcctgtcgaaacgccatgccgtgacagtgtacgagcgcgagctgcagccgggtggacatagccataccgttcgcgtcctatatgacggagagccgatcgacgtcgatgtcggcttcatcgtgttcaacgaggcgaattatccgcagttgacggcgctgttcgcgcatctcggcgtgaggaccgtcgagacctgcatgagcttcgccatgtcggccgatcacggtcgattcgaatggcggggtggcggcgagacccttctgcaagctgcccgcggcctgtttgcacaaccgcgcaatctcggatcgccgtcatattttcgcatgctggccgaagtgctgcggttcaaccgccagagcgagacggacttgcgcgccggccggctgcacgggctgacgctcggcgactacctgcgcaaggaatcattcgggccgcgcctgttcgccgattatctcggaccgatgggagcggcgatctggtcctcctcgtcggccgacatcctgtcctttccggcggagaacttcgtcgccttcttcgacaaccaccggctcctgcatctggaccggccgcgctggcgtaccgtcgaggggggcagccgtcgctatgtcgacaagctcaccgctttgttcaaggacaacattcggctaggctgtgccgtgacgtcggtcaaccgagcggagcatggcgtgaccatccgcgacagtcatggcggtgtggaaacctacgatgccgtggtgatggcttgccatagcgaccaggctctcgcggcactgtcggatgccgacgcccacgagcgctccattctcggcgcgatcaagtacgctcccaacaccgtctatctgcatcgcgatcgcagtctcatgcccaggcgccgtcaagcatggggttcctggaacttcctgcgatggccgcggcaaacgccgacccaaaacgacgttgcggtgacgtattggatgaatcggctgcagggcatcgacgacagcaagccgttgttcgtcagcctcaaccctcccttcgagccggcagcccatctgacatttgcgaaattcagcttcgcccatcctcaatacgacctggctgcgtttgcggcgcagcgacgactcccggccattcaggggcgtcgccggacctggttctgcggtgcgtggaccggctacggctttcacgaggatggcttgcaggccggcatctccgttgccgaggcacttggcagcacggtgccgtggcggcattctgactcgctgctgatccaggctgccgagtagcacgatgacgccaacgaaaccggccaacgcggagaatgcgacagcgccggcagcgctctactggggaaaggtgatgcacgcgcgctggcggcccgtgcagcacaggttcacctatcgcgtgatgagcctcttgatcgaccttgaccgcttgaacgaggcggatcgccagtcctggctattcggcatcaaccgagcagcccccttcagcttccacgagtgcgaccacggcgacggcaaaggcgggtgcctcagccagcacgcccgacgactggcggccgagcgcggcgtcgacctctcgggcggtcgcgttctccttctctgttatcccagcgttctgggctacgtgttcaacccgctttcggtctatttctgctatgcggcgtcgggcgatcttgcgctgttgatctacgaggtccgcaacaccttcggcgagatgcactcctacgtcctgcccgtgcaggatgcacgaccgggcggcgcaatacgacagaaccaggcgaaggagttctacgtttcacccttcatggagatgggaacacactaccgcttcagcatttctccaccggcgcaaaacgtgacggtcagaatcgtgcagacgggcgagcaaggcgcgatgttcgcggcagcattcagcggacgacggcgcgccctgaacagccgctcgctgctggcggcgctcgtcgccctgcccttcctcacgttcaaggtgatcgcagctatacactgggaagcgatgcggctttggctgaagggtgtcccctacctgccccgcttgaaacaacgcgagacttgaaccatggacctcgctgccgctcgtcactccgtccaattcgatggtgttccattccttgcccggctggccctgcgccttgcatcgcagctcaggtacggcaccgttcatgtgcgcctccccgaccggagagttgttgctttgcgcggccagcttccgggtccatcggccacgatcgaactcaacaattacaggttcgcgcgcagcctcgtcctgggcggcgacatcggcatggccgaggcgtacataagaggcgattggaccacgcccgatctcacccagcttctctatctgttctgtctcaacgaagatctggtcgacagcgcctttgccgggaatgtgctggtccgcctctgccgacgggcacttcatcggctgcgccgaaacacgagacagggctcgaggcacaacatccacaggcactatgatctcggcaacgagttcttcgcggcgtggctcgataccagcatgacctactcatcggctctgttctcgaccgaaacggccgacctgcccgccgctcaacgacacaagtacgagcaactcgcaaaggcgatcgaattgcagcccggacagagcgtgctcgagatcggatgcgggtggggcggattcgccgaatttgccgcgaagacttacggcgccaccgtgctggcactcaccatcagcaaggagcagcacgaatttgccagccgacgaattcacgaggccgggctcgcggagaaggtcgaggtgcggttgcaggattatcgcgaccaggacggtcgcttcgaccgcatcgcctccatcgagatgatcgaggcggtcggcgagcaattctggccggcctatttcagccagctgtcgcaacggctgaaaccgggcggcctggcgggcatccaggccatcaccgttcgcgacgagctcttcgacagctatcggcagcgcgtggacttcatccagaggtacatctttcccggagggatgctgccttcgaccagcatcctgcgcacgctcggcgagcgcttcgagatgcccgtcattcgcgagcgcctgttcggacaggactatgcaaagacgctcgcgctctggcgcgacaatttcagccaggcctggagcgacctgacctcgctcggcttcgatgagcccttccgccggctgtgggaatattatctgtgctactgcgaggccggcttcagggccggaaagatcgacgtcgggcagctggtgtttgcgcgtcggagctgaggcggctcagggcacggcatcaggccaaggagagcggtgcctgagatattcccggaagaagtggtgcccaggggcggaatcgaaccctcgcctatccgactgaaagttcatcattttttgaacggcgactttccagtgtacctaccagtggacccggcgctttattcgcggccgggagggtgcgactctgcgccgctatacgcaacatatcatcagcgccgcgtgcggcgcgcaaatacagattggtacgcgcccccttagctcagctggattgagcgttgccctccgaaggtggaggccacacgttcgaatcgtgtcgggtgcgccacttcggtatgccgtccttgaggggcgggaagaacctgaccccatcgccctgtcctggcatttcgatcttgaggaagtcggcgccatagtccgccaagagcgtcgccgcgaacggcgctgcaacgatggtcgcgatatccagaaccttcaatccctctagggttggcaacgagtttgagtcttcgaacagtaggctctgcttcgtattttggataacgattgcgctttttggccttgttggcgcgtcatcgttaacgctgctttctcggcttcattcgcattctttgtattcgaatcattgaatcgaaaagccaagcaggacgcgatgcggtttcgcaacttcacggttcctatggctttagaagcccgtattttcccggagaaatcctaatgctttccaaatggtccatccgttccaagattatcgcggttatcgtccttctcctcgccatcatgggcggcttaggggtcatcgccgtacgaagcatgcaagggatcaacgcgcatacggtcgagatcgccaccaactaccttccgagcgttcgcgtcctcggcgccctgcgggccgacattaacgcctaccgttcgtcaattcgcgaccacctcttgggcgaaaccgcggaggaaaaagctgcggccgaaaagaaaatggcggcggacattgagacgatcaaaaaggaccgcaagtcctacgaaccggtgattgcctcccccgaagaacgggcgatatacaacgattggacccgagtgtgggaagagtaccgcaaaggtgtcgacgaagttatcgaggcatcccggaagagcgtcggtcggcctgccgacgaagcgcgcgatctcctttatgcgaagtacagcaagctccgcgcccaatccgacgagttgcttcagaaggatattgacttcaacgataccggcgccaataccgagaccaagagcgcagccgacggatatagcaccgccttcacggtgataacaggtgtcattgtcgccgccatgctttgtggcgcgttaatcggattcctggtcgttcgcgacgtgtcgaaggggatcgcttcgatcatcaagccgatgcaggagcttggacagggtgacctcagcgcggaagtgatgcatcgtggcgagaggaccgaggtcggcgcgatggccgatgtgctgcaaatcttcaaggaagcgctgattgcgaagaaaagggctgacgaagatgcggcccgcgacgcggaggccaaaatcgatcgcggtcgccgtgtcgacaacatcacccgtgagttcgaatccatgatcggcgagatcgtcgagaccgtgtcgtcggcctcgaccgagcttgaggcctctgcgagcacgctgacctccactgccgaacgggcacaggaagtgaccacaatggtcgcggcggcgtccgaggaagcctccaccaatgtgcagtcggtggcgtcggccactgaggagttgtcgtcctccgtcaacgagatcagccgccaagtgcaagaatcggctcggatggcgggtgatgccgtcgatcaggcgcggaagaccaacgatcgcgtcggcgaactatcacgggcggcgggccgcatcggtgacgtggtcgagctcatcaacaccatcgcgggccaaaccaaccttcttgccctcaacgccaccattgaggccgcgcgcgctggtgaagcgggccgcggctttgcggtggtcgcgtccgaagtgaaggcgctcgccgaacagacggcgaaagccacgggcgagatcggccagcagatttccagcatccagtcggcaacccaggaatccgtcggtgcaatcaaggagatcggcggcacgatcgaaaagctttccgaaattgcctcgaccatcgcagccgccgtcgaggaacaaggggctgcgacgcaggagatctcccgaaacgtccagcaggccgcacagggcacccagcaggtctcgtccaacatcgttgatgtgcagcgcggtgcaacagagaccggctcggcctctacgcaagttctgtcagcagcgaagtcgcttgccagcgacagcacccggctcaaagtcgaagttcaaaagttcctcgagtcggttcgggctgcgtgacggcgcagccccgcgcgcaaacggtcttacggagcagcgacgacaaatgaggaagatcactgattttggggaagtgcagaaagtccgtgcgcccgctggttaccagtggagccggtctgcaatcctggctgacgatctcgaggtgctgcacacccggctcgcaacactaagtgggatactctcaagacaacttgcttccgtggaccgtctgctctcaattctccccgacgcgagctgtaacggcgcattgactgaaacggtgaagatcatcaggggccccctcttggaagcagatcgattactcaaccgagagcggcacgaattgaagtccttgcgagagcaacggtttaaaatctacgggcgcggtgctgcagggtcagacataagctgtcaaagtgaaaatgttgaagaaaagaattcttagtgtttgatcccggtatttgctggagcggatggagttttaatcgttctggcttggaagccgagcatttgtagagatattcgtgggacgcctcctcagtctcttcagacgccgagagcagttgcccgcagcggtttcgatgtcctgaattgaatcgcattctggaaatcgcggttgacgaacccataataggcttcgcgcggcacgccgtattccgtcgcgtgaccgttgaggcttgcggtgtgaaaatatggcacgccgaaatccaacatcccgctgagatcagtatggacgcaattggcggtgatcttcttgtccgtcggcgtccatttcacggtgccgaaccggcttctcatccttgcttggtcacgtgaacgatcgccggtcgtgatgttagcgttagcggcggctttttgcacgtcttagcgtttcggaaggcgacatagcatagctggcgcgatagagcttggccatccgaccgaggtgagcgaagccccatttcgcagcaacctcgttcaccggcagttcgttctgtggattggagagctctctgtggacagcctcaagccgcagacgtcggagataggtgagcggtgtcgtatcctgatatctgcgaaagccttgctgaagggatcttccgcttattccgagctcttcggccaacttgctaagcgtcagcggctcgtgcagtctctcgttcatcagatcgatagcggctcgcacctgccgggaactggcatcggcaggcgttctctcgaaaatcgagtctccgcctagattgctcccctcgatgatcaaccgcaacatggcttccgaaatgagggctgaagcattgggcgaaccggatatttcctcgaagtggcctgccgcgatgcctcgggccatgaaatgtaagagctgcccctccatacttctgagatcgaaacgcggctgcggaaaaatcgacgccccgtcccgatcatagatccgcgctagcacttctcggtaggccgcgtgctgccagttgatgccgatctgcgcgttctctggatttccgcgtccagaaaagaccacgggatcaggatcggcgaggatcagggcatgtgcgcccgtcgaagcctgggtctgctgacgcgtcgcagcttggaatgcgccgaccgtcggcaacatgagcgtgaatctttcctcggaggcgacttcggcacacgtccactcgccgttattctgtcctgtacagacccggagatgtggtgtcgcaagaaagtgcacgcgccaacggaaattcttcggctgcctgacatcgaatcgagcgccaggcgaaagaatttctaacgcctcgacgaagtcgtcgatggacgcggttttctcgtcgaactttcgccgcatatctgctcgcccgaaaagaagaacgtaaacggcagtcgatctgcaaaagcggaataaagtaaaaacagattacgttgattcaccagcggctggggcggcaagattagtccatcagagtaagatagagttagggtcaatacaaggtgatcttgattcaaatgtcggcaccacgttccgcgagcgcgcagcttctacttgccgatccagtagccgccgtattgctttaccgagcagcctgcccgccggaagccagcgacgcttgggcagcgggcttggcgacggcatgggaagctagatcctgcatgctggcccgttctatctattccagaccgcatcgaccagcggcttctccagttgggctcccctgttcgccagaagctcatgggcccttctcgcagacttgacgggtcggtgagcccgccgctcgatcagagcagaaaagatgtccgggaccgcaaggatacgaacgacgtcggaaatgcgctcggcggaaaggccgtcgagccgctgccctcgagatattcgtgatgatgcctcggatcacggactatttcatcggttgtgtcggggttgccgaaaagcgccttataaccggccgcaggatgggtctcgatgagagttcgttcgcgatagccttgtcgagcactctcgccgcggtcctggttcgttcagcctcatgtcggggccggttgccgccacagagctgatcggccaaatcgacacaaccgtgctccgacttggcaccagaacacgcactgctacgcgtgactcgcctgcgccggcctcggctgttaggcggcgatccggctttctgaaagattgacgatctcgacgcttcctcagctcgtcgtctatgacggccgcaagcgctcgcgccggacgtgataatcaaagacatcgaaccgattgtaacctgcgaccacatcgtgaagacgcttgggctcgatgctaagccaagtcgagatcggcatagacgagcccctcgtccgtcgtcgcttcgccgaagaccacgcccgtagggtcggcgaagaaactttcggagattggcgtcgcctccagcacgctcgatgcggcttgtcaccgttcgcgatccgctcccgggccacgtggtcttggcagcttcccaccaccacgaagtacttggccttgaagggcggtgttgggagatgaggagcgatagcggcaactacaccaacttgtgtgatcgccgcgatcatcaaccttgccgcattagtcgggcagcacgtcccgtgttatcacccacaacttctttgtaaacggacctttggaagtccatgtaatgtgcactccagaagagaggccgataacgtcaccggccttaaacgaatgctttttgccgctgtcggtctccacgacttccacctcaccctcaagcagcagaatggtttcatcacccagcgtaccggtgtagggggtaaccagcgtacctttcgcatcgacggacgagccggcaatacccttgccggaacgccagacgccgctcatcatcgtgccggtagagcctgaggtgcgaatgaaatacagctcgccagcgaccaacggcccttccttgggttcggtgaaatgatattcctgccactcctccggattgtcactgacgtggctgatcttcaattccttcggcgcattggacgtcggctgcgtcccgttccagatgcaccaatatttct

SEQ ID NO: 308 - DNA, 327636 bp, Bradyrhizobium colbertium
  misc_feature (3428)..(3437): n is a, c, g, or t
  misc_feature (45219)..(45292): n is a, c, g, or t
  misc_feature (136094)..(136103): n is a, c, g, or t
  misc_feature (240107)..(240116): n is a, c, g, or t
  misc_feature (282271)..(282280): n is a, c, g, or t
gccctggctgttgatcacggcgccgagcccgcgagaccacgcggcattgaccagggccgtcgccacggcgccgcagtcgaagggcgtatcgtcgctaccatcaagcatgcggtcataggtgatgatcacgcagacgggcgcgtcgaactggcgaaagccgcgcagcacccagtcctggcgcctctccatattgtcgcgctcgattcccattgctgagaataattgcttggcgacgccgacctgcctgtcgcggtgcttgcccgaaaaagcctggcccgtgcggaactcgcgcgactgtgggatgcctgccagcatccgttcggtgttgccggcgcggattcgatccagcggttcgccagtaatgacatagaaattccagggctgggtgttcatcgatgatggagcgcgcatcgccaaaccaatgatctccgcaatcagctccttggggaccggatcggacttgtagccgcggatgcttcggcgaccgagaatgacgtcatcaaactgcatttgtgtggagtccccctgacaagttctgagcgcttgcgattttcgtggtttcggcaccctcgcgcaagcgacgacgggtgtcattaaggatccagccacgcagaacatggtcgcgtcaatctcgcgcacgccgtcattctgcgagtttcggtagaagcaaattgggcctctgatttgcccaacgtgtcaaattccggtccacgctgcctttgatctcacattctggcttgactgacactctctactccatcgcgcctcaccgtaggacctccacttcccatcccccgctcgctttagcgtcggatcggttacccgcgctggctccgcgatgaaatcgatgaacgcgcgggcgcggtgtggcagaccttctatcaatgcgccatgcagaaacgcacctgtacagggccgcatctcctccgtaacctccgctgcgcaatttcaaggagatgctggcgtggcgaagacggcgactaagaaggcttctaagaagaagagtgcgtcgaagaaggcggcgaagaccgcgaagaaggcgaactccggccgcaagagtgccgtcgcgaagccggcaaggaagtccgcgccgcgcaggtccgccgcaccgcgtcttcccaagggaccggcctggcaatggtcggcggtggagaccgccgcggccatccgctccggcgccatctctgcggtcgcgacggtcgaggcccatctcgaacggatgcgcgcggtcaatccgaagctgaacgccgtcgtcgtcgatctctcggaagaggcgcttgccgcggcccatgcggccgacaagcagcgtgccaagggcggcgatctcggccttctgcacggcgtgccgatcacgatcaaggaaaacgtcgatttccagagtcggcccaacttcaacggcgtgccggccaacaagggcctgatcgccccctccgacgcgcctgttgtccgcaacctgaagaaggccggtgcgatcgtcatcggcctgaccaacacgccggaattctccttccggggcttcaccgacaatcccctgcacgggttgacgctgaatccctgggacccggacatcacctgcggcggctcctcgggcggagcgggctcggcggtcgccgccggcatcggcaccatcgcccacggcaacgacatcgggggctcgctgcgctggccggcgcattgcaacggcgtcgccaccatcaagcccacgcagggccgcatccccgcattcaacgagagcgcaacggccgagcggccgatgctggcacatctgatgtcggcgcaggggccgctcgcccgccacgtcgccgacgttcgcctcgcgctggaggtcatgagccagcgcgatccgcgcgacccctggtgggtgccggcaccgctggtcggcgaacggccgaaaggaccgatcaaggtcgcgctggccaaaatccccgaggacatggacgttgatccgtctgtctccgccgcgctgcgccaggccgccgaccatctcgagcggtctggctatcgcgtcagcgaggtcgaggtgcccgacatcaacggtgtctggcagacctggtgcgacatcatcaccaacgagaccgtggtgatgcaggaagccggcatgctgaaggtcacgtccgaggattttcacaaggcctggggcggcatgaaggccaaggccaatgtgctcgatctcaagggctggatgcaggcgaccgccgcgcgcaacggccatatccgcgcctggcagttgttcttcgaggagtatccggtcgtgctggcgccgaccacggtgaagccgacgccaggcccgcgtgacgacaccatcagcgccgagcgcgtgcgcgagatcttctggggcgagatccgcttcatctccgccatcaatgtgctggggctcccgggcgcggtcgtgccggtggcgctgcacgacggcaagccgatcggcgtgcagctgattgccgggcgctatcgcgaggatctcgcgctcgatgctgcggccgcgatcgagaagcgcgccggcgtgctcgcccgccagctgtgggagcaaatgtcttaggtgcaccttccctgatgccgcgtcgatctgccttctccaagccgggagagggcagaggcacgcaaccgccgcggcaggacgcagcaatttgttaatccgcattaacccgaatgccggccaattccctggcaagcattaggtttacttcctcgatctctaggcgaattattgtccgctttaccacccgcctctaacagaggagcggcggacaacgcacatgcctcatacaggctaataagtgcggcccgccccacgcggaggtggcataatgcgcaacgagacgattgctattcacgccggctacgagcccgaagccaccacgcatgcggtggccgtgccgatctaccagaccgcggcctatgccttcgacagcgccgatcacggcgccgccctgttcaatctcgagaccgaaggctttcgctacagccgtatcgccaatccgaccagcgcggtgctggagaagcgcatcgcccaactcgaaggcggcgtcggcgcgctcgcggtcgcgaccggtcaggcggcgctgcatttcgccttcgtcaacgtcgccgatcacggcggcaacatcgtttcagtgccgcagctctacggcaccacgcacacgctgctctcgcacatcctgccgcgccaggggatcaccggccgcttcgccgagagcgacaagccggatgcgatggcgaggctgatcgacgagaacacccgcgccgtcttcgccgagacaatcggcaatcccgccgggaatgtctgcgacatcgaagcactggcaaagatcgcgcatgcgcacggcgtgccgctgatcgtcgacaacactgtcgcaaccccgatcctgctcaagccgttcgactacggcgccgacatcgccgtgcactcgctgaccaagttcctgggcggnnnnnnnnnnccacgctgggtggcgccatcgtcgattccgggaatttcccctgggccaaatatgccgagcgcttcccggcctacaacaagccggatgcctcctatcacggcctcgtctatgccgagcgcttcggccgcaccgcctatatcgagcgcgcgcgcagcgtctatcagcgcaccatgggctcggtgctgtcgccgttcaatgccttcctgctgctgcagggcatcgagaccgtcgcgttgcgcatggagcgccacgtcgagaatgcgcgcaaggttgccgaattcctgcgcggcgatcctcgtgtcgcctgggtcaattacagcggtttccctgacagtccttactatccgctggtgcagaagtacctgaacggcaacgcctcctccctgttcacctttggcatcaagggcggcatggaagccggcaagtccttctacgatgcactgaagctgatcacccgcctcgtcaatatcggcgacgccaagtcgctggcctgtcatccggcttcgaccacgcaccggcaaatgtcggcggagcagcagcgcgccgctggcgtgctgccggagaccatccgtttgtcgatcggcatcgagcatgtctcggacatcatcgaggacatcgaccaggcgctggaaagggcctgttcgccggcccgtctcgaggctgcggagtaggcggcgctgcccatgacgatcttgatcgacaaggatcaagtcatcgccggcccggcgctggtgccggccgagcacgatctcgcgcgcgaggccggcgacgaactcaccatcgggctcgtcaacaacatgccggatccggcgctgaaggccaccgagcgccagttcatgaagctgctccaagccgcagcaggcccgcgccgtatccgcttctactgcttctcgcttcccagcgtaaagcgctcgccggaagcgaagtggcatatcgagagcgagtactccgacctctccgatctcgagcgcggcaaattcgatgggttgatcgtgaccggtgcagagccgatcgcgcccgagctcgatcaggagccttactggcgcgacctcacgaacctcatcgactgggcgaagatcaatacgcgctcgacgatctggtcgtgccttgccgcccatgcggcggtgctgcacctcgatggcatcgaacggcggcggttgccggccaaatgtcacggcgttttcgattgcgacgtcgtaacggccgactcgctgacacgcgccgcgcccgcgcctttcaaggtctcgcattcccgcctgaacgagatcgccgagagcgacctcgagcaggccggttatcaagtgctgacacgttcggcccaagccggcgtcgacgtcttcatccgccaatatgccagccgcttcgtgttcttccagggccatccggaatacgacgcgctgtcgctccagcgagaatatctgcgcgacatcggccgctatctcgcgcgcgagcgcgacaactatccacgcctgccggtgagctattttgacgcagcgacggaagagaagctggctcgcttcgagaagagggcggcacatcagcgccatccggcgctcagcaacgagctgcccaggctgaacttgcgcgccgatatcggcgctggcagcgccgcggcggtgctattccgcaactggttgcgctatctcggcgcggccgccgatgcgtctgcggcggtacgctagcgtaggcgtcttggtgccgcgttaggattacccaagcgttaggcttgcctcaaccagcgcacgaatgtttcagtagcgccaacagggaaatcacgggaaacgcagcgtgtggtcggcactccagggacgcgtgagtaatcggctggctcggcatttccgagccgcgccgcaccgactgcccgcgcatgcgccgatggtgagctttaccttcgacgatgctcccgatagcgcggcaagcgagggcgccgagcttctggagaagcatggcggccgcgggacgttctatctcgccggcagtctgatcgatcagccgtcggagcattggcacggcctgtcgaatgacgcgatcgtgcggctccaccgcgccggtcacgagattgcctgccatacctactcgcaccggaactccgccactctcgacgagggcgcgatggctcgcgagatcgaacggaaccgctcctatttccgcggcatcgattcctcgatcacactggagaacttcgcctatccctatggggtcgcctcgatctggcgcaagccgcaactcacaaaggccttccgttccgcgcgtggcattcttcccggcgtcaacagcgatgtcatcgacctccagttcctgcgtgcttcgcccttgatcgattgcgagatcgacaaggcaggagttgatcgctatttcgacgaggcggtcgcaagcggcggctggctcatcttctacggccacgacgtcaccgatcggccgagcccctatggctgcacgcccgacctgatgcggcatgcgctggcggcagccggcaagcgcaacatgccgatcgtcacggtcgcagaagcgttgcggcggatcggagcctagcttcccgcctctcgccgctggcgcggcgggaagatagacttgccacgccgtcgccagcatgcgactggcctcgtgacgaatctcacggccttgttcccagcgcgcccatgtccgctccctccaccgctaccgtccctgtaccggccaacggccacgacgcgctgtcggtgctgcattcggtgttcggcctgccggacttccgcggcgcgcagggcgagatcatccgtcacgtcacccagggcggcaattgcctcgtgttgatgccgaccggcggcggcaagtcgctgtgctatcaactcccttcactgctgcgcgaaggctgcggcatcgtggtgtcgcccttgatcgccttgatgcgcgaccaggtcgccgggctgatcgatgccggcgtcaatgccgccgccctgaactcgtcgctgacgccgcaggaggcgtccgatatcgagcggcgcctgctcgcgggtgatctcgacctgctctatgtcgcgccggaacggctggtcacgccgcgctgcctgtcgctgctggcgcaggcgaaggtggcgctgtttgcgatcgacgaggcgcattgcgtctcgcaatggggccatgatttccgtcccgagtatgtggggctctccatcatcgccgatcggtttcccgacgtgccgcgcatcgcgctgaccgcgaccgccgacgagctgacccgcaaggagatcgtcgaacggcttcatctgaccggcgcgccgcaattcgtctcgagcttcgaccggcccaacatccgctacgagatcgtggacaagcgcagcccggtgtcgcagctcaaggaattgatccgcgagcgccacgccggcgatgccggcgtggtctattgtctgtcacgcaaccgcgtcgaggaggtcgccgccgcgcttcaggaggccggcattgcggcgctgccctatcatgccggcctcgacggcagcgtgcgatcgcgcaaccaggaccgcttcctcaacgaggacggcatcgtcatcgtcgcgaccgtggcgttcggcatgggcatcgacaagcctgacgtgcgcttcgttgcccatctcgacctgcccaagagcatcgaggcctattaccaggagacggggcgagcgggccgcgaaggcaagccgtcgacggcctggatggcctatggcctctcggacatcgtgcagcagcgccgcatgatcgacgagtccaacgcttcggatgagttcaagcgggtctcgatcggcaagctcgatgcgctggtcggccttgccgagacgccgcattgccggcgccggcggctgctcgcctatttcggcgagatcgcgatgggcgagagctgcggcaattgcgacaattgcctgacgccgcccaagatgcgcgacggcaaggtgctggcgcagaagctgctgtcctgcgcctatcgcaccggccagcgtttcggcgcgatgcatctgatcgacgtgctggtcgggcgcctgaccgagaaggtcacgcagttcggtcacgacaagctgtcggtgttcggcatcggccgcgagctcaacgaaaagcagtggcgcacggtgctgcggcagctcgtggcgatgggccatttgcagagcgacagcgaagcgttcggagcgctgaaactgacagagtcctcgcgcggggtgctgcgcggtgaaacggaggtgtggctgcgcgaggaagcgaccggcacccgcacccgttcgagccgcgctagatcccgccgcggcgatctcgcgcctgcggccggcgcgccgcaaggcgatgtcgatcccgagctgcgtgcgcgcctgcggtcgtggcgttcagacgtcgcccgcgaacgcggcgtgccggcctatgtggtgctgcacgataccaccatcgacggtatcgtccgggcctggccgacgacgctggacgaactccgcaccgtgccggggatcggcgacaagaagctcgagcattacggcgacgagctgctgcagatcatcaggacgcggtaagaggaaatgacgaagacaagagcgagagccgcccttctgatgcctcacccattcctgaacgcataggcatacccgttcagcgccggcgcaccgccgagatgggcgtagaggatcttcgcgcctttctcgaaatggcccttcttcgcaaggtcgatcaggccctgcatcgacttgccctcgtagacggggtcggtgatcatgccttcgagacgcgcggtgaggcggatggcacccttggtctcctccgacggcacgccataggcgggataggcatagtcctcgatcagcacgacgtcgtcggcgacgatctccttgccgagctcgacgagctgagcggtgttctgcgcgatctcgagcacctgcgccttggtctgcgcgggcgtaaaggaggcgtcgatgccgatcaccttgcgggcacggccatccgccgcaaaaccgaccagcatgccggcatgggtggagccggtgacggtgcagacgatgatgtagtcgaacttgaagcccagctcggcttcctgcttgcgcacctcctcggcgaagccgacatagccgaggccgccaaacttgtgcacggaggcgccggcgggaatcgcatagggcttgccgcccgctgccttcacctcctcgatcgcctgctcccagctctttcggatgccgatgtcgaagccctcgtcgaccaggcgcacgtccgcgcccatgatgcgcgagagcatgatgttgccgacgcggtcatagaccgcgtcctcgtgcggcacccaggcctcctgcacgaggcggcacttcatgccgatcttggccgcgaccgcggcgatcatgcgggtgtggttggactgcacgccgccgatcgagaccagcgtgtcggcattcgaggcgatggcatcggggatgatatattcaagcttgcggagcttgttgccgccataggcgagaccggaattgcagtcctcgcgcttggcgtagatttcgacgttaccgccgagatgttttgacagccgctccagcttctcgatcggcgtcgggccgaaggtcagcggatagcgcgcgaatttttccagcatcattggtcatcccgattggcaaatggtctggggacgcagctagcattggccggggcaaatgtgctttcgaatattgcggcaatgctgcactatatcttgcgagaaggacgtcctctgctatggtttcttccgcaaagctgtcattgaaagaaagcttcttccatgtcgtcccggctcgatcgaattgatctcaagatgttgagattgcttcagaataacggccggctcagcaacgccgagctggcggagacggtcgcaatcagccccgccacatgccatcgccgtacccagcgactgttcgaggacggcttcattgccgccgtgcgcgccatggtcgcgccgaagaaggtggcgaaaggcacgctcgtgatggtcggcgtcgtgctcgaccgctcgacaccggagagctttgcctccttcgaacaggcgatcaccaaactgagatgcgtgctcgactgccatctcgtcgccggcgatttcgactatttcctcaagatccgcgtcggcgacatggaggatttcaaccgcatccacggcgagcagctcatcgcgctgcccggcgtgcgccagacccgcaccttcttcgtgatgaaggaagtcgtcgacaacgcgccgctggagttttgagcggctatcctgcgctatgcctaattgcgcacggcgtagagcggcgttcgtagcgtcagctggtaggacggcttcggcgcccacgcgatcagcgcggtgataccgaacagccggttgtcgttgtcgtccatgcgatcgaggtcgagccgcaggatcggctgggtgaaggactccgcgatcgtccgccccgcgagctgtgcgccaccgaaggactgcacgccgaggcgcccggtgaacttccagttgctcggccattggtagtagccgccggcatagaggatcgtattcgttccgatgttggcgaacgggctggcaatggcggtggtggtgtattgcgtgccggccagccagccccgcgtctcgtcctcgtcgagcgcgtagtcgaactccaggatgttgttgaacgaattcgtcataccctgttcgttcgggaccgattgcgtcagggtcgactgcagcgtgatggtcggaatcgttccgccattctgctggtacaggtcggcctgcacgccaatgttccagctcgtgatgtcgaaggaggaccagccgcggccgtcgtcagtggtagagcccgacacgccgccatacagcgagacgcggtcgctgacgtcgacggtcaacggcaggtcgatggcaatcgctgtcgtggccggcaagccgtgcggcagcgttgcgccgcgacgcaccgccagggcctggagtgcggctgatagcgaggtgtttccgaatccgagtccgagggtgcccgacgggattttcgcatagttcgtgcgcagatcgaggtagatgttcggaatagccggctttgccgtttcatcgtcgtcggcctcgccgaaagcggcgctcgccgagatggcaagacaggccagccccatcgcaacagcgcgcaaatccggacgatgcgatgggttgtgacttgacacgtgacaatccgatgcgcggaactctggttaccgagcggcccgctaaatggaacgcgatcgttcctgaggtcaagggctatccgcacgatggactgcatcgatgcgcgcggctaccctgccgtgatcgcaccgactctcgccggctatagctcgggccggaccatggaggacgaagccatgaacacgtcgcgccgcatcctgctcgccggaatggcggggctcatcgccgctccgactgccgtgacggccacaccggcgtcggcggccgatgatgtgacggttgccgaagaacgctttgcgcgcatgatcgccgccgcgcatgcgcccgacatcaattgcgcgcggcaggcggagcgttatgcggacgcgcattggcctgaatacgttgtcgcggccagggcggttctcgatgcacgcgtgtgattcgcgtgctcacctcttcacagccctccgcacctgttctccgatctgcgacaacacgagttgtgcctgcggcaggatcgcgcccatggcgtggaaattgtgaaccatgccgtcgtggcagacatgctcgacggcgacgcccgcggcgagcagcttgcgggcataggcgttgccttcgtcgcgcatcgggtcgtactcggcggtgtggatgatcgcggtcggcagtccggtgagccgcgttgcgcgcaacggggagacgcgcggatctgcggtatcgatgtcgtcaggcagatagtcggaaagatcggcttcgatcgtggcgcgatcgatcaggtgcccctcggcaaaggcttcgcgtgagggcgaggtctcctcgaaatccagcaccgggcagatgaggcattgcgcggcgatggagaggccggcggtctgcgccgcctcctggcacacgatcgccgcgagcgtagctccggcggaatcgccgccgatcaccagacgatccgcgtcgatgccgagagatgcggcctcgcgcgccacccattcggtggcggcgatcgcgtcatcgacggcggcgggaaatctgtgctccggggcgagccggtactcgaccgatacgaggcggcaaccggtggcatgcgccagcgcggccgcgatacggtcgtgcgtggcaatgctgccggcgacgagcccgccgccatggaagaacacgaagcccggcgcgagctcctcggcgcttgccggcgtgtagaggcgataggccagttcagtggcgtggccagtcagcgtgccatcggaggtcgccacatccggcgcctcggcgcgcgcgaactgcatcagctttgccagcgattgccgccgcgcctccacgctcggtctgctccgcgcctgcggcccggccgccgccatcatggtcaacaaacgctttgcgagtggatcgagcggcatcgatctctcctttctctcacgagggaaaagggtaactcacgaagcccccgcagcaaatcgtttagaaattgggacaatagtgcccggatggttccaggggaggcccggtcatggccgaaatcaagaaacccattgaatattcgccgagttggaccttcttcgagggtaaatggcacgacggcaatgtgccgatcatgggcccgcggacgcatgcggcctggctcggatcgatcgtgttcgacggcgcgcgcgcgttcgagggtgtcgcccccgacctcgaccgccacatcgcccgcgccaaccagtctgcgctcaacttcggcctcaagccggtggtcgataccgacacctggctcacgctcgcgcgcgagggcattgcgcgctttggaccttatgccgagctctatatccgtccgatgtattgggcgcagaacggttcgggcggcggcgtgctgttcgaccccgaaaccaccaattggtgcctgtgcatctacgaggcgccgatgccaaaacccgtgggcaacgccatcacgctgtcgccgttccgaaggcccaccgccgaatgcgcgccggtcgaggcaaaggcggcttgcctctacccgaacaattcgcgtgcgctagcggaagctgcttcccgcggcttccagaacgcgttgatgctcgacatgctcggcaacgtggccgagtttggcaattccaacgtgttcatggccaaggacggcgtggtgtttacgccggtgccgaacggcaccttcctcaacggcatcacgcgccagcgcgtcatcagcctgcttcgcggcgacggcatcaccgtggtcgagaggacgctgcgctatgccgatttcctggccgccgacgagatcttctccaccggcaatttcgccaaggtcgcgcccgtgatccgcatcgacgagcgcgaactgaagccggggccgttctatgcgagagcgcgcaaactgtattgggactttgcgcatgcgatgaagcaggcggcttgacgcgagctgtttccgcgaacgccatcatggcgagcgcggcggtggctcacgcgccgcgtctccgaaaccggctgaactgaaacgcctgcgtggaatcccatggcgtgtgatgcgtctcgcttcgcgtctcgacgagctcgaactccgggccgagcgccgccgcaaggctcgcgctgtcatgccgctgcaccggcaggccgctgcatttctcgggaccatcgggcgcgaacgtcgcaatgatgacgttgccgccgggagcgaccgccgaccgaaggcgctcgacataggcggccctgtcgcgcgggtcggtcaagaaatgaaacgcggcgcgatcgtgccagacctcgtaggtcttcgccggctgccacgtcgtcgcgtcggcaacgatccagtcgaccatcgaggctgctccgccgatccgcttctttgctgcgtcaagcgcattcgccgaaagatccagcacgctgacgtcgcgatatccgtcctgcaacagcgcatcgaccagtcgtgatgctccgccgccgatatcgatgatggctgcgccatggtcgggagttgcagcgcggatcaggtcgagcgaggtcgccgggctgttctggaaccaactgacctcggcttcgcccttggtgaggtagacgttctcccaatgcgcacttcgatcggacatggcgcatcctttcggcttggggcggctggcttgaaagaagacctactcgtcctttttcgacatccgctcgaggcgttcctgcatttccttcatctgctggcgcagatcgtcgatgttgctgtccttcggcgcctcggcattcgcgtcgggctccggggtagtggccgaacggggcgctgcgaacggcttgaacatcgagaaggtctgctggaacagctccatgttgcggcggacctgttcctccaggggagcaaaaggagtgccggacagggtgttggcgatctgcttgcggaacttctcctgctcctgggtcagggtcgcgatcgactgctccagatatttcggcaccaccatctgcatgctgtcgccgtagaagcggatgagctggcggaggaaggtggtcggcagcaggttctggccggccttgttctcctgctcgaagatgatctgggcaagcacggagcgggtgatgtcgtcgccggtcttggcgtcatagaccaggaaatcttcgccatccttgaccatggcggcaaggtcttccagcgtcacgtaggtgctcgtcccggtgttatagagccggcggttcgcgtatttcttgatggtggtgggttggtctgatttcgccatgggctctcacttgcaaaacgcggagaacgggaacctgacgggcaaatgccgcagggcgggaagagtacgcaacgcaacaaaataagcattttcaaagggctcacgctaccgttttgtgcggcacggttaattgcagagcaaaatcctgcttgcgaaagcgccaagaacgctattttgaatgcgttgcggcatgaattcggagaccgtccgattgacatgcctcaacgacgttaacaggatgccattcgagactggcgagccgttttccccagccccgtctgcccccatttcaaacccaggagatgcccatgtcagacgatgtcgtcatcgtcagcgccgcccgcaccccggtcggaagcttcaacggagcgttcgcgacccttcccgcccatgacctcggcgcagtcgccatcaaggccgcgctggagcgcgcgggcatcgagcccggccgcgtctccgaggtcatcatggggcagatcctgaccgccgcccagggccagaacccggcacgtcaggcttcgatcgccgccggcattccggtggaaagcccggcctggggcgtgaaccagctttgcggctcgggtctgcgcaccgtcgcactcggctatcaggcgctgctcaacggcgattccgagatcgtggttgccggcggccaggaatcgatgagcatggccccgcacgcccagcacctgcgcggcggcgtcaagatgggcggcctcgaactggtcgacaccatgatcaaggacggtctgtgggatgccttcaacggctaccatatgggcaataccgccgagaacgtcgcgcggcagtggcagatcacccgcgcccagcaggacgaattcgccgtcgcctcgcagcagaaggcggaggccgctcagaaggcgggcaggttcaacgacgagatcgttcctgtcaccatcaagacccgcaagggtgacgtcgtcgtcagcgcggacgaatatccgcgtcatggcgccacgctcgatgccatggccaagctcaagcccgccttcgagaaggacggcacggtcacagcgggctctgcgtccggcatcaatgacggcgctgccgccgtggtgctgatgactgccaagcaggcggccaaggaaggcaagaagccgctcgcgcgcatcgtgtcgtgggcacaggccggcgtcgatccgaagatcatgggctcgggtccgatcccggcttcgcgcgccgcgctgaagaaggccggctggaatgtcggcgatctcgatctcatcgaagccaacgaggccttcgcggcgcaggcctgcgccgtcaacaaggacctcggctgggacacctccaaggtcaatgtcaacggcggcgcgatcgcgatcggccatccggtcggcgcatccggctcacgcgtgctggtgacgctgctgcacgagatgcagaagcgcgattcgaagaagggtctggccacgctctgcatcggcggcggcatgggcatcgccatgtgcctggcgcgcgactgacggcgagcttgcacgcgccgacgcgtgcgccgcacacgtcggcgcgtgcgtcgcacgcgactaaaaaggcagcggctgcaaatcaaatattcttcgcaaccacgcaagcctcgactaaagaaaaacgcccggctcgacgccgggcgttttgttcttgatgtccgtcaaaccaaccgcataatccaacgctaaaaacgatcgctccagaaacgtccgaagagtccaagggaagggaatttcgacatggcacgtgttgcattggtcacgggtggtacgcggggcatcggtgctgcgatcagcaaggcgctgaaagccgccggctacaaggtcgcggcgagctatgccggcaacgatgcggcggccgagaagttcaaggccgagaccggcatcgcggtctacaaatgggacgtcagcagcttcgatgcctgcgccgagggcgtgaagaaggtcgaggccgatctcgggccgatcgaggtgctggtcaacaatgccggcatcacccgtgacaccgccttccacaagatgacgctcgagcagtggaacgccgtcatcaacaccaatctcggctcgctgttcaacatgacgcgccaggtcatcgagggcatgcgcgcgcgcaagttcggccgcatcatctccatctcttcgatcaacggccagaaggggcagttcgggcaggtcaactattccgcggcgaaggccggcgacatcggtttcaccaaggcgctcgcgctcgagaacgccaagggcggcatcacagtgaacgcgatctgccccggctacatcaacaccgaaatggtgcaggcggtccccaaggacgttctggagaagaacgtgattccgcagataccggccagccgtctcggcgagcccgaagagattgcgcgcgcggtcgtgttcctcgcggccgacgatgccggattcatcaccggctcgaccctgacggtcaacggcggccagtacatggtgtgatgcgatcgcatcacgcgggctgatattttccgcctcgtcatgcccgggcttgtcccgggcatccacggccttacaacagccgtcgccacggaagagcgtggatggccgggacaagcccggcatgacggaaacattgggccgatgactccccgcaccgccacactgatcggcttgaccgcgatcctcatgtggtcgctgctgtcggtaatgacggtggcgaccgggaagatcccggcatttcaactcgccgcgatgacgtttgcgatcggcggcctcgtcggcctgctcacctggatcgggcggaatggggcgacgaaaagcctgcgccagccgctcgtcgtctgggtcgtcggcgtcggcggcctgttcggctatcacgcgctgtactttctcgcgctgcgcttcgcgccaccggccgaagccggccttctgaactacctgtggccgctcttgatcgtgctgttctcgtcattcctgcccggcgagcgtctggctgcgcatcacatcatcggcgccgtgctcggcctcgtcggcaccgtgctgctgttcgccggcaacacctccggcttcgcgccgggcgcggtaccgggattgatcgcggccttcatcgcagctttcgtctgggcgacctattcggtgctgtcgcgccggttgaaggcggtgccgaccgacgccgtcgcgggcttctgccttgccacggccgcgctggccgcgctgatgcatggcctgctcgagaccacggtgtggccggagaccagggtgcaatggctttcagtcatcgcactcgggatcggccccgtcggcgccgccttctacgcctgggacatcggcatgaagcgcggcgacatccgcgtgctcggcgccgcctcctacgcgacgccgctgctttcgaccggattcctcattgcagccggttttgccaaagccagcgccagcatcgcgcttgccgcaatcctgatcgcgggcggtggcttgatcgcggcgaaggacatggtgttgcggaagaggtgaggggagctacggctcccagccgttcggtgcgagctcgaatcctgcgaactcgaatgcgggcgccaccgtgcagccgaccagcgtccactcgcccgtggtttcggccatctgccaggcattcgcaggcacgataccctgcggccgctcgccgccgacgaggtcggagcccagccgcacctcgtgttgcgagcaaccctcatgggcgatgcgcaggatcaaagaattgccggcgtaataatgccaggtctcgaccgcatcgacgcggtgccagtgcgagcgttcgccgcgcgcgagcaggaaatagatcagggtcgagcgcgaccgcccgttggcgtcggtggcctggtcgcgaaacgtctcccggtaatgcccgccttccggatgcggccggagttcgaggcgcgcgatgatctcggctgcggtcggcatcgatccccgccaggatttgttcgtctgatcttcaggacttgttcttgcgctcgcgcagctcgccgaacaccgaggcggggtctgcgcctttcatgtgcagcttggccgcgaccgagggttcgtcggcgcgcaggaacacgttggcgcgcttctcctcgccgagcagggtgggaatggtcggcttgttctcggcccggagcttcgtcacctccgcggcgcgcgcctgcagcgccgcattgtccggctcgatggtgagcgcgaacctgacgttggacgccgtatattcgtggccgcaatagagcttgaagtcgtcgggcagggcgcgcagcttcaggagcgaatcccacatcatgggataggtgccctcaaagacgcggccgcagccgatcgagaacagcgtgtcggctgcgaagaccgccttctcggtgtcgaacacgtaagagatgtggtcgagcgtatggcccggcgtctccacgacgcgcgccagcagattgccgatcttgaccacgtcggcattggcgacgcgcagatcgacgttggcgatcttcgtcgtcttgtcgtgcggcgcgacgacgcggcaattgtatttctgcttgagttcagcgaccccgccgacatgatcaccatgatgatgggtgatcaggatgtcggtgagctgccagccctcgcgctccagggcctcgaggatcgggccggcctccggtgcgtcgatcgacgccgtcgccttggtttccacatcgtggatcaggtaaccgaaattgtcgtttaaacaggtgaaagtacgaatttcggcggccatgtcatctccatcgcgctaccccgcccgacaaatatggcgttaacgtcgcgcaggcaatgcaatattccgcgcgcagcgccgggcgcgtgcatgatacattgcccgtcatgaccatcgacgtcgtcgacctccgcgagttctattcccgccgcctcggcatcgtggcgcggcagatgatcaatcgcggcatcagggagcgttggccccgcgccgagggccagcgcgtgctcggcatcggctatcccacgccttatctggggttgttccgcgaggatgccgagcgctgcattgcgttcatgccggccgcccagggtgtcctgaaatggcctaccggacggccggcgctggcctcgctggtcgatgaattctcactgccgcttcctgacgccgcggtcgaccgcatcctcctggtgcacgcgctggagatgtcggacgatccggccgcgctgctgcgcgaggtgtggcgcgtgctatcgccgtccggtcgcgtgatcgcggtgatcccgaaccggcgcggaatgtggacccgcacagacaacacgccgttcggtcacgggcggccctattcgcgatcgcagatcactgagctattccgccagacctggttcacgccgaccgcctggggcgaggcgctgttcatgccgccctatgccggcggctgggtgctgagatcggcgcagatgtgggagcgcgccggagcagcgttgtcgctgccctttgccggcgttcatatcgtggaggcgaccaagcaggtctaccgcgcgatccccgccaagcgcgagcgcgcacggctcattccttcgctcggcaagcccgtgctggtgccctcctcgacgacggcgacacgcagctgaaacaaatcgtcccggcgaagccgggacgattcaggtcagaagatcggaagaggctactcgccgggggcgacctcgtcgctggaggcgaccggggcggcttcgcgctcggggcgcgggccatgcggacggcgacgccgccggggaaagcgctcgccaccaccgccctcgaacccaccttggccgccattcgcgccgacattcacctgcggctgcgcgccggtgatgaaggagggcaagcggtcgacgccgccggcatcggcaatgacgggctgcggctggttagctggcggcggctgatattgcggctgcggacgatgatcgcgctcgcggtgctcgcggggctgctggttgtcgcgctgataaggcggctggctgtcgcgctgctgagggtcacgctggtggtgatcgcgctgcccgtcgcggtcgcgcatgaagggctgctgctggggctgcgggacgaagcccggctcctggccgaaggccgagaaattctcgccatcgtcctcgccgtcgtcgctgctgttgctgatcggctcatcgccgcgcggctgctggttctgccggaactgctcctgagccgccgcgatcaggcggaagtaatgctcggcatgctggtaatagttctcggccgcaacggggtcgccggaggagcgcgcgtcacgcgcaagctggagatatttctcggcaatgtgcgaggcggtgccgcgaatcttgatgtccggtccgttggactcgtagacccgggtcatcggattctggccgcgccggttgttgttgttattgttgttgcggttgcgcatccgctgcttgttttgaccgtttctcatgtcctgcctttaattccagccctaaaggttgcacgcattactgattgctaggagtgatcgggtgacatgggcccacatctctcacgcgcaccgcgtgcaagagcggatcgaaccctgccgatgttcgtcgaccgtcgcgttcaacaaagacgcgttccccacccgccagcattcagtgccagcgaacccattcatttcgcttgccgaaacaagcccagctgtcttgcgtaagtgttcaagcgcaatatcaggctttcgttcactttgcggtcggagagcagcgcagctccactggccatcgcgctcaacaggacctgcggcttggaaccttatcagtaatgctctcgcccgagagcccggctttcgcccgtaggtctacggggccggcaccgatgtgttgaacggaacgtagtcgttcccaggcgatattccaagaggtttttgcagttcaatccggcttttatgggggcatttttcgggccgaaacggcccggggaatgccggccaaatcggtcttgggtggcctgtcgatcgacaacgcggcccccctcatcaaggtttcaatattctgggcctggccctggccagcctcgacgatcaccgcgccggccggggagaggcgctcggcggcctgagggatcaatgcgcgataggcgtcgtagccgtcattgccgccgtcgagtgccagatgaggatcgtgctcgcggacctcgatgctcaatttcggaatctcggcggagggaatataggggggattggacacgatgaggtcgaacgggccgcggagcgccgcggcgtaggagcaggcgacgaaggcggcgcggtcggcgaggccgagcgccgcggcattgtccctggcggttctgagcgcgttctggctgagatcggtgccgacgccgaaagcatcggggatttcgtgcagcagcgcgagcaggatcgcgcccgatccggtgccgagatcggcgatacgcggatgaggcgtcggccgctcgcgaaagacttccagcgcaagctcgaccacggtctcggtatcggggcgcgggaccagggttgcctcggacaggcggaatggcaggccccagaactcgcgtgtcccgagaatgcgcgccaccggctcaccggcgatacggcgctctgcgtgctgcgccagccgcgatgcttcggccgcggtgagaggacggccggcctgcgtgatcaggccggtgaggtcgaggccgagtaccgcactgatcaggatgcgtgcgtcgagctcggcctcgtcgaattgtgccgacctcagtcgcgcagcgagcgcgcgccgcgcgccttcgatggattgtccggtgaagggattgctcacgcctcaggccgccgcgccttgtgcagcgagctgcgcggcctggtgctccgtcgtcagcgcatcgatcaattcgccgagcgcctcgcccgcgatcacctgcggcagcttgtagagcgtcagattgatgcggtgatcggtgacgcggccttgcggaaaattgtacgtgcggatgcgctcggagcggtcgccggagccgaccttctccttccgctcggccgagcgcgcggcgtcgacccgttgccgctcggcgtcgtagatgcgcgaccgcagaatgttcatggcagaggcgcggttcttgtgctgcgagcggctgtcctgcatcatcaccacgatgccggtcgggatgtgcgtgatgcggatcgccgattcggtcttgttgacgtgctggccgcccgcgccttgcgcgcgcattgtctcgatgcgcaggtcctcgttcttgatctcgacgtcgacatcctcgacttccggcagcacggcgaccgtcgccgcggacgtgtggatgcgtccctgcgtctcggtatcgggcacgcgctgcacgcggtgcacgccggattcgaacttgagcttggagaaggcgccacggccctgcacctccgcgatgatttccttgaagccgccgacggtgccttcactggcggagatcacctcgaccttccagccctgaaggctggcgaagcgctcgtacatccggaacaaatcgccggcgaacaacgaagcctcgtcgccgccggtgccggcgcggatttccagcaccacgttgcggtcgtccatggcgtccttcggcagcagcgcgacgcggatcttctggaccagctcctcgattcttgacgtcaactcgccgcgctcggcctccgccatgctgcgcatctcggcatcggtggcgggatcggcgatcagggcttcggtatcggcgagctccttgaccgcggagcgataggtcttcaccgcctcgacgagcggggtgatctcggcgagctcgcgcgtgatctgcacgtaccgctcggaggtgagctgtcccagcgattcagcctcgagcgaggcgtgatgcgcgagcaggaggtccagtttggcttcgggaagtgacgacatcggttcagtctcaatagcggaaaggagcgaggcggcaggacgcggcgacaggctcgctacaacgccaggccctcggcttcggcaaattccgtcagcttctgccggatcgagacgctgcccgccggcgcgtccaggagcgggccgagcacggcttcggccttcctggcgtcgaggtcgagcaccattgccttgacggggccgagcgcggttgccgagagcgacagcgaacggtagcccagcgcgatcagcgccagcgcgccgatcggtttcgacgccatctcgccgcagagcgagagcgacttcttcgccgcgtgcgccttgcgtgcgatatcgcgcagcgcgcgcaggatcggcgccgacatggtgtcgaagcgctcggagaccttggcattgccgcgatcgaccgcgaacaggaactggaacagatcgttggagccgaccgagatgaaatcgaccttcttcaggagctcgtcgagctggtaaagcagggcgggcacctcgaccatggtgccgatgtcgatacgttccggcagcgtgtggccgtgctggcgcagatatgtgagctcgcgctcgaccagcgctttcgccgcgtcgaactcggcgacctccgagatcatcgggaacatgatgcgcagcgcgcggccgccgccggcccgcagcaatgcgcggatctgcccgcgcaacaggcccggacgatccagcccgagccggatcgcgcgccagccgagcgcaggattttcctcgatcaccgcttccatatagggcagcgccttgtcgccgccgatatcgagcgtgcggaaggtgacgggcttgctgcccgccgcgtccagcacggtgcgatagagcgcgagttgatcgctggtgcgcggcaggctctggccgaccatgaattgcagctcggtgcggaacaggccgatgccggcgctgccggtgtcctcgatatgcggcaggtcgatggcgagacctgcgttgatcatcagctcgacgttctggccgtccttggtgacgcagggccggtcgcgtagcgccagatactgcgcctggcggcgggcgcgaaagcgcacgcgctcggcgaacgccgcctcgacctcctgcgacgggcgcacatagatcgagccggaggtgccgtcgacgatgatggcatcgccgggatcggcgatgccgggcgcgttcggcacttcgccgactgcggggattccgagcgcgcgcgccacgatggagacgtgcgaattggcggtgccttcctccagcacgatgccccgcaggcgcttgcggtcgtagtcgagcagcgccgccgggcccatcgcgcgggcgatgacgatggcgttgtcgggcaattgctcgcgcgaaggcgcgtggtcttgcccgacgagctgccgcatcaggcgatagccgagatcttccagatcgtgcaggcggtcgcgcaagtaagggtcagtggagcgcagcatgcgcgcgcgggtgtcggactgcacgcgctcgacggcggcttccgcggtaaggcccgtggcgacggcctcgtgcagcttgtgcgaccagccctggtcgttggcgaacatgcggtaggcttccagcacctcgcgatgctcgccgccttcggcgacgtcgccgcgctccagcatgcgatcgagatcggcgcgcagcttggcgagcgcggtgtcgagccgcttgatctccttcggcaggtcctcggcgatgtagtccttgatgacgacgcgcggctcgtgcagcacgacatggccgagcgcgatgccctccgacaggatcgcgccgaccttctgcgcggaatggcgcgcagcgggctcctggcccggctgggccagcgccgacaattcgcccgaggcgatcagctcggccagcaccatcgcagtggtctgcagcgcctcgagttcctcctcgacatagttgcgcttggcgcggttctgcaccaccagcacgccgagggtgttgccggcccgcaggatcggcacgccgaggaacgagtggtagatctcttcgcccgtctcggggcggaacgagaaggccggatggctctgtgcgtcgctcagattgagtggcgtcgcctcgctggcgaccaggccgaccaggccctcatgggcgctgagcacggtgtggtgcacggcctcgcgattgagaccttcggtggcgtagagctccagcgtgttgtcgatgcgcagcacgtagaccgagcacacctcggccaccatgttggcggcgatcagcaccacgatcttgtccagccgctcctgggccgagacctgctccgccatggtctcgcggagccgtctcaacaagacgcggggacctcccgacgcgctccgcatgaaccgtcaatctcctccgtctgccgggcccggcggtatcggccggcggctaacccaaagttccagaaaaacaaccaaaattgttcgtccggcgcaggcacaaaccgaaatctacttgagatctagcgcttgcgccgaatcagcgccgcctgaactgggacacagtctgcggcagcccaccctgttcgccgtatagcgaattgaggcttgttttgccaagcaaaacgcctgccaaacgcgaaggtgtgtacaccttcgcgtttgctgcgaccgctaagagaaaattagcctagatatggtccggaaagcgtgacgcgattttccggaaaggccatgctcaacgacaatctgaagcgcgacgagggtcgtgctttaggcttgatcgaggccgtagagcgtgtgcagggtgcgtaccgcaagctcggtgtaggcggtatcgatcaagaccgagaatttgatctcggaggttgtgatggcccggatgttgatgttccgtcgggcgagggccgagaacgcctgggccgcgacgccggcatggctgcgcatgccgctgccgatcaccgagatcttggcgacgtcggtggccgtatcgagccgcgcatagccgatcttgcccttggcggcggtaatcgtatcctttgcgcgggtatagtcggcggccggcacggtgaaggtgaggtcggtggtcttgccgtcctcggaaacattctgcacgatcatgtcgacgttgatgttggcgtccgccagcgggccgaagatcgatgccgcaacgccgggcttgtcctcgatgtggcgcaccgagatctgggcctcgtcctttgaaaaggcgatgccggtgacgacgtggctttccatgatctcctcctcgctgcagatcagcgtgccgggcggctggttggcatgcgggtcgatatcctcgggcttgtcgaagctcgagcggacgaaaatcggcatattgtggaccatgccgagttccaccgagcgcacctggagcacttttgccccctgcgaggcgagttccagcatgtcctcgaatgcgatcttgtcgagcctcttggccttcggcacgattcgcgggtcggtggtgtagacgccgtcgacgtcggtatagatgtcgcaacgatccgccttgacggcggcggcgatcgccacggccgacgtgtcggagccgccgcggccgagggtggtgatgcgattggtctcggggttgatgccctggaagcctgcgataaccgcgacctccttgcgctcctggaagcgcttgatgatctcgctgccgtcgatgtcctcgatccgcgccgaggcatgggcgtcgctggtcttgatcgggatctgccatccctgccaggagcgagcctggatgcccatgccctggagcacgatggcaagcaggcccgaggtcacctgttcgcccgaggcgaccacggcgtcgtattcgcgcgcgtcatgcatcggcgaggcctcggtgcaccaggcgaccagctcgttggtcttgccggccatcgccgagacgaccacggccacttcgtggccggcgtcgacctcacgcttcacatggcgtgcaacgttgcggatacgttcgatattggcgacggacgtgccgccgaatttcatcacgaggcggctcatgacgacgcgtgcattccttcataaggatcagtatggtgacccgcaccggacggctgcctcgcggataccgaccgcgcgtatacagagcggcgggggcgggggcaagcgggttcctgcggaggcaggacgcggggtagtgggttaaccgaggcatggcgcgttacatcgacgagatcctgcaaccgggcgagcgggtcctgtattcgaccaatgcgcactggatcttctactttccggccatcatggcctggatcgtggcgctggccctcttcatcctgtcgcggcaggtgaccgtcgactggctctttctgctttgcctgggaggcgccggcctcgtggctctggccgcactgtactggaccatcaagggctggttccatcgcttcaccaccgagaccgacgtcaccaacctcagggtggtgcacaagaccgggttcatccagcgccgcaccttcgagatggcgctggacaaggtcgagagcgtcgatgtcaaccagacgattcttggacgtattctcaactacggcgatgtgaccatcaacggggtcggtgaaggtcgcgaaaccatccggacgatcgcctcgccgctcgccttccgtagttcgatcaccacgcggtaggaccgcgcaccaccatgagcatgcagcaaaatccttccctttctgcccagccgggctcgaccgtcgatgccgccgagatcgcaaaattctcgaaactctcggcggagtggtgggaccccaagggcaagatggcgccgctgcaccggatcaacccgctgcggctcggctacatccgcgacgccgcctgccgcaagttcgaacgcaacgtgcgaagcctcagttgtctcgggtccttgcgcgtgctcgacatcggctgcggcgccggcctgctctgcgagccgctgtcgcgcctgggtgcgcaggttgtcggcatcgatccttcggcaagcaacatcgccgcggcgaagctgcacgccgacaagagccatcttgcgatcgactatcgctgcacaacggtggaggaggtcgacccgcgcgagcgcttcgatatcgtgctggcaatggaggtggtcgagcacgtcaccgacgtcggcgtcttcctgaagcgctgcgcctcgatgctgaagccgaacggcctgatggtggtctcgacgctgaaccgaaactggaagagcttcgccctcgccatcgtcggcgccgaatacgtgctgcgctggctgccgcgcggcacccacgagtggaacaagttcgtcacccccgacgagctcgcaaaacacctgctcgacaaccgtctggtgatcaccgagcagaccggcgtggtctacagcccattcgctgataaatggtccctctcgtccgacatggacgtgaactacatggtggtcgcggaagcgatggtgtgaggggaatgagcggcgcgcgagctctcaccgctgggggcagtgtcgcattgacccataccgcggatctgtcgttgcgcggatggtgtgagatgtgcaggttggcggctgccgaaaaacggctccttggggtaatgggtccctgcgtgcgcagggacgacgccgaatttgttgcgagagcatcgctcccatgacgtccgtgcggttgaccgggttgggttcaacttgcaggctggccgcgttgatttcctgctagcgcccgttcgccgcccctatgctcaccattgccagcctctggatccctttcacgatcattgccgcgctgggtcaggtcgcgcgcaatgcgatgcagcggtcgttgacgaagccgctggggacctggggcgcgaccaatatccgcttcctgttcggctttccgttctcgctgctgtttctcggcgtggtgttgatcggcaccggcgatcatctcggcttgccgccgaccctgttctggccatggctgctgctcggcgcgctcagccagatcgtcgccaccggcctgatgctgctcgcgatgaacgaccgctccttcgtggtgacgacggcgtatctgaagaccgaggcgatccagaccgcgatcttcggcttcgtcttcctcggcgatcacctgacgtggctgaaggtgctggcgatcgtgatcgcgacgatcggcgtggtcatcaccgcgctgcggcccggcggcgagaagagctttgccgaattgaagccgaccatcaccggcctcgtcgcggcggcagcgttcgcgctctccgctgtcggttttcgcggcgcgatcatcaacgttcccggcgtctccttcgtgactgcggcctcgttcacgctggtgcttggcctgttcgtgcagacgctggtgctgacgatctatctgctctggcgcgcgcctgacgtgttgcggggaatcctcaaattatggcgcccgtcgatgctcgcgggcttcacgggcgctttcgcgtcgcaattctggttcctggcgttcgcgctgacggcggccgccaacgtccgcacgctcgcgctgatcgaggtgctgttcgcgcaaggagtagcctactactcgttcaagcagtcgatcgcgccgcgcgagcttgcaggcatcgcgctgatcgtgatcggtgttgcggtgctggtcggcgtctagttccggtcttccggcagcgtcggcagcggcgagacctcgatgccttcctcgatcagcgacttcgcctcttcgggcgaggcctcgccatagatcgggcgatgctccttgtcgccgtaatgcattgcgcgggcttcgttggcaaaacgctcgccgacattgtcggcgttcttgacgatgtgatcgcgcagctccttgagcttggcgcgcaactcgcgctcctgcgccatcagcagcgaggtcgatcctgaggccgcagcgtcgggtgtcgcggccgtcgcgactggttccggtggcggcgtcgcgcggccacggcccttcttgccgacgatgcgcggcgccatgatcgccttgtcgaccttggccgagccgcagatcggacaggtcacgagcttccgcttcacctgggaatcataggccgacgaactctggaaccagctctcgaactcgtggttccggtcgcagcgaagcgcgtagcggatcatgccgatccccgcacaaggtgcaggtgatccgggcccgccttcggatcggagacaccgaagcggcggccatgctggagcgaagggattgcccgccgggcggtctcgaccttggccggatcgatcctggccatgatgacgccgggctcgacatcgccctcggcgaggatttcgccccagggatcgatgatcagcgaatggccgtaggtctcgcgcttgttctcgtgcaggccggcctgggccgcggcgaagacgaagcagccggtctcgatcgcacgggcgcgcagcagcacgtgccaatgtgcttcgccggtcttgcgggtgaaggccgacggcaccgtgatgaaatatgctccgctttcggcgagtgcgcgatagagcgcggggaagcgcacatcgtagcagatcgtcagcccgatgcggccccagggcaggtcggagatcacggcggtctcgcccggctggtagttcgcggattcccgatagctctcgccgtccggcagctcgatgtcgaacatgtggatcttgtcgtagctcgcgagcacattgccctcgggcccgatcaggaaggagcggttgaccgccttttcagccgagaagcgcagcgccagcgagccgacatggagatggatcttcagctccgccgcgagcgcgcgataggctttcagcgaggtgtcgtcctcttcgctttggaggtgctcgaacaatgccttgcggttcagctgcatcatgttgctgacttcgggcgtctgcacgtagtcggcgccattggccgcagcctggcggatcagcttggtggcctgctcgaggctcggcccgggcatcaggccggtgcgcatctgcaccatggcggcggtgaaggtcctgacctcgctcatgagaccgccttgacgctttggagcatgccgtcgagcttgccttcgcggtcgagcgcatagagatcgtcacagccgccgacatgggtgccgccgatccagatctgcgggaaggtcgagccctgaccggcgcggtcgtacatttcctgacgccaggccgagttcttggcgacgtcgaattcggtgaaggtcgccttcttgcgggtcagcagcgacttggcggcggaacaatagccgcagcccggcctcgtgtagatctcgacagcagcggtcatctcgtctggcgctctcatgtcatgaagtcattgaattatatgggaccggggctgctctcgacaacccgggcaaagaccagcacgtcgacctgggcggccctggcgcggagcaagacccgcgcgcaggcatccagcgtcgcccctgacgtgaggacatcgtccacgaggacaatgcggcggccctggacctcggcctgacgctctggagatacctggaatgcgccctgcacattggtggcgcgctgggcccgcgacaggccgatctgctgctcggtggcgcgcacccggcgcagcacgtcgcctcgcaccctcactccgctctgcagggcgatgacacgcgccagagctccggactggttgtagcggcgccgccaggctcgccgccaatgcagggggacgggcaccagcatgtcggcgcctgtgagcagctcgctgccggcgcgcgccatccagcggcccatggccggcgccagatcggtgcggtcctggtatttcagcgcatgcaccaaggtgcgggcgacgtcgtcatagcgcaccgccgcgcgggcgcgctggtaggccggcgggctggcgatcgcttccatcgacagcatgtcgggaccggggtcatacacaaagggaatgccgagccgcgggcaatagggccgttcgatgaacgacagccgcccccagcacgaagcgcaaacgccttcgccatcgaccggctcctggcaggacacgcattgtgtcggcagcgcgatgtcgagcgcgagccgcgccgcgcgcgacagcacgtgtcggccagccgtccacgcggcccgcaacggcgcgccgatggaacgggtagggccagcttcggtttccatgaggcaaggctagcgctgcgcgcagcggattgccagaagcgtggagatcggcgtaaccagcggcatggctcagaccccgcaaaccccgcccgccttgttcgatcgcgccttgctgaacgcgcggcagcggcgcgcgcaggcgctgggcgaggtgacattcctgctcgatcgcgtggccgaggacatgtcggaccggctggcggcggtgatgcgcgagtttcaggcgccggctgacctctggacgcccggcagcgggctgccggcgctgcgtacaccgcttccgtccatcacacggattgcgcccgatgcgactggcgcggaggagcttccgttcgcgccggaaagcctcgatctcgtcgtttcggctttggcgctgcaattcgtcaatgacctcccgggtgtgcttgcgcaggttcgccgggcgttgaagccggacgggctgctgctcgccgcgatgatcggcggcgacagcctcactgagctgcgccaggcgtttgccgcggcggaggctgaatgcgagggcggggtgtcgccgcgcgtggcgccgttcgccgacctccgcgacgtcggcgcgctgttgcagcgggcgggcttcgcgctgccggtcaccgacgtcgaccgtgtcgtggtgcgctatggcaatgcgttcgccttgatgcaggatctccgccgcatgggcgcggccaatgtgctgatcgagcggagtcgcacgccgacgcggcgcgcaacgctgctgcgcatggccgaaatctacgccgagcgcttcgccgatgccgacggccgcatccgcgcgacattcgacatcgtgtggctctccggctgggcgccgcatgccagccagcagcagccgctgaagccggggtcggcgaaggcgagtcttgcggaggcggtgaagaaggcggggaaggagtgatcctcatggtgaggggcgcgtaagcgccgtctcgaaccatgcaggcccggctcttgccgtgtgagcccgtgctcacatcaacagatcgatcaggtgcgggatcagcggtatgtccgcgggcggcatcggatagtcgcgcagcttgttggcgcggacccaggccagggtctggccttcgcgcgccgtaacttgcccttcccagcgccggcagatgtagagcggcatcaacaggtgaaaggtctcatagccgtagctcgcaaacgtcagtggcgccaggcagggctcggcgacggtgatgccgagctcctcgtggagctcgcggatcaggctctgctcgggccgctcgcccgcctcgagcttgccgccgggaaattcccagaggccggccagcgccttgccctctgggcgctgcgcgatcaggacgcgcttgtcggcatcgacgagcgcgcaggccaccaccaatgtcagtttgagatcggccatgctgcctaggaccggtagtccccgttgatcgcgacatattccttggtgaggtcgcacgtcatgacgcggtcgcggcccttgccgagcccgagcgagaccctgatcgcgatctccggcgccttcatcgcttccgacacctgcgcttcgtcgtaagacggatcgcgtgcgccgttcttggcgacgcggatgccgttgaaggagatcgagagcttgtcgcgatcggccggctcgccggccttgccgaccgccatcaccacgcggccccaattggcatcttcgcccgcgatcgcggtcttcaccagcggcgagttggcgatagacatcgcgatcttgcgtgcggaggccttggtcttggcgccttcgaccgtgatctcgaccagcttgcgcgcgccttcgccgtcgcgagccacctgctcggcgagattggccagaatctggttgaaagccttgacgaaggccttcagcctggggtcgctggcgcggctgatccgcggcgcaccgtgttcggcggccgagccggtcgcgaacgccagcaacgtgtccgaggtcgaggtgtcgccgtcgatcgtcaccgcattgaaggtgtcctcgacgccggccttgagcagcgcctgcagggccgcgggcgcgatcggcgcgtcggtgaagatgaaggacagcatggtcgccatgtcgggcgcgatcatgccggcccccttggccatgccgttgatggtgaccttggccttgccgagcttgacggtcgcggtcgcgaccttcgggaaagtgtcggtggtcatgatcgccttggccgcggcgagatagtcgccgggctcggcggtcccggcgagacggccgagcacgccgtcgaacttggtcgcatccagcggctcgccgatcacgccggtcgaggccaggaagatctcgctctcgctgcacccgaccgccttggccgcgatcttcgcggtcagcgcggtcgaggcgcggccggtcttgccggtgaaggcattggcgttgccggagttgaccaccagcgcgcgcgccttgccgcctttcagcttggcgcggcaccattcgaccggcgccgagggacacttcgacttggtgaagacgccggcgaccgccgtgcccttgtccatcaccgccagcagcacgtcggtgcggttcttgtagcggatgccggcctcggccgtcgcaagacggacgcccgcgatcacgggcatgtcggggacggtcttcggggcgagcggggagacggaggaggacatcgcggggcgccttggtggggtctggacatgcagatggccgggggatcccccggccattgcgacgttagatactattggcgtccgcgaagtgacagcgaattcttacttcttcgccgggggcgccatcttgctgtcggacggcttggcagtgtccgccggcttcgcatcggacttggcgtccttggacgcatccgccgccggctggttcagccgctcgaccttggcttcggtgcgcagcttggcgacatattcggcctgggccttgcgggtcacgtactgctcgatttgggccttgacctgctcgaaatcgggcgccttgcggttgcgcttttcctcgaccttgatgacgtgccagccgaactgcgacttcaccggatcggagatcttgccgggctcgagcgagaacgccacggccgagaactccggcaccatctgctccttggtgaagaagccgaggtcgccgccgtcggcggagcccgggtccttggacttcttcttggcgagctcggcgaaatcggcgcccttctcgagctcggccttcaccgccttggcctcgtcctcggtctcgaccaggatgtggcgggcgcgcacctcctgctcgccgctgatctgcttggaggcctcctcgtaaaccttcttcatggcgtccggcgtggtcgcggccttgccctcgctggcgagcaggctgtccatcaggaggcgattgcgggcgaatgccaggcgcttcttgaactcctcgctgtcggcgatcttcttgtcttcggcagccttgctgacgatcttcatgtcgatcaggaaggacaggacgttctcgtccttggtcgccgggtccatctgggcgaggctcggcccgagttcctcctcggccatggtgacgtcgctcttcttgatttccgcgccattgaccttcgccagcaccggatcatcggcggcccggagcgggcccgcgaacgccagggacagcgccagagcgaggctcccagccagggcggacgcatggcgaaagcgctggccggtggttaccgggaacgaggtggtcatggaaaatccttatgttgaagcagggggctgctcgagcggggcggacactcgcccaattcaggggggcttggcaacgcgaaaagtctgtcaaaatgatgaattagccgcaatgcgcccgccgttgacaaggccctgaccgggccatatctctggccggtcgcgaccatggcgatagcgtttattttgctgcgtttttggccgttgaacccagacttgcccaattcccacccatatggcggacgacccccgcagtccgggctctgacgccacgaggcgtcacggtgagttgataggcaggcgggtgacaacttcttaggccaacgcggttaattcgcgaacacaggaactaagcatgatcggcgcgctcgcccgcaagtttttcggctccgccaacgaccggcgggtgaagggatatcagtcccgcgtcaacgcgatcaacgcgctggagcccgagctgtcaaagctctctgacgaggcgctcaaggcccgcaccgcggaattcaagcagcagctcgcgaacggcaagacgctcgacgacctgttggtgcctgccttcgccaccgtgcgcgaggcggccaagcgcacgctcggccagcgccatttcgacgtccagctgatcggcggcatggtgctgcacgagggcgacatcgccgagatgaagaccggcgaaggcaagacgctggtggcaacgctcgcggtctatctcaacgcgctcgccggcaagggcgtccacgtcgtcaccgtcaacgactatctcgcccgccgcgactccggctggatggggcagatctacggcttcctgggcatgaccacgggcgtgatcgtccatggcctcgatgacgccgagcgcaaggcggcctatgcctgcgacatcacctacggcaccaacaacgaatacggcttcgattatctccgcgacaacatgaagtaccggctcgaggacatggtccagcggccgcattacttcgccatcgtcgacgaggtcgactccatcctgatcgacgaagcgcgcacgccgctgatcatctccggtccgctcgacgaccgatccgatttctacaacaccatcgacagcttcctgcccaagctcgacaagaccgactacgacgtcgacgagaagcagcgcaccgtgacgctcaccgaaggcggcatggagaagatcgagacgctgctgcgcgatgccggccagctcaagggcgagtcgctctacgacgtcgagaacgtctccgtcgtgcaccacatcaaccaggcgcttcgcgcccacacgctgttcacgcgcgacaaggactacatcgtccgcgacgacgaggtcgtcatcatcgacgagttcaccggacgcatgatgccgggccgccgctattcggaaggcctgcaccaggcgctggaggccaaggagcacgtccaggttcagcccgagaaccagacgctggcctcgatcaccttccagaactacttccgcatgtacgagaagctcgccggcatgaccggcacggccgcgaccgaagcggacgaattgttcgacatctacaagctggaggtggtggagatcccgaccaacctgccggtcgcgcgcctcgacgaggacgatgaggtctaccgcacccagcaggaaaaataccgcgcgatcctcgccgagatcgagcgcgcgaatgcacggcttcagccggtgctggtcggcacggcgtccatcgagaaatcggaggtgctcgccgagtttctcaagaagaacggttacaagcagatcgatttcggcaaggagaacgcgctcgacaagctctatgccgcggcccgcgccggcaagccggccaagctgttcgcggtgctgaacgcacgcttccacgagcaggaagcctatatcgtcgctgaagccggcgtgcccggcgcgatcacgattgcgaccaacatggccggccgcggcaccgacatcaagctcggcggctcgctcgagatgcgcatccagcaggagaccgcaggaatcgaggacgaggccgagaaggccaggaagatcgagcagatcaaggccgacatcgcgcatttccgcgagatcgtgctgaaggccgaggagaccgtcgagctcgagccggcgaagggctccaagccggccaagaccgtgaagaagcccggcggcctctacatcatcggctccgagcgccacgaatcccgccgcatcgacaaccagctgcgcggccgttccggccgtcagggcgatcccggccgctccaagttcttcctgtcgctggaagacgatctgatgcgcatcttcgggtcggaccgcctcgacagcatgctccagcgtctcggcctgcaggagggcgaggccatcatccatccctggatcaacaaggcactggagaaggcgcagcagaaggtcgaggcgcgcaacttcgacatccgcaagaacctgctcaagttcgacaacgtccagaacgaccagcgcaaggtgatcttcgatcagcgcatcgagctgatgaaggacgagagcgttgccgagaccgtcacggacatgcgccatgccttcatcgacgatctcgtcgccaagcacgtccccgagcatgcctatgccgaacagtgggatgttgccgggctcaaggacgaattgaagcgcgtgctcgatctcgacctgccggtcgacgaatgggccaaggaagagggcatcgccgacgaggagctgctctcccgcatcgagaccaaggccgacgagcacatggccgccaaggtcgcgcaatgggggcccgacgtgatgcgctacgtcgagaagaccattttgctccagaccctcgaccatctctggcgcgagcacctgatcatgctcgaccatctgcgccaggtcatcggcctgcgcggttacggccagcgcgatccgttgcaggagtacaagacggaagccttcaatctcttccaggagatgagcgctcacttgcgcgaggccgtcacggcgcagctgatgcgggtcgagatcgtcccgccggagcaggaagctccggcgctgccgccgatggaagcgcacaagttcgatccgaacaccggcgaggacgagatggcgctcgccagcgtttcgctcggcgcccaggccagcgacgccgcgctgcgcgatcccaagaaccccgccagctggggcaaggtcggccgcaacgaggattgcccgtgcggctccggcaagaagtacaagcactgccacgggcggtatgcctgatcggtgatctcaagacctggcgaactcgcgttgctgtttggcccgcgagttcgccatgcgttgaatgcttccgatgcatttccgatgctgctgcgtccgcagactgccggcgaccgtcgtcggtccggctgcgcggctgaagggccttcgacaccaggaaagcctatgctcaaaccgcgagacgttctcccggagaacgccgtcgggtaggcatccaatcttcgccgctgctctttgtgatctgaatcacctcaacagagctcaatctgtgttgtgattgaatcacaatacgcggtccagaaaattggaaaccagacaatgcccaaacgcgcgctgccgactgccttctgtgctcttgccctcagtttcttagcctgcggttctgcccctgcgagccaggtggtcggatggtggggcggaacatggtcgtgcaacatagacggccggtcggcccggatgaaatgggttgcagttgatgacagtcagaccacctgcaacggcggcacttgcacgagcagctcgggagtacgatggtcgggcagcttctcggataatggctcgcgatgggtgaagttgacaaatccacgcagcggaacgcagggcggcgtctacttccaccacgctgatggcaataaatggtacctggccaaaccggtgagcaacaaggccgtgggctggacgacctggaacggccaacgctatgccctctcgtgctggcggtgatgcatcaagcgcggcctgctcgtcctccacatggctgccgggcgagccctaagcgctgaataagaaggcaacgctgcacgacgaagtcggttgaagatgccgcctaggttgcgccgtccgatcagccctatccgctcaggagaccgcgggagcgatgatacaagttccacccgcgagtacattgggatgacaatccaaactcccccgctcctcggtcgcaaccctgcaccttgaatcttaccttcaactggttgcgttggagttgaaatgtatcgctgcgagcggcagaacttccacctgctcggggttgccatacttgctggacggaaaggactcgctccgtacattgagatgcgtgactctcccctgcacagagcggcaggtgagtgtgtccgcctcgcaaggcgccacgctcgagttcacgaagcctaattcgaactgtcgatcaggctctccagcagccgcttgagctcgctcgtcgacttgtcgccgtagctctccaggatgtgctcctcctggtccaccgcgagcgagttgagcttcctgcagagcaccttgccgcgatcggagatgaacatcagcaccttgcggcgatcgttgggatcctgcacgcgatagaccagcgtgtcggagaccatgcggtcgatcatcttcgtcagggtcggatggttgagcagcacggcatccgcgagttcgcccatcgaatggccgttgccatccgacagcaccttcaggatgcgccattgctcgaccggcacgccctccttgctcaaccgcaattcgagctgccggttgatctcccggttggcttgcgcgagcaggtaggcgagatgttcggtgatcggggtgttttctttcgacggttttgccacggctaagacttcgtcttgacccaaatgagtgaatgtcttgcaatcgatgctgcatctatatgcacttcaattcttgaatattcaatatttccaaaataggatcattgcccaacaaacgggcggaagccgcggccgcccgaagaatgtgctttcaggtctggtaccaggcaggagttggcgtgcgcgcgacggtaaatttcccggctcacggcggtccggcgttgccgccgtcattgctgttcaggaatttgtcgtcaccggcggcggatgtcgacctgtcgccattcgacgcgcaggtcatgaagcgccgcggcgcgcgcaacaagctgcgcatcggcaatttcctcactttcaccggctcgcccggaatctgggggccgacctccaccaacagcgcaatgttggcggtcgccgagatcaacaagcgcggcggcattctgggccgcgagctcgagctcacgatctacgattccggcggcccgatcgaagacgtggtgcggcgggccgagcacgcgatcgccctcgatgaagtcgacctgatcatgggctcgcacatcagcgcggtccgcgtcgcgctgcgcaaggtcaccggcaaccgcatcccctacatctatacgcccgtctacgaaggcggcgagcgcacgcccggcgtcatggcgatcggcgaaacgccgcggtggcagagccggccgtcgatccactggctcgccgaggtcaagaaggcggcgcgctggtatctgatcggcagcgactacgtctggccatggcaatcgcatcgcgcggtcaagcgctacatcaaggaggcgggcggccaggtcgtcggcgaggagttcgtgcccgtcggcgaggacaatcatgagccgcatctggcccgcatccgtgcggcaagacccgacgtggtgctgatctcgctgatcggcaccgacagcatcaccttcaaccgcgccttcgcggaagcgggcctggcgacgtcgacgctgcggcttgcgggcgcgatggacgagacggtgctgctcggcatcggcgccgacaacaccgagaatctgttctgtgcgtccggctacttcaactgcatggcctcgcgcgccaacgacgagtttctcggcggctaccaggccatgttcggcgccaacgcgccgccggtcggctccgtcggtcagtcgaactatgaggggctgcgtttcctcgaatccgttgccaatcgcgccggctcgctggcgtttcggccgctgctgaaggccgcgcgcaacaccgtctactcggccggccgtggtcctgtaactcttcgcgatggccgtgccgagatgccgatgtatctcgctgaagccgacggtctcgacttcaagatcatcaaggcgctctgagaggcggctgctgatccgtcgcagcggtcttcgaaataatacttgaaaaggaaaatatttccgtctctagtaacgacgcgaagccgatcgggccgtgccatgcaggcgcgagcagatgtggcttccgaccaacgccagggatcaagaagccttcaaggagagcgccgtgacagttgcccttcccacgccagcccaacttcgcagtgtcgccgagcaatgcggcctttcgctcaccgatgatgacgtcgcctcgttccgcggcctgatgcaaggctcgatcgaagcctacaacctcgttgccacgatgccggacgagctgccggaggtgaaatatccgcgcacgccgggctatcggccttcggctgaagagaatccgcgcaatgcctggtatcgcaagtcgaccgtgaagggtgcggccagcggcaagctcaagggcaagaccgtcgcgctcaaggacaacatcatgctggccggcgtgcccatgaccaatggctcgtcgacgctggaaggctatgtgcccgacttcgacgccaccatcgtcacgcgcatgctggatgccggcgccgagatcaagggcaaggtgcattgcgagcacttctgcctctccggcggcagtcacaccggctcctacggacccgtgcacaatccgcacaagatgggctattcggccggcggctcgtcgtcgggctcgggtgtcgtcgtcgcgctcggcgaggtcgacatggcaatcggcggcgatcagggcggctcgatccgcatgccgtcctcgttctgcggcatctacggcatgaagccgacctggggcctcgtgccctataccgggatcatgccgatcgagatctacgtcgaccataccggcccgatgaccgcaacggtcgaagacaacgcgctgctgcttgaagtgctcgccggcgacgacggctacgatccgcgcatcaaggcgccgaaggtcgaggagtacaccaaggcgctcggccagggcgtcaagggaatgaagatcggtatcctcaaggagggcttcgagcagccgacggcagaggccgcggtgaacgaaagcgtccgcgaggccgcaaagcgcttcaaggatctgggcgccagcgtggagaccatctcggtcccgatgcatcttctgggcggcgcgatctggaccccgatcggcaccgagggcctgacccagaccatgatgttcggcgacggctacggtctcagccgcggcgatctgtattcgacctcgctgatggattttcatcgtggctggcgccggcaggcggactcgctgtccgagacgaccaagttgttcatgctgctcggcacctacatcaacaacaatttcggtccccgcttctacggcaaggccctcaacatctcgcgccggctgacggcggcctacgacaaggcgttcaaggactacgatctgctcctgctgccgacgacgccgatgaaggccactaagctgccggagccgaatgccagccgcgaggaatacgttgcgcgcgcgctggagatgatctccaacaccgcgccgttcgacatcacgcatcatccggcaatgtcgctgccatgcggaatggtcgacggtctgccggtcggcctgatgctggtcggacgcatgttcgaggagtccaccatctaccgcgccgcccacgccttcgagaagatcggcgattggaagaagatgtgagcggaccatcaatgcagacgggcggaacagcagcgcatggctaacgcgttcgttgcggcgttcgagatcctgagcttcggcgcgatcattgtcctgatcgtgctggggctcgggatcatcgccagcatgatgggcatcttcaacttcgcgcagggcgagttcgtcctgctcggcgcctacatcacctatctcgcctatgccaagggcctgcccatctgggccggcatggtcgcagcgcccttcgtggtcggcgcgctcggcttcgtgctggaggcgctgatcatccgacgattctatgccgcgccgattgtcgccatgctcggcacctatgcgctcggcctgatcatccgcgaatccgtgcgcggcctgatcggcggcttttatctcaccgtgccggagccgatcggcggctcgatcgatatcggcgccatgcacatctcggcctggcgcttcaccatcatcgtcatcacgctcctggtgatgggcgcctgctatctgctgctgtcgcgcacgagctttggcctgcgcgtgcgggcgacgctggagaatccgtcgctggcacgtgcctccggcatctcaacgccattgatctacggcgcgaccttcgccttcggtgcggcgcttgccgggcttgccggcgcgctgatcgtgccggtgttcagcctgttcgccgatctcggcctgcgcttcctgatccagggcttcgtcgcggtcatggtcggtggtgtcggctcgttcatcggaccggttgccggtgccggcgtcatcggtacgctcagcgccgcgctgccctgggtgatggcgcccgtcgtcgccgacgtcctcgtcttcgtcctcgccatcgtcttcatcaaattccgcccgcagggcctcatcgctggaaaaggggtttaatcacatgttcgatcgtactcagctcacgcgacgtcgctttctttccaatttcgcatttgcttccggagccgtcgcaaccggcgtcggcagctgggtgatcccggcgccctgggccaacgcggccgagggcccgatcaaggtcggcatcgccaccgatctcactggtccgatcgcctatgccggcaacgctgacgccaacgtcgccaagatggtgatcaaggagatcaacgccgccggcggcctgctcggccgtccgctcgagctctacatcgaggataccgcctccaacgaatccgtcgcggtcggcaacgtgcgcaagctgattcagcgcgacaaggtcgacatggtgctgggcggcatcacctcgtcgatgcgcaacgcgatcaaggacccgatcgtggcgcgcggcaagacgctctacatctacccgcagctctacgagggcaaggagtgcacgccctatctgttctgcaccggcccgaccccggcgcagcaatgcgacgagttcatcccctggctgatcaagaacggcggcaagaagttcgcgctgccgagcgccaactacgtctggccgcacacgctcaacgtttacgcgcgcaaggtgatcgaatccaacggcggcgaggtcgtgttcgaagaatattatccgctcgaccaggtcgatttctcatcgaccgtcaaccgcatcatctccaacaaggtggacgtggtcttcaacaccgtcatcccgcccggcgtcggcccgttcttcaagcagctctatgaggccggcttcctcaagaacggcgggcggnnnnnnnnnnnnnnnnnnnnnnnnnnnnnnnnnnnnnnnnnnnnnnnnnnnnnnnnnnnnnnnnnnnnnnnnnngcccgccgcaaggtgctttaactcggaatgctgaagttcatgggtgcagccaagcaagcgatccacgccgccgtcgtggatgaggcggatgtttcggtggcagaaggcgtgccagccgagcgaccgaccgcacgaaaagtcctgcctatcgtcgagggcgtcgtgctcgtcgcggcgctgctcgcgccgctggtgctgcaggactatctcacggtgttcgcgacgcgcgtcatcatcctggcactgttcgcattgtcgttcgacctggtctggggctatgccggcatcatgagcttcggacaggccctgttcttcggctcggccggctacggcgtggcgctgctcgcgcgtgacctcaacgtcaccaacatccttctggtgctgccggcgggcacgctgatcggcctgaccttcgcgctgctgctcggcggcttcctgctgctgggccggcatccctccagcgtcatcttcgtctcgctcggcacattgaccggctcctacgccgccgatcgcctcgcgcgcggctggtactatctcggcggccagaacggcatcccctcgatcgcaccgatgtcgctcggcagctatgatttcaccgagggccccgccttctactatctggtgctcggcatcctcgtcgtggtctatctgctgtgccgtttcctggtgcgctcgcaattcggtcttgcgctcgccggcctgcgcgagaacgagcagcgcatcgccttcttcggctacaaggcgcagcatctgaaagcgatcatcttcaccatcggcggggccgtcgccggtctcgccggcagcctctatgcctttcacgaaggctttgtctggcccaacatggtcggcgtcgtggtctcgacccaggtcgtgctctacgttctgtttggcggctccggcacgctgattggtgcggtgatcggtgccatcatcgtcgagggcgtcagcttctggctctcggacaattaccgcgacatctggccgatcatcctcggtctgctgctgctgctcgtgatcctgttccgcccgctcggcctgatcagcttcgtgctcggcgagcgcgagcgcgtcggcagctttggcgccaagccgaaggagaagcgcaatgccgctccttgaagccgccggcgtcaagaaagtcttcggcaagctgaccgcgctcgatggcgcctcgctcaccgtcggcgagaacgaattccacggcctgatcggcccgaacggctccggcaagagcacgctgatgaagtgcatcgccggcgccgaggtgccgacgcagggcaaggtgtcgttcgtcaacaccgacattaccgagttcacgccgaccgagcgcgcccgcgccggcatgagcctgaaattccagatcacctccgtgctgccgtcgctgacgctctacgacaacatcctgctcgcgctgcaggcgcagtgctcgctgctcgatctcgtgttctcgcgcacgcgcgggctcctgcacgaccaggtcatgaccatgctgacccagttccggctcgccgaccgcgccttcgaggcggcggcggcgttgtcgcacggccagcagcaatggctggagatcgcgatggcgctggcaggcaagccgaagctgctgctgctcgacgagccgaccggcggcatgagcctggaggagcgccgcgtcaccggcgaattgctgcagccgatcaagcagcattgctcgctcgtcatcgtcgagcacgacctcgatttcatccgcgacatctgtgatcggctgaccgtgcttgaccagggcaaggtgctggcatccggcacggtgtccgagatccaggccaacaagtccgtccaggagatctatctgcgccgtgcctgaatttttggacatcaagcatctcgacgccggctacggccgcagccaggtcctgttcgacgtcaacctcggcattccctggcgcggcggcgtcgccgtgctcgggcgcaacggcgccggcaagaccacgctgatgaagaccatcgtcggcgaattgccggcgtggaagggcgaggtcgccttcgacggccgcgacatcagccgccgcgccacccaggagcgcgtgcgcgccggcatcggctacgtgccgcaggagcattcggtgttcgcgcgcctgtcggtgcgcgacaatctcgccgtcggctcgctcgcgcgcaaggatgcctctgccgtcgaccgcgtgctgacgattttccccaagctcggccagcgcctcgaccagcctgccggcacgctctcgggcggcgagcgcaagatgctcgccatcggccgcgccatgctgggcgatccgaagctgctgctgctggacgagcccaccgaaggcgtctggatcggcgtcatcgaggagatcaccgaacgcctgatcgatctcgccaaggagatcgccgtcatcatcgtcgagcagcacctcgacctggcgctgcgcgtcgccgactacgcctacgtgctcgaccgcggccgggtcgcgctgcaaggcgaggcgggcgaggtgagaagcaatccggagctgatgcgctatctggcgccgtaggcgccagttgttcgtgagtgagccgctgtgctcgctgcccacttcgactgtcatgccgccgatggcggggcacccagtacgctgcggcttctcggttcaaccacaagcgtctctggaaggctcatcgcccgccttcgcgggcgatgacagtgcgagtgtggagcgaaaccgaaagtcgcccgctacctcaccgccccaaagcggctctcgaacgagttcgactgcaccaccggagcggcgcccatgatctgcgtcgcttcactcgcgccatcgctcaccgacggcttcagcgcggggcgcgtctgggcgagacgcgtgtcgggcttcgccggctcggcgggcttggccgcaacgatcggcttcggcgcctccttcgcggcatccttggacttgtcgtgcccgggcacgaaccgtgtcacggcggctttgagccgcgacgccgcggttggcggattcggcgtcgtggtggccggagcgaccgaggcggtggtttgcgccggcggcgtggtcgccgtcgtctccgacgagccgatgcccatcttgcgtccgagattggagaagaagccgccgccttgtgatttctcctgggatttattcgccagcgcagcattggcaacgcgggtgctggcgggcgcgttcaccgcgacgaccggctcttcctgcgatgcaggcgcggatgccacggcgtcgagattcggcttgggcgggttgacgtggctggggatcgtgccgggcgccttcgccatcgccagcatctgcagcgtggtgccttcggcgctctcggacaggccggtcgagccttccggaatcttcgcggcgaacaccttgttcatgccgccgtcgatgccggtgttcaggcgcgccacgggcgtgcccttggcgacaagccttgcgtattcggcctcgtccttcgcctgcttctggcggacagcgctggcgatctcctcggggatcacataggccgggcatttcgccgaggcgtcgaacacggggtcacgcttggcgtccgcaggctttgccgcatcgaagacgtatttcttctcgcagaaatcgaccttcggctcctgccgcgtcacctcgaaatgatcatagccttccttgatcatcttccagaacggcatgttcgggttgttccggtgcctggccatgttcaccggcgtcatcttgaacggataggcctgcagctggaatgccttctggccgccgaagaaggattcgcgccccagcgaatagatctccgcgatctgctcgtcggtcatcgcgtagcagccgcgcgaggagcaatcgccatgcaccatcagctgcgagccggtgcgccccagcgccttgtcgaacgcgttcgggtaacccgtgttgaacgacaggtaataggccgattgcggattcatctggctcggattgatcgagtagaatccctccggcgcctgccggtcgccttcgcgcaccttcggtccgaggtcgcccgaccagcggcagatcggataggtcttgagcagggcgaactggccgctccgtgtctgcttccagatctcgagctcggcctcctgcttgaacagccggaccaggatcggcgattgcaggtccatgtccttctcggccatcgcggcgatcagcttcggcggcaccggctggttggccttggcgttggtcgcgagcgagacctggtcggtgttgcagcccgagagcaggacgccggccgtcatcagcgcaaccgaagccaagagcgcgcgagcaagcgaacgagaaatcaagatcgaccccacaccgtgccgggcagcgagcgcaaaccccaatcgtttggagcacgatccgaccggatgaccgggcccgcctgggacgggtttttcagaccacgctccagcgcttatgccctgaagccattgattaaaattctaacctctgggtcatgtggtcgcaacccgagcggggatcacgagggcgttggcccagtggcatggtcaacgaagactgaatggacgcgactttgggccggacttgggcttttcgggcccatcaccactcagatcgccgatttgggcaaaaaaagggttaatgcggggttacctggcccggcccgacattccggtttcgccctttggacgcccggaatgacggcccaatgccaaatcagcccagtttccggccgatctccaggaatttctgccgccgctgcttgcggatggcctcgccatcaagcccgcgcagctcgtcgaaggccttggcgatcgcatcgcccgtggtggcgatcatggcggcggggtcgcggtgggcgccgccgaccggctccttcaggatggcgtcgatcaccccgaagcggagcatgtcctgggcggtgatcttcatgttgttggcggcttcctgcgccttggtgccgtcgcgccagaggatggaggaggcggcctcgggggagatcacgctgtagatggcgtgctccagcatcagcaccttgttggcggtggtgatggcgatggcgccgcccgacatgccctcgccggtgatgatggcaacgttcggcacggtcagtgccaggcacgcatcggtcgagcgcgcgatcgcctcggcctggccgcgctcctcggcgccgatgccgggataggcgcctgccgaatcggcgagcgacaacacgggcaggccgaaccgctcggccatctccatcagccgcacgcatttgcgatagccttccggccgggccatgccgaaattgtgccggatgcggctctcggtggaatcgcccttttcctggcccatcacgcagatcggctcgccacggaaacggccgaagccggcgaccagcgcctcgtcctcgccgaacttgcggtcgccggcgagcggggtgaattcggtgatcaggcccttgatgaagtcgttgaaatgcgggcgctgcggatgccgcgccaccagcgtcttctgccagggcgtcaggttctgatagaggtcggccagcgcctgcgccgccttgtcctcgatgcgcgagacttcctcggcaatgtcggtgccggaggctgccatggcccgcagctcgtcgagcttggaatcgagctcggcaacgggcttttcaaagtcgagatagctgcgcatctggtcttgcatcaactcaatatagggaggacggggcgaggcggcgaagcggatttagattgtcggaaagaagtgtagcttcttcaatgggttgacctgtgcgctgcgagcgagcccgccaatcagtcgaaaggccccggctctttctgcggagaagtggccgaagtcaaggcggtttcatgggtcgcccctggcccggatgaagcgcggcgcaacccggggggtctacccgcaaggtgagaatcccggatttcgctgcgctccatccgggctacggaaaactcacttctccgccagcgggtgcaggtcgcgcacgaggctcttcagccgttcctcgaccacatgggtgtagatctgggtcgtggagatgtcggtgtggccgagcagggtctgcacgatgcgcaggtccgcgccattgtgcagcagatggctcgcaaaggcgtggcgcagcacgtgcggagacaccagccgggcctgcaggcccgatgcgaccgcgagctccttgaggtcgcgggcaaaatgctgccgcgtcagatgcccgctttcgccgaaggacgggaatagccatttcgaggcggccaagctgttcttcttgtcgcccttggcggcttccgtcgcggcgagataatcggccatcgcctggcgcgaggcctcgttcagcggcaccagccgctccttgttgcccttgccgcgcaccacgatcatgcgtgcatcacgcttggccgccgagcgcggcagcgccaccagctcggagacgcgcaggcccgtggcatagagcacctcgagcaggcaatagagccgcaagcttcgcatccgtttcgatggagaggcgtcttgcgcctcgctcaattccttggcgcggcgaagcatgcgatcgacgtctgcgatcgacagcacctttggcagtccgcggccgcgcttggggccggacaggatcgcggcgggatcgtcggtccggatgcgctcgttcagcaggaagcgatagagatgccgcatcgccgacagccgacgtgcgacgctggtggatttgaagccgcgggcgtcgaggtgggcaagatagtcgcgcagcgtttgcgtctccgcatccgcaaaattgtggccggctcggcccaggaactccgagaaatcggcgaggtcgcggcgataggcatcgagcgtgttgggcccggcaccttgttccgcggcgagcatgtcgaggaacaggccgatgagcttggtgtctgagggcttggtgcgcatgccccggaggctagctcctatttcttgagaaacttatccggcgggatcgtcacgatcatctcccgcgacttgggactgacgaaattcgccaacgcgaaaaccgcggcgtagacgatgcctgcgatcacggcgacgaccgtcaggaagcggaacaggctgggcatcggcgagatctcggagacggggccggacggacaaattaatcaatgaaatcatccaacatgttcgtcctttcatggcaagagtcctctggcgagggcccctgtggggtcgtataggtggccgaagcctgctgcctttggcggtagatcgagcgagatccgatcgagcgagacatgtccgacgccgcgttgccgcttcctgcttcgcccgaggccgacatcctgtcggcgctcggtgcgcgctcgatcgtgctcgtcggcatgatgggggtgggcaaatccaccatcggccgccgcctggcgacccgcctcaagctgcccttcgtcgatgccgacaccgagatcgaggcggcagccggcatgaccataccggaaatcttcgagcaccacggcgagccgcatttccgcgacggcgaggcgagggtgatcgcgcgcctgctcgagagcggacccgtggtgctggcgaccggcggcggcgcgttcatgcgggaggagacgcgcacgcgcatcgcggcgaaagcgatctcgatctggctgagggcggaccacgacgtcatcatgcgccgcgtgcgccgccgtgccgaccgtccgctgctccagaccgccgaccccgaaggaaccgtggcccgcctcctcgccgagcgcgagccggtctatgccgatgccgacctcaccatcgcctcgcgcgacgtgccccacgacaagatcgtcgaggaatgcatcgaggcgctgcacgcccgcctctgcggcggacacgccgcccaaccacctgccgacgttgcgagtgcgttaagatgactgcgccattgaagcattccgatccggtcaaggtggacgtcgcgctcggcgatcgcgcctatgacatcgtcatcggccgcggcgtgctggcctcggtcggcgaacggctcgcgcgcctgcgccccggtgtccgcaccgcgatcgtgacggatcgcaccgttgcgaagcactggctcgagccgaccgaagcttcgctcgccgccagcggaattccgacctcacgcatcgtggtcgaggaaggcgaaatctccaagacctacgccggcctcgagaaggtcagcgaggccctgatcgccgcgaagatcgagcgcaatgatctcgtcatcgcgctcggcggcggagtggtcggcgatctcgccggctttgcggccgcgatcctgcgccgcggcgtcgatttcgtgcaggtgccgacctccctgctggcgcaagtcgattcatccgtcggcggcaagaccggcatcaactcgccgcagggcaagaacctgctcggggccttccaccagccggtgctggtcattgccgacaccgccgtgctcgacacgctgtcgccgcgccaattccgggctggctacgccgaggtcgccaagtatggcgtgctgggcgacgaggccttcttcacctggctggagaagaaccattccgacatcgtcaagggcggcgcggcccgcgagcacgccatcgcgacctcgtgccgtgccaaggcggggatcgtcgcgcgcgacgagcgcgagaccggcgaacgcgcgctgctcaatctgggccacactttcggtcatgccctggaggctgcgaccggcttctccgatcgcctgttccacggcgagggtgtcgcgatcggcatgacgctggcggcacagttctcggcgaagctcggcatgatcggcgaagccgacgcagcgcgggtcgagcgtcatctgatcgaggcgggggtgccgacgcgcttgcaggacatcgcgggcttcgcgcaggaaggactcgccgatgccgacgcgctgatgggtctgatggcgcaggacaagaaggtcaagcgcggcaagctcaccttcatcctgctcgaagcggtgggacgcgcggtgatcgcgaaggacgtcgagccggcgctggtgcgggatttcctgaaatcgaagctgtcgcaatgatggcgggatcgtccggacatgccgcccacacggaagggcggacggtcacggcggtcgcgaggcaaacatgagttcgatctcgatcaatctgctgcttgcggtcctcttgctcgctgccaacgcgttttacgtggcggcggagttcgcactcgtgaagagccgcggcttccgcgtcaaggccatggtcgagcagaaccgcttcggcgcgcacctgctgcaggccatgatgggaaacatcgaatcctatctcgcctgctgccagctcggcatcaccatggcctccctcgggctcggctggatcggcgagccgaccgtgtctgcgctgctgagcccggtcctcagcccgctcggactgtcggaagccacgctgcacttcacctcgttcgtggcgggtttcctggttttctcttcgctgcacatcatcatcggcgagcaggtaccgaagacgcttgcgatcagggagccgatgccggtgtcgcagtggatcgcgtatccgcttcatgtgtcctatctcgtgttctatccgctgagctggtgcctcaacacggcctcgggcgcgatcctgcgtctgatcggagtccaggagttttcgcagcacgagatcctgacggattcggagatcgaaggcctggttgaggaatcggccgtgcacggcaagatcgagagcggtgaggccgagtatattcacaacgtcttccgcctcggcgagctgaccgtgtccgacgtgatggttcaccgcaccgccatggtgatgatcaatgccgacctgccgccggaagagctggtgcgggaggtgctggctaccgagtacacacgcattccgctgtggcgcgagaagtcggagaacatcatcggcattctgcacgccaaggatctgctgcgggccatccgcgcgtcggagggcgacacgtcgcgcatcgacgtcaccaccatcatgctgccgccctggttcgtgccggagatgcggccgatctcccaacagctcaaggcgttccgacgccgcaagacgcatttcgcgctggtcgtggacgagtacggcgaggtcgagggcctcgtgacgctcgaagacatcttggaggagatcgtcggcgatatctccgacgagcacgatgtcgtggtcgcaggcgtgcgccgccagcccgatggctctgtcgtggtcgacggctcggtcccgattcgcgatctcaaccgcgcgctcgactggcatctgcccgatgaagaggcaacgacggtcgccggcctcgtcattcacgaggcgcgatcgatccccgaccgcggccagagcttcaccttccacggcttccgcttccgtgtcctccgccgcgagcgcaaccgcatcaccgcgctccgtatttcaccggtgccgcgcgagaccgagctggaagaggccaagccgaggcgggccggcacgtcgttttgacgcagcagatttggtcgtcggagtttccacatcgtcatggccgggcctgacccgaccatcacgtctacgctgttgcgcgaatgaacgtggggcgcacgggtccagcccgggcatgacgaacgattcaattatgtgaaagctcgtccgggacgggagggcagcatcagccttcccccggcgcttgtgcctggatcgcgagcgcatgcacgccgccggagagttccgcggccagcgccgaatttatcatgcgatggcggtcgacccggctcttccctttgaaggcatcagacacgatatagacgcgaaagtgcgtctcgccgcccgcccgatggccggcgtgcccctcatgcaaatgtgactcgtcgacgacttgcaggctttccggcgtgaaagcttcctgcaacttgttgctgatagtgtctttcatagccatgtgtgccattaaggtgcgcgatcgcactccgtcaatacccggacgtccaaggtcattgcgaccgggtgctcagcgaattgcaatgtcaagacttgaaggtttttgcattgcgtagtcaaagtcagccatgccgatcgattcatcaaagttcttcgactccatccgcgtcaagccgcgcggcaagcagccggaagtgaagccgcgcgacaccgccgtcaattgcgagtgggcgggctgcgcgaacaagggctcgcatcgggcgcccaaggggcgcgagaaccagcgcgagtattggcatttctgcctggatcatgtgcgcgagtacaaccagaactacaatttcttttccggaatgaatgccgacgccgtcgcgcgctaccagaaggatgcgctgacgggccaccgcccgacctggaagatgggcgccaatggcggcaagaagaatgcggaagccgaaatcgacatggcgtccgatccgttcagcatgttctcggagatcaatggccgcgccaactggcggaagggtcccgaagcccagcccaaggccgagacgcgcaaggtgatgaatgccgagcgcaaggcgctccaggtcatgggcctcggccccagcgccacgctcgccgacgtcaagacgaagtacaaggcgctggtcaagcagcaccaccccgacgccaatggcggcgaccgctccaccgaagatcgcctgatcgagatcatcaaggcgtacaattatctgaagacggtggttcgggaggcgtagggtgcggcaggcgccttgcttccacgcatgctttccaagctcataatgaatgccgtccacccggaagcggacggcaccatcaacgtcacctcacccggcagacgcggacgcgcttgacgatgcgacgcccgtgatagccgcgcttgacgaccgtgcgtacggtgcagactcgtcgcggagcgtaatgatagcgagcgttcacgacgtccgccgagaccgcagcgcccgggatcggatgagccgtcagcgcatgggctggcattgcgagtgacgacagagcgagcagcgttcctgcagcgagggcgtaggagagtttcttcattaccgttcctttgttgcctgcccctgagaaggcattcgttggggcaagcatgaatgcgcagcgcgcgttatcgttccggatcgcctgctgaaaccttcgtcatgctcgcagaatgcccggtgatggattcggcaggccggaggtcgctcgcgatcagtccgcaggcatcgcgcccacataggacgagctcggcctgatcaggcgcccggtccgctgctgctcgcgcgcatgcgcggtccagcctgcggcgcgcgcgacagcgaagaccggcgtgaacgcctgcctcggaatcgccagcgcatcgagcaggatcgcggtgaagaactccacattggtctccagcggccgatccggattcttcttgcgcagcgcgctgcggatataggcctcgacctcgccggcaaagggcaggtcggcgccgtccgccgcgagccgctcgatcgcagccttgagcacgtcggcgcgcggatcgcgcacgcgatagacgcgatggccaaagcccatcagccgttcgccgcgcgcgagcgctgcatccacccagggccggatgcgatcgcttgagccgatcgcatcgagcatttccagcaccggctccggcgcgccgccatgcagcgggccggtgagcgcgcaatagccggcggtgatggcggcgaacaggtcggcctgagtcgaggccaccacacgcgtcgtaaaggtggacgcattcatgccgtgatcgcagaccgtcacgagatacgcgtcgagcgccgcgacctcgcgcggctccggcgaggagccgcgcagcatccgcagcgtatcggcggcatggctcgcattcggatcgggcgcgaccggctcgagccccttggcgcggcgaaccagcgcgcccgcgatcatcggcaacgcgccgacgatggtcgcctcgtgcgccagcccgttctctgcacgaagccccgcgacgcctgcgcgaaacccgtcgacgatgcccatgccgcgcgtcgccggcaggaggtcgccgagccgtgcgaaggcgcgctcgcgcgccgtgcccaggcttgcccgcacattggcttcgctgagattgctcttgctggcgccgttccagagccgggcagtgacgccttcaaagctggactggcttgccagccggccgacatgctcgccggcgatgatcagctcgccgcgctcgccgtcgacgtgactcagcacggtctcggccgcgggaacgccgtccagcccgatctggcttttggtgaggtggatgttcatggcccaaatctcccttttgcatcgcacgcaggggaaaggtcaggcctctcgacacattgatcaatcttgattacataaatcaacatgaaaaattcttcggcgctctacttgtctgcccgggaagccgccgccgagctcgcggtttccccggccaccctctacgcctatgtcagccgcggcctgatccgctccgagccgacgccggactccaggaagaaccgctaccgcgccgaggacgtccgcgcgctgaaggagcgccgcgtgccgtcgccggagccgcgcggactgcgtagcttcgatgccgacctgccggtgatggacaccgagatctcgaccatcaccgaggagggtgcgatctaccgcggcgtcaattgcgtcgatctttccgagagcgatacgcttgagcacacggcgacgctgctctgggacgtctccggcgtcgatccgttcgatccggacaatcagccggagatttccgatgagatgcgcgcgatcggccaagccgcgcgccgggccgcgccgatcgaccgcgccatcgccgtgctcgcgctggccgcgagcgccgatccccgcgccttcacccgagcgcccgacggccgcgcgctcgtcggtgcgcgcatcgtccgcctgctggttgcgaccatgctcaacgccgagccgtcggccgagccgctgcatcagcagattgccggggcctgggtggccgacaacaagcatgcgcccgacctgatccgccgcgcgctggtgctgctcgccgatcacgagctgaacgcctcgaccttcaccgcacgctgtgccgcctcgaccggcctcaacctctacgactccgtcatcgccgggctcgccgcgctcaagggcccgaagcatggcggtgccggcgtgctggcctcgcaactggtgaaagcgctggtcgatcgcgatgtcgagccgatggtgcgcgagcgcgtcgcgctcggcgagcgctttgccggcttcggccatggtgtctacaagcggggcgacccccgcgcgcaatcgctgctcaatgcgctgtcgcgcgccggggcgccgcgaaagttcacccgcgaggtgccggagcggatcgccgaagccaccggcgaattcgtcaatatcgactacgcgctcgccgtcctcgtgcacgcgctgcgcctgcccgccggcagcgagctcgctctgttcgcgatggcccgcagcgtcggctggatcgcgcatgccagcgagcaattgcagttcgggaagttgatcaggccgagggcgagatatgtggggcctgcgccggggcgtcgggcgggagctgctggttagaagctcgatgccgggctgtcgtccccgcgttcgcagggacgacacctatggcgtcgcagcagcctactcccccggcttggccacggcggcagcgccgttccgccgacggcgatagatccacatcccaacgctcgccgtgaccgcaacgcccaccacggtcagcatccagatatgcttgccgacatgctcgtgatgatgcagcccggcataatcgtgcagcgcggtgaccgcgagaacgcccggcagcacatgcgcgggggcccaagccaggatcgccgggatgtttacggcgtagaatctcgcaggcgccatgcccagggcgcctgcggtgacgggcacgaaggcgcggatcggcggcacgaagcgggcgaagaacacggcccacgtgccgaagcggttgaagaagttttcgctctcggcgaccacgcggggataattggtcagcggccaggtgctgaggatctcgcgctggcggcggtggccgatccagtaggccgagccgtctcccagcagcgcgccggctgcggccgcgagcagcacccatggcagctgcagctcgccgcccgggaccagcgcgctcagcgccaggatgatggtcgaaccggggatcaccgatcccaccaccggcacggcttcgagcagcgccgccaggaacagggtgagatagccgagccaggcatgggccgagacgaaggcgatgaggggatcgaggaaggatgtcacgtcgtctctgcggccggctggagagctggagttcggaccctacatgggcaggcccatgccgcaacagtgccatcgcgggctgctgcgcccaaatcgcagggaaattgggcgtgattcgcaaggcagccctccaaaaactgcgttccttacctatctaaatgaaaagacaacggaactttgattgttgcccgggcttctgccggctcgttgtctctgataggttgctttccagcacccagccgcagccaacgtgcgaataaccggtttcgggaccgcccgggacctcggaggattgatgacgaccgccgccctgtccaaagttgaggaagtttccggtctgcccgacatgaaggtgtcggtgcgccaggtgttcgggatcgacagcgatctcgaagtgcccgcctattccgaagtcgatcctcacgtgcccgaagtcgattccgattaccgcttcgaccgcgccaccacgctcgccattctcgccggcttcgcccgcaaccgccgcgtgatggtgaccggctatcacggcaccggcaaatccacccatatcgagcaggtcgccgcccgcctgaactggccctgcgtgcgcgtcaacctcgacagccacatcagccgcatcgatctcgtcggcaaggactccatcgtggtccgcgacggcaagcaggtcaccgaattccgcgacggcatcctgccctgggcgctgcagcacaacgttgcgctggtgttcgacgaatacgacgccggccggccggacgtgatgttcgtgatccagcgcgtgctggaggtctccggccgcctgacgctgctcgaccagaacaaggtgatcaagccgcatccggcgttccgcctgttcgcgaccgccaacaccgtcggcctcggcgatacctcgggcctctatcacggcacccagcagatcaaccagggccagatggaccgctggtcgatcgtcaccacgctgaactatctcagccacgacgaggaagtggagatcgtgctggccaaggccaagcactatcgcacccaggagggccgcgacatcgtcaacaagatggtgcgcctggccgacctcacccgcaacgccttcgccaacggcgacctgtcgacggtgatgagcccgcgcacggtgatcacctgggcggaaaacgccgacatcttcggtgacatcggctttgccttccgcgtcaccttcctcaacaagtgcgacgagctcgagcgtcccctggtcgccgaattctaccagcgctgcttcaacgccgagctgccggaatcggcggtgaacgtggcgctgagctgaggtgtgggatgtcgtcccggaccagcgcagcgcagatccgggacccataaccacaggccgtggttttgcgaagagcggggccgtcagtacctcactaactgctccctgtggttatgggtccccgccttcgcggggacgacggctcgggttgagcctgggacgacggtgagatcgagatgagcaccacctccaactccaaattccgcaacaccaaggaagcgccgaccgagccgttcaagcgctcggtggcctcctgcctgaaggcgatcgcgaaagcgcccgagctcgacgtcaccttcgcggccgagcgcccgggccttgcgcccggcaaggcgcggctgcccgagccggctcggaagatgaccaagcgcgacgctgcgatcgtgcgcggccatgccgattccatcgcgctcaagatcgcctgtcacgatcccaaggtgcatcgcaagctgatgcccggcaatccgcaggcgcgcggcgtgttcgaggcggtggagcaggcccgcgtcgaggcgatcggcgcgcgccgcatggccggcgttgccaagaacctcaccgcgatgctcgacgaccatttccatcgcggcaagttcgacgagatcaccgaccgcgccgacgcgccgctcgccgatgcgctggcgatgctggtgcgcgagcgcctgaccggcatggcgccgccggccgcggccaagaagatggtcgacctctggcgtccgatcctcgaagacaagatcggcaagcggctcgaccggctcgacggcgtgctcgaggaccagtccaagtttggcgatgccgtgcatgacctgctctcggcgctcgagctcggcgacgagcgcagcgccgacagcgaggacaacgacgagaacgacgagaaccaggacggcgacaacgaccagtccggcgccgagggctcgcccgattccgacgccgcgcaggagatgagcgccgaccaggcgcaggcctcgagcgaggagatgagcgagagcgcgatggaaagcgcgcaggcctcgacatccgacaccttcgacgacggcgagctcggcgacgacgagacgccgggcgaggcgacgcgcccgaaccagcacggcaagaacgagccgcgcgggccggaataccacgccttcgcgcccaagttcgacgaggtcatcgccgccgaggacctctgcgaccatgacgagctggagcgcctgcgcgcctatctcgacaagcagctcgcgcacctgcagggcatcgtcgcccgcctcgccaaccgcctgcagcgcaagctgatggcgcagcagaaccgcgcctgggagttcgacctcgaagagggcatcctcgaccccgcgcggctgtcgcgcgtcgtcaccgatccctatcacccgctgtccttcatgcacgagaaggaggcgacgttccgcgacaccgtggtgacgctgctgctcgacaattccggctcgatgcgcggccgcccgatcacggtcgccgcgacctgcgccgacattctcgcgcgcacgctggagcgttgcggcgtcaaggtcgagatcctcggcttcaccacgcgcgcctggaagggcgggcaatcgcgcgaggcgtggcttgccgccggcaagccggccaatcccggccgcctcaacgatctccgccacatcatctacaagtcggcggatgccccctggcgccgcgcgcgcaagaacctcggcctgatgatgcgcgaggggctgctgaaggagaacatcgacggcgaggcgctggactgggcgcacaagcgcctgctcggccggcccgagcagcgcaagatcctgatgatgatctcggacggtgcgccggtcgacgattccacgctgtcggtcaatcccggcaattatctcgagcggcacctgcgccacatcatcgaggagatcgagacccgctcgccggtcgagctgatcgcgatcggcatcggccatgacgtgacccggtattatcgccgcgcggtgacgatcgtggacgccgaagagctcggcggcgccatcaccgagaagctcgccgagctgttcagcgagaccaacacggcgcccacgcaagcccccggtcgcccgcgacgcaaattgcattcgtgagcacgcattcgtcccgccgcagcttccttgggcacgccgcggcgggactttccactctcgccgtctcccgcatcgcgcaggcgcaggccgcggccgagccgccgccaagaacggctcaacgcgcgcttcaggtcgagcacgcggtcgcggagcccgtcagcgtcgaggtcaatgcgcgccccattcccaatttcgagccgcgcgaccgctcgcgcacgcgcttcggctcgctggactatcgcagcggcctggtgctgacctcgccctatcgcggcttcggcggcctgtccggcctccgcttcctcgacggcaggggcgagcgcttcctcgccatctcggaccagggcggctggttcaccggcgccatccgctattccggccgcgagatgaccggacttgccgatgtcgaggccgcgccggtgctgggccccgacggccggccgatcaccgagaagaagctctggtacgacaccgagtcgctcgcgcgcgacggcaatctcgtctatgtcgggctcgagcgcgtcaaccagatcctgcgctacgatttcgccaagggcggcacgcgcgcccgcggcgaggcgatcgccatcccgccggccctgcgcaagctgccctacaacaaggggcttgaggcgatggtggccgtgccgaaaggcaaagaccagaagttgccgctcgcgggcagcctgatcgccttctccgagcgcgcgctcgatgccgacggcaatctcatcgccttcctgatcggcggcgcctcgcccggccagttcagcgtgcggcgcaccgagacctacgacatcagcgatgccgtgctgctgccctcgggcgagctgctcatcctcgaacgcaaattctcctggttcaccggcgtcaacatccgcatccgcgcgatcccgctgaaatcgatcgcgccgggcgcgctggtcgacggtcccgcgctgttcgccgccgatctcggtcacgagatcgacaacatggaagccatcgacgcccacgtcacgagcgaaggcgagacggtgctgacgctgatctccgacgacaatttctcgatgctgcagcggaccctgctgctgcaattcacgctgacggagtagggcagtctgtctcggtggggacgctggcttgcttcaaaacgccattgcggaaatgcacgcccgggctaccccccattcccgccgcgcaactagcaatccgccgcgcgcccactacactctcccgcatcatcctccttccccggaactccccgcatgtccgtcctgttttccccgatcaagctgcgcggcctgaccctgaagaaccgtctcgtggtgtcgccgatgtgccagtattcggccgaggatggcgtcgccaatgactggcacttcacccacgtcaacaatctctgcctgtcgggcgcggcgatgttctgcatcgaggcgacccatgtggaggcgatcggccgcatcaccccgggctgcctcgggctctacagcgacgcctgcgaagccgcgctgaagccgatcctcaactcggtgcgcagatattcctcgaccgcgatcgcgatgcagctcgcccatgccggccgcaaggccagcagtgccaggccgtgggacggcggccagctgattccggtgagcgagggcggctggcagaccgtcggcccgtcggcggtgccgcacaaggaaggcgaggccgccccgctcgcgctcgatgaagcgggcctgaagcgcatccgcgaggccttcgtcgattccgccaggcgcgccgcgcggctcggcatcgacgccatcgaggtgcacggcgcgcacggctatctcctgcatcaattcctgtcgccgatctcgaacaggcgcaccgacgaatatggcggcagcctcgagaaccgcatgcgcttcccgctggaagtgttcgacgcggtccgcgcggcattccccgccgacaagccggtcggcatgcgggtgtcgtcgaccgactgggtcgagggcggctgggacctggcgcagaccgtcgcgttcgcgaaagccttgaaggcgcgcggcgtcgactggatcgatgcgtcctccggcggcgtctcgccgctgcagaagatcccgctcggccccggctaccaggtgcagttcgcggacgcgatcaagcgcgagaccggcctgcccaccatcgccgtcggcctgatcacggaagcgaagcaggccgaagagatcgtcgcatcgggcaaggccgacatggtcgcgctcgcccgcggcatgctctacgacccgcgctgggcctggcacgccgccgccgagctcggcggccaggtcgaagccccgccgcaatactggcgctcgcagccctcgacccagaaggagctgttcggcaagaccacgttcggcgctaggtaggcagcgcgctgccgccccccgtcattgcgagcgcagcgaagcaatccagcatccctccacggaaagactctggattgcttcgcggagcctgtcatcgggccgcgcgaagcgctgagccgttggctcgcgatgacaatagtaggcaggcgtgcacaaggtgattcaggtgttcttcacccctccgtaactcccccgagcttccacggcccgccaaactggcctaaccttccgcgaaaccagaggcaatggaggggctgcccatgcgttatcctgtccgcaaagcggctcacatcttcgagcgcgtcggccttgcgatggcgggcgccgcctgcgggctgttcgtcggcgcccatgtcgggtcggctataccgatgctgacgacgcagggcttcctgctgctgatgatgctgctcggcgccatcggcttctatctcggcatcgacacgccgcagatgccgttcgacgatgcgcacagccagatcgacgccgccgagttcatgagcgccgccggcacgctgtttgcgacgctcaccgccttcgtctccgtcgtcgtcatcgtgctccggctcgacccgcacatgacctggacctggctcgtgttcgccggctggctcgccggcgtggtcatgcagattgtcgccggcgcaaaggcgaggatgcggaagtagctgcggtcgtggtgcgagaggtcgcgccgcgagcacaccccctctagaacaccacgcccacgcgcgtgccgcgcttccacgcgatgcggcagcgcttcttggtgttgacgtgcaggagctcgaagcgatcgggaatcttcacctggccgccgagatcgacgcaggctccgccgggcgaatagtcgatcagcgtgcaggggatcaccggcgcgcgcgggtcggtgatgatcttggcctgccgcgacaccagccctgcgggcttcacgcgggtaaatcggcgcggatgctgtggcacgtctcctccaagtccgcaggttcgcggtgatcgtgccgaatgatcgcaaggagatgatgcgatccggctaaggcgcggaggagaattttaatgaaaagtgtcggcgaagctgaaaagcggcggtagctggccacccgccaggggagggtaagggacagcgtgccgcgatcctcacggctccgccatctcccccgcctccaggtccgcccccggctccaccggcatcggcacggtcacgtagtccttcggcatgttcaccggccggtagtccggctccaccgccatccgcttcagcacgctctcgtgcacatgcgcgccctcgggaatgacgcgcggctcggcgtcggggatgtagaagccgagcaccaccttgcgctccggccattccctgtatgtcgcgcgcttcggcacatattccagcaggcgccaggcccagttcatggaatcgtgcagcgtgccggtcttgccggtgaaggcgggcgccacgtagtggaacggcgagttcttgcgctggacgccccaggcgagctggttcacggtgcgcgggttgaacttcagcccggccttcgcggcctccgcgatcatccacagcagcggatatttcgattgcccgctctccgcctccggatagccgccgccgacgtcgccatgcacgccggcgaaccacacctgccggatgtcctgcggcaccttcttctcgtcgggcacgtagcggttgctccagaactcctgcggctcgcggtattgcttcaggcggaacatgcagcgccgctcgtcgatcgcgatcgcctgccggaagatcctgatgctggggttgcgcagcgtgaaggcaagctcctccaggctcggccagaacaggcggtcggggcgcggcacgatcacgctggccacgctgtcccatacgccgacgaagtggatggtcggccaccgcgtcgaggtgatgcgcgcgaactgcgcggcgagatcgaacttgtccttagggaccggcccgctctcgtcgaaagcgacgtcctcgacgtcggcggcatcgttgccgtgcccggtgccggaatattgcttgtaggcgatcagcccgctccctgcgaggttcgcctgctccggcgagatcaggccgatcttgtggatcagccccgccagcacgcgcaccgtgtaggccccgcgcgagaagccgaacaggtagatcctgtcgccgggcgcgtaatgctggaccaggaagcaataggccgagagcaaattgtcatcgagcccgtagccggtggcgagccccagcaccatgttgacgttggccttgaagcggtgccacgtcgtcggctccgtcaccgtgccgaccccgggatcgtagaacaccatctgccgcggctgcgtcctgtccgtcttgcgcaggcagcgatagagcttcaggacgttggagatgttctcgctgatctcgttgccggtgccgtcacagcagatgacgagatgcttcggctccgtcttgcgatcggcggtggctgcggactccatgggctgcgcctccgggtgatgctaccggggcgagtatagtgggaaatgaggaagtgtgcgtcgaatctattcgctgtgaattcggaccctttcggtttgcgacacttcctctgtcagtacaagcaagaagccgcagcaaatagcagtcgcgtaaattatgacttcgctaggggcagcgcccgtcagttcagcttggagcttctcaaaagcctggaatacaatggctcgtaatcggcttacgtcaatctgtagaacctcgtccttgttacggtgcgcgatcctgttcctgatcgtgttgatcagtgtcatcatttcccattctggcctgtcatgtgcaattggcgtatatgcgcgtgccaccgccagcttgtcgtagtaggatagacgagcctggtgaagatatttcggatgggcaaagatggcgttcaagtagtcgtcgagattcccttcgatctccaaatgcgcattcagggcgattgcgatggaactctcgacgtgacgcaaactctctcgaaacttgtcaatgaagttatcgtattctgacatctttggccggactcgctaagactaccattcggaaggtacaagagcttggccgcgccactcttcggttagagcgactccgggaaggtcaccccaaacgccttcgtcagcatgatcaagcacgataatctgaaggcgaccgccggcggcttccgcttctcgccccaacagggcaaatatcttgcggacagctacgacgtcttgatcacggagagtgaaaccctcggccgtatcatcgctcgcggcccgctttggaaaatagacttggctcggttgatcgtagaccagaaaacccggtacgaaatgttggggctctgtcaggaagaacttttgcagtgcaagcgtcaggctaacgtgatatgcaagccaatttgcaccactgccgatttcccaaagatagtcgtctcgactaccgcgaattactttgatcgtaaggtcctcaattatgagtttgactggtgcacccggccattcagcatcgagttgggggaccatttggctggtcatgctctcaactctagcaagagcattgctcaatttgcgacggatctctgcttcggaaatgaccttttgaacatcttcgatttgttttcgaagtgcggcgatctccgtacgcaggtttgacgattggtccgcacggtcatacaactgcagtgcttgctcaagacgccctaagaaacgttcaacccgatcaaaatggttggtagcttcacgtgcgatctcggaagctcgttccaagttggaaatttcatttcgagtttcgttcagctggctgagtacttcctctgtggccgatcgctgtctgagcatttctttgtcaagcgtgcctgatacgcttggaagggacttgagccttacgtccagggcgtcgagactgtcgcaaagctgcatcagcttgcctctgccgcctccactaagctcggctagctacatcatctaataattccaaggagacctgagccccgctgggacaagtcagaaggtgatagcaaagtcgaaccggttgcagcgcgaagcccaaatatggcccgggtgcagcatgctttgcagcctttacagcaacgttcattccgcccctacttcgtggaccgagacgtctttctcccttttctttttatgcacgccgcggttgatggcaaatagggctaaagcataggctgcgaatcgcaacgaagggagtcctcgcagtaggatgccgctacgttgatacacaacaaaaacggccggatcttccgatccggccgccactcaaactctactcggctaagcctacgccacgcgacgcaacctagcccccgcccgattcaaaaaactcagctcgcctgcttcgccggagcggcgtcgccgaccttcttctggatggcgcgcttcagctcgagggcgcgcggcgacaaattgtcggcgtcggccttgagcaggaaggggtcgaggccgccattgtggtcgacgctcttgaccgcgttggtggagacgcgcaggcgcacgttgcggccgagagcctccgactggaacgtcacgttgacgaggttcggcaggaagcggcgcttggtcttgatgttggagtggctgaccttgtggccgacgagggggcccttggccgtcagttcgcagcggcgagacatggtagaaatcctcaatctaagcccccaacgatctgcggccgccattctgggcgccacgggggcaaattctttcgtccttgcagggagcgggcggacgtataggggggaaggggcgttgcgtcaagttttcggggctgttgggacgcgggttttcgtgccgccaccctggtgtcatcgcccggccttgaccgggcgatccagtacgccgaggcggcgcggctggccagaggagccgcgccgtaccggatgccccgatcgagccggggcatgacgtcggagagagcgggagaggcgggagcccgcggcagccgccccatcatcaaaacggcaatgtttgtcgcgccttaccatcacataaagggcgtattcgcgcttgatgagtccagtggagttcccggccctttcgggcccggctacattgcttgccgcggtttttggcttaagtaacagcgcatcgcgctccgattggattgtttcgtgccgacaacgcctcattttgcgcaagagctgcgcccggtccgtccgcgttttgccggcaggctggtggcgctttgcgcgctgggcctcgggtccggcctggcgttcggcgcggcgccggcggcggcgcagggcaagctcgaggcgcaatatgaggcctcgctggccggcattcccgtcggcaagggcgcctggaacatcgatatccaggacgacgtgttctcggcggccgcctccggcggcacctcggggctgctcaagtcgttcaccggcggggcccgcaccggcgccagccaggggcgcgtcgtgggtggcgcgctggtcgcgaccggctaccaggcctccaccaccacccagaagaagaccgaggaaatccgcatcaccctcgacaagggcaatgtgaaggatttctccatcctgccggagccgccggtcgatcctgaccgcatcgtcgtcaccgaggcgcatcgccgcggcgtctgggaccccatgaccgcctcgctgctgcgcgtgcccggcaccggcgatcccgtctcgccggaagcctgccgcaacgcggcgccggtgttcgacggccgcatgcgctacgaactcaagctcgatttcaagcgcatggacacggtgaaggcggaaaagggctacaagggcccggtcgtggtctgctcgatctatttcgtgccgatcgccggctacatccctgatcgccccgtgatcaagtacctcgccgcccagcgcaacatggagatcgcgttcgcccccatcgccggcacgcgcatcctggtcccgttctggctgaaggtgccgacgccgctggggccggccatgctggaagccaccagcttcgtcacctcggcccagcccccgcgcgtcgccaagacgcagtaggcgcgctgcgcagctcgctctctctcggcgtcattccgccctcgcgccagggggcgcgccacggaatggcgaacgaaatcgggtccggaagcgggccccaatgatttcaacgacttgcctactgtgcatggggttgttttgcaaaatgggttgggaaggcggccatccatccgcttcgaagacgatggatgcgggccaagcccgcgcatgacgcgccgggaatccatttgactcctgcccgattctgattcgactcggggccgtccccagttttaacggtctcgcccgcttgtgcgcctgcgcaaaactccatctagtgcgcagccattgcgagtcccgcgacatgttgcgggaacggaacaggactcaatcgggagtcagcgattcggccgcgattcgttctagagtcgttccgaagcttaaagcgaacgggaaaagcgtcgcaaagtgaaacagttgcgcggggttcgggggatgggcgttcccacaccggggcatgacagcggagcgcgtggctggccgcccggcgttcggagacatggctgacactgccagcccccacaccgccccatccagcactgacattcgcccaaatcggcactacctaatccccacacatggctttttcctcctcccccttcgcttccgagcgcgcccttcacgatcgagtgcctggcgcgggcgtcaccgcggtgctcgggccgaccaacaccggcaagacccatctcgccatcgagcggatgctcgcgcatccctccggcatgatcggcctgccgctgcgcctgctcgcgcgcgaggtctacaacaagatcgccgccagggccggtgaagccagcgtcgcgctcgtcaccggcgaagagaagatcaagccgaagaacccgcgctattgggtctcgacggtcgaggcgatgccgcgcgacctcgacgtctccttcctcgccgtcgacgaggtgcagatcgccgccgatctcgagcgcggccacgtcttcaccgatcgcatcctcaaccgccgcggccgcgacgagacgctgctgcttggggccgccacgatgcggccgatcatcgagcggctgctgccgggcgtctccatgatcacgcggccccggctgtcgcagctcgaattcgccggcgaccgcaagatcacgcgccagccgcgccgcaccgccatcgtcgcgttctcggccgatgaagtttacgccatcgccgagctgatccggcgccagcacggcggcgccgccgtggtgctgggctcgctcagcccgcgcacgcgcaatgcgcaggtcgcgatgttccagaacggcgacgtcgattatctcgtcgccaccgacgccgtcggcatgggcctcaatctcgacgtcgaccacgtcgccttcgcctccgaccgcaagttcgacggctaccagttccgccggctcacgccgtccgaattcgcgcagatcgccggccgcgccggccgcgccacccgcaacggcacgttcggcaccacgggccgctgcgcgccgttcgagcccgagctcgtcaacgcgctgcagaaccacaccttcgatcccgtgaaggtgctgcaatggcgcaacgccaggctggatttctcctcgctcggcgcgctccaggtctcgctcaacctcgctccaggccatgaggcgctgacgcgcgcgccgatcgccgaggacatgcgcgtgctcgatcacgccgcccgcgacggcgaggtgcgcgatatcgcgcatggcaaggttgcggtggagcggctgtgggaagcctgccaggtcccggactatcgcaagctgtcgccggccgcccatgccgagctggtgacgacgctgtacggcttcctgatgcagaagggatgcatccccgattcctggttcgaggcccaggtcacccaggccgaccgcatcgacggcgacatcgacacgctgtcggcccgaatcgcgcagatccgcccctggaccttcgtggccaaccgccccgactggctgagagaccccgagcgctggcaggggatcacgcgggaagtcgaaaataaattatcggatgcgctccatgaacgcttgactgagcgtttcgttgatcgccggaccagtgtattgatgcgccgcctgcgggagaacacgagcttgaatactgaaatcggcaagaccggcgaagtcatcgtcgaaggccatgtcatcggccgcctcgacggcttcacctttgcaccggatgcggcggaagccggctccgatgcgaaagccttgcaggctgcagcgcaagccgtgctcgccggcgagatcaacgcccgcgccgaaaagctgggcaatgccccggacgagcagttcgtgctgacctccgaaggcatcatccgctggaccggcgatgccgtggcgcgactgtctgccgcagacgaggcgctgcatccgcgcatccgcatcatctccgacgagcgcctgaccggcccccctcgcgacaaggtgcaggcgcggctcgagctctggctcaagacgcatatcgagaagctgctcgggccgatgttcgagctgtcgaaggccgaggacgtcaccggcatcgctcgcggcatcgcctatcagctggtcgaggcgctcggcgtgctggagcggcccaagatcgcgaacgagctgaaggatctcgaccagccctcgcgcgccgttctgcgcaaatacggcgtccgcttcggcgcctatcacatctatttcccgggcctgctcaagcccgccgcgcgtgcgctcgcagcgctgttgtgggcgctgaagcaggacaatgtcgatctctccgcgctctcgggcgcgcagcatctggcatcgtcgggccgcacctcgtttccggtcgacaaggctctgccgcgcgacgcctatcgcgtgctcggctacaagcaggccggcgaacgcgccgttcgcgtcgacatcctggagcggctggccgatctgatccgcccggcgctggcctggcgcgagaattcgcccggcgaaaagccggccggcgcgttcgacggccgcagcttcgtcgtcacacaggcgatgacctcgctcaccggctcggccggcgaggacttcgcctcggtgctgcgcgcgctcggctatcgcatggagaagcgtccgccgctgccgccgaagcctgtcgtggccgagacggtcgctgcagaaacggtcgctacagagacggtcgtggccgagacgccgccggtcgaaggcagcgcggagacctcgaccgagactgcggcagaggccgttgccggcctgccggcggaaatgactcccgcgaccgaagccgctgtcgaagctgtcacggtcgaagacgcgcccggaatggagccgcgcgacgagcccgctcaagaggagccggcgctcgaagcgactcccgaggctcccgtcacgcccgaagatgcccccggcatagcgccgccggccgaagaggctcctgcgtccaccgaggctgccgggctcgaagccgctgctgccgagactgccgcggttgaagctgccgcatcgcccgacgctgcggcgcccgaggctccggccgcgcccgcagagcccgaactcgtcgaagtctggcgtcccgccggccgtcacgaggatcgcaagccgcgccacgagcgccatcgccatcagcgtcaccacaaccagccgcgcacacagccgggtgctgagactggagctgcacccggtgcggcgagcgccgcgcccggtgaagcggccgaaggcgcgaagccgggccatcgccatggcggacatcgcaaggacttccgcaagggccgcgaaggtggcgagggcggcgatcgccgcgacgaccgcaatcgcagcttccagggcaaggatcgcgacaacaaggatcgcgatcgcaaccgcgacaacaagggcaaattcggcggcgatcgtgacaagggccgcgagcatcgcggccgcgaccgcgacaaggggcgcgatcgccagggcggtccgtcgctgcgtccctacgcctcgagcgcgaacccgcgcgagcgcgatcgtccggctgatccgaactcgcccttcgccaagctcgccgcgttgaaggagcagctctcggggcggaaggagtagcccacgaccgagcggcagcgcatcgacaaatggctgtggcacgcccgtgtggtgaaggcgcgcagctcggccgctgagctcgtcgtcaccggccacgtccgcgtcaacggcgcgcgcgagacatcgcccgggcatgcgatcaaggccggcgacgtcctcaccatcgcgctcgatcgcaccgtccgcgtcctgaaggtcatcgccttcaacgaacgccgcggcgatgcggcctcggcgcgggtcctctatgaggagctcgggacgcgcaattaattgcgcttcttattcatttcttggtcgatcaagcgcacaaagccgtcatgatcgggccttcccgatcttgcggcgccgggccatccgcgctacgcaagccgcgacttttgaaagagcttttcggagcgttggatgacttacgtcgtcactgaaaactgcatcaagtgcaagtacaccgactgcgtcgaggtctgcccggtcgattgcttctacgagggcgacaacatgctcgtcatccaccccgacgagtgcatcgattgcggcgtgtgcgagccggaatgccctgccgacgccatcaagccggacacggaaccgggcctggaaaagtggctcggggtcaacgccgagtacgccaagagctggccgaacatcacccagaagaaagaatcgcctgccgacgccaaggagttcgacggcatggagggcaagttcgagaaatatttttctccgaacccgggctccggcgattaattcgggcccaaacttaaccctaatagcggcccttccgccgaaaaccagccctgaagacccctaaatcattgatttttgcgggaaatgtgctatattgggcacattaagccgaaccccgtcagcccgttggcccctctgggttcccgtgaaaaccaaatgtcgaacaggggcgtggcagtttccgcgcgcaggctgtgtcacagaaaacgcgtaaaaagagtacttcagcgagggcttcccataaggaggccaaaaaagtcgccgcggccagccgtagcgcatccaagggtcggaccgcgacgaaggcgccggctgcaaagtcctcgaagaacaaaagaagcgcaatgcctaacaagactgccaaaccggccgcgaaagcgaccgctgccaagcctgctgccgccaagcctgccgctgcgaagtctgctgccgccaagcccgtgactgccaaggctcccgctgccaagcccgcgacgaaggcccctgttgctgctgcgcctgccaaggcgcccgccgtcaccaagcccgctgccgcgccgaaggtcgaggaaaagaaggtcgtgacccagcgtcagggcttcaaggccaacgaattcgtcgtctatcccgctcacggcgtcggccagatcctcgccatcgaggagcaggagatcgccggggccaagcttgagctgttcgtcatcaacttcatcaaggacaagatgacgctgcgcgttccgaccgccaaggtcgccaatgtcggcatgcgcaagctgtccgatccggcgctggtcaagaaggcgctggagacgctcaagggccgcgcccgcgtcaagcggaccatgtggtcgcgccgtgcccaggagtacgaagcgaagatcaattcgggcgacatcgtcgcgatcgcggaagtcgtgcgcgatctctaccgctcggaatcgcagccggagcagtcctacagcgaacgccagctctatgaggcagcgctcgaccgtctgtcccgcgagatcgcggtggtgcagcactcgaccgagaccgaagcggtcaaggagatcgaggcccagctcgccaagagcccgcgtcgcgccaacgccaaggcggaagccgccgatggcgagggtgacacggatgccgagggcgatgccgatgataccgatggcgacgacaccaccgtcgccgacgaggcggcgtaagcccctcgctgcctcgaccgcaacagatcaaaagcccggccgcttggccgggctttttattgatggagggggcgcttcgagcggccgctggcctgccgttcgcctcaatgaagaactgcaccgtcgccgtccggccgcgttgtgtgacgccggacactttctcccgtctcgctttcatccagagtgccgccacgcgctggatgtcccggccgcacaagccaagggagaagggtcatgaagtttcctcgtttcgctatgtccgcctttgcagccaccgtcggaattggcctgctggcagtctccgcctcgtactcgcccgccgctgcaggcgctttcggcccggactacagctggatgggcaatcgaaaatacatggactgcctgaaatatatgggggcgttcgggcccaactatcccggacgggacaagaacatcgcgatctgcaagagagagtttcttccgggcggtcgctgatcgtgaccggcaggcggctgcatcgcgccacgcctacttcaccggacgcttctcgagctttctcgcgagcgtccgtcggtgcatcccgagccgccgagccgtttccgagatgttgaattccgtttcgatcagcgtctggtggatccgttcccattccagcgtcttgatcgaagtgggccgcgcatcgagggcgacctcggcattgccctcggccttgtggaaggcagcctcgatgtcgtcggtgttcgacggctttgcgagatagtggcaggcgcccagcttgatcgcctcgacggcggtggagatgctggcgaaaccggtcagcaccacgatcagcatgtccggatcgtgtgcgtgcagcagctcgacgcaggcgaggcctgaggctcctcccagcttgaggtcgaccacggcatggctgaaggagcgttgctccagcacctgtcgtacctcctcgatcgaggcggcgagcacgacctcgtagcctcggcgttcgaaggagcgcttcagcgtgcgtgcaaagccggcgtcgtcctcgacgacgatgagcgaacggtcagccgtcaaaattccctccgatcgcgagcgttgcgagcggcaacgtcaggcgcaccgtggccccgcgcttcctgtggttcctggcggtcacggtgccacctagcttgcgtaccacgttcacgaccaggaacaggccgaggccgccgccggtgcggcccttgctcgattggtagggctttcccagctgcgcgagcatttccggcgcaaagccggggccgcggtcgctgatcgacagcaccagattgtcgtcctcgcgctcggccacgagctcgacccaatcgcgcgagacctcataggcgttgtcgagcacgttgaagatcacctgcttcagcgcgacgtcggagacgatcgcgacgtcctcgccgaaggtgttgacgaagtagagcgttcgggccgagcgcgcgtcgcgccactcctcgaccagcgcagtcacgaacgccgtcaccgtcgtcggcgaggagccctcgccgcgcgcttcgcccgccgagaccaggatccccgtgacgatcgacttgcagcgctgcagcgaggtttccatctccgcaaggtcttcggcgagctcctgatcggcggcgagatccggcatgcgccgccagtcgctgaggatcaccgagagcgaggcgagcggcgtgccgagctcgtgcgccgctccggaggcgagcaggcccatgcgcacgatatgatcctgctcggcggcatgctggcgcagcgctgccagattggcgtcacgctcgcgcaaattcctgttgatgcgggtgacgaagaccaccagcagcacggcgttgagcacgaagcccaggagcatgccaagcacggtgagactataggtctcgctcaaggggttgggcggcagatcgagcgggcggtaggccaatgtcagccagacgaagcttgcgcaggtcagggcgaccagcgaccaggtcgagcgggaatcgagcagcactgcgcccagcgtgacctggagcaggaacagcgaggtgaagggattggtggcgccgccggagaggtagagctgcgcggtcagcgcggcgacgtccaacatcaacgcgaccagtagctcgttattggtgatcgcggcgcgatggcgcacccacacgaggctcgagacgttgagcagcaccagggcgccgatcacggcgcccatccgttccagaggcagcgggatgccgagaccaaaatgcacgacgccgatggtcaccatctggccgaccaccgccgtccagcgcagctggatgagcagcgccatgttcttgcggttggtctcgtgatcggtcggggccgtcccgaccagctcgctacgcgcatcggcctgcgattgcagcgtgaccagcccgccgcgcgcaagcgtctgggaaagcgtcttcccgtcgtcaggtgggctcggcgatcgttccagcatctgatcccgtcctgcgggcgagggcattcgggccgccggccttgtcgtggacgaagcgtttgcggcggaacagcccgccgccgaatgtgacgaacagtcggccggccagcatgaaagccagggcaaaccacgtcagcgcgtagatcaggtggttattgggaaagcggatcacggtcaatccgccgatcggcccgccagcgatttgtgatttggcgtcggcatcgacaaagaagggcgcgacctcgtggagaccccgcgcggccgcgatcgcggcgacgtcccgcgagtaccagcggttgtgctgcggcacgttgttcctgaggaatccacccttcggctcggtgatgcgaagaagaccggtgatctcgaccaggccctccggattgccgtctctgcgcgtcgatgcgtcgcgccgctccgacggcacgaagccgcggttgatcagcacctgcgtgccgtcatcgcgctggagcggcgtcagcacccaatagccggggccttcctcggtgacggcatgaaccagcgtctcgcggtcgtggaggaagcggccgctgaggccgacgtgcctgtattcgtcgtttgcggcgctgatgatgggccatgaagcggccgagggaaccggctgggccggagcgtggacgcgctgctcgacacggtcgatgagagccagcttccaggcgcggcgctcgatctgccagacgcccagagcgatcagaagtacaagagcggtgagcgagaggaccgtgaaccacaaggagggcggacgcacagccttgctgtgcatccctgtctcgctcgtcgccggccgggtcatgctcacttcatcccgctcatctggtgcatcggcatcatgttgctgttcaggtggctcatcacccacagcgatccggacagtgcaatcaccaccatcacgatggtgaagatcagcgccatcatggtccagccgttctcggaggccgcgttcatgtgcaggaaatagatcatgtgcacgacgatctgcacgatggcgaaagccatgatgaccagcgcggtgatctgcttgctcggcagtgtgccgctcatcaccagccagaacggaattgcggtgagcacgaccgagagcacgaaaccgagcatgtagctcgagaacgtgccgtgggcgtggccgtcgccgtgatgatggccgtgagcgtgcgcggcgttcgtatcggtgctcatcgcagaactcccaggagatagacgaaggtgaagacgccgatccagaccacgtcgagaaagtgccagaacatcgacaggcacatcaggcggcggcggttggcttcgatcaggccgaactttcggacctgcaccatcagcgtcaccagccagatcaggccgcaggagacgtgcaggccgtgcgtgccgaccagggtgaagaaggccgacaggaaggcgctgcgctggggcgtggcgccctcatggatcatgtgggcgaattcaaagagctcgatgccgatgaaggccaagccgaacaggccggtgatcgcaagccacgcttgggtctgtgcgaccttgttctgctgcatcgtcagcatggcgaagccgtaggtgatcgacgacagcagcagcatcgaggtgttcaccgcgaccaggttcaggtcgaacaggtccttcggtgcaggtccggccgcatagttgccgccgagcacgccgtaggtggcgaacaggatcgcgaagatgaggcagtcgctcatcagatagatccagaagccgagcgacgtgctccagccttccggatgcgggtgctcgtcggcgagatagaagaccggctcgccggtctgcgagggatgaacagcgacggtcattcaattgactcccgcgagcagcttggtgcgcgcgtcctcggtccggatgacgtcttcagccggaatgtcgaagtcgcggtgatagttgaaggtgtggccgattccgacggcgatcatcgcgatgaagctcaccactgccagccaccacatgtaccagacgagagcaaagcccatcgcggtggcaaggccggcgatgatgatacccgtgccggtgctgctcggcatatggatcggcttgaacccggtgagcggacgctggtaaccccggcgcttcatgtcccaccacgcgtcgttgtcgtgaacgacgggggtgaaggcgaagttgtagtccggcggcggcgaggacgtcgcccattccagcgtgcgtccatcccagggatcgccggtgacgtccttgagctgctcgcgccggagcaggctgaccgcgaactgcatgagcatcgagagaatgccgatgaagatgaagagggctccgaccgcggcgatgacgaaccagatctgcagtgacggatcgtcgaacacgcgcaagcggcgggtcacgcccatcaggccgagcacatagagcggcatgaacgcgagatagaacccggtgacccagaaccagaacgacatcttgccccagaacggatcgagcttgaagccgaaggccttcgggaaccagtagttgatgccggcgaacgcaccgaacaccacgccgccgatgatcacgttgtggaagtgcgcgatcaggaacaggctgttgtgcagcacgaaatcggccggaggcaccgcgagcagcacgccggtcatgccgccgatcacgaaggtcagcatgaaggcgaccgtccacatcatcggcaactcgtagcggatgcggccgcgatacatcgtgaacagccagttgaacatcttcgcgcccgtcgggatcgagatgatcatcgtggtgatgccgaagaacgagttgacgctggcgcccgagcccatcgtgaagaagtggtgcaaccacaccaggtacgacaggatggtgatgaccaccgtggcgtagaccatcgaggtgtagccgaacagccgcttgcccgagaaggtcgaggtgacctccgagaagatgccgaaggcgggaagaaccaggatgtagacctcggggtgcccccagatccagatcaggttcacgtacatcatcgggctgccgccgaagtcgttcgtgaagaagttggtgccgacatagcggtcgagcgacagcagcacgagcacgacggtcaggaccgggaaggaggcgacgatcaggacgttggtgcagagcgaggtccaggtgaacaccggcatcttcatcatcgtcatgccggggcatcgcagcttgacgatggtgcagatcaggttgatgccggataacgtcgttccgacgccggcgatctgcagcgcccatatgtagtagtcgacgccgacatccggactgtagccgatgttcgacagcggcggataggccagccagccggtgcgggcgaactcgccgatgaacagcgaggccatcaccagcaccgccccgccgaccgtcatccagaagctgaaattgttcaggaaggggaacgacacgtcgcgggcgccgatctgcagcggcacgacgtagttcatcaggccggtgaccagcggcatcgccacgaagaagatcatgatcacgccgtgagcggtgaagatctggtcgtagtgatgggcattgagatagccttcggagccgccaaaggcgagcatctgctggccgcgcatcatcagcgcgtcggcgaagccgcgcagcagcatcacgatgccgaggatcatgtacatgatgccgatgcgcttgtggtcgacggtggtgaaccactcgcgccagagatagccccagaggcggaaataggtgaggccgccgagcagcgcggcgccgccgagcgcgaccaccacgaaagtgccgacgacgatcggctcgtgcagcggcagtgactcgagggtgagccggccgaagatgagcttgggaagatcaggagacatgcgggatctcgttaggagtctgatttcggacgctgtccgaggaagaaggacgaggatttgagcggcatgaacgagggtcgcttcaggccggcgccgagcagaggcgcggtatcgaggggtgctgcgatcgaggcggtggtcctgccctgcggcgcatcgggtgtacaggtgccggcgacgaaggtcggctcaggcccaagcgcggtgccgcggcgggcgtatttgtcgtaggccagcggcagggtgttggtgaggccctgatgaccggcgccgcccctggcgtcgatcgccatcatctcgctctggcacatcttgccggtctccacgcacatgttgaggatcaggcgatagagatcggcatcgacggtgccccagcgccgcaccggctcgttctgactgggcttttcgagctggagatactcggcgcggccgagcgtgccgccggcggacttggcgctggcgatccaggcgtcgaagcctctgtcatccaggccctggaagttgaagtgcatgccggagaagccggcgccgctgtagttcgcggagaagcccttgtaggtgccggcgtgattgacgaccgcgtgcagcttggtctccatgcccggcatcgcatagatctggccggcgagcgcggggatgtagaacgagttcatcaccgaggacgcggtgatgcggaaggtgatcggacgatcgaccggcgcggccaactcgttgacggtcgcaatgccgtagcccggataaataaagagccacttccaatcgagcgcgaccacatcgacctcgagcggagccttggactggtccacggcgcgctcggcatggatgcggccgagcgtgcgatagggatcgagcagatgcgtgcccatccaggtcagcgcgcccaggcagacgatgatcaggagcggcgccgaccagatcaccagctcgagagcggtcgaatgatcccaatccggttcatagcgagcgtcggtgttggactggcggtagcgccacgcgaacagcaccgtcagcgccatcacgggcagcacgatcaggagcatcaggacggtcgagatgatcacgaggtcgcgctgctgggcggcgatgtcgccggctggcgccagcacgacgtagtcgcagccgctgagagcggcagccagagggagcagcgccaggatcttgagacgggacacgggccgggcctttgagaatgagtttcctttgcgggaccgacgggtagctgcggcgcaacaggccggacattggacaatttgcccaatgttgcagtgcggagcgttggaccagacagggcctgatcgcctggcctcgccgggcggtcggctttggttttcaggacgttgaaggcgcacggatggcgacggcacagacccccgcaatggcagacctccacaccggcgagcacggccacgaccaggccagtcccggcgagatcgccatcggcgtcatcatcggccgcacctcggaattcttcgacttcttcgtcttcgcgattgcctcggtgatcgtgttcccgcgcctggtattcccgttcgcgagcgaactgaccggcacgctctattctttcatgattttcgcgctggctttcatggcccggccgatcggcaccgtcatcttcatgacgatcgaccggagttacggcaagaccgccaagctgatctcggcgctgtttctgctcggcacagccaccgtcgcgatcgcgttcttgcccggctatccggagatcggcgccgccgcgatctggctgctggcgctggcgcgaatcgcacaaggtcttgcctggggcggcgcctgggacggcatggcttcgctgttggcgctgaatgccccgccttcccagcgcggctggtacgcgatggtaccgcagttgggcgccccgctcggactgatcgtggcgagcgcgctgttcgcctattttgccggcaatctgtctgccgacgatttcttcgactggggctggcgctatccgttcttcgtcgccttcgccatcaacgtcgtggcgctgtttgcccgcctgcgcatggtgacgacggaagaatacgcctcgctgttcgaaagtcgcgaattgcagccgtcgcgcatctccgagaccgtcgcgcgcgaaggccagaacatcatgctcggcgcattcgcgccgctggcgagctttgcgctgttccacatggtcacggtgtttccgctgtcctgggtgttcctcttcacccatgaaagcccggttcgcttcctgatcatcgagatcgtggccgccgtgttcggcgtcggcgcgatcgtggcgtccggcatcatcgccgaccgcgtcggccgcaagtcgctgctgatgggatcggcgatcgcgatcgcgatctatagcggcttcgccccgcaattgctcgacgccggggcattcggcgagaccatttacatggtgatcgggttcatcctgctcggcctgtccttcggccagtcttccggcgcgatcgcctcgaacttccggcagacgtaccgctacacggcttcggcgttgacttcggacatggcctggctgttcggcgccggcttcgctccgctggtggcgctgcttctcgccaccaatctcggcgtcatcgcctcgggtgcgtatctcctgtcgggcgcgttctggaccttgctcgcgctctggctcagcggccagcgcgagaagggggatatggacacggggcggtagggctcaagcagcacgcgattcgtagcccggatggagcatcgcgtaatccgggacagacgggccatcgatacaaatcccggattgcgctgcgctccatccgggccacggcgtgcgcctggtgccagcctcagtccgccacgatcttcacgcgatcgcgcaccttcacttgcgcgttgcgttcgagaccgttgagcacgcggaagcgctcggcgggacggtcgacgccggccatgcggtgggacagcgattccacggtatcgccgggctgcacggtgatgaccttgatccgcagcgggcgcgcggcctggatctcgtcgagtgtcaggcggcggaatgaattgacggtctcgcgcgcattgcggtcgctttccgtcgacctctgccgtgtcgcaaagatgaaacggtacacgtcgctcccgaagcgcagcgcatagaccttgaactgccactggtcgcccttggcggtggcggatgccgccggaaaaccgttgatggtgatgtcctcggtcgaggccttctcgacgccttccatccagccagagttcaggtactcgccgagcgactgttcggccggcacgcgcacgacatcgaagcgcatcgcctgcgcgccgccctcgcgcacgccgatcacggcctgcgcggtgttgtcgagcgtaaaattctcgggtgcctggaaggtgaagccgagcttcggatgcaggaagcgccggccgcggacgaaaccttcgctcgggtcttcgccatagacgaggttgtcgaccgcggcgagatagctctcgcggtcgcgctcggcgccttccggcgcagtgtattgccgcgcgatgttctgcgcgttctgcacccgctcgggcgtcgccgggtgcgaggaggtgaaatcctgcgcgcgcggatcgagcgagttctttccggccttcagctcggcattgcgctccatcgcggagaggaagcgcgccgctccataagggtcgaaatgcgccttggcggagatgccgacgccgatgccgtcggcctcgatctcctgcttgcgcgagaagctcgccatggtgagcttggtcttggcgagcgcgagggcggtgagatcgggatcgttgctcatgtccgtgacgacacgggtgacgatcgcggcctggcgggcctggtcctcgcgcatcgccgcatgcttggacagcacatgggccatctcgtggctgagcacggaggccaattccgaggtgtcgctcgcaagcgcaaggagtccgcgcgtgacgtagagctggccgttcggcaacgcgaaggcattcaccgcgccggaattgagaatggtgaccttgtagccctggtccggacggtcggaggccgcaaccagccggtcgacggtcttgctgacgagcgcctcgagcttgggatcgtcataggtcccgccatagctcgacaggatgcgctcgtgctccttctcggtggccggcgtttgcgcgatcgcgggcttcggcttgggcatcacgacggccgccggggtcgccgcggtgtggaaccggcccatatcgccgcatcccgccagcgcagtgcccagagcaaggcacagcacggccggcgcagcccgcagccggcggccttcacctcgtccctgccgttctagcaccccattcacgtcgcttaacccgtgcccggcctgatctaaggccttacccctatcggctcgtttgcgcccagcaactcgacctgtcccacgaggcgtatatcgatccgcggccccgtgttcccttcgacccagcctcgaattcgaatacgtttattctccaaggacttaagggcgattccggtgctttcgaatgccggtagcgtgcgccttgaaatagtcgccgcaaagctccgtgtccagtttcgcccgaagttgaggtaggtcattgccccagcttgccggaccgacaggaccttgccctcgaccaccgtaaagcgcccgatctccgccaaaatatcgtccggactttccgcgttttttatggccgacgagtcagcccagctgcccattttttggcgccgcgctgcggcttcggacgccatcaagactgccgcgcagtccctgtccacgatttcggcggagaccatggcatcgccctgggccagcagcatggcctgcaccgacgtgtcgcttccgccgatgaacagcagcgcgccctggcggccgtatcgatcgggcatgtcgtcgggactccgcagcgtcacgtcacggccggcgagcagcgacaccagcgcctgcttcgtggccgccgtcggctcgatgccggcgaggcggacctcgcgcccgtcagcgaggcgcacgctgcgcggatcgatgatcgccgcgacgcggccctcgccgagggcttcgaactggcagggcgcggcgaacgcacaatgtccggccacgagcagaaatgcgacgatgaggtgaagccgtggcgtcacgtgaccggagaggttgcgttgtctgccgagcatagctcaagcgtgctggattgcgaagagacggttgtgtgacctttcgctgttgccccacatccgtcactgcgagcgcagcgaagcaaatccagactcattccatcgtgagatcctggattgcttcgctgcgctcgcaatgacgcgtggaaaccttcgcggccgactcgccattccgttttgcggaaatcatgcgcggcaattctgctatcgcaaccccctcgcgcttgctgcgctgttgcgcatgcggcatgattgcggcaatagcaaacacccatctgctatagccaagagcaataccaagccgccatcagagtacggcgcgataagggaggttgttttcgatgaagatgattttgtccggcatttttgccgccgcgtttgccctcaatgcgagcgccgcgcaggcccaggacaagccgccgctgaagatcggcggcatcctcgacatgtcgagcctctatgccgacatcacgggtcccggcagcgagaccgcggccaagatggccgtcgaggatttcggcggtgaggtgctggggcgcaagatccaggtgctggcagccgatcatctcaacaaggccgatctgtccgccaacatcgcccgcgacatgctcgacaatcagggcgtcgagatgatctacgacgtggcggcctccgcgaccgcgctcgccgccggcgagatcgcgaaagcgcgcaacaagatcatcatgttcaacggcccgggctcgatccgtctctccaacgaggcctgcggcccctacaccatccactacgtgttcgacacctacggtcaggccaacgtcaccggccttgcggccgtgaagtcgggcctcgacagctggttcttcctcaccgccgactacgccttcggacaggatctggagaaggacaccagcgcagtcgtgaccaagaccggcggcaaggtgctcggcagcgtgcgccatccgctcaacacgtcggatttctcgtccttcctgctccaggcccaggcttccaaggccaaggtgatcgggctcgccaatgccggcggcgacaccatcaacgccatcaagcaggcggcggagttcggcatcaccaagggcggccagaaggtctcgccgttgctcgccttcgtcaccgatatcgactcgatcgggctggagaccgcacagggcttgctgcttgcggaagcgttctactgggacctcaacgacgatacgcgcgcattctccaagcgcttcatggagcgcaccaagcgggtgccgacctcggcgcaggccggggtctattcctcggtcacgcattacctgaaggcggtgaaggcggccggcaccaccgacgccgcggccgtgatcaaggtgatgaaggagacgccggtcaacgacttcttcgccaagaatggcaagatccgcgaggacggccgcatgattcacgacatgtacctgttcgaggtgaagaagccctcggagtcgaagggccgctgggatgactacaagctgattgccaccgtgcccggcgccgaggcgttccagccgctggagcagtcgcgctgcccgctggtgaagaaataagcctcgtcgttgcgagcgaagcgaagcaatccagagacgtttccgcagagacggtctggactgcttcgtcgcttcgctcctcgcaatgacggcgtggtgagagctaaatcaaaaaacaagggagacgtcctgtgagcaacgacatggtcttgcaaaagctcgaaggcgggctgctcaccatcacgatgaatcgcccggagcgcaagaacgcgctcaaccccgagatggtcgtcgggctggtcgaagcggcacgacgcgcagccgacgatcccgaggtgcgggcggtgctgttcaagggtgcgggcggctccttctgtgtcggcggcgatgtcaagtcgatggcggcaggccgcgcaccgctgccgttcgaagtgaaaatggccaacctgcgccgcggcatggaggtctcgcgcatcctgcaccagatgccgaagccggtggtggcccagctcgacggtgcggcggccggcgcggggctgtcgatggcgctggcctgtgacctgcgcatcgcctccgaatcctgcaagatcaccacggccttcgccaaggtcggcttctccggcgattacggcgggacttatttcctgacgcagctgctcggcagcgcccgggcgcgcgagctctatctgatgtcgccggtgctgacggcgaaggaagcacatgcgatcggcatggtgacgaaggtggtgcccgacgccgagatcgacgccgccgcgcacgaactggcgctgtcgctggcgcagggcccgtcgatcgcgctcggcttcatcaagcgcaacatcaacaatgccgagcatctggcgctggaggattgcttcgacggcgaagcgatccatcacacccgttgcggcgataccgaggaccacaaggaggccgcaaaggccttcgtcgagaagcgcaagcccaccttcaagggcgcatgacgatggcgccctatatgcggctgcggcagatctgcctggttgcgccgcagctcgagcccgtcatctcggacatcgccgagatcatgggccttgcggtctgctaccgcgacggcaatgtcgcaaaatacggcctggagaatgcgctgctcccggtcgacacgatcctgctggaggtggtcgcgccgttcaaggacggcaccacggccggccgcttcatcgagaagaccggcggccgcggcggctacatggcgatcttctgctgcaacgatcccgacgagcgcggccgcaacgccaacgcgatgggcgtgcgcaccgccaatgtcatcgaccatgcgccctatcacggcgtccagctccacccgcgcgactgccgcgccgccttcatcgaattcaatcacaccgaaggcagcgacgacatcctcggcgcctatccgccggcgggaccggactggcagaaattcatccgcaaggatgtgacgcaggcgctgacggcggtggagatgcaaagcccggatccggcggggctcgcggagcactggggcaagatcatcggtgttgcgccgagtggcgatgccgaactgaggctgccgaacgccaccttccgcttcgtcaaaggccgcagcgagatcatgagcgcactggagttccgggtcgccgatgctgctcgtgtgctgcatgccgcgcgggcgaaaggccttgcggtgaccggaaatgagttcttgttgggcggtgcgacgtttcgcgttgcttgagccgcttcatcgttatccgtcaccctgaggcgctcgcctcttcggcgagtctcaggggcgacgttgcgggcggagccgttcatccttcgagactctctgcacgtgctgcgccgtgcagcccgcgccctcaggatccaaggtccgatggcgcggccgctcagggatgggacaggggcgagaagagatgctaccgtcccttgaagttcgcgacccgccgctcttcggtcgccttcacgccttccttgaagtcttccgtggcgcgcaggcgcgtctgctcggcgagttcgtggttggtcgcggccatgacgcggtcggcgaggccggcgcgcatggtggcgcgagtcgagagcaggccgagcggggagcattcggcgatctcgccagcgagcttcatcgcggccgccttcacctgatcctgcggcaccagctcgttggcgaggccccacttcaccgcctcttcgccggtgacgcggcggctggtgtagaacatcagctcggcgttgttcttgccgatcagttccggcagcgtcacggtcaggccgaagccgggatggaagccgagcttggtgaagtttgcggagaagcgcgcttcgggacaggtgacgcggaaatccgccgagacggccaggcccagaccgccgccgatggcggcgccctgcacggccgcgacgatcggcttcttggcgcggaagatgcggacggcctggatgtagagatggttgatcgggccgagactgtcggccggatcgcccttcttctcggcctcttgagcctcctgggcctgccgcgccggatcgccgaaattggcgccggcgcagaacgccttgccctgcgcggagagaacggaagcgcggatctcgatgtcgcggtcgaactcctccagcgcatccgcgatctggttgatcagcgaaatgtcgaagaagttcagcggcgggcggcggatctcgatggtgccgacatgcccgaccttctcgacgccgatatctttataggtgctcatttctagtctcccgtatctcagtagcgaagaaccacctctcccgtcgggagaggtggacggagcgcggggcgaaggtttcgatcccatctatcgcaggccaagtccgcgggcgatgatgccgcgcagcacttccgtggtgccgccctggatggtgagtttcggcgcggtcttgatggcgaagtcgagctgccgctccagggtctcgcggttggtcgcggtctcctcgacgaaggcggcgagatcgcgcacgcgatgcggcagctgctgctcccagacggtgccgatgtccttgacgatcgaggcctccaccaccggctccttgcccgcttccagcatgccggcaacggagaccgacatgcgccgcatcgtatggagttgcgcgacgaggcgcccgatgccctcggcgctgcgcgtatcgggatcggggccgaccgcgcggacgagctcggtgagcacgtaataggtctcgaggaagcgctcggggccggagcgttcataggcgagctcgctcgtcgcctgcttccaggcaccgtcgacctcgccgagcacgtgatcatcggggatgaagtaatcggtgaagacgacttcgttgaactcgtactggccggtgatctggccgatcgggttcaccttgatgcccggctgcttcatcttgaccagaaattgggtcaggccgtggcggcggttctccttggtcggcggcgaggtccggaagatcgcgatcatgtagtcggcgatgtgcgccgacgaggtccagatcttggtgccgttgatgagatagccgccgtcggtcttggtcgcgcgcgtcttcgcggcgaacaaatcggagcccgagttcggctcgctcatgccgatggcgaaacagatctcgccgcggcagatgcggggcaggatgtccatcttgatgtgctcgggcgcatatttcagcagcaccggtccgctctgacgatcggccacgaagaagcgccgcgtcggcgcgttggcgacacgcatttcctcggtcacgacatagcgttcgaggaaggagcgctcctggccgccatatttcttcggccaggtcatccccagccagcctttggcgccgacccggcgggaaaattccggcgcatcggtgtcttcgcggttgggctggtgcggatcgaaggtgccggcggcgatctcctccgcaaggaaggcgcgcacttccttgcgcaattgctcgcacttctcggggaggcggatcggatcgaaacggagggcagcggtcattgtgtatctcccggatcagcgcgacgccacgagcggccacaattcgtcggcgccgcggtttgcgaccagcttgccgagctcgaccgcccagtagctttccgagccgaaatcgtcgcgccaggccagcgcgcgcagggaataacggtgcaggatgtgctccatggtgaagccgatggcgccgtgaacctgatgcgcgatgccgccgcctttctccgcggcttcggcgcagcggatcttggccgaggcggcttcgagatagacctcgtcgttgaacgactttgcattcgcgatggcgtcggccgcggatgttgcagcggccagcgctgcggcggattcgccggcaaggcgcgcgagattgtgctgcacggcctggaatttcgagatcttcttctcgaaagcgacgcgctcgttggaatagcgcacggagatgtcgagcatggactccagcgcacccgcgatctgaaggctgcgtacaacgccgcccatcagcatcagattggtctggtcgaggcctttcggcgcaggcttgatggtgacgggctggaccctgtcgagcgtcacggtgtcgctgtggtcatagccaacgttgaggcccgcctcgatgcgcaccttggccgcatcgaccagggcgatggaaacgccgtccttgctgtgcaccagcaccgcaaagtgcttcgccgccttggcaaatggcacgccgcgcgcgcggccggaaagcgcgccgtcggcatcgagcgttacacggtccttcggtgaggccggcagcaccgtcatctcgccttcgggcgaggcgatcttcgcctgcgccagcagccagcctgccagcatggtctcggccaggggaaccgcgacggcgaaacgccccgcggcattcagcaaggcaaagccatcggcaaggctggcaccggagccgccgagatcgtcgggcacccaggccagcggcaggccggcttcgctcagcgcctgccagagcggcgcctgccatgaatctttcttgtcgttgttgatggtttgcggatcggcgagatcggcgaagatcttctccgcggtctcgacgacgatattgtcactctccgccacagcgttccccgtgttttgcccattggcgcgccccttcgggcggcgcgcaggctcttcttgcgcccgatgatccgaaaaagccatggccctgacaagcgttgatcgcagatcaacctgcggcctgggcatgggcgcgaggaccgcagaagactaattccgcttagcggagtttgctcgatttgcagggcgcggcaaactcgctaaacatgatgccgacgtcagaacaggggaaggaatttcaggatggcaaaggacggcttatgcgcaatcgtgacggggtcggcgtccggtctcggcgcggcgactgcggaaattctcgcccggagcggagcgcggctcgtcatcaactattcgtcgagccagaaggaggccgaggccacggccgagctctgccgcaaggccggcgccgcggaggtcctggtcgcgcagggcgacgtctccagggatgacgattgtcgcaagatcgtggctgccgctgcgccctggggccggctggatatcctcgtcaacaatgccggcaccaccaagcatgtcgctcacgccgatctcgatggattgtcagcggaggacttccagcggatctacggcgtcaacaccatcggcccgttccagatggtgcgcgctgcgcgcagcctgctcgaggccggcgccaaggcttcggagcgaccgtccgcggtggtcaacgtctcctcggtcgccggcatcagcggcgtcggctcgtcgatcgcctacgccgcgagcaagggcgcgctcaataccatgacgctgtcactgtcgcgcgcgctggcgccgctgatccgcgtcaacacggtctgccccggctatatcgacacgccctggttcaccaagggccgcggcgaggccggcgccaagcaggtgcgcgacagcgtggtggccaaagtgccgctgaaggtcgcgtcgacagcggaagacatcgcccagctcgtctgcttcctggcaatgccggcctccagcaacatgaccggcgaagtcgtgcgcatggatgcgggcatgcatttggtgacgtgattggcgcgctctttccccgtcatggcccggcttgacccggcgatccacgcgttgccgcgtggatcgaaagacgtggatgccccggggcaagcccgggcatgacgatctggagacggttcgccgtctctgggcgctgcgagttgctaccccttgatcacgccgctcgccaccagccgattccagatgaacagcaccaccaccgcgccgatggttgcggtgatgaagcctgcgccctggtcggggttgtagtggccgatggcctggccgagccaggtggcgagaaacgcgccggcgatgccgaggatggtggtgaggatgaagccgctcggattgttcggccccggtgcgagccagcgcgcgatgaggccggcgacgaagccgacgacgatgatccacaacaggccgcccatgctcatgattgtgctccccttcctgagaacgcttggagcatgatccagagacgtgtgtcgccgtgctccgaagagatcatgctcagaccaaaacctcagattcggcccgagagctcgtcttcggtcggcagccgcccgtccggcgtcagctgatcgaccacctgcggcagatattggctgaggccggagagcaggtcctcgcgtgacaggccgctctgggcggacaggctgtcgatctggtcggcgccgagtgcgctggcgagatcgcccggcgcgatcggcttgttctcgcccttgccgacccaggaattggcggtgtcggcgtggccgctttgctgcaactggttgaggagatcgccgagcccgccgctaagaatgctgccggccgcaccgccggcgagcaggccgccgaggccgcccttgagcatgtcgctcagaccgccgcccgtgcctgcgttcacaggcggaggtgcgggtgccggtgacggttggggcgcagagccggactggttgccggtgaaatgcttgaatgccttccaggccagcaggccgagcagcgccatggtcatcggcgacatgccgccggaggatttgtcggtgctcgctgtgctcggaccgcgcgggccgttctgcatgccgttgaggacatcgagtagacccatggtgctctcctttggcgtctcgttcggcgagcgctcgccgctgactgccccccggggcgaaaacatatgaggcgctcatgacggttacaaggcggctgcgacgcgatgggcagcggcctttgcctctgctatcgaaggccggccattcagggagcgagttcagtgatgacggatcgaccgatcgtggtggccggcgcgggcgccatcggctgtttcgtcggaggcatgctggcggcggcaggccgccgcgtcgcgctgctggtgcggccccgggtgaaggccgagatcgaacgcttcggactgtatttgaccgatttcgacggctccgagaagaagctcgatgtgagccggctgacgctggcagaggatcccgtgatcttgcacagcgcaggcatcgtgctggtcacggtgaagagcgccgacaccgccgctgtcgccgagcagatcgcgcagcatgcgccgcaggacgcggtcatcgtctcgcttcagaacggcatcggcaatgtcgcggtcctgcgcgagcggctcggcggccgccgcgtgcttgccggcatggtgcccttcaacgtgatcgcgatgggcgagggccgcttccaccgctcgacctccggcgatatccacgtcggagaggatccacagaatacggccgctgcgctctcggttgccggcctcgcggtgcgcgcgagcggtgacatcaccggcgtgcaatggggcaagctgatcatcaacctgaacaacgcgctcagcgcgctctccgacatgccgctcgccgcgcaactggccagccgggactggcgcaggctgttcgcggaccagatggccgaggggctggccgtgctgaaggccgccggcatcgtgccggtgtcgtcgacgccgatcccgatgaactggtctccgaccctgctgcgcttgccggatgcgatcttcaacgcgatcctggggcgcacgatgaagatcgatcccgaggcacgctcctcgatgtggcaggacctcaagctgggccgcaagaccgagatcgactatctccagggtgcgctgatcgcgctcgccgagcaaaacaatgtcagcgtgccgctgatgcgccgcattgttgcgctgatcaaggaagccgaggcgaccggcagcggtccccttcgcctgacaccgcagcagatccgcgggaacgcgtgagcggaatggagaacaggatgaagcgtcgttttgtgatcgggctcgcgctgaccgcgttttgcggtgcatcgacgctagcccatgcgaggccgccgacggtgatgaactctccgggctacgacaggcgattgcaggagagcaggtcgcagctggggagttcgccgacggtagtggagcctgcgagtccgcccgtggtcaaaccgaagcgcagcaagaagaagcgcgcgcgctgacgctccatccctccgctatcgtcccgggccagcgccagagggcgctccagcttcgcgactacgttttgttgcaaggctattccggcctggcgtggctcaacccttcttcgccggcttgctgggtgccgggttgaacagcttcttcagatcgttcaacccttccgacaggcgtggccattcgcaggagaaggagcccttggtgcatgcgcccttcgctcgcgcgcgcgtatcgccgatggcggcctgctgaaccttcggccgaccgacggggatcggcacgcgctcgacttcggttcgcagcgcgacctgctgaagctgctgcacctgttgctcttgttgctcgcgctgctggcgggccgtggcttgcgccgcttcattgctgcggcgctgcttggcgagataggcggtataggcttcgtcgatcttcttctgttcctccggcgtcggattggggccggcgatgtcgaaggtgcgatcctggaggaagtcgtagtaggaatagccgccgcccggcttgcggcggccggcaaacttggcgttgcaatcggcaagggccgccgtcttctccgccttggttgcggctttctcggcggcgtcagcgcattcctcgaaatcgaccggtgcgcgtctccaccattgcgcctcggcgtgtgcaggcatcagcaggaaaaatcctgctgcggccgcgggaagcagcgccgcacgacgcgatgtatctccggtcgacattctacgagagcattccttgcaagactcaacccgagctgagtcgagtcggatttttgcccctttatcgtcgccttgtcacccgtggaacccgggaatttcatggctgtaatgctgacattttgtgcttgacgtggcgcgagagtcacagcgctgcggcggcatgctgttacacttgtgccgccagcccctcactgccgaggtgccgccaagaaaatggaaacgcctgatgctgttgcccctgtccgatgtgccgcgctggtatgccgagcgcaagccgcaaggcacgatcgccattcgtcacgggcaggacaccctgacatgggacgagctcgagcgcggcgccaaccggcgcgcgcgggcgtttgcggccaagggcgtcaagcccggcgatttcgtcgcgatcggattgcccaacggcaacgcgttcttcgagacgtcatttgcggtctggaagtgcggggcgacgccgacctcgctgtcatggcggctgccgcgcggcgaagcggccgccgtgctcgacattctcaggcctgcgctcgtggtcggcggcgaggccgactggaatgcgccgaaccggttgcccgccgagttcgtgccggaaggtttctcggatgagccgctgacgccgccggtggcgcgctactggaaagcgatgacctcaggcggctcgaccggccgtcccaaggtgatcctcgaccaccagccggcggtgaccgataccgcggccgccccgccgctcaatattcccttcggcgtctcgctgctcaatcccggcccgctctaccacaacgccccgttcatcgtgtcgcactacgcgctgttcgtcggcggcatgctcacggggctcaccaaattcgatgccgaggaaacgctgcgccagatcgagcgcgagcgcgtgcaatgggtcaatttcgtgccgacgatgatgcaccggatctgggccctgccggagagcgtgcgcaacgcctacgacctgtcgagcctgcagacggtcttccacatggcggccccgatgccgccgtggctgaaggaaaactggatcgcctggctcggacccgagcggatctgggagctctatggcggcaccgagcggcagggcgcctgcatcatctccggtaccgaatggctgacgcacaagggctcggtcggcaagatcggcgacatggcgcgcttgcgcatcatcggcgaggacggcaacgacgtcgcgcccggcgagaccggggagatctactttctcaacaacgacggcaaggacgccacctatcactacctcggcgcggagccgaagcgccgcgccgacggctgggaatcgctcggcgatatcggccggctggatgcggagggctatctctatctgggcgaccgcctcgccgacatggtactgcgcggcggcgccaacatctatccggcggaggtcgaggccgcggtgtccgaggctcccggcgtgcgctcctgcgtcgtggttgggctgcccgatccggaactgggccagcgtgtgcatgccatcatcgagccggagcccgatgcggacggccaggccatcgccgacgggatggcggatttcctgaaggaccggctcagccgctacaagcatcccgagagcttcgaattcgtcaacgccccgccgcgcgacgactccgggaaggtccggcgcacgcttttgcgcgacgaacgcgcagcatggatgaaggaaggtcgcgccttccggattctgccggcgagagcgcgggcgcatgccgactgagacagatacggaaggactgacatgacgatcgccattgcagcgaacagcgtgccgaaaccgccggccgacatcatcgcgggctttcgagacgcgccgacctcgatcatctccgacaatctctcccgcctgcccggcgcggtggggctgaggccctttcatcgcggcgccaagctggtgggcgcggccttcaccgtgcgcacgcggcccggcgacaatctcgccatccatcgcgcgctcgaactggtcggtcccggcgacgtcatcgtcgtcgatggcggtggcgatgagacgcgcgccttggtcggcgagatcatgaagaacatcgcgcaatggcgcaaagccgaaggctatgtcatcgacggcgcgatccgcgacgtcgcagccttcgcggccgacgactttccgtgcttcgcccgcgcggtgatccatcgcggcccatacaagaacggtccgggtgagatcaacgtgcctgtcaccatcggcggcagcgtgatctcgcccggcgacatcgtggtcggcgacgaggatggcgtggtgtcgttccccgctgccggcgcaactgcgctgctgcaggcggtccgtgcccagatgagccgcgaggaggagacgctgaaggcgatccgcgagggccgctaccagggctcttacggaaagtcctgatcagagaagcgaaggggaggatggcgtgagccagaaggacgagttccacaacatcgacgatacgaacgatggccttttccgcgagctggccgccggagtgacgacgcgcatcttctccggggagcaggcgatgctgtctgttgtgacgctggccccgcatgcgcaaggcacgctgcaccatcatcccgaggagcaatggggcgtgctgctcgacggttcggccatccgcgttcagggcgatgaggaaatcgcggtgaataagggcgatttctggcgcacgccgggtaacgtgccgcacaccatgcgcgccggacccgaaggcgcccgcgtgctggacatcttcagtccgcctcggccggaataccggaaagcagggtcgggcttcggaacgacctgaagcgctccgcgcttcaggtattgatgtggggcatgatctttccggagaaccgctgaccgttttttccgatcgtgctcgagcgccaaagagcaaaaagccgggcgcaacgacgagggggggaccgtgacgatcacacgacgggcgctgctggccgtgcccgccatcctcgcgatggcaccggcgcgcgcccgggcctcgaaaatcacgctggtggtgccgtttccgccgggcggatcgaccgatgcgatggcgcggctgctgcagagcaatctgccacccagctgaaggagacgcaacacatgacgctgctgctccaggacggcgccgccttcaagaccttcttcgacaagcaggtcgccacttggcgcaaggtggtgaaggacaacaatatgagggcgtagccggcggcctcgtcacgcgccgcgcagcggacgggcgaagctcagctcatggccatcggggtcggtgagatgaaagtagcgctcgccccattccgcatcgcgcggcgtggtcgacggctgccatccggccgcgcgagcctgctcataggtggcgtcgacgtcggcgacataaaagatgactcggccccaccaggaccactgcctgtcatcgggctgtgccgtcaggttgagatagccggtgccggcgcgaaagctcgtgaacgccgcggcctcgccgccatacaggagctcgaaccccagcgagcggtagaaatgcacggcgcgcgccatgtcatgggtgccgagcgtgatggcgctgatgctgtcgatcatgtggctgctccggggcaatggatctggagctgaatgtacagctccttctgcgcgttgagatgacccgcgttgcagctggcgaaccgcatcctcctctgctatgagaaggccgaacctgcaaggccgggttccgcggtcccgtagctcagccggatagagcggcggtttcctaaaccgtaggtcggaagttcgagtcttcccgggatcgccacttcggcatgtatccagcccgaagacatgggctgtggcgtcctcgtccgtgcgcccccgtcggcgaaagccgatcgggtacgccccgcaagatcgacggcttggacgcacctgtcagtcccttcccgcctccatgatcgccctggcaagccgcgccggatcggagaagcacagctcgtggcttcccggcacctgcaccaggcggaacaggccgagcttctccgacagacgcggatgccagccatagctgtgcggcagcgcggtgtcctcggtgcagttgatgtaggatttggccagcggcatctcggccggattggccttgagcgcgatcttgtcggtgaaggtcgcgagcgggtgcggattgaggacgtcataggcgcgttgcgccgtctccaggtcggcatcgttgatgaaagcctcgcgccagatcgggaagggcaagacgacggagccgtcgccgcgctcggctgcgatcgcgtcgaacagcccgacatagtgcggcggcaccatgtcgttgaggcattcgccgttgttgggcacgaaggcattccagtagaccaggcggcggatgcgctccggcgcgaggtcggcaacgccggtgatgatcatgccgccataggaatggccgagcaggacgacgtccttcagattgttctcggcaaggtggtcggcgatcgactggatcgcctccttcagcccggtcgtcttggcatcgccgggacggttgcccttgatggtgggggtgtggacctggtggccggccgcgcggatcggtgcggcgacgggctcgaactcggcaccggtgtgccaggcgccgtggacgagaacgtaggtcgacatgttgtggctcctcccgagggtgtggttagatcgaggccgcgccgttctgaccgagcggcgccgccgcacgtcaattctggacgcgcggctgatctgccgcttggctggaagtgaaccggattggtctcggagtgaaccgatgcagctgatcgagcgcgccgtttcgtcacgccaatcggcctgggacaccgggggcgtccggccggcggagcagttcgcctattatcgcgaggcgatctgccaggccttcatgaatctgacgccggagccggcggccgcagccggctttcctgccagcgtcgaacacatccgtctcggcgatgccgcgatcaaccgcgtcagctttcccgagcacgtggtgcggcgctcggcggccgacatcgcggcgtccgagcgcagctgcttctacctcaatttgaagcttgccggacgttgtcgcattcaacagggcgatcgcgaggtcagcctgtcgcccgggcaggtcggcatcttcgacagcgatcggcagtttgcgcttctgcacgaccgcggaccgcaattgcgcgtcgcctcgttctgggtgccggccgaggccttgcgcgaatgcctgccggcatcgttcggcgtcgctgcggcgcgcgtctccgatgatccctatgtcggccatctcatcgtcgagaccgcgcgtacgctcagcgacggggccttgcgcatctccgaggaggagggcgtgcttctgttccgggcgttgatcgagctcgtcgcggtgagcctgtcgcggcgcagccgggcaggcgcagcggaatctgaaagtctcgccgatgcaactgcgctggcggtgaagcgcgccattcaccggcggctccgcgagcccggccttgcggttgccgatatcgccggtgccgtgggcatcagcgagcgctatgtgcacaagctgctggcgcgatcgggctccagcttcaccgactacatcatcgaccgccggctcgacggcgcggcgagggatctcgcggatcccgcgatggcggatcgtgcgatcggcgccatcgcgttcgactggggtttctcggatctctcccacttcacgcggcgcttcaagcagcgcttcggctgccggccgcgcgactggcgtgcgcgatgatctaaagcgacctcgaaatcagcagcttcatgatctcgttggtgccgccgtagatcttctggatgcgggaatcgatgaagatgcgggagatcggatattcctgcatgtagccgtagccgccgaacagctggaggcattcgtcggccgtctcgacctgcttttccgagcaccaatatttcgccatcgacgccgtcaccgtatcgagatcctttgcgatcaggcgctcaatgcaccagtcgacgaagacgcgcgcgatcatcgcctcggtcttgcgctcggccagcgtaaaggcggtgttctggaattccatcagcggcttgccgaaggctttccgttccttggtgtagtcggtggcgagcttgaccgcgcgctccatcgaggcgacggcgccgaccgccagcgcaaggcgctcctgcggcagctgctgcatcagctgaacgaagccctggccttcctccttgccgagcaggttttccggcggcacggtgacgttgtcgaagaacaattccgacgtgtcggaggcgtgcagcccgatcttgtcgaggttgcgcccgcgcttgtagccctcggcgcccgcggtctcgaccacgatcagcgaaatgcccttggcaccggcatcgccggtgcgcgcgaccacgatgacgagatcggcggcctgtccgttggtaatgaacgtcttctggccgttgatgacgtaggaattgccctgcttcttcgccgtggtcttcacggcctgcaaatccgagccggtgccgggctcggtcatggcgatggcgccgaccatctcgccggaggccatcttgggcagccagcgcttcttctgctcctccgagccgtaattgaggatgtagtgggccacgatggcgctatgcacggagacgccggtcgtcagctccggcacggtgctttcgagatcgtcgagcacggcggcgtcataggcgaaggtcgcgccgagcccgccatattcctccggcacgctggccagaagtgcgcccatctcgccgagcccgcgccaggcgaagcgatcgaccatcttctgctcgcgccatttctcggcgtgaggggccaggtccttggcgagatacttgcggaactggtcgcggaacgtgtccagctcttcggtcatccacgacgatcggtaatgcatcagcgcctcgctctcagacaatcaggccgccaccggcgacgaccacctggccgctgatatagttggattccgggctgcagaacagatagacggcgtcggctgcttcttccggcgtgccgccgcggccgagcgggatcatgcgcgacatggcttccagcatgtgcggctgcaccccgaccttgatgtcccggccggcgacgtcgatggtcttctgctgcgcctcgatcggctgggtcaggcgggtgttgatgaggccgaaggcgacgcaattgacgttgaccttgtagcggccccactccttgcacatggtgcgggtcagcccgatcagcgaggccttggccgaggaatagctcgcctgaccggcattgccgtagaggcccgcgatcgaggagatgttcacgaccttgcggaacacctcgcgcccctcctcggcttccttcctggcgaagacgcggatcggctcggcggcggcgcgcaggatgcggaacggggcgacgaggtggacgtcgagcatggcctgaaactgctcgtccgtcattttctggatggtggagtcccaggtgtagccggcattgttgacgatgatgtcgagcccgccgaacttgtccagcgcggctccgacgaagcggtcggcgaaacccgtctccgagacgctgccgttcacggcggcggcgtcgccgccgagcgccctgatctccgcgaccacggcgtcgcccggttcggcatcgaggtcattgacgacgacgcgcgcgccttcacgcgcgagcttgagtgctatcgcgcgcccgatgccgcggcccgagccggtgacgagcgcgacctttccctgcagttttgccattctgaatgagtccttttgctgttacagcgcgacgacggcgctgccttcgagcttgacctcgccgcgatcgtcggcggcggtgagcgcaagccttgcgcggcgctcgccatcctcggcgaagagctcggtcaccgtgccttcgcatgtcagcttggcgccaagctgggtgatggcgacgaatcgggtcgcgaaactgcgtagccgcgacggtggcaccgcatccgtcagcgcctgcccgagataggccatcgccagcatgccgtgagcgaacacatccggaaatccggccgccttggcgaagtcgagatcgacatggatcggattgtggtcgcccgaagcgccgcaatagagcgccagcgtgtgacgggtgatcggcggaaagaccttgtggacgatccggtcgccggccctgatgtctccgggtgccgtcatcacgtcacctcgttccggacgacgatggtgcgcgcggtatcggcaacgtgcacgccgtcctggttggtcacctcgcatcgaatgccgatcagcgtcatcgcgccgcccttcttgtccgtcacgctggtcacgcgcggccggaacgtcagggtgtctccgaccagaaccggcgcgtgataggcgaagctctgctcgccatgcagcacgcgggcgagatcgatgccgagcgcgctgaacatctcgaaggggtcgtcgacgtccatcatctccaggcagaacaagtaggtcggcggcaccggcatgccgtcgaatccggccgcccgcgccgcgtccgcgttgcggtagaccgggttctcttcacccagcgtattgagaaaatagcggaggcggcccggctccacccgcgcggtgacgggcgtgaagctgcgccctacggcggactgatcgaccatgtttgtcagtgccgcttgtagagcgtaacgacgcaggcgccgccgaggccaagattgtgctgcagcgcgaccttggcaccctcgacctgcgtggagccggccgtgccacgcagctgccgcgtcagctcgtagcactgcgcaagtccggtggcgccgagcggatgtcccttcgacagcaatccgccggacggattggtcacgatccggccgccataggtgttgtcgccgtcattgatgaacttgccggcttcgccctcgccgcaaaggccgagcgcctcgtaggtgatcagctcgttgtgggcaaagcagtcgtgcagctcgaccacgtcgagatcgtcgggcccgatgccggcgctttcataaacccggcctgccgcctcttttgccatgtcgtagccgaccagctgcatcatgtcgccggccttgaaggtcgagggcgtgtcggtggtcatggcctgcgccgcgatgcgaacctccttgccgatgccgtgcttgtcggcaaaccgctcggagaccagcacggcggctgcgccgccgcaggtcggcgggcacgccatcaggcgcgtcatgacgccgggccagatcacctggtcgttcatgacgtcgtccgccgtgacctccttgcgaaacagtgcgagcggattgttcttggcatggcggctcgccttggcgcgcaccttggcgaaggcgtcgagcggagtgccgtacttcttcatgtggctcagcccggcgccgccgaaatagcgcagcgccagcggaatgccgggagcgtcgatcagctggtccgctgccgcgtcgaattcctcgaatgcgctcggacgatcggtatagacgctgccgagcgcgccgggcttcatctgctcgaagccgagcgccagcacgcaatccagcgctccgctcgcgatcatctgccgcgccatgaacagcgcggtggagccggtcgagcaattgttgttgacgttgacgatggggatgccggtcatcccgacatggtacagcgcgcgctgcccgcaggtggaatcgccatagacgtagcccgcgtaggcctgctgcaccttgtcgtagccgaggcccgcatcggcgagcgccagcttgaccgcttccgtccccatctcgtgatagggcgcgctggctcccggcttggcgaagggaatcatgccgacccctgcgacgatgacgtcagacatcgcttcctccaaataaattacccgttggactttttcttacccacgggtaacatatcggtcgatgcccacgagagtcaaccgaccgagcatggattcagcgccgcccgttccgccctcattgccgtcctcttcgccctggctgccgttcgaaagccgccgccgcgcccgcgacgaaaagcgcgaggcggtgctgcgcgccgccgtgcagctgttcctggagcagggctatcatcgcgtgacgctgaacgaggtcgccgagcggctgaacatcaccaagcccgcgctgtacaattatttccgcggcaaggacgagatcctgttcgaatgctggtcgatgggcgccgagctcgtcgacagcgtcatcacggagatcaacggcggcggcggttcggggctggccaagctgcgcaagctggtgcacgcctatgccgcgctgatggcgaccgatttcggcgcgagcctggtgcgtttcgacctgcgcgacctgaccgagcggaacgccgcggtcgcgcgtgccgccaagaagcggatcgacgccaccttccggcgctacatcgccgcaggcacggccgacggctcgatcaggccttgtgatcccaagcttgcagccttcgcgatcgcgggcgcgctcaactggatcggccattggtatcgccgcgacggcgagctgtcgccgagcgaaatcgccgacgagttcacggttcgcctgacggagggcctcgcaaccgagagccggcagcagatgacaaagaagacgccgggggcgccgcaacggcgcaactcaggacgcacgacggcagggaagaagcgtacaggaggaggaacgcgatgaacatcacgcacggactgcggcgcgcgctgcagatcaacccgaagggactcgccaccgtctatggccagcggcgtcgcagctggggcgagctcggcgaacgcgttgcaaggctggccggcgggctgcgctcgcgcggcgtcagtgatggcgatcgcgtcgccgtgctgtccttcaactcggatcgctacctcgagctctacctggcgaccggctgggcgggcggcgtgatcgtgccgctcaacatccgctggagcgcccttgaaaacgaggatgcgctgcgcgactgccgtgcctccgttctgttggtcgacaaggcctttgcgcaggtcggcgcgcagctcgccggcgcaattccgggtctgaagctgatctatgccgacgacggcgaggtgccggccggaatggagagctatgaggaaatggtcgcgggcagtgcgcccgttgccgatgccatgcgcaagggcgaggatctcgccggcatcttctacaccggcggcaccaccgggcgttccaagggcgtgatgctcagccaccagaacctgatggccaatgcgctcaacgctctcggcgaaggactgtttccggcgagcacgatgtacctgcacgcggcgccgatgtttcacctcgccaacggcgcggccatgtattcgctgctgctctccggcggctccaacgtgatcgttcagggcttcacgcccgaaggtgtgatggccgcgatgcagagcgagcgtgtcaccgacgtgctgctggtgcccaccatgatccagatgctggtcgatcaccccgcgatcgggaactacgacctgtcctcgctcaagcacatcatctatggagcctcgcccatcagcgaggcggtactcgaccgtgctgcgcgcgcactgccgcatgtgcgtttcacccaggcctacggcatgaccgaattgtcgccgatcgcgacgctgctgcatgcgaacgagcatgtcggggaggggcgcaggaagggacgtcaccgcggcgcgggccgcgccacgctcggctgcgaggtgcggatcgtcgacgagaacgatcaacccctgcccacgggcgctgtcggcgagatcgtggtgcgcggcgacaccgtgatgatgggctattgggagcggccggaggagaccgcgcgggccgtcgtcgacggctggatgcacacaggcgacggtggctacatggacgaggacggcttcatctatgtcgtcgaccgcgtgaaggacatgatcatctcgggcggcgaaaatgtgtactcggtcgaggtcgagaacgcgctggcgcagcatccctcggtgctgcaatgcgcggtgatcggcgttcccaatgagcaatggggagaacaggtccacgccgtcgtggtcaaacgcagcggtgtcgaggtttcgcccggcgagctgatcgagttcacgaagacgttgattgccggttataaatgtccccgcagcatcgagatcacagaaacgccgctgccgctgtccggcgccggcaaggtgctcaagcgcgagctgcgcaagccgttctgggaggggcgggaacggcgggtcagctagggccttcgcggacacgtgcgaggtttcctgttttcagatcgcggtcgcgcaggtaccatcgagagcattcatcgggaacattcggtcttggtcgagacgcgcgagctcaagctcgacatcgaacgcattggtacggtctcggcgatcctgacgcggccggaccatgcgcgcgcctgctacgtgctggcgcacggcgccggcgccgatatgcggcattccttcatggagaaggtcgcggaggggctcgcgagccgcggcatcgcgaccttgcgcttcaattttccctacatggagaagaaacaagggcgtcccgaccagccggctgttgcgcatgccgccatccgcacggcagtcgaggaggcggcgcggctgtgtcctggcctgaaacttgttgccggcggcaaatcgttcggcgggcgcatgacctcgcaagcgcagtcgaaggcaccgctccctggtgtcaagggcctcgccttcctcggctttcccctccatgccgccaagaagccgtcgtccgagcgcgccgagcacctcgccggcatcgcgatcccgatgctgttcctgcaaggcacgcgcgacgagcttgccgatctcggccatctcaagccggtgaccgaaatgctgggcgcgaaggcgacgctgcatgaggtcgaaggcggcgaccactccttcgcggtgctgaagaagtccggccgcagcaatgacgaggcgctcaaggaggtgcttgatactctcgcggcctggatcgaccagcgcgcctgacctcaggctgaatagagccccttgtcgcgcgctttctggatcgccagtgcgccgatcaggtcgagcgtcggcgtcgacaggccggcggtccgcgcgaaggcctgcggcgccttgaccagcacgtcgatctccatggcgcggccgagttcgtagtcctgcagcagcgacggcttgtgatttggggcggggccgctgcgcgtgacgcgcttgacctctgggatgaaatgctgggcaatctcgttggcctcgttcagcatgcgcggaatcacgtccgcgaaggccgggtcgtcgcgcacgccgcgcgcggtctggccggtgagcaggcacagcaccgagagcgacatgttggtcagcagctttgaccagatcgcctcgcggatctcggccaccggcggcgattccagccgggcatcgttgaggacgttgcggagcttcgtgatgcgctcgcaattgcggtcgtcgcattcgccgatcagaagccggttgcggtccggggtcaggttctgcaccacgcccggcgcgatcacctcgttggaggagaacacgacgcctccgatgatccgctccttcgggatgcaggcgcgcaagcgtccgccggggtcgagaaatgaaatgtcgggcggggcgggatgccgcggcggcaggccgataccgtaccaccagggaatgccgttctgggcgaacacgatggcggtgtcgtcctggagcagcggcttgatgctggagaccagtccctgcagcgccgtcgccttcagcgtcgagatcaccacgtcctgcgggccgagctgggccggatcgcctgttgcgttcaccttggcgccgacctcggaatcgccgacgcgcagcttgaggccgcccgcgcgcgcggcctcgagatgcgcgccgcgcatcacgcacgagacctcgtggccggcgcgcgccagccgtaccgcaatgtggctgccgacggcgcccgcaccgaaaatgcagatacgcatgatgatgtccggtccctgtctctttgccgcccggaagccagcatgacacaagccgccatgcggtggacgcggccgccccacgccggaaagatatggatcaggacacgccgcgtcggccatagtgcgcagcaaagaaaccgaccggaggaccaccgatgaccgccaaccccgtcctgtggacatcagatgagcgtggggttgcgaccgtcacgttgaaccgcccggaggtcaacaacgcctatgatggcgcgctgatcgcgggcgtgctcgcggccatggacgatctgtccaagaagccgaacctgcgcgtcgtcgtgctcaggggcaacggcaagcatttccaggccggcgctgacctcaagtggatcaatagcgtgcggccgcaatcggctgaggccaacgaagcggcctcgcgggcgacgttcgaggctgtgcagcggctcaacacgctgccgatccccaccgtcgcgctggtgcagggcggctgttttggcggcggcaccggcgtgatcgcggcctgcgacgtcgtgattgccgcggataacgcgttgttctcgattaccgaggtgcgctgggggctgacggcggcgatcatcatcccgcagctctgcgacgccattggtgtacgccaggtccgccgctacgcgctcaccggggaacgtttcggcgccgaggacgcccgccgcatcggcctcgtccacgaggtggtgccgctcgccgatctcgaaggcgcaggcagcaaggtggtcgagcaattgctcgccaacggaccggatgcgatggccgagaccaagcgtctcgcgctcgagagctcgttcggcggcatggcggtgggcgatgccgcctacacccggctcgtgcagttgcattcgctcaagcgacagagtgcggaggcagcggaagggctggcgtcgttcgccgagaagcgggcggcgaattggggcggcggtaagggctgaacgtcagcagccgcggcagatgttgttgatgctgcgatagactgcgtcgtcgttctgccgcatctcgcggagcgtttcgagcgcggtactttcgcgaggcggctcgggcctgcgcttggccgcaagctcatcctcctgccgcttgtagcaggcttcgcggtcaggcttttcccggatgaagcggcagttctgctccaatgccgctgcatggcccgatgggagcacgaaggcgaccagggcaacgagcgcggatttcttggccatacgatacatggctgccttgtctcaggtccagcgagcgggagcaaccgtgatcttgcgatggtggggcgagccgggctaatcctccatccctccagacaaatgccgggagcggacgcgccatgcggcccaggatgatcgaagaaccggcacggaaagtgccgctctatggcgaatacgaagtggtcgtgcttggcggcggtccggccggcatcgtggcggcggcctcggcctcgcgggccgggcggaagacgctgctgatcgagcgttacgggtttctcggcggcatgggcaccgcagccggcgtcaccaacttctgcggcctgcatggcaatgtccatggcgagcaccggcggctggtgcagggcatggcgtcggagctgctggcgcggatcgatcgcttgaacggcctgaacacgccgcatctgatcctcggcaaggtctatgcgcaggcctacgacaccgcggcctacaagatcgcggccgatcaactgctcgccggtcaccaggtgaacatccttttccatgcgctcggcgccggcgtcgtgatgggggatgaccgccgcatcgacgcgttgctggtcgagaccaaggctggccgacaggcggtgcggtccgagatcttcatcgattgctccggcgacggcgatcttgccgtgtgggccggcgcgccgttcgagctcggcgatgagcacggtcatccgctctacccttcgatgatgctgcgcctcaacggcatcgatccggagaaggcgggcgatgcgtggcgcaccattccgcaattgatggacaaggcccttgcggccggcacccacacattcccgcgcaagagcgcgatcgtgcggccgcaaaagtccggcatcgagtggcgggtgaacttcacgcaggtcgcgcgcgaggacggccacgccatcaacggcgtcgagcccgacgatctcacccgcggcgagatcgagggccgcaagcaggcgctggccgcgttcgagttcctgcgtaccgtgccgggcttcgaaagatcctatatcgtcgacttgccgccgcagctcggcatccgcgagacccgccgcatcaagggcggctaccagctcagcggcgaggacgtgctcggctgcgcctcgttcgaggattccatcggcgtcaatggctggccgatcgaggcgcatgttcccggcgacgtcgtctttacattcccgccgatcccggactcgcgcggctacaacgagctgccttaccggatgctggtgcccgaaggcgtcgacaatctcctggttgcgggccgctgcgcgtccatgacacatgagggccaatcggccgcgcgggtctccggtgcctgcttcgcgatgggcgaggccgcaggttccgccgccgcgctcgcgctcgctggaaatcggattccgcgcgacatccccattgaaaaattgcaggaaaccttgaaacaacagggcgccttcgtcgggcgggaccaggcgctgcctgaaggcctgtagcggactgcaagacaaccacgagaggaaacgggatgatcgggatggtgcggctcgtgctcgcgggcctggtggcgatcatggtgatgggtacggcgcgggccgaggacggcctgaaggccaagatcggcgtgctccgcctgtcctcctccgcgcccgtcttcatcgcgcaggataagggctatttccgcgacgctggcctcgaggtcgagctgaaattcttcgatgcggcgcagccgatcgcggtcgccaccacctcgggcgacgtcgatttcggcatcaccgccttcaccgccggtctctacaatcttgccggcaagggcacgctgaaggtgatcggcggtatgagccgcgagaaggccggctatcccctgatcggctatttcgccagcaacaacgcctatgcggccggcctgaaaacgccgaaggacctcgccggcaagcgcgtggcgatgacgcaggttggctcgagctttcactattcgctcggcctgctcgccgataaatacggcttcaagctcgccgatgtgaggatcgtgccgctacaatcgctttcgaatgcggcggcagcgctcaagggcgagaccgtcgatgcggcgctgctgccgatctccacggcgcgcaagctgatggacgatggcggtgcgaaattcctgggttgggtcggcgacgaaacgccgtggcaattgggtgcggtgttcgcctcgccgaagacactgaccaacaagatgctggtgacaaaactgctcggtgcgctcgccaaggccgatcgcgaatatcacgacgtcatccttgccgcgatgaaggacggcgtcgccccgattaacgagcagacaaaaccgctgctggagatcatcgccaaatacaccaacttgccggtcgagcaggtggtcggcaactgcgcctatatcgatcccgacggcaagctcgacgtgaagaacgtcgacaaccagatcaaatggctgcaggagcagggttttgtcgacaagggctttgatgtgaacacgatcatcgccaaggactacgtgaaggcggactgatgtttccgtcattccggggcgatgcaaagcgagaactatggtgcgcccttgcgcacctgagaatctcgaggttccctggtgcgcaattgcgcaccgaggtctgatccttcggatcatcccggaacgacgcagggatagacaacgcgcatggacctgatcgccagccacatttcccaccgcttcggcgatctcgccgtactcgatgacgtctcattcacggtcggcgccggcgaggtggtggccgtcgtcggtccttccggttgcggcaagagcacgctgctgtcgatcctgggcggcctcttgcaaccgacctccggcgcgcccgagttgcgcgggacgccgccggcggacagtctcaatccgctgactttcgtattccaggattttgcgctgctgccctgggccacggtcgaggagaacgtcgaattcccgctgctgcacacccagctcacggccacgcagcggcgcgcgttagtcgaggacgccctgcgacgaaccagcctgaccgattttcgccagacctatccaaagcagctctccggcggcatgcgccagcgcgtcggcatttcgcgcgcgctggcggtgaggcccgccattctcctgatggacgagccgctctcggcactggattcgcagactcgcgaactcttgatggaggatttcgtccgcctgctctccgatggcggcatgggtgcggtctatgtcacccacaatctcgaagaggcggcgcggctcgcggaccgcatcgtcgtgctgtcgcggcggcccggacgcatccgcgaggttgtgacggtgccgatgacgcgcactgagcgcggtgagaccgcggcgcgtgaaaggctgctggcgctgcagacgcagatctggtcgctgatccgcaacgaggcgatcgatgccgagcgcgaggtccagcatgcttgatcgcgcgcctgccgaggagaccttgaaggatcaggcgacgcgccgcgtccgtttccgcggcgccggcttcgtgcctgcgtcgagtcggttcggcggctggttcgcgctcgcgcttgtcatcgcgatctggcaggccgccagcagcgccggcctcgtcaatccactgttcctgccggcgcctaccgcgatcgcgcgcgcgatctaccagctcgcgatctccggtgcgctctggcagcacgtttcggcctcgctgctgcgcattggcatcggctggctgttgggaacggcggctggcgtcgccgtcggctttgccatcggcctgtcgcggctcgcgcgcagcgtcggcatcaccttcatctcggcgttgttcccgatcccgaagatcgcgctgctgccgcttttgatcctttggctgggcatcggcgaggagccgaagatcgcgaccatcgcgctcggggtgttcttctcgaccgcgatctcggtctatagcggcgttgatgcggtgccgcgcaacctgatccgcatggcgcagagcttcaacgtgccgttcgcgaccatcgtgcgcaaggtgatctggccgggagcgctgcccgcgatccttgccggcttccgcatcactgcatcggtcgcgctgctcctcgtcgtcagcgccgagatgatcggcgcgcaatatgggatcggggccttcgtcttgcaggccggcaatttgatgcagacggatcagctgctcgcgggcgtggtgatcctgtcggtgttcgggctcgcggtcggcaaggtgatcggctggctggagacgcggctgctgcactggcgctgaagcctactccgtcattgcgagcgcggcgaagcaatccagactctttccaccgcggcagcccggattgcttcgtcgcaagggctgcccgcaatgacgatctggctagcaccagaatctcacgcgttgccgcggtcctcgcggaacagatccagcttctgctgcaccgggcggtccgagaagctgaacagcaccgcgtcctcgtccgcctcgtgcgtgacccagtgccagctcggcaccacgaacaggtcgcgcgggccccattcgaaaacggcatcgccgatgcggctgcgccccttgccttcgatcgggcagaacacggtggcatcggtcgaccgatagcgcgcggtcttgaagcccttcggcagcagctggatgaaggtgccgatggtcggcatggcgaaatcgccggtctcgggattgctgaacttcagcttcaggccgtggcatgcgtcccactcctggctcgtgcgcgccttctccagcgcctcgcgggtgtaggcgtagggatagctgaagatcggcgaggtcttcgagctgcgcttcacatcgaccggcaacaggttgtggccgtagcgcgcaaagctgtcgccggcgggcttcgtgatcttctgctgatcctccttcgaaccttccgcgaaggagcagtcgaagaactgcaccagggggatgtcgagaccgtcgagccagaacatcggctgatcggtttcattggaatgatcgtgccaggtcatcgagggcgtgatgatgaagtcgccgggctccatcgcggtgcgctcgccgtccaccgcggtgtgggcgcccttgccttcgagcacgaagcgcagcgccgactggctgtggcggtgcgcaggcgcgacgtcgccgggcaccaccatctgcacgccggcgtagagcgacgtcgtgatcttggattgcccgcgcaggccgggattctccagcaccagcacgcgccgctcggcctccttggccgtgatcagcttgccggcttccgtcatgtaatcgcggatgacgtcgaatttccagaggtgaggccggcaggcgctcttcggctccggcgtgatgagatcgctcatcaccgtccacagcgcggtgaggttttcgccgtcgatctttctgtagaatgcctcgcgttccggcgtcttggccacggcttccatggtcgctgctcccgatcgtttgttgattgacagtatactgacgatctaggtagcgtcaacgtaacgaagggcatacaagccaccgtcattccgggcgtgcgctagcatcggactatggtgcgcacttgcgcgcctgagaatctagaggttccgggttctcgctgcgcgaggcccggaggacagaaaattgggaggtctacatgaagctgcacggctatttccgctccagcgccgcttaccgggtgaggatcgcgctgaacctcaagggcctcggcgccgagcacctgccgcaccatctgcgcaagggcgagcaatgcgcgcccgcctatcttgccatcaatccgcaaggcctcgtgccggcgctcgaaaacgacggcggcgccgtgctgacccaatcggtcgcgataatcgaatggctcgacgagacccaccccaatccgccgctgctgcccaaggatccgctgcgccgcgccaaggtgagggcgttcgcgctcgcaatcgcctgcgacacccatccggtacagaacctgaaggtgctggcgcggctgcgcgagctgggcctgcccgaggagaaggtccaggattgggcagcctgggccaatcgcgagggcctgtcggcatgcgagaccctgatcagggacgagccgggcccgttttgcttcggcgatgagccgagcctggccgatctctgcctcgtgccgcagctcaccaatgcgcgccgcttcggcgtcgatgtctccgcctatccgcgcctgctcaaggccgaggccgcggcgaaggcgctgccagcgtttgcggatgccgcgccggagaagcagcccgatgccgagtaagccgcttcctccgatcacgatggacgcggtctatgccgcgccgggttatctgttccggcgcatgcagcagattgcggtctcgatcttcatggaggagtgcaaggcattcgatctcacgccggtgcaatatgccgcgttgatcgccattcacacccatcccggcatcgacgccacgcgcctctcggcggtagtcgccttcgatcgctccacgctcggcagcgtgatcgaacggctccaagccaaggattacatcgagcgcaagccggcgccggaagacaagcgcatcaagctgctccccctgaccagatccggcgccgcgatcctgcgcgagatcatccccgccgtcgagcgcgcccaggcgcgcatgctggagccgctgaagcccgccgaccgcaaggtgttgatggaccttcttgggcagctcgtcgatctcaacaacgaggcgtcgcgcgtgccgctgcgggcggaggatgcgatggagcatctggggaaggcgggctagtggagtttgaggcgatacagttgcgtcatctccgccgtcgtccggggcgccgtagcgcgagcccgggacgacaccagcagtgcttcggcagtggttgctacaacctgagcagcgcctgccgatcgatcttccccgtgccggtcttcggcagctcgtcgatgaagatgacctcgcgcggatatttgtagggcagcagcttgcccttcacatagtcctgcagcctgcgtgtcgtttcgccgtggtcaacggcgcggttgttcatcaccaccaccgccttcagcgtcatgcggcggtccggcagttcggcggcgaacacagcgcattcgcggatgtcggggtggtcggcgaggcacagctcgacctcgagcgggtagacccattggccggagatcttgatgaggtcgtcggcgcggccgcggaaaaaatggaagccgtcggcatcgcggatgaagcggtcgccggtatagatccagccaccgtcgcggatggtctcggcggacttgtccggccggttccagtacagcggcgtattggaatcgccgcggacccacaggatgccttcctcattgtcgccgacgtcgcgtccgtccgtgtcgcgcaatgcgacctcgtagccgggcacgcgcaggccggcggcgccgagcttcttctgctccggacggttggacagatagatgtgcagcacctcggtcgagccgagaccctcgacgatttcgaggccggtcagggtcttccagccgttgaacacctcggccgacagcacttcggccgccgaaagggacatgcgcaatgacgagaaatccgtcttgtccgcgccttcggccttggtcagcgatgtgtagagcgtcggcaggccgaagaacacggtcggcttgtaccgctcgatcgcggcgaagatcgcggcaggcttcggctgacccggcagcagcagcgtcgccgctccggccgagaacgggaaggtgacggaattgccgaagccgtaggcgaagaagatcttcggcaccgagaagcagatgtcgtcgggcgtcagcttcaggatgttctgcgcgaaggcgagatcgctataggccatgtcgtgctggagatgcacgatgcccttgggctttccggtcgagcccgacgagtacatccagaacgccatgtcgttgcgatgggtgtccgcttccctcagctgggtggagaattgcgcaagccagtctgccgccgcgagcaccctcggtgcggcgtggtcgccgggcgcgccgttgacagcgatcagcgtatgcagccgggtgtccttgcaggcctccgcattgaagcgcgcgcagaactccgcgtccgcgaccgcgacactcgccccggaatcggcgagatagaattgcagcaggtccggcggcgtcagcgtgttgatcaggagcggcacgaagccggcccgcaccgcaccgaagaacgcggccggataggccggcgtgtcgtcgaggaacaggagcacgcggtcgccgcgcttcaggccgagcgaggcaaggccattgccccagcggcacgcttccgcgcagagttcggcataggttcgcgtacccgccgggcccatgagcgcgcatctctcaccacggcccttgccgagattgtcgaacagcacgcggctggcattgtaggtgtcggggacgacaaagccgatctcgcgtgcccccgcgctgtcggctggcacctggtcgcgaatctcgttgctcatgccgcatccccggcattcctggcggcctcgtagcgcgccatgaaggccggcgacatgtggcgcaggcgtgcgtcgtcgatgcggccggagcgggtgatgtagctgtaggcgaaatccagcaggggaagcttcatgtgctcggcgaagtgttcgtaccagaacgcactcgtgcgcgcggcgttgacgagcttctgcacgatgggcttgcgcgcggcctgatagcgatgcagcgccgtcgcaagatgcgcgtcggattccagcgccttgaccagcgcgatcgcgtcctcgatcgcgagccgcgtgcccgagccgatcgagaaatgcgccgaatgcagggcgtcgccgagcagcaccatgttcttgaacgaccagtgctcgttccagacccagggaaagttgcgccagatcgatttgttggagacaaggcaatggccgccgagcgtgtcggcgaacacctcctcgcagactcccttggattgctcgacgtccttgtaggcgaaaccgtaggcctgccatgtggcgtgatcgcattcgaccaggaaggtgctcatgctgggcgaataacggtagtgatgggcgttgaaggcgccgcgctcggtcttcacgaaggtctgcgacagcgtgtcgaagcgtttcgacgtaccgtaccagacgaacttgttggaggagtaggacagggaggtgccgaaatcgccttcgaaggcgcggcgcaccagcgagttcagcccgtcggcggcgacgatcaggtcatggccgttgagctggtcgatggtgtggatctgcgtgtcgaagcgaggcgtcactccgacgccgagcgcacgctgctgcaggaatctgaggaactcgagccgcccgatcgaggagaagccgacgccatcgatggcgacgctgtcgccgtgcaggtgcagcgtgatgttctcccagctctccatgtgcggcgcgatcgcatcgaccgtttcggggtcgtcggcgcgcaggaactccagggcctgatcggagaacacgacgccaaagccccaggtcgcgtcggccgggttctgttcgaacagatcgacctgatcctcggggtgacgcttcttccagagataggcgaagtagagcccgccgggccccccgccaatcacggcgatccgcaacgtctgcctccctttaattgacagtatacttactatctaggggtagactaatgtgctccagccgctggcgccagcggaattatcggcaagcctgcgtgcggcacctcggcctcggatgcgtataggcgtgcgtccaaaatcgtctggtcagaaccatagccaaaccactccggaatggccaccgcagtgtcaggcggacgctgtagcccaaaccccattcaccggctcgccggtggcggcggacgaccggaccaggtttggggatcgcgacctgcctcgcctatcgcgcggcgaatcgccccagcacgtccctgcaggccggtgacagcgatgcggcattgctggcgaggcactggatgatgcggccgccgccagcctcgacgccggcgcagatcgcgcggatgtcggctccgcaggccgattgggcgacgaacagctgctcgcgtggccgcagcgggcggagcacgagcacggtcggcgccgcagcgggcgccgtcgcgggagctgcgcctgcgggcgcagccgtcgccgctgtgccggatgccgcgcccaacgcggcttggcaggagggagagaccttggccttgtttttctccaggcattcgagcgcggccgttccgcccgggggcacgctggcgcagaccttgggataatcgccacggcaagcgctcttgatggccgagacctgggcagtgctcggctgcttggcgggagcagtcttaggcgccgcggcagtggccggcttggcaggttctgcgggaggcacaccaggcgcggcctgggccttcggtgctgcgggtgccgccggcgcggcctcggtcttgggtgcagccggagcggcttcagccttcggcgccgccggaggctcgagcgcgcgcacggcagtctggcatcccggtgacaggctggacatgttcttctgcaggcattgaaacgcttccgcgccgccaggcgtcacgctcgaacaacgtgccatgaagtccgaacgacatgaagagcggatcgcgctcttctgggcctcggtcggtgtctgcgcgatcgccactgttgccgttgcgaggagcgctgccgccagcaaggtcacgcgcgcggatgtgtgcttcaacgtattgaacatctgactgctttcccgcccctgtcggcaaacgccgtcggcttcctgagatgtgatgcgattgcaatcgtcgcgagtggtgcccgcgaccgatatcattggccgcttcagccccacctgcaaggtcaattattccggtgcaacctgcctcgtcaaagcctgatcatgcgcttgccgcggttttcgcccgcgagcaatccgatcagcgccttcggcgtgttctcgaggccatcaatgatgtcttcctgcaccttcagtctgccggacttgacccatgcctgcaggtcggcgagtgcgcgctggctctccttcatgtagtccatcacgatgaagccctgcatggtcagccgcttcaccacgatcaatccaggcacgccgcgcgggccgtgtgcaggggcgcgccgtcatattgcgagatcgcgccgcagcaggcgatgcgcccgtaattgttcatctgcggcaggcaggcttcgagaatgtccccgccgacattgtcgaaatagacgtcgatgcctttcggagcggctgcgcgcagcgccttgaacaatgcgccgtccttgtaatcgacggcggcatcgaagccgagctcggaggtcagccagttgcacttctcggctccgccggcgatgccgacgacgcggcatcccttgatcttggcgatctgcccgacgatcgagccgaccgagcccgcggccgccgagaccacgaccgtctcgccctccctgggcttgccgatctccagcaggccgaaataggcggtgaggccggcgatgccgaacacgctgagcaggtgcgtcatcggctcgagcttcggcatcttggtgagatgcttcgccggcaccgcggcatattcctgccacccggtgtcgccgaatacgatgtcgccgggcgcaagctcgggcgccttcgagctgacgacctcggcgatggcgccgccggccatcacgctgttggcttcgacagccgagcgataggtcgcaccgtgcatccaggcgcggttcgcagcatcgagcgagatgtatcggacgcgcagcaaggcctcgccgtccttcggctccggcacggcgccctccaccatcttgaaatgctcggggcccagcttgccgctgggcttctccaccagcagaatctggcgattgacgttgctgctcatggacattccctcgtcgatggtctgattatcgatgccggcgttcaaacaaacgtgcgaagccgcattcgccgtgcgctgtgcgaggctagatcgcagcgttccattgcacaacgggaacatcctgccaacggctggacgccgacatcctgctctccggcgtggcgcgcgcgacaacgcgccgctcaagcacatctctccgagcgtgatctcgatgtggcgtgtgccggccgagctgctcgctgccgtctgaccggactcagggccgtcccgtcacgttgaaatccggtcttgcgtgaccgcgcatctccgtggccggcgaagtgcccagcaatcgcgccggcacgtgtctgccggtgaaagtctgcgcatccatgctctgctgcatgtagagctgccccgcgaccagtgtcacggccgcacaggcgagcacgaacatcgccagagccaattggtgcgcttcattcatgtccgcagctcgaaagactggaaactgctgatttagctgccaaaaggacggtgcaacgttgatgttgcgcaacttcagaggttgaattctctccggcagactacttaggggactcgccctaagataagccgcgcaatcgcgcgacccggcggttccgtttaacaacgccttagcggaacagagtccggagagcccaatgaatcattcgatttatagcgccgaccgcgccactcattcgaggatcgtcatcgtcgcgctgctggttgccgcggccgtcgccggccttgccgtttcccgccacgccgatgtgagaaccgtatcggtcgagagggccgccgtattcaagcctagcaaggcggtggttctgagcggttcggccatcgtcgccgtccgctgacccggagatccccgatgcgaatgagcagaactgaggccgggattgccaacaagccgtttgacgcggcgttctggtccgttgcagccgtccttagcggggcggttgtctatctcgcccgtctgatctagcgggccgcgagcccgtcagaggccgatgccgtcttgcgagcggcgtgccgccgcgcatttcgttattgtttgcgctggcgcaaccgacacgaccagatgcgcgatagcgtcttggagcctggcggctctctctgaaaccccgatgcagttgctatggcaacgaggctcggtaattccgggcctcgttctattttgccgattggctgtcgaaggatatcggcggtcagcgctggcggctcagtgctccgcctcgaagatccggtccagcgccgcctcatacgccgcatgcaccatttccggatgcagcttgcccagcgcttccatcatcacgccggaattgatctcgagcactttccattcgccgccgacgcggaccacgtcgatggacgcgaacgcgatcccgatggcgcttgcggcggcgcttgcgagtctgacgcaagccgcgcgaacctcgccatcgccgagcaatatcggcgttgcgccggcatcgagattgtgccgccaatctgtgccacgccgcttgctgtagacgacgagcgggagatcaccgagcagcaccacacggacttcgtcctcgatcgcgacatagggcgagatcacgagtccggcgctcatcgaaaacacgtcgcgaaccgcgcggtcgagctccgcctccgtcgtcgccttgaacacggcccggcccgaggtgccctcgttcggcttcaccacgacgccttgcgaattctgggcgagcagcatcagcatctcacggcgccaatcggtgccggcgacgtgaatgcccaggctcggattgaggaacaggtgatgcggaacgcacggcacgcccgccagcgtcagcacctcggcggtggccgacttgtcattggcgaggcggtgggcgatggcgctgttgaggccgatgtcgtagccgaaggcgaagtgacgcttcgcaccctggcgcatcgcgatcagccagccacccgcgcggacatcgaccgcgatgccatgctccgcgcaatagcgcctgatcgcctgaacgaagattcgctcgccgctcgccatacttttcgtttctgtcgccaaaagccgtaaatgcgcggaaagggcgccagccgggatgaaaatcagagctattcttaatgaatttctcgcgagcgcagcagaaattaactgctccaaccacgcggctgagtggaaggaaattgcctgccgtgcctgctcgggaggggaatcgttaatgctgtggccagttctgccgcaaatgccggtttgaccggcatcaattgcatccggaacgaggttgattattggtcgcaatggcgtagatcacacacgcgaaatcctccgccatggcaatggtgtccgcccccatttcagggccgggctacgcttttgcccgaaagccgcaactattcggaatatcgagaatcatgagcgcgttttaccgagagaaggttctttccgtccaccattggaccgacacgctgttcagcttccgcgccacgcgcgataccggcttccggttccagaacggccagttcgccatgatcggcctcgaggtcgacggtcgtccgctgctgcgggcctacagcatggcgagcgccaaccacgaggaagagctggaattcttctcgatcaaggttcaggacggcccgctgacgtcgcgcctgcagaagatcaaggaaggcgacaccatcctggtcggccgcaaggcgacgggcacgctgatcaccgacaacctgcttcccggcaagcggctgatgctgctgtcgaccggcaccggccttgcgcccttcgcgagcctgatcaaggatcccgaggtctatgagcagttcgagagcatcgtgctggtgcacggctgccgccaggtctccgagctcgcctatggcgagaagctcgtcgcgaccctgcgcgaggacgagctgttcggggagctgctcgcggacaagctcgtctattatccgaccgtgacccgcgagccgttcaggaatcgcggtcgcatcaccgacctcatcagctccgagcagatattcaacgacatcgggcagtcgcccctcgacatcgaaaccgaccgcatcatgatgtgcggcagcccggcgatgctcgaagagctgaaggcgatgttcgagagccgcgacttcgtggaaggctccggcaacaagcccggccattttgtgatcgagaaggccttcgtcgagcggtaagctcggttggaaagtggcgtgatcgtgcgccacgttcagctcgtcgtcccggctctgccgctcaagcttgcccgggacggcagctctgtctggtggcggctgtcgcccttccatcctcttgctgcaccgcaacccggtccatcgggctgattgatttctctcggccggattcgctagcctgaaacaagggccgcgtcatatccgtatgacaggcgcgggcgtatcgtagcgccttctggcgagaggatgtgatcgtggccgaggacaacaagacgcagcaatctcccaaacgtctgccgctggcggaagaggggatcatggagaccctgctgcttccattctcgccccgcttcattgtgctgacgatctgcgcgatcgtcaccgcgcttctcatcggcatcggcctggcggatcgcaagatcttcgacatcatgctggtcccgatcctgatcttcggcgcgctgacgctgctcggggtgcgcgatctcctgcagaagagccacgcggtgctgcgcaactacccgatctccgcgcatatccgcttcctgctcgaagagatccggcccgagatgcggcagtatttcttcgagagcgagaaggacggcatgccgttctcgcgcgacacccgcgcggtggtctatcagcgcgcgaagatggagctggacaagcggccgttcggcacccaggaggacgtctaccgcgaaggctacgagtggatgcatcattcggtgtcgccgaagccgcatgccgcggaaaaattccgtgtcgtcatcggcgggccggattgcgcaaagccctactccgcctcggtgttcaacatctccgcgatgagttttggcgcactcagccccaacgccgttcgggcgctgaatgccggcgcgaagaagggcggcttcgcgcacgacaccggcgagggcggcgtcagcccctaccaccgcgagatgggcggcgacatcatctgggagatcggctcgggctatttcggctgccgccatctcgacggcaccttcgatcccgaagcgttcgcgcgcgtcgcgagcgacgaccagatcaagatggtcgagctcaaggtcagccagggcgccaagccgggccacggcggcgtgctgcctgcggcgaaggtctcggaggagatctccaagatacgaggcgtagcgatgggtgaggactgcatctcgccggcctcgcaccgcgccttctccacgccggtcggcatgatgcagttcgtcgccgagatgcgccgcctctccggcggcaagccggccggtttcaagctgtgcatcgggcacccctgggagttcctggcgatctgcaaggcgatgctgcagaccggcatctatccggatttcatcgtcgttgacggcaatgagggcggcaccggagccgcgccgctggaattcatggatcatctgggcatgccgatgcgcgagggcgtcaatttcgtccacaacgcgctggtcggcatcaatgcgcgcgaccgcatcaagatcggcgcctcgggcaagatcgcgaccgctttcgacatggcgcgcgcgatggcgatcggcgccgattactgcaactcggcgcgcggcttcatgttctcgctcggctgcatccagtcgctgagctgccacaccgaccgctgcccgaccggagtcgcgacgcaggatccgacgcgcgcccgcgcgctctacgtgccgctcaagatcgatcgcgtgtacaattatcaccacgcgacgctgcactcgctgacggagctgatcgccgcggccggcctcgaccatccgcagcagctgcggccgatccacttcacccagcgcagctcgacgacggacgtgaaatcgtttgcgcagctctatccggcgctgcgcccgggcgagctgctcgaaggcactgaagacccgcgatttcgcgacgcctggcgaatggcgcgcccggagacgtttcagccggcgctgtaggatgccggctgcctgattcatcccgacttcagcccgcacttaacgtttgtttcaactttgggtgtaaattgggctcatgggcgacgaacgacgcagcagggcgagacatcgcgtgctgaaggccggaacgatcgagttcggcggcggcgcgatcgactgcaccgtccgcaacctttccgacaccggtgcggcgctcgatgtcacgagccccgtcggcatccccgagcgcttcaccctcttcgttcaggcggatggaactcaccgggcctgtaccgtggtatggcgcaaggaaaggcggatcggcgtgaagttcgggtaaggccacacaggcgtgctgaactcacgccgcggcctgctcgctccgccgggtcgccaggatcttgtcgatcctgcgcccgtcgagatcgaccacctcaatgcgccagccgccggcgtcgaaggcatcgccggcgctgggcagcacgttgaactgttgcagcacgaggccggccactgtgttgtagcggtgcggcggcaattcgatgccgagcagctcgccgaattcgtcggccggcatccagccggagatcaggagcgagtcgtcggcgcgcctgacataggccggctccggcggtcccgcctcggaatggaaggccccgacaatggactcgaggatgtcggcagccgtcaccatgccttcgaaggaaccgtattcgtcatagacgaaaccgacgtgaaccggcgcagctttcaggatggccagcacgtcgcgcgcatcagccgacaccggaatgccgggcgcctcgcgcaccagcgcgcgcaggtcaggatcgcgctcgttcatataggcgaccagcaggtccttggcctggagcacgccgatcggcgtgtcgcggtccccgtcggagacgggaaagcgcgaatgcgggctcttggcgatgatttcctggatgaccgccggatcgtcgttcaggtcgatctcgtcgacctccgtgcgcggcgtcatgaccgcaccgaccggccgatcgccgagccgcatcacgcccgcgatcatctctttctcgccgggctcgagcacgcccgcgctctcggcctcgctgacgaggtgatggatctcgtcctccgagaccttctcgtccgctttgccgccgcggccgagcagcgtgaggatcagctttcccgagacgtcgagcagaaagacgagcggcagcgatattttcgcgagcacgtgcatcgcgggcgcgaccctgactgcgatgctttcggggtcgcgaagcgcgacctgcttcggtaccagctcgccgacgatcagcgtcgcgtaggtgatgagcgtgacgacgatgccgacgccgacgatgtcggcaatgcccttggacagcccgagctcgagcagccattgcgtcagccgctgtccgagtgtcgcgcccgagaacgccccggagagcacgccgaccagggtgatgccgatctgcaccgtcgagagaaacttgccgggatcggcggccagcgtcagcgcccgctcggcgccgcgcacgcccttggccgcgagcagcgacagacgcgccggacgtgacgagaccacggccagctcggacatggagagcaggccattgatgacgatcagcacgacgacgatagcgagttcgagtgagagcattgaccttccggaggtaaataagtgtgtcgcgcatcggcgcgccagtcactgatataggtattactgaggagaatgcgggcaattctgcgtatttggcatcgaagggaacccgcgtccgccagcggtatccaggccgccgcgacgacctgacgctccgcggaactacggatcgttgcttaacggggtcttagtggcccgacggctaggtttcgacattgcagaaatctagctggggactgaaagatgcggattgggaagctcttcgcactgtcgatgctgacggtgacggtatttgcagtcatcctcggcgcagaggtgctgataccccaggcgcgcatcttcacgaaccgctcggacgcgatcaaaaccgtcgacgcttttggcgcgacgctgatggccagccagcacgtcgcgagccttcgcgcgccctacatcggaccgatcttccaggaaggcgctgcgacgcaggcgcagctcgaagctgcgacgaaggctgcgaaagctgccgaggcgggcttcgaggcggcacggcgcgctgtcctggtgctggatgacggggccgccatcgccgagaatatcgaccgggccgcacggcgactgaaggatatcaccaccgctgccgatcgggcgatgagcgttccgctcgcggcgcgtgacagcgcggcgacaaagggcttcctgcccggtgttgccgaggtcatcggccacatcgaaccggtcatgaaccgtctcgaggcaaaggtcgtcaatgtcgattcctcgctggccgcactcctgagcctggcgcgaacggctcaggatctgcgtgtctcggccggcagccgcgccgccacgctgtccccggcgctctccgcacgccgcccgctcaccgcggctgaactgtcgctgatggaccgcatgcagggacgcgtggaggccgatcgcgagcgcatcgaggccggagtcgaccagcttggaaatcccgcccgcatcgccgccgcgctgaaggcggcaacggaatcctacttcggacaagcagcggtcgccgtggacaaggagcttcctgcggcccggagcgacggcaagtacggcgccacggcggacgagctcgcgaaagtcatcgtgccggcgatccagatgttctacggcgtgcgtgacgccgcgctggcggaagcagccgcgcgcgcctccgccgcgcgcgacggcgcgctggcgatgctcgcgctcgccgctgtcgtcgtgacggcgctgctcgggacgctcgctggcgtgacgatcatgttgcgcaggcgcgtggtgacgccgcttgcgaagctcgccgacgtgatcggggtgctcgccgcaggacggcacgaggtcgagatccctgcaacgggccgcaacgacgagatcggccaggtcgcgggctcgctccagcacttcaaggattcgctgctcgccaagaaggccgccgacgaggccgccgcggccgaagccgaagcgaagctcaagcgcagccagcgcatggaccagatcgcgcgcgagttcgaagccatgatcggcgacgtgatcaataccgtctcgtcggcctcctcggagctggaagcgtcggcgggaacgttgacgagcacggccgagcagtcggaaaaggtcaccgcgacggtggcggccgcgtccgagcaggcctcgaccaacgtgcagaccgtcgccgccgcggccgaggagatggcctcgtctgtggacgagatcagccgtcaagtccaggattccgcgcgcatcgccggcgaggcagtgcagcaggcgacgcgcaccaatgatcatgtcggcgagctcgccagggccgcgggccgcatcggcgacgtcgtcgagctcatcagccagatcgccggccagaccaatcttctggccctcaacgccaccatcgaggcggcgcgcgccggcgaggccggccgcggctttgccgtcgtcgcctccgaggtcaaggcgctggccgagcagaccgccaaggccaccggcgagatcagccagcagatctccggcatccaggccgcgannnnnnnnnnctccgtcggcgccatcaaggcgatcggcgacaccatcacgcgcatgtccgagatcgcgtccgccatcgcatcggcggtcgaggagcagggcgcggcgacgcgggagatctctcgcaacgttcagcaggccgcgcgcggcacccagcaggtctccgccagcatcgtcgacgtgcagcgcggcgccagccagaccggatcggcctccgccaacgtgctgacgtccgcgaagtcgctgtccggcgagagcacccgtctcaaggccgaggtcggaaaattcctggacgcgatccgggtggcgtaaaggccgcagaatattggctcgatgcaagccgaggacaagaacacctctcccctccggggagaggtgaacgaccatcgagcccgtgctgaataggctcagaactccccgtgcagccgccccgagaacaccgacacgggtccgcgatcggcgttgtaggcggggttgacgatgagctggtagtcgccggtgagggtgaggttcttgttcagcgcgtaggcgtaataagtctcgaggatgcgctccttgcggtagttgagcgcgccgtcgccgacgagaacgccgaggccgccggcggcgaggaagtcgcgatagtcccgagaaatcgcgttgatggcgccgccgatgccgatcacgtcgtcggagcgcccccatgccgcgcccctgatcgagaggccgccggacaggctgcgatgaatgtcggtgaaggcgagggtttcggtcctgccgtcgttccagctccagcggccgaacagcccgacatcgtccgtgatcgcctgctcgacgttgagcacatagccgtacttcaggcggccgcgccgggtccgcgcgatgtcgaggttgagtccgggattgtccagcgtctcgcggaagctgcccatattggcgctgtccagccagcctatggtcctgagcttgccggggcggccgaacagcgagagccgggtctcgagctcgagtaagtattgcccgcgctccccgaccctggtgtcgaagtgattcccattggactccgccaccatcaggaaatagccgccgcgcagtgcccattgccgctggttgagttcggcagtgacgccgtaggtgaggccgactctgtcggcggaatagtcgaaggcgccgggcgcccagatcgaccaattcatgaaatcccggcgggtgtcctttgcataggcattgccgtcgaacacgtccaccaccgcgaacttgccggcctgcagggtgaggcgtgacacgtcggccttctgggcgagctgcagctggccgctcgcgagctcctcctgctcgccgccaaatccaaacgtctggcgcacgaacaggcgcgaggcgttgtaatgtgggtaagggaagttcgacttctgcgcctcgccgttgggaaagcccgctgcaccgacggtatcgttcaatccaaaaccctgaagcagttcgggattgtaatagacctcgccgccgtcccagagccgtgcgttcaggaacaggctgttgctccacgtcgccttggcctgccgcgacggcgagagcgagttcggtccgctatagagcgcgggaaatgacggatagccttgcggcagataggtgctttggccgtggatctcccagcgatcggattccgtgtcgaaaagagagcttttcgggttgtagctcggcaggcccggccaatcgaccttgcgattgaggccgaggcggatggcgtgcatgttcaacgtcgatgcgtagttcacgcccgacggaaagctcaccgccgcgcggtcgaaaccctgatagagatattcgagccgtgccgtccagtgcggcgcaaacccgtattcgaggccggctccagccgcccaaccgagtctcgtgtgcagtcgcctgtcctcgacgtcgttgatgggcgtcgagagaaagcgctcgccggcaaaggcgagcccgccggtcgcgtaaaggagccagttgccgctggtgtagccaagccgcgcgcgcaggctcgcgacatagtcccagcgctcctccgcgctcgacagcccggtcgcagccgatgacacgacgtgattggagggcaggtagttcggaaacgagatgtcgccttcgacgccgagcaggacccccgagctgaggcgccaattgtagccggcctggacgcccccggtcatgccgttgaacacgtggttgtcggtcgcgaccgtgggatcggcgagcgtggccgaggacgtgccgcgggtgaatccggtgtgcatgccgatatagagtccggtccagtcgtagaccgctttcaaggcgggggccttcagcaccagatcagccgcctggccggcggcgggaaaagccagcgcgccccaggcaatcgccgcagccgtccgcaaggacctgtaacggtgacctctcaacgtcaaaacgcatgcccccaaacgcaagtctattccacccgccgcagtatccctgccgattcgcaggggccctgtcatcaagcctcaatcgtccacgcgaaccgatgcaacttagccccaagttcccacggctaccgcagcattattgcaattcattcgcaactgcaaaatgtggggattgctgcaagtggatgcttcgcactgctttgtgacgggggtgcaacaacggctccggcgcaggaaatggatgaccccgcccggggggacagccggacggggtcgggggcacgacacggggtggatgaggcgcccgtgtcggacacaggatccacgtgagatcggcctcagatactcagatcagtagcaggtacgaacgcggccgacgtactggccgaaggcgttgtattgggcgacccagccgcagcgatgatagccgtagtaataggggtcgttgctggcagccatcgcggagccgacgacggcggcggtggcgaggccggcacccataccccagacccaggcgggctgcttggcttcagccgaggaggtggtggacacgatgctgccggcgacggcgagggcagcgaaggcgacggcggcaatcttggtcctggtcgacatgagaactccatccggattgaggcggtccgttgtggcccgcgtgcccaattggacggagcctcttcgcgtccggttcgaatccggcggatgaggcgctggtgcgcgcccttttcccgaacgaatccagatggatgtgagctaaccgagggggcctttggccagcctgttcacgtcgaagttatcgacctcgccgagcagctcgcaaaagcccgtcgcgccctgatcgatcagctgctcgcctttctcggccaccgccagcgtcgcattgccgactgcaccgctggcattcagatcctgcgcctgccaggcgaacggcgccggacgctgggtcgacagccagcgatactgccgctccatcgcgatgctgcttgcaggaaaatccgcgatcgcgctcttgcgcacctggtcgggatagcgcgccagcatgatcgaggtctcgaccgcgccgccgtgaatgccgtggcgtacttcatcggccgggaacagcttgtcggcgccggagagccgcgaccacgacgtcgtcaccacgaacagcttccgatgcgcgcgaagatcctgcgccaccagcatcatggccgcgctgttgccgccatggctggtgacgatgacgagcttcttcacgccgcggcgtgcgacgtcctcgccgatccccgtccatctcttcagcgcggtttcggtcggcagcgtctgcgtccccggaaagtcgatatgctcggtggagatcccgattgtctcgaccggcaggaaacaggccggaacggacgccggcaacaactcgcgtacgcgcgccagataggcgtccgcgatcagtacgtcggttgtcacaggcagatgcgggccgtgctgctccgtcgcagccagcggcagcaccgcgatccatcgcgacacatccgcgaggctcgcatgagcccagtcgatgtcgatccagtcgcgaggcggcgtcatcaaggtttccctgcctgaatttgtcacgtaatttggggtatgaggggacgcgggcccggccggctcgcgtcccctggcgtcatgcggttctatcgcgtcgcgttcatatcggccagccacgatcgacggagtgccatcatgaccccctctcatttgcggctagcgctaacggcgggcctgatcgccgctctggtcgctcttgcaccggcccgggccgagacgctggacaaggtcaccttcggcaccaactgggtcgccgaggccgagcatggcggcttcttccaggcggtcgccgacggcacctacaagaaatacgggcttgacgtcactatcgtcccgggcggccccaacgagaacaaccgcatgctgctgatcgcgggcaagatcgatttcttcatggccgcgaacacgctgatgtcgttcgacgcggtcaccaacaacgtgcctgtcgtcaccatcgccgcgattttccagaaggatccgcaggtgatgctgacgcatccggacgcgaaggtcggcaagatcgaggacctcaagccgctgacgctgttcgtctccaaggagggcatgaccagctacttccagtggctgaaatccgaatacggtttcggcgagaagaacgttcgtccctacaatttcaatccgcagcccttcatcgccaatcccaagagcgcgatgcagggctacgtcacctccgagcctttcgcggtcgagaaggcggccggcttcaagcccaacgtgctgctgcttgcggattacggcttcaacacctattcgaccctgatcgagacgcgccgcgacatcgtcgagaagaagcccgaccttgtccagcgcttcgtcgatgcttccatgatcggctggtacaactacctctaccgcgataactccgccggcaatgccatgatcaagaagctcaatccggagatgaccgacgatctgctcgcctattccgtcgccaagatgaaggagcacggcatcgtcgattccggcgacagcctgaagaacggcatcggcgcgatgagcgacgagcgctatacttccttcttcaacaagatggtgaaggccggcgtcgtgaaggcggacctcgacttccgcaaatcctatacgctgcgcttcgtcaacaagggcgtcggcgtcgagctgcgccccaacaagccgtagcgcatgccgggaccaatccacggtgtagcggcgtcgcccacctctccccgatggggagaggtcaaagacgcggcgcgaccgagctccacaacggccgcccatcaatgatggcgaatccgacgccacccaccgtcgaggccaagctgacggctctcgccgtcagcctgcgcggcgtgacgaaagcctatgacaacggcgtaatggcgctcggccccctcgaccttgccgtgcgcaagggcgacttcatctcgctgctggggccgtccggctgcggcaagtcgacggccctgcgcatcatcgcaggcctcactgcggcgtcttcaggcacggtgcgggtggcgcggccggagggcgagatgcagccgggccacggcatcggattcgtgtttcaggagccgaccctgatgccctggaccagcgtgcgcgagaacgtgaggctgcctctgaggcttggtcggattccgaaggcggaggcatgcgcgcgtgccgacgcggcgctcgccagcgtcgggctggccgatttcgccgacgcctatccgcgcgagctctccggcggcatgaagatgcgggtgtcgctcgcgcgcgcgctcgtcaccgatcccgacattctgctgatggacgagccgttcgcggcgctcgacgagatcacgcgcttccgcctcaacaacgatctgctggcgctatggcgagcgctcggtaagaccgtcatcttcgtcacccattcggtgttcgaatccgtctacctgtcacagcgcgtcatcgtgatgaccgcgcggcccggccggatccaggccgacatccgcatcgagaccgtcgagccgcgagccgaggagtttcgcacctcggccgcctattcggactactgccgaagagtgtcggctgcgctggcgccatcctatgcgggacggtcgacgctatgaccgcgcaagctgccgtcaccgcaaaaccgtccggcgcacgacgcgcgatgcgtttcgtgcttcccctcatcgtgttcgcggcggggctcatcgcctgggagctgctggtccgcctcaaggggatcccgccctatgtgttgccggcgccgtctgtcatcgtcctgacgctgataaaggactgggccgtgctttcgcaatcgctggccaccacgctgctgaccacgctggagggttttgtcgccgccagcatcggcgggattgcgctggcgctgctgttcaaccagtcgaaatgggtggagtactcgctgttcccctatgcagtcgtgcttcaggtgacgccggtcatcgcgattgcgccgctgcttctgatctatctcgagcagcagactgcggtcgtggtgtgcgccttcatcgtcgccttcttcccggtgctgtccaacaccacgctcgggctgaattcggtcgatcgcaacctcgccggcctgttccagctctatggcgcctcgccgcagcagaccctgcgctttctcaagctgcccgcggccttgccctacattcttggcggcctgcgcatcgccggcggcctgtcgctgatcggcgcggtcgtcgccgagatcgcggcgggaacagccggcgccggctccggcctcgcctacaggatcgcggaatcgggatatcgcctgaacataccccgcatgttcgcggcgctgcttctgttgtcgctcgccgggattgtcatctatggggtgctggcgctagtttcgcacctcgttttgcggcgctggcatgagagcgcgcttggaaaggaagactgatgaccgccggttcgatttcgtccgagaagatcgaccttctgatctatgggccggtgcggccgatcctagaaaacggcttctccgatcatttcgtcgtgcacaaggccgagacgcgcggcgatctcgagcggctgacgccggcggtccgcgacaagatccgcggtgtcgcggtgacctatcacaccgtgcgcgccgacagggattcgctgtcgcagctgcccaagctggaaatggtggcgagctttggtgtcggctacgaccacatcgatgccaaatatgcggccgaacacgacatcatcgtcaccaacacgcccgacgtgctgaccgaggaggtcgccgacgttgcgatgggcctcttgatcgccaccctgcgcgagttcatcaaggccgaccgctatgtccgctccgggctctggcagacccagaactatccgctgagcgtcggttcgctgcgcgaccgcaaggtgggcatcgtcggcatgggccggatcggccaggccatcgcgcgccggctcgatgcctcgctggtgccggtggtctatcactcccgcaatccgtccaaggacgtttcctacaagcactatcccgatctgatcgagatggcgaaggcggtggacacgttgatggtgatcgtgcccggcggcgcctcgaccaacaagatgatcaatgccgaggtgctgaaggcgctcggcccgcgcggcgtgctgatcaacgtcgcgcgcggctcggtggtcgacgagccggcgctgatccaggcgctgaaatccggcaccattctcgccgccggcctcgacgtgttcgcggccgagccgaacgtgccggacgagctcaagtccatgcagaacgtcgtgctgctgccgcatatcggctcggcctcggtggtgacgcgcaacgcgatggaccagctcgtggtcgacaacctcaaggcctggttcgccggcaaggcgccgttgacgccggtcgcggaaacgccggtcaaggggcgctgatgaccgcgcctcggctcctcgcattcgccatcatggcatgtgcagccgcggtgggttctgcgcgtgcgcaggatgcgacgagcctgaagaagcagatgcccggtcagtgggagctctcgaccaccgagcgcagcaagacctgcgtcgtcacgctgaagggtgatgccgctggccagggcttaaagctggagctcgagccggcctgcaagacggcgctgcccttcaccaaggacatcgtcgcctggagcgtcaggggactcgacatcgtccgcctgcaggatgcggccggcgaggccgtcatcgacttcaccgaggtcgaggccggcatcttcgagggcttgcggcagggcgaaggcgtctacatcctgcaggatctcgccgccgcgcgttccatggcgaagtcgatggaccagatgatcggcgactggtcgatggtgcgcggcaacggccagccggtctgcgggctgacgctgaccaacaccgaagcggacccggacaatttccaggtcttcctcaagccgagatgcgacgcggcggttgcgcagttcaatccgacgcaatggcgcctcgagcgcggccagatcatcctgatgtcgaaatcgggtgaggcctggcaattcgaggccgacgatcacgcccaatggcgtcgtgtccccgacaccgccgatcccctgatcatgctgcggcagtaggcggcggctgataacgttgatgccgtgccgcgtttggtcgggtcccgacggggacgaactcggatgggccgaagatcgcctgccaaggcaattcccgttcgaacttttctcgcatctggagagaccaagacgggaatcgctcaaattcgatcgggctttgacatgaaactgtttgccctggccttctcgtgtcttctgcttttcgcggtgtccgccagcgcgaatgacacccgcaccttcaatgcgatggtcgcattggccaatcgcggagattccgaggcgcaatatcatgtgggcatgatgtacaacaacggcatcggcacgcagcaggatcgcagtcgggccttcgagtggtttcagaaatcggccgccgccaacgaccccctcggtgcctacaagctcggctgctactatgacggacaaggcgcaggcatcatcacaaccgacgcggatcaagcactgaagtacaagctcgttgccgccaatgcgggttatgcgcgtgcccagcacgatgtcgctctcacatatgaccggcgaggcaatccggaagaagcgctgaaatggtggaagctggcgggcgatcaggggcttcccgaggctctcttcagcctgtcccgcgcctattcggccggaaagggaacgccgagagatttgtcactgtcgtatgcctatttcaagctctcgaaggtggcgccggcgaagaacgtgaacgagatggcttccatgttgtccaagcccgagctcgagaaagccgagaaactcgctgccgcatggaagccgcgaccgaccgccctgacgctcaaggcattcgccggcatcacagccgcggaagaccatttgaaagccgccaggaaccaagtgttctgatctggcctaaatcaaccgcattccacgcaagctcgcgtggccattcttgcccacgatgatgtggtcgtgcacggcaatgccgagcggcttggcgatgtcgatgatggccttcgtcatctggatgtcggcctgcgacggcgagggatcgccgcttggatggttatgcaccaggatcagcgcggtcgcggagagctccagcgcgcgcttgatcacctcgcgcggatagaccggcgtgtggtcgacggtgccggtctgctgcacctcgtcggcaatcagctggttgcgcttgtcgaggaagagcaggcggaattgctccttgtcggcaaaggccatgctggtgcggcaataatcgatcacctcgttccaggacgacagcgcgttgcggctgttgacgccgcccttggcgatgcggtgcgccgccgcggcgatcagcttgagctggttgaccgcggcctctccgacgccgtggacctcgcgcaagcgcgccaccggggcatggacgacctcggcgaacgagccgaacgtcttgatcagcgatttcgccagcggcttggtgtcgcgccgcggcagcgccggaaacagcgccatctccagcagctcgtagtcgctgagggcatccgcgcccgcgctgtagaagcgctcgcgcagccgctcgcgatggccgtgatagtgcggcgcctcggcggatggattgtctggctggtcggtcttgcggggcatcggcgcaaggatgccgcgccgggcggtttttgcagctctgaagtgctgcgcgacgtccggcggcggcgagaaatcaggcgccgcgcgaacacggagcctttcgcattcacggcttgcggcgcgatcaggccttgacggcggcgaaggcgtagccgttgccgtccttggccagcgtgccgacgttcggaaagccgaaatgatagccggcgatcatccccttttcggcgattacgcggtcgaagaaggcgcgccgcgtggcttccgccttcggcccgtcgctgtcgaagccggagaaccagccggggttcttgacgaacagctgatagatgccggtgacgtcgctctggatgaagagctgctgcccgccggaggccaccaggaaggacatgtggccgatcgtgtgacccggcgtggcgatggccttgacgccgggcgcgaggtcggcgccgtcgccatactgcttgatgttcttccaggtcgggaaggtcgcctgaatccgcttgacgtgggggcgattggcctcgggcactttctccaccagggccgcatcggtccagaacttgtactccacttcgggcatcatgatttccgcgttcggaaatacctgcgcgtcggtttccttcacccacaggcccgaaatgtgatccggatggaaatgcgagatgaccaccgtcgataccgtcgccggatcgagtccggcagccttcatgttgctcgcaagcttgccgacgctggcggggccgttgccgccgaaaccggcgtcgaacagcacgaccttgccgccggtacggatggcggtgaccgtaaaggggttgtcgatcttgtcgggcccgatgccggctgcggtcagcgccttcttgacctcgtcgagcccggcattcttgaccatgccctcggtcaccggccgttcgatcgagccttcatggaggctgaacacctcgatgtcgccgaccttgtatttgaggctgtcggcggcgcgctgtgcagaagcggctccgatgaaagacactggtccgttgaggccgaagaccagtgccgccccggtgcttccgaggaccagatcccggcgtgaaatctcgaacattgtggtgctccctttgagtgaatcctcgggcggcgcttttcatgggttgaatgcgcccgccatggttcgacaccgggatgcgtggcctattccatggcgattgtcgtgcagggaacggcaagatgacgcagtcaggctgcggtcttgagaacaatttgcaacaaagagcgtgcgcttacgctgccgcccacggcttctcgccgtgccgctccgacagcgtgaagatctccacgcccgtcgccgtgacgccgaccgagtgctcgaactgcgccgacagcgagcggtcgcgggtgaccgcggtccagccgtcggagaggatcttcacatgcggcttgccgagattgatcatcggctcgatcgtgaagaacatgccgggcttgagctgaacgccctcgccgggccggccgacatggatgatgttcggctcgtcgtggaacatgcgcccgaggccatggccgcagaagtcgcgcaccacgctcatgccctgcggctcgacgaagctctggatggcatggccgatgtcgccggtggtggcgccgggcttcaccgcggcgatgccgcgcatcatcgcttcataggtgacctcgatcagccgctcggccttgcgcgcgatcgggccgatcgcatacatccggctggaatcgccataccacccgtcgacgatgaaggtgacgtcgatgttgacgatgtcgccttccttcagcggacggtcgccgggcatgccgtggcagaccacgtgattgagggaggtgcaggtggagtagcgatagccgcgatacatcagcgtcgccggataggcgccgtggctgaaggcgaagtcgcggacgaattcgtcgatcttcgaggtcggcacgcccggcccgacgatgtcagtgagctcgtcgaggcattttgccaccagcgcccccgccttgcgcatgcctgcaaaggcgttcggcccatgcagcttgatctgtccggtcttgcgcagggatgtatcggtggcttcgacgtagctcatgcgtgtcaggtcttccgggtcttatctcgattcggtggaaaggcttgatttcaggccccaatctaatgattggcggccttcatgcaagccaaggcagggcgttttcgagcgaagtggcgaccggttcgcgcgaagaaaacgcgtcaaaacaggggccttgccggtccggggggacgaaagcagcctaatccgggacttccacggtggtttccaccggcaggacgccgccgcggatgcggatttcgcggacggggtagggaacccggatgccttcgcgcttgaacgcgtcccacagcgccagcatcacgtcgctcttgacggtgtccatgccgtcgggatccgcaagccacaaggtcagcgagaacttcatcccggcctccgcaaactcggtcaggatacagttcggcggcttgcccttctgggcgcgtggatgagcggcggcgatctcggtcgcgagcttgcagactagcttcggatcggcgtcgtaattggtgccgaaggcgatcttcaccagcgtgttcttgtcggtgtaggtccagttgacgaccttctgcgtcaccagatcctcgttcgggaccaggaactcgcggccgtcgccggcggcgacggagatgtatcgcgtcttcatcgcgctgatgcgaccggtattgtcgccgatggtgacgagatcgccgggcttcaccgacttgtcggcgagcaggatgatgcccgagatgaaattggcgacgatcttctgcaggccgataccgatgccgacgccgaccgcgccggagaacaccgcgagcgccgacagatcgatgccgacggcgccgagcgcaatgacgattgcgacggccagaagcccgatgcggatgatcttcatcagcagcacctgcaccgacggcgtcaggtcggtggtcgcgttgatccggctctcggcgaaattgctcgcgatattcgtgagccagagcgcgatgaggaggagggcgccggccttgatcgccaggagcggggtcaacctgagaccgccgagcacgatcgcgaaggaatcaagcaggtcgacggtcgcatcgagctgaccgacgatggagagcgccgcgaccagccacgccgtgaccgacaccaccttgacgatgaaggcgttgcgcagcaccgaggtgacgagccggattaccagccaggcgaagcccagcttggctgcgaccatcaggagatagctgcggcttggccaggtcgcatggtacatcacgacccgcgagatgatcacgagcaacgtgaacaccgccgtggaagcgctggcgatcatcacccgcgcgaagtgccggagcggcagcggccaccgcatcgccagcgaggtcatgtcgagacggctgcgaatggcggcttcggccgcataggcgataccggccgcggccaggatgagaccgaattgcaggtagaaccagggtgaggagatttccgctccgacgctgcgtgcggtcgtctgcacgaactccatgaagtctttgaggtccatgtccgtcggtctcgtcagggaagcggaggagggattgatgcgagggggccggagaatcccacaaggggcacggccgagccatcgatacaccgccaagtgaagcgcgttaaggccgtaaaatcctggcagattgccgcgagccgcagaaaatgggttggcgcgagagtccaccgacgatatggatgcaattccagcgaattttgcccggaaggtggatggcttccctcgattccgtcagtctcgccatattgctcggctccgtcctcgtcatggccggcatcctgtccagcctgcttgcgctgcgcttcggcgcgcccctgctgctggtcttccttgcgatcggcatgctcgccggcgattccggcccggggcagctccagttcgacgacgtccgcaccacctatttggtcggctcggtcgcgctggccctgatcctgttcgacggcggcttgcggacgcgctttgccagcatccgcaccgtgctggcaccctcggtggcgctggcgaccatcggcgtgctgctgaccgctttgatcacggcacccttcgcgaagtacgcgctcgacctcaactggtcggaatcgctgctggtcggcgccgtggtggcctcgaccgacgcggccgccgtgttcctgctggtgcacacccagggcctgcgcctgcgcccgcgcgtcggcgcgacgctggaggtggaatccggcacaaacgatccgttcgcgatcttcctcacgctgatgctggtggaatacatctcgctgggctcgagctcgcccggccatgtgctgatggagttcgtcctggaggcggtgctgggcgccatcgtcggcatcatcggcggccgcctcgtcgtgatggcgctcaacaaggtcgccttgccgcaggggctgcatgcgccgttcgtggccacggcagcgctcgtcatcttcggcggctcgcagatcatgcacgcctccggctttctcgcggtctatcttgccggcatcatcataggcaaccggccgacgcgcgcgcataattcggtggtgaccttcctcgatgccgcaacctggctggcgcagatcgtcatgttcgtgctgctcggccttttggtctcgccgagccggctcggcaccagcatattgccggcggtcgccgtcgcgctcgtcctgatgctggtggcgcggccgctcgcggtgttcctgtgccttgcaccgttccgcttcaactggcgcgaaaggatattcatcgcctggacgggcctgcgcggcgccgtcgcgatcttcctggcgtcgatccccatgctggtcggcctgtccaaggcctatctttatttcgacgtcgccttcgtcgtcgtcatcatctcgctgttgctgcagggctggaccctggcggccgccgcgcgcaagctgcacgtggcactgccgcgcgtcgagcgcggcccgcgccgcgtcgagctggacctgccgggccagctcgagcagcagctcgtcggctatccggtgcggcccaagagcctgtatttccgccgcggcctgatcccgtcctggtccaagccgacgctggtgatccgcaacgagcacatcctgacgccgacggaagccgacccggtcgcgcccggcgactacatctatctgctggcaccgccggaaaaagccgagtcgctcgaccggttcttcgtcgacatgcagccgagctcggcgccagatccgcatttgctcggcgacttcgtggtgtccggcgagcacacgctggccgagctcgccgagatctacggcgtgatggtgagcgaggatgcgagcaagctcacgctcgccgattatttcgacgtgcatctcgaccacgcgcccaaggagggcgccgagctcgccctggataccatcgtcctcgtggcgcgcagcatctccggcggccgcgtcaacgtcgtcggcctgcgcctgcccgaggaggacgagaccccgccgccgctgacgcgcgcgcaagcgctgcggaagaagctcgcggatgtgtgggcctcggtggcgggggtctagcctttcctcgtcatttgcgaggacgttggccctacggggctacgccagcaccttcacgccgccgagactcgtcacccgcccctgcttcagcatcacgatctgcgtggcgagctggcgcagctcggcgacgtcgtggctgacatagaccatcggcacgttggcctcgtcgcgcagccgcaccagatatggcaggatctcgagcttgcggccctcgtcgagcgcgcccagcggctcgtcgagcagcagcagccgtggcttcgacagcagcgcgcgcccgagcgcaacgcgctggcgctcgccgccggagagcttgccggggcggcgatcctgcagcgcgccgatgtcgaggaggtcaatgatgcgcttgtgctgcgccggatcgaaggcaagcccgttcatccgccgtccgtagtcgaggttctgcgccacgctcagatgcggaaacagccgcgcatcctggaacacatagccgatgcggcggcggtatgtgggcacgtgaatgccggccgcggtgtcgtccaccgtctcgccgtcgatcacgatggtgccgcgatccggccgcaacagccccgcgatcatgttgaccagcgatgtcttgccggcaccggaggcgccgaacaggccgatgacgcgcccttcgctgctgaaggatgcatgcagcgagaagtcgccgagctgcttttcgatgtcgacccgcagcatggtcaattcccgtgcaggcgctgcgtggcgcggcgggcgaaccactcggcggcgatgagtgcaccgagcgccagcacgatcgagacgatcaccagccgtcccgcagcggcatcgccgtccggcgcctggatcagcgaatagatcgccgaggagatcgtctgcgtctcgccggggatattggagacgaaggtgatggtcgcgccgaactcgccgatcgctttggcgaagcccagcaccatgccggcgagcacgccgggcagcgccagcggcaacgtcaccgtgaggaacactttccacggcgccgcgccaagcgtctttgccgcctgctcgagccgtcggtcgatcgcctcgatcgacagccgcatcgggcgcaccagcagcggaaacgacatcacgccgcaggcgagcgccgcgccggtccagcggaacgagaacacgatgccgagatggtcggcgaggaagccgccaacgaggccgcggcggccgaacgtcagcaggagcagatagccggtcacgaccggcggcagcaccagaggcagatgaacgagggcatcgagcagcgacttgccccagaagtcacgccgcgccagcagccacgccagcgcaatgccgaatggcgtcgccaccagcgttgcgatgatggcgaccctgagcgagagcaggatcgccgtccattcggcgggagaaatctcggtcatcgagccccagctatcacgtcgcaagacctaagttacgggactgatcaggaacttgaagccgtacttctcaaaaatggacttggccgccgtggagcgcaggaaggtcagatagccgctggtctcggactttgccgtggtggttgcggcgaccggatagatgatcgcgggatgcgaatccgccggaaaggtgccgacgaccttcacgcccggctcgaccttggcgtcggtggaatagacgatcccgagcgcggcctcgccgcgtgcgaccagcgtcagcgcggcgcgcacgctctctgccatcgcgaatttcggctccgcggcctgccaggcgccgagcctttcaagcgcagccttggcatatttgccgacaggtacagatttgacgtcgcccgtcgcgatcctgccgtcgccggcgagcctggcgagatcgaagccttgcgcgacagtcacgttgtcgatcctggaatccttgggcgcgatcagcacgatgctgttgccgagcaggttgactctggaaggctcgttgatggtctttttggagatcgcgtagtccatccagtcggtgtcggcggacacgaacacgtcggccggcgcgccctgctcgatctgcttggcgagcaccgagcttgcggcatagctgaccgagaacttgacaccggtcctggcggtataggccgcgtcgatctcgtccagcgcgttcttcatggaggccgcggcgaacacggtgatggtcttgtcctcggcgaccgcaggtgagaggggtgcggtggcaaggatcacgaaggcggcgagaagccgggacagacgaaacatggatgcgctccgtgcgagctcgcgcgcgcaggaggcgcgcaatctggcgttggttgggtcagatgcgacgggcggacgcgctgttccacgtggccttgcgacggcttacgaccggcagggatatcgcaattgcgaagatagcaggccaggtcggaaggtcaaacctggtgcgtcatcccgggctcgcttcgcgcccccgggacgacagcgatgggcgaggcggcagcttgccttccgccgcaaccttaccgcttcgcatcgccggcgtgcagcaccgctttgcaggccgccggcatctgggccagcgtcatcgtcggcttcggctttggcggctccggcggcggcttggggtgcagcaccgcgtcggaaaaccaataggcgagatccgcgggcttgcagccttcgtcctcggcctgtgacggctggccctcgcatgcgccggcaccggcagggcagcgcatgcggatgtggaagtgatagtcgtggccccaccaggggcggatcttcgacagccatgcgcgatcacccttggcctcgcggcacaccgccttcttgatcgcggcgttgacgaagatgcgctgcaccgcgggctcccgcgccgcatcgcgcaacaccagcacatggcccggcgtgaacaccttgggatcgacgtcgagccggtcgggccgcaccatcatcacggccgacatctcctcccgctcctcgcgcgagagccggcggttcggcatcggcgtcagccagatgtcggcatcgaggccgatctggtggctggcatggcccgaaagcgccggcccgccgcgcggctgggcgatgtcgccgaccaggatgcccggccatcccgcatccctgtgggccttcgccgcgagccgcttgatcagcgcgatcatgtccgggtggccgtagctgcggttgcgcgacaggcgcatcacctgccaatgctcgccgctgaccggaatctgctccgcgccgccgatgcagcccctggtataggagccgatgacatgggccggccccttcgacggcagcagctttcgcgcgaacagctccttggcggcgagatcggggtcgttcggattggcgagcggcggcagcggcttcggggtgacgctgcccttgtcctgggccagcgcgccgccggcgcccgggaaagccaatgcaagcaggaggagggtgatgccgcggcgactcatgctgtcgtccttataacgcaattgccgcatcagggttaagaactcaggcttctgttccggccgcaggctcgcggcacaggagctcagtcaaaccgcgcctcgaactgccgtttcttaactgtgcaataaccctgtcccgcattgaccaaaatacgtgcgcggcgggcggaataactgcggcctggcatgcaatcgcgtgcgatttcggaactgattcaggtgcgcgcgcaattttgcgccagatcgatccctgattgcggcgctgaacccattttgacggtgcctgccgtcgcagccgcgcctcgcaaacaggcagcaaggtccgcctcgcgcggatcgccaccgggcaagattacttttttttcagacacttgtctcaagactcgcggccgccgggcgcactgggacgcgtgaagttgagtttgaaatctcgaagaacaagaaagcgaacgcaaagcgtgcttgcaagcgtcggcaaaagggcgcgcaagccgcgctttgcggtcgcgtcgcgagttccttccgagcgcagcgaagtgctgcgcagccgtgccgaggcggaagccgcgatcgcggaagcacgcaaatcccatgaacgcctgcgccaggccatcgatatgctgccgcagggcatcgtgtttctcgatgctgaaggccgctacgtcctctggaacaagaagtacgccgagatctacagcaagaccgccgacctgtttgcggaaggagcgcgccttgaggacacgctgcgcatcggcgtggcccgcggcgactatcccgaggccgtcggcaacgaggacgagtggatctccgagcgcctgcaaaagctctatcagcccggtgcgcgccacgagcagaagctgtcggacggccgcgtcatcctgatcgacgagcgtctgaccgatgacggcggcgtcgtcggcctgcgcgtcgacattaccgagttgaagcagcgcgaggcttcgttccgcctgctgttcgagggcaatcccgtgcccatgatcgtctgcgcgctggacgacgagcgcatcatcgccgtcaacgacgccgcggtcgcgcactacggctacagccgcgccgagttcgagcggctgaagatccgctccttgcaggcctttgacagcgagccgccctggaccgccgacgtgaccggggaggagcaggcaggccgcacctggaagcacgtcaaggcagacggcgcgctgatcgaccttgcgatctattcccgcgagctgacttatgccgagcggcccgcggtgctgctcgcgctgatggacatcaccgagcgcaagcgcgccgaggcgcggctcgccttcatgtcccagcacgacggtctgaccggcctgcccaatcgcagcctgctgcgtcagcaggtcgacgagatgctgctgcatacgcggcgcagccccgagaaggtcgcgctcctgatgctggggctcgacagtttcaaggccgtcaacgacacgctcggacatgcggtcggcgataagctcctgcgcggcgtcgcgaagcggttgcgttccacccttcgtgaggaagacgcgctggcgcggctcaattccgacgagttcgcgatcgtgcaaagcgggctgacgcgccccgaggacgcggtgatgctggccaagcgcctcctggcggcgatcgccgatccctatctgctcgacggccattccgtggtcatcggcgcctcgatcggcattgcgatggcgcccggcgacggcgacgattccgagaagctgctcaagagcgccgacatggcgttgtcgcgcgccaagctggacgcgcgcggcaccttcgccttcttcgaggccgcgctcgacgccaaggcgcagagccgccgcaagatcgaggtcgagctgcgcgatgcgatccagaacgacgtgctgcgaccctattaccagccgctgatcgacctccagagcggccgcatcaccggcttcgaggcgttggtgcgctggccgcatgcggagcgaggcatggtctcgccggccgagttcatcccggtcgccgaggacaccggcctgatcaatccgctcggcgggcagatgctgcgccgggcctgcctggatgccgcggcctggcccgacgacgtccgcgtcgcggtcaacctgtcgccgctgcagttccgcagcggcaatctgctctcggtggtgacggacgcgctgaaacattccggcttgccgccgcgccggctcgagctcgagatcaccgagaccctgctattggagaagagcgcccagatcctggcgacgctgcatgcgctgcgcgcgctcggggtgcgcatctcgatggacgatttcggcaccggctattccagcctcagctatttgcgaagcttcccgttcgacaagatcaagatcgaccagtccttcgtgcgcgatctcggctccaaccgcgaagcccaggcgatcattcgctccatcgtcagcctcgggaagggcttgggcgtcaccatcaccgccgagggtgtcgagaccgaggccgagctgagctgtctccgcgccgaaggctgccatgagggccagggcttcctgttcagcaaggcccggccccatgcggagatcgtcagcctgctggcggcgcagcgcggcatcgacggcaacgaggacgccgccctggtggcgtgaggccgttaacgggtccgcaagggtgctgcactccctcgcccctctttcaaggggcgaggtgaagagatctcaggctgcccgcagtccggccagaaacgtatccacgcttcggatcagcaccgaggcatgttgtcccagctcgcccgtggcaaccatgacgtcgccggccagcgcccgggactggtcggcggactggctggcgccggcgacattggccgagacgtccgtggtgccggccgatgcctgctgcacgctgcgggcgatctcccgcgttgccgagccctgttcctcgaccgcggcagcgatcgtgttggcgatgccgctgatctcgcggatggtgtcgctgatgccggagattgcggtgacgcaatttccggtggcggcctggattgcggtgacctggcttgcgatctcgtcggtcgccttcgcggtctggctcgccagctccttcacttcggcggcgaccacggcaaagccgcggccggcttcgcccgcgcgggcggcctcgatcgtggcgttgagcgcgagcaggttggtctggctggcgatttcgctgatcagccgcagcacgtcgccgatgcgctcggcggcggtggcaaggctcgtgaccatctcggtcgtctccgcggccttgcggacggcgccgctcgcaacctcgctggaatgggtgacctgacggccgatctcgttaacggatgaggccagctcctccgtcgctgccgcgacggcattgacgctggccgaggcttcctcggaggccgtcgctgcggcggaagctcgctgcgaggtgccgttgacgctggtggtgatctcgccggccacgctctgcatgccctcggtcgcctttgccacggcggccaccacgcccttgacgtcggcctcgaagcggtcggccatctggcgctggagtgcctgcttctcgatctcggccctggccctgtccgcttcctgcgcctcgcgcagggcgcccgcctcgagcatgttgcggcggaacacgtcgaccgccttggccatggtgccgagttcgtccgtgcgttcgcttccgggaatggtgacgctggtatcgccgctcgacagccggttcatgaccgcagtgatcgcggtaagcggccgcgacaggcctcgcccgagcagcagggccagcacgatcgtgacggcaaggatcgcaagcgtgccgaggatcaggttgcgctcggctgtggcgaacgcggcctcatactcgctcgtgtccttgatgatctcgagcacgccgacgggcgctcccgcatagttcttgataagtccggcatagacctcgactggatgaccgtcgagctcggccgcatgccggaccaccgaaccgtcgattgcgttcttcagctgatccagcgtggtgacgaccgtgtcgccaaaggttgacgacagcttgttcaggttcttgccgtcgagcgagtagactgcgaggtcgatgccaaagcgcttcttggcgcggtcgacgaattccttgccgaaggctgcgccgatatcaacgttggcaaggcttttgccgcctcgcacgatcggtgtcatgccgaagatgccaagcgcctcccggccgggctcgacgccgacgatctgccggccgcccttgatcgcctcgaccacggtctcccggcgcgccgagacgtcatcgccgaacaccttgggagcatgtacacggtaaaatgcgaccgcgggcggaacctggaaggtgatgagtgggataccctgcgctttcagcgatttgttggcctcgccgagcagtgcggccaggctgtcgcggtcgcccttcgctatggcatcgccaaccggcggcagcgccgcgatcacggcggagacggccagtgccgaacgcccttcatagtcgatcgccgcaatcacgctctcatattgcagcttgagctgctgatcgagcgccatccgcgtcagcgcccgctgctgggtgatcgagaagccggagaggatggcgcaggccactgccactgtgagtgcgatggcgaggatcaggcgggcggcaatcgacttgatcttgaacatgaacaattcccgggtatttccaaattctgctttggtgggaatggttgcagaaattgcttaacaataaggccggatggcccccgtgttttaacggagacgccgtcatccctttgcatgactcgctgcaacgggcgcatggagggctggtggttcgccgcgagcaaaggcaacgcgcgcagtcattcctgcaggcgaccagtgcaagtcgcggaaccggcgtgagcggtcgaagcccgatgttgatccatctggctgatgggaccaggcgacgcgtcgttcgacgccggagcatcgttcgaacgcgagggcctcgccaccattcctggatctcagcgacgagggcaacgcggcgagatgctttctggaccatagcaaagcggcaatgtaccttcaccggcggaccatacggcaagaccacgtcccgcgaggcgatcgggcaagcgcgcgccgacggggcggtgctccgatgacgaaaggcagtgcgcgggagtgaattggaattcgaccataccggcacctctgaaggagcgcgatcttcggatcgatctctttcggggcctttccctatggtggatctatatcaatcacatcccggaaacttatctcaacaggttcacgcccaagaatttcggcttcagcgatgcggcagagattctcgtgtttctgtcgggcctggcgtccggcatcgtgtacggcgatctgttgcgcagctccggctttgcggcggcgagcctgcgcatgttgcggcgttcgttcgaaatctatatcgcgcagattttgacggtcgtcctgttgctggcggaagtgtcctacatcgcggcatggcagctcgacatgttcgatcacgccaacctggccgtcctgctgcaacagcccgcagaaacactgctgcaggccgcgctgctgcgatatacgccggtcaatctggatcctctgctcctgatggtcatacttcacttcgcgctcgttctcatcgtgccgttgacgatcggcgcctggccgctggccctggccggatccgtggctctttatgtttgcgcccacctgttcgactggtacatcccggcctatccaaaggggcaactctacttcaatccgctgaactggcagttgctgttcgtgatcggcatctggtggggagcgaaccgcggtgattggcagctcgccattctcaactcccggacgcttgccgtcctggcggcgggctatgtgctgttctcgttcgtgatcactctgggctggcagattcacgcgatcgaagcctatgtgccggcctggctgtcgcgtctgatctatcctgtcgacaagaccaatctcgacatcttgcgattgttgcattttgctgcgctcgcgctgctctgttggcgttttcttccaagcaatgccagcatcttgaaagccagatcgctggtgccgctgatacggtgcggcgagtattcgctcgcgatctattgcgtcagcgttctgctgtcctttgcggcccatgcgctgctcagcctgggctcgaacggcctggcatcgcagacgctggtcaccctgctgggcttgggcctgatgagcgccctggcgatgtcgctcgccgcgattgatcgcggcgtcttgcccaatctcaggccattgtaggtcgaccgcgaccgcacaggcgcatcatgcagatgtcagaccgcggcgcgaccgagatcgagcgatggccggcgcctggtcggaaagctcagcgccactgcgacggcggcgaggccgatcgcgaatgagccggcgtgcagccaggtgtagcgctggaagttatcgaacacgattccgccggcccagggccccagcgccatgccgaggctggcgaaggccgacaccgcgccgaacacggtgcccatgatgcgcgcgccgaagtattcgcggaccagcaccgcatagagcggcatcaccccgccataggcgaggccgaacaccaccgagagcgcgtagaattcgccgagttgcgccaccgcgagataggtcgcgatgcacatcgcctgcacgaacagcccgccgaccagcacgggcttcgcgcccatgcgatcggccagcacgcccagcagcaggcgtcctccgaggccggagacgccggcgacgctgtagaccgtcaccgccgtgagcggggcgatgccacagaccatcgcataggacaccatgtggaagatcgggccggaatgcgcggcgcaacaggcgaaatgggccgcggcgagtgcgatgaattgcggcgtgcgcagcgcctgcgctgcggtcagctcaacggcggctgcctcgtccgccgtcgccggcgcgggggccgccggcgccggacgcaccaggaagcaggcggggatcaacagcgcccaggcggcaatgccgatcaccagcatcgcggtgcgccagtcataggccgtgatcagccagctcgcggccggcgcgatcgtcaccggagaaacgcccatgccggcggagaccagcgccaccgcaaggctgcggttcttctcgatccaggcgctcgcgagcgccatcatcggtgcatagaagctgccgacggcgatgccgatcagaacgccgaagcaaagctggaactgccacagggttgtcgcctggctcgccgtcaccagcccgagccccagcagcaggcttcccgagagcaccacgatgcgggtgccgaaacgatccgacaacgtgccccacaggaacgcggcaaatcccatgcagaggaaatccagcgtcgccgccgccgagacgccggcgcgcgaccagcccatcgcttccgagatcggctgcagaaacaccgcgagcgacagcatcgtgccgaacccgacacaggtcatcagtgcgcccgcggcgacaacgacccagccatagtcgaagcgtgctggcctgctcatgcgtttccccgcgctgtttgtcttgttggtggtgcgcggcgggatggtggcctaacttccgcgcgagggcaaggtggccgcaacggcacgctgacactgtctgtccgccttggtagcatgccttggtccccggcctgcgaggttgttctcatgagcgcacacacaggaatgtgtgaggagacaagttcaatgaggcgggaagcgctctgcaggctgcgcgattgtcgcaggctgttcgtttccgtcattttcgccgtcgcggtctcggcacctccggcatgcgcacaggacggcagaagctcgctgggtgagccggggccggtcttctcggacagcggtcccgacgccgaactctacggcgcggccgagggctatccggtcggcacccgggccacagccactcagctcgacaagctggtcggcgtctacagccgtttcggcgacatccatcgctcgcgcacggttcgtcgcgcggcggcgccgtggcacttcaagcgcgcgcctgagccatcgataacgtacagctttggtaccgaacggctgagcatcggggactatctcaagcgcaacccggtgacagggctcctgatcgccagggacgacaccatcctgtacgagcactatcaatattcgcggaccgaccgcgaccgctttctctcgcagtccatggcgaagacgctggtggccatgctggtcgggatctcggtctcggaggggcggatcaagtcgatcgacgacgtcgtctcgacctacgtccccgccctcgcaggaacggaatatggcaacacatcgctgcgcgctttgttgaacatgtcgtcgggcgtcgcgttttccgaagtctatgatgggaaagatgacattgcccggctgaggcgggcgctgtttgctggtgagccgagagaccccgcggagatcgtcgcgcaattcaacaaccggaccgcaccaccggggaccagatggcactatgcaagcgttgagaccgagatactcggcctggtcctgcgctccgtcaccggcacgccggtcgccgactatctccacgatcggatctgggaccccatcggcaccgaagcggatgcgtcgtgggcgatagacggtagcgggcaggagatcgcgttctgctgcttcaacgcaaccttgcgggactacgcgcgcctggcccgcttgctcgcccatgacggcgcttgggaaggtcggcagctgatcccgcggcagtggctgctggatgccacgaccgtcaggcccgaggatcgccatctcgctccgcgcgtggccacgccctatttcggatacggctatcaggtgtggctccttccgggcgagcagcgccgatttgctctgcgcggcattcgcggtcaggtcatcctggtcgatccggcctccaagctcgtcatggtgcacactgccgttcgcaagaagccgaccgagcccggaggcctcagggagccgctcgcgttgtggtctgccgtgcttcagcaactcgggcaatgacgacctgacgccgccttatataccccagatatttgcgacgaccgtgtcggcgccggcgagtttcgatcgtcctaggtccacaatcgcggacctgccgcggatggcccggcacccgggatgtcgtcagctcgactgcaagaattgaactggagaataccgatgaggatcaccgtcgaaaccagcgtagcagccccgatcgatcaggtctggcgtgcctatacgacgcctgccgatatcgtgaagtggaatgcggcgtccgacgactggcatacgaccaaggcgacggtcgacctgcgggagggcggggctttctcgtcccgaatggaagccaaggacggcagcatgggcttcgacttcgccggcacctacacgaagatcgtggagcacaagcggatcgagtacgcgttcggcgaccgcaaggccgaggtcgagttcgtgcccggcgcgaatggcgtcctcgtccgcgttgtcttcgatgccgaaacgacgcactcagaggagcagcagcggggcggttggcaggcgatcctcgataatttcgcgcgatacgtcgaggcgaagcagaaggtgtgaatgttcggcgagccggacgcactgactgcgcctgcatcacacaccctgcgatgctgacaccgtacccctgttttgcccgacggagcaagcccacttcgcaaaatcgaaaaggcgcaagcccgccacgagggcggctactgtgcatggggttgttttcgcggttttgtgtcgcggggtgctgaacgggtcggccgaaccggtcccgcgacgaattctgctccacatcgtcgtcatggtcgggcttgcccggccatctacggctcttgtcgctccagaaacgtgaatgcccgggacgagcccgggcatgacggcggttcgcgacgagtgaagccccgttgctcagctatccaccttcagtgcggcaatgaaggcctcctgcgggatgtcgaccttgccgaactgccgcatcttcttcttgccttccttctgcttctccagaagcttgcgcttgcgcgtgatgtcgccgccgtagcacttggcggtgacgtccttgcgcagcgcgcgcaccgtctcgcgcgcgatcaccttgccgccgatcgccgcctggatcgggatctggaacatgtgcggcgggatcagctccttcatcttctcgaccatggcgcggccacgtccctcggcgcgggtgcgatggaccagcatcgagagcgcgtcgaccggctcgccattgaccaggatctgcatcttgaccagatcggccggcttgtagtcggtgaggtgatagtcgaacgaggcgtagcccttggagaccgacttcaggcggtcgtagaagtcgaacacgacctcgttgagcggcaggtcgtatttcaccatggcgcgggagccgacataggtgagctccttctgggagccgcggcggtcctggcacagcttcaggacgctgccgagatattcgtccggcgtcaggatcgtcgcctcgatccagggctcgtcgatctccgcgatcttgaccacatcgggcatgtcgacgggattgtggatctcgatctcctggccgtcggtgagcttcatcttgtagatgacgctcggcgcagtcgcgatcaggttgaggtcgaactcgcgcgacagccgctcctggatgatctcgaggtgcagcagcccgaggaagccgcagcggaagccgaagccgagcgcggcagaggtctccatctcgaaggagaagctggcgtcgttgaggcgcagcttgcccatcgcggcgcgcagcgtctcgaagtcgtcggcatcgaccgggaacaggccgcagaacacgacggggatcgcgggcttgaagcccggcagcatctcggcgaccggcttcctgtcgtcggtgatggtgtcgccgacgcgggtgtcggcgacttccttgatcgcggcggtgatgaagccgatctcgccggggccgagctcctcgacctgctgcatcttcggcgtgaagaagccgacgcgctcgacgtcgtaagccgcgcccgtgcccatcatgcgcacgcgctggcccttccgcatcgtgccgtcgacgatgcgcaccagcacgacgacgccgagatagacgtcgtaccagctgtcgaccaggagcgccttcagcgtcgcgtcgcgatcgcccttcggcggcggcaggcgggtgacgatggcctccagcacgtcgggaacgccgaggccggtcttggccgagatcatcactgcatccgaggcgtcgatgccgatgacatcctcgatctgctgcttgaccttctcgggctcggcggcgggcagatcgaccttgttcaggaccggaacgatctcgtgattgttgtcgagcgcctggtacacgttggcgagcgtctgcgcttcgacgccctggctggcgtcgaccacgagcagggaaccctcgcacgccgccagcgaccgcgagacttcgtaggcgaagtcgacatggccgggcgtgtccatcaggttgaagatgtaatccttgccgtccttggcgcggtactgaaggcgcaccgtctgcgccttgatggtgatgccgcgctcgcgctcgatgtccatggaatcgagcacctgctccttgcccgccatctcgcggtcggagaggccgcccgtcatctggatcaggcggtcggccagcgtcgatttgccatggtcgatatgggcgacgatggagaagttgcggatgttggaaatggggacggtcgtcatgggcgcgggataccactcacatccccgtgcggcaaccatattgctgtaatttcagggtctttgttcacgccaagctgattccaacacgggccaaaacgcgctacgcacggcccatgtccaggctcatgtccaccacctcgattccctctgcccgaccgcgcgtcagaacccgggtgagttatgaccgcttccgggcctggctggttgcctgcgcggtccgccccgaggcgcgcctgtggctggtgatccagttcgccatcctgcatgcggtgctctggaccttcatcctgatcaatctcaaggcggcgcaggacgttcacatggacgtcgcagaagcctggggctggggccagaaattcctctggggctatggcaagcccccgccgctgtcgggctgggtggccggcctctggttcagcgcgttcccggcggcggactgggcgacctatgcgctcgcgatgacgacggtgagcgtcggcatggtgatctgctggttcgtgagcttgcgcgtggtggatgcgcgccgcgcgttcctcgtcgtggtgatgatcgcgctctatccgatcttcaatttcaagggattcaagtacaacccggatctgttgcagctcgtcacgctgccgctgttggtgctcgcttatctgaacgcattcgagaggcggagctggcaatccggaatcctgctcggcctcgccggcgcgctggcgctgatgaccaagtattgggtgctgaccatgatcggcgccatcggtcttgccgcgctgatccatccggagcggctgcgcttcctgtcgtcgcctgcgccgtgggtcgcgatcgtgacgatggtcgcggcgatgatcccgcacatcgtgtggcttgcagatgcgcatttcgtgccgctgacctatgccggcgacacctacagcctcgccgacagcgctcaggtgcaccagctcgtcgcgggctacgtgctgcataatctcggactgctggccctgccggtggcgctcgcggcgctggccatggcgctggtgccgccttggggcaggctgctgctgcgcgccccctcgcgcatcgtcacgcgtgcctgggcgcgcggcggcagttccggcgtcaatgcctcgcaggcgctgaacgtctggatcatccaggtcatcgtcgccctcggcccgccgctcggtgcgctggtcttcagcatctacatgaagaccgattggggcatctcgctgttcttcctggtgccgctcgccctggtcgcgattccgacgctgcgcgtgcagggcgccgtgctgttcaacatcgccgcgatctggctcgtgctcagcgtcgcgacactcgctgcctcgccctggatcgccgcgcgggagatggcggccaatgccggcaacaccgcgacctacggcgcgcgctcggagctggcgcgcgagctgacccaggcctggcacgcgcgctttgcctcgcgctgggccgtcgtcgccggcaccatggagtcgatccagccgatggtgttctacagcccggatcatccgtccgcattgctgccgctcgaggcctgggattccgggttgacctcgcgcgatgacgccaagacgtacggcttcatcggcgtgttcgatccgaccgacggccggctgcccaagttcgagaaatgggtggcggaagtcgcgcccaacgccgagcgcatcgtgatgacgacgcgccgcttcacccacggcaaggccggcccggcgatgagctggaacatctacatcgcgccaccggcgaagtgagcttgctgtcgttcccaacgcgcgcgacgcgtgaatacggtgcgcgattgcgcacctgagaacttcgagatcccggaggtgatgcttcgcaccatcccggaatgacgatcgggcctaaaccccttcctcgttgaacttgctctcgaccagctcggtgatcgccgcgagcgccgcttcggcatcggtgccggcggcggataccgtgatcgtcgtgccgggccctgcggcgagcatcatcaggcccatgatcgaggtgccgccgacggtctcgccgccgcgcgtcacccacacctgtgcatcgaagcgctcgaccgcctggacgaacttcgcggaggcgcgggcatgcaggccgcgcttgttgacgataagaagatccttggagatcgcgcccgcgggcacgcctgtccccgcttgtgacgcctcgtcgctcatttgccggcgagcacgcggctggcgatggtgacgtatttgcggcccgcttcctgggccatcgcgatcgcatcgggcagcgaccgctcctcgcgcaccttggcgagcttcaccagcatgggcaggttgatgccggcgagcacttcgaccttgggccggctcatgcaggatattgcgaggttcgagggcgtgccgccgaacatgtcggtgaggatggcaacgccgtcgccggaatcgacgcggttgaccgcctcgatgatgtcgcttcggcagagatcggaatcgtcttcggcgccgatcgtgatcgcctcgatttgtttttgcggacccatgacatgctcaagcgccgccttgaattcgtcggcaaggcgcccgtgggtcacaagtactagaccaatcatcggaaaactcctcgcgggcgcttttggtgcaccgcacgaacgcgccactttgaccatccagagcccccgcgcaagaggggatgttgcgtatctccctgaatatagacggatggataaggggagctgcgccggtcactcggtcgcgatactggggttcatatggttaccatttcccttcaaacaatcgccggaaaggttaacggaagatgaactcttggtagtggtcaaggccgcgacaaccaggggaaggggcgaatagtcgcgggccaccgggattcgcggtatttcgacacccaaaatgctggttttcagggactcggctgggggcagtcgctccgcgtccgcggcatgcagatcgacgacgagaccgacggtcgcatgctccacgaagtcgcagctgcggatgccgaggccccggatctcgatcagtcccaccagcggcgcggcggggcggacctcaatttcatggccgactgtcgccagatggacacggtcatcgccgaccagaacggtcctttcgaccaggccggcgcgtcccgccatgatcaaatcaaacgcgaggcgcgacttgcccgagccggagggcccgcggatcagcaccgcacaagtcccgaccatgacggcggaggcgtgaacgctgggcccatcgctcatagcgccggcagcctcaccacgaagcgcgcgcctgatacggtcgggacgccttcgtcatcgggcgggcctgcgcggttctcggcccagatgcgtccgccatgggcgtcgacgatctgcttggagatcgacaggccgaggccggagttctggccaaatccctgatgcggtcggtcggtgtagaagcgctcgaagatgcgctccagcgcgtcgtcgcgaatgccgggaccatcatcgtcgaccacgatctcgatctcgccgcggacccggcggcaggtgaggcgcaccttgctgccgcgttcggagaacgattgtgcgttggagagcaggttggagacgacctgtccgagccgcgaatcgtggccgctcacggcgaaggtgtcggtcgggctgcggccctcgaagcgggtctcgaccgcgacgtcgtggccgagcttggtctcgttggcgaccgacaccagcgtcgtcagcaggcggcgcaaatcgaccgggaccgcatcctgccgctgcagctcggcatcgagccggctggcgtcggagatgtcggagatcagccggtcgagccgcttgacgtcgtgttcgatcacctcgaggaggcgtgcgcggctgttctcattgcgcgcgagcggcagcgtctcgaccgccgagcgcagcgaggtcagcgggttcttcaattcatgggcgacgtcggcggcgaacatctcgatcgcctcgatgcggctgtagagcgcgctggtcatgtcgcgcagcgcgccggagagatggccgatctcgtcgcggcggcgggtgaaatcgggaatctcgatgcgggccttgatgcggcggcggacgcgctcggcactgtcggcgagccggcgcacggggcccgcgatggtgctcgcgagcaagagcgagagcatgatcatgacggcggcggcgacaccaccgaccttcaggatggcgaggcgctcggcggtgaccatctgatcgatgtcgtcgccttgcgtcgacagcatcaaggcgccgtgaatggcccgcgagcgcagcacggggacggcgaccgagacgatcacctcgccgcgcgcattcacccgcaccatcgagcgcttctgcccttgaagcgcgtcgcccacctccgcatagccattgccgttctcgggcccgagctcccgataaagcggcaggtcgccgcgattcagccaggtgcgcactgcgaccatgccgcgctcgacgaaaccgggcttggcggccggaggcggcagatcgaagcggagcacgttctcgaggtttcggctgtcgagcagcaggctgccgttcggatcgtagatgcgggcgcgggtcttggtcggcgagatcagcgtgcgcagcaccggcgcgacgcgctcgggattgatcgggaagtccagcggcgaatactcgtccgggccgccataggtctcgcccggcttgaggtcgagcagcctgtcggggtcgatggtgatggcgttggtctgcaccgtcgcggaggccgcgatcgccccggcgatgatctcggcctgcaccaacaggctctgcgcgcgcgcgtcgatcaggccggcgcggaattgcgacagatagaggatgctcgcaaccagcgccacgaggccggcgagattgagggagacgatgcggcgggtcaggctcgagaaggagagagcgaagaagaactgcccggcgcgcttcagccagttcagcggccggaagcctgacggcttgtcctcggcaacgagctcctgaacgccgttggaggtgctatccccggcgctcgggttgggatcaggctgcgttcggtcaagcaatgcttacgcccgcgttaggacaagtggtcgagaaggtccccgcaccctagagcatgatccggaaaagcgtgcagcggttttccgaacagaccatgctcaaacgataacccaaagcgcgagacgcttcatcccgttctcatcgcgctttagagcgatcccggccccgatggaaatcgggcccggcgatgctcctggtcgtttgtgaggctgcagagcctcaggcctccttgaaacgatagccgacaccgtagagcgtctcgatcatctcgaactcgttgtcgaccaccttgaacttcttgcgcaaccgcttgatgtggctgtcgatggtgcggtcgtcgacatagacctggtcgtcataggcggcgtccatcagcgcgttgcggctcttcaccacaccgggacgggtcgcgagcgcctgcaggatcaggaattcggtgacggtgagcgtcaccggctcgttcttccaggtgcaggtatgccgttccggatccatgcgcaacaggccgcggtcgagcgccttggcgtcgttctccttcggcgcaacggtcggatccttcggcgccgagcgccgcagcaccgccttgacgcgttcgaccaggaggcgctgcgagaacggtttgcggatgaagtcgtcggcgcccatcttgaggccgaacaactcgtcgatctcctcgtccttcgaggtcaggaagatcaccggcaggtcggacttttgcctcagacggcgcagcgtctccatgccgtccatgcgcggcatcttgatgtcgaggatggcgagatcaggctgggtggtgcggaagccgtcgagcgcggaggcgccgtcggtgtaggtcatgatgcggtagccttcggcttccaaagcgatcgagacggatgtgagaatgttgcggtcgtcgtcgaccaaagcgattgtgggcatgagcctctgctttctgctttccgtttgggtcgtggcttgaaacggcgagcaatccagtgatgcgccgcatacatgggtgccgaagtggcgttcgaaccttgtcaccgagcaatgcaagctgggctgaagtgtgaccaagttccacgaaacacggcagattcgccgcatctcgacccataaccgggcccccgtttacccgaaaaaaggccccccacgcaaccacctgatccgagaaagccgatgcaaccgactcccgacttcgaccctggaaagctagccaaatcgctgctgaggcggtctcggcaaggcgccctggcgacgctgatgaccggcagcggcgatccctattgttccctcgtcaatctcgccagccaccccgacggctcgccgatcctgctgatctcgcgcctcgctgtgcacacgagaaacatcctcgcggacagccgggtctcgctgatgctggacgagcgcgtggccggcgatcccctggaaggggcccggatcatgctggcaggccgggcggaagaggcgggcgcagacaaggatctgcttcagcggcggtatctcgctgcccatccgtcggcagaaggctttgtttcctttacggatttttccttctttcggatccggccgacgggaactcacctggtcgccggatttggccggatcgtcgatctcaagcctgagcaattcctgacggatctcaccggcgccgaggacctgctggcggcagacgagggcgcggtcgagcacatgaatgccgaccatcgggacgccatgaacctctatgcgacaaggctcctcggtgcggcctcgggcgactggcgctgcaccggttgtgaccctgaaggcctcgatatgcagcacggccaggcgacgctgcggctggacttcccggagcgggtcacggacggcacagggctgcgcaagatgctggtccgcctcgctggtgaggcgcgcaagaaggtggagcagggcgcaacgccttgaacgccgccgcccgtcgcagcgacccaagccgtaaccggtccggttggcagcgaggagttatgacgcatcgacgtttggcactggcggtgggtgtagcactcgcgatcgccacctcatgtgccacggccgctctcgcccagaaggccagtccggccgcgcaaggtgcgcggatcagcgcgctcatgagcgccggcaaatatgcggaagcgcttccgctcgcccaggccatggtcgcgagcctggagaagaccaacgacggtcgcgaactgtccgccgcgctcaacaatctcggccaggtctatgccggccagggccgcgacgatctggccgagccggtctacaagcgcgccattgcgttgatggagaagtcgctcggcctcgacacgggcttgatcgcgcccgaactgaacaaccttgccgcactgtatcaacggcaaggccgcttcactgaagcggagccgctgttcaagcgcgcgctcgccgtcagcgaaaagagcctgtcgcgcgagcatcccgatataggccgagctttgaacaatctcgccacgctccatgtgaagcaagagcgttttgccgacgccgagccgctgtttcagcgggcgctcgcgatctatcatcaagccgccgggcccgagcatcccgctgttgcaaccgtcctgaacaacatcggtcagctcaatcgcgatctcaatcgcgacgccaatgccgaagcgccgatcaagcgctcgctcgcgattcgcgagaaagtgctggggccggagcatcccgacgtcgcccgctcgctcaacaatctagccgggctctacgagcaccagaagcgccatgcggaggcagagcccctttaccgccgggccctggcgatacgcgagcatgcactcggagccgatcaccctgacgtcgcgacctcgacgagcaatcttgctcatttcctgcaagcgacgggacggacggtcgacgctttgccgctcgcgcagaagacgctcggcgcgaaccgtgcgcagctgcccgtcgtgttgccgatcctgttcgctgcgcgccagcaatcgctgctggcgagcgacaaggcgctcgatgacgcgctcgcagcgatccagcgcggcacgcaatcctccgcagcgtctgccgtgaacaagcttgcggtgcggcttgccgccggcaccgaccggctcgccgagctcgtgcgcaaggaccaggatctcgcggccgaagctgaagcgctcgacaaggcgatcgtcgctgcggtgtcgaagtcctcggcgcaacgcgatgttggggccgagcagcgcagccggacgcggatcgcttcgattgcgaacgaacgcgcggccctgcagaagacgctcgccgtcgagtttcccgaatattcctcgctctccaatccgctcccgctggccgtgaaggacatccagccgttgctctcggccgacgaggcgatggtgatctattccgtcaccaagggtcagagctatgtggtcgcgatcacgcgcgagggtgtcgactggaaggagatcaatgtcggagcggatctgctggcgcagaaggtgtctgcttttcgcaaggggctcgacgtcggcaaggcgcgggacagctccggaaaatcgggactgttcgatcttgcgctggcgcacgagctctatctcgcgctgcttggcccggtcgaggtgctgacgaaggacaagcgtaacctgctggtcgtgccgtcggcggcgctgaccgcgctgccgttccatctgctggtcacggagaagccgcaggctccgatcccggacaagctcgaaggctatcgcgatgccacctggctgctgcggcgtcaggcggtctcggtgctaccgtcggtggtcagcctcaaatcccttcgggcctttgcgcgcagggaccacggcgtcaagccgatgaccggtttcggcgatcccgtgttcaaccctgctgaaggacccgccgatcgtcgtgccgcgggcggcaagatcgccgcgcgcagcatcgcgacgattgcctatgccgaattctggcgcggtgccggtgtcgatcgcgctcgactggctcaggcgttgccgcaactgcccgataccgccgatgagcttaacgcggtggcgagggacgtcggtgccgccgcggccgacatccatctcggccgcgaggccagcgaaacgacgctgaagcgtgcagcgcttgcccaatacggcatcgtctactttgccacccatggcctcgttgccggcgacgtcaagggattgggtgagccctcgcttgcactttccattcccgaccagccaacggagctcgacgacggcctgctgaccgcgagtgaggtggcccagctcaagctcaacgccgattgggtggtgctgtccgcctgcaacaccatcgccggggacaaacccggcgcggaagcgctgtcgggattggcgcgctcgttcttctatgccggcgcgcgcgcattgctggtctcgcattgggcggtggattccgaagcggccacccgcctgaccacgtcgacgttcgcgctgctcaagaacgaaccagcgatcgggcgtgccgaggccctgcgccgcgcgatgttaacgtttgttgatgacacctcctcgccccagaacgcctatccggcgatgtgggcgccattcgcactgatcggcgaacgcgaggtaagataagaagacgcgacgaggaattgtgcgtcgcaataaccagacataacgcgcaaccacgcctttggttgcgcgatcattgtggtttctgcatgcgtctactcagggctgacatgcgcgaagtttggcgtggtccttgaataaaccaaatcctgcgggatcagcttggcaacgccagcgttcatcagtattaggtcgttcagccgaggccgaatggcccattcatcacggtgaccgcgatggcgccaaacttggtcgcgctaagtgtcgcgggttctaggagggttttttcgtgcaagagacgggcgtgcgcaacggtgccttcggcgccgacaaattcggcttaaagaatctcaagcaggttcactggaatctgggtgcgccgcaactctatcaatactcgcttgctgcgggtgaggcggtgctctcctcggacggcgcgctctgtgccgacacgggcgagttcaccgggcgcagcccgaaagacaagttcacggtgcgtgacgccaccaccgacaagaagatgtggtgggccggcaaccagtcgatcaccgccgagcagttcgagacgctctatcaggatttcctcaagcacgccgaaggcaagcggctgttcgcgcaggacctctatggcggcgccgatccggcctatcggatcaagacgcgcgtcttcaccgagctcgcctggcactcgctgttcatccgcacgcttctgatccgccccgaggcaatcgagctgtcgaccttcgtgccggagctcaccatcatcgacatgccgagcttccgcgccgatcccaaacgccacggcgtgcgctcggagaacgtcgtcgcgatcgatttcgcccgcaagatcgtcctgatcggcgggtcttattatgccggcgagatgaagaagtcggtcttcaccacgctgaactactatctgcccgagcgcggcgtgatgccgatgcactgctcggccaatgtcggggccaagggcgacaccgcgatcttcttcggcctgtccggcaccggcaagaccacgctgtcggccgaccccaatcgcacgctgatcggcgacgacgagcacggctggggcccgaacggcgtgttcaatttcgagggcggctgctacgccaagtgcatcaagctgtcgaaggaagccgagccggagatttatgcggcatcgacccgcttcggcgcggtgctcgagaactgcgtgctcgacgaggacacacgcgtggtcgatttcgacgacggctccaagaccgagaacacgcgctcggcctacccgctcgacttcattccgaacgcctcgcgcaccggccgtgcgccgcagcccaagaacgtggtgatgctcgccgccgacgccttcggcgtgctgccgccgatcgccaagctctcgccggcgcaggcgatgtatcatttcctgtccggctacaccgccaaggtcgccggcaccgagcgcggtctcggcaacgagccgcagccggagttctccacctgcttcggctcgcccttcctgccgctcgacccctcggtctacggcaacatgctgcgcgacctcatcgcccagcacaatgtcgattgctggctggtcaatacggggtggaccggcggcaagtacggtgtcggctcgcgcatgccgatcaaggtgacgcgcgcgctgctcaccgcagcgctcgacggttcgcttcgcaacgtcgcattccgcaccgacaagtatttcggcttcgcggtccccaccgcgctgccgggcgtgcctcacgagatcctcaacccggtcaatacctggaaggacaaggacgagttcgacaagaccgcccgcgcgctggtcggcatgttccagaagaactttgccaagttcgaagcccaggtcgacgcggaagtgcgtgcggccgcgccggacgtgaagctggcggcggagtgatcgctctcccttcaatgcaaagggcggccgcaaggccgccctttttgtttgtcgcacaatctttccgccgtccttgatgagttcgtggacgcagctacgccttgaagtacgcgatctgcgtcgtggtcgcgagcaggcggccgttcggcgaccacagctcgccatgctgatcgccgtagctccggtgaaagatcttggcgtccgcggtcgccagcacgcgcgtggtgtcctcggcggcgaggttttcgctcgtggtgtggaagtaggtcgtcagcgacaccgtgccgaacggcaccagctcgcgtcgcgcatggaagacgcggccgaagaaggcgtccgacatcgacatcagcgacagcatgtcgagcttgcgcggcgtgcggtcgctgatccagagcttcgaataggtgctggcggggtcggcctgccgcgggccgatccgcatctcgccctcgacgaagcggaattcgtactggttggcccacgccgccgagatcttcgggaacggcagcgtctgttcgaacggcgtcgcgtcggggacctcgaccacccggtgctcccaggacggccggcgctcggcgaacacggcggtggcgagcgttgcgacctcgccgccgttctgcgacagctccacgctccaatgctggctggagcggttggccttcaccagccgcacgtcgagatcgaacgctcccttggcgatcggcgcgcagtaattgacggtcattgccaagggatcgccggtgcgttgcgggtgctccatcagcgcgcgcaggatggttgcggcggtggcgccgccgaacgggccgacgaaggcccagtaatcgtcgctggtgtgcccctgccagcttgagtcaccggcggggatgcgggtggcgtcgtcgaaggggtgcgggagcttggagtgcattgttggtcctcgatgcctccacagccgtcattgcgagggcagcgaagcaatccgggctctttccacggagacggtctggattgcttcgctgcgctcgcaatcacggcggttgaggttgcggcgtcgtgtcaccgtgccgccttggggatgatggcgatcatatcatcatcccttgcagaggatgcaataacctcgcaggtaacccgcttccacaccgcggaaaatcagcccgcggcgtcgcgcaggttcggcagcagcggcgtggtcggattgaccggcacgttccagatctcctcggcgtattcgcggatggtgcggtccgaggagaaccaggccatgcgcgcgacgttgaggatggaggcccgcgtccaggccggtatcacctgccagcgcgcatcgaccgcgcgctgcgcctcgtaataggaatcgaaatcggcgctgaccatgtaatggtcgagatagcgcagcgcatgcgcgatcgattcgaagcggccggggtcgccgggcgagaactcgccggcgccgatcgcattgatggcgcgctgcagtttcggcgaattgcggatcacgtccgatgcgtccagcccctgcttgcgccggatcatgacgtcgccggcttccatgccgaagatcgcgatgttctccgcgccgacatggtcgcggatctcgatattggcgccgtcgagcgtgccgatcgtgatggcgccgttgagcgccagcttcatgtttccggtgccggaggcttccatgccggcggtggagatctgctcggacaggtcggccgcgggaatgatcacctcggcgaggctgacattgtagtcaggcaggaacacgaccttgagcttgccgtcgattgcgggatcgttgttgacgatctcggcgacgtcgttgatcagcttgatgatgagcttggcgtagcgatagctcgccgcagccttgccggcgaagatcttcacccgcggcacccagttgccgttcggatcgtccttgatggcctggtacagcgcgaccgtctcgatgatgttgagcagctggcgcttgtactcgtggatacgcttgatctgcacgtcgaacagcgcgctcggatcgaccttgatgccgagccgctcgccgatcacgcgcgccagggccgtcttgttgtggtgcttgacgttgcggaatctcttctggaattcgacgtcgctcgcgcgcgcctcgatcaggccgagctgggtcggatcgtcgagcacggcatcgccgcaggtctcgcgcaacagctcggtcagcttcgggttcgccagcatcagccagcggcggaaggtgatgccgttggtcttgttggtgatgcggccgggatagagatggttgaggtcgtggaaaacggtctcgcgcatcaggtccgaatgcatcgccgagacgccgttgatgcggtgcgagccgacgaaggcgagctgccccatgcgcacacggcggccgctcttctcgtcgatcagcgagaccgaggcgcggaagtcgatgtcgccggggcagcgtgcttcggcgagcgccagatgctgcacgttgatacggtagatgatctccagatgccgaggcagcagccgctcgaacagctcgaccggccaggtctcgagcgcctcgggcagcagcgtgtggttggtgtaggagagggtggcgaccgtgatcttccaagcctcgtcccagcggaaattgtggaggtcgacgaggatccgcatcagctcggttacggcgaggctcggatgggggtcgttgagctgcaccgcgaccttgcctgccaggctgcgcaactgcccatcggacgacagatgtcgcttgaccaggtcctgaagcgaggcggagacgaagaaatattcctggcgcagccgcagctcgcggcccgccgggctctcgtcgttcggatagaggaacttgcagatcgcctccgcgcgcgcctgttcggcgctggcgctgacgtaatcgcccttgttgaacgcgtcgagcttgagcggatcgggcgagcgggccgaccacagccggagcgcattgacgtgctggccgcgccagcccacgatcggcgtgtcataggcgatggcctgcacggtctcggccggatgccagatcgcgcggtcgcggcccttgtcgtcgacatgctcgacgccgccgccgaaattgacgtcgtagatcacctcgggccgctgcaactcccaggggttgccgaagcccagccattcgtccggatattcctgctgccagccctgattgatgatctggcgaaacaggccgtaatcgtagcggatgccgtagccgatcgcggggatcgacagcgtcgccatgctctccatgaagcatgccgcgagccggccgaggccgccattgccgagcgcggcgtctggctcgcatttgcgcaactcgggcagcgagacgccgagatcgccgagcgcgagctcgaagatattcagaaggcccatattgttgagcgcgtcggtgaacaggcgaccgatcaggaattcgagcgagagataatagacccgcttgcgcccggtatcgtagctgtgcttctcggccgtgagccagcgatgcacgatgcggtcgcgcagcgccagcgccgcggcctggtaccagtcgtgctttgtcgccatgcccgcgtccttgccgatggcaaggcgcagctttgccaggatggcgcccttgatctcggtcagcgcgagttcgtcgataggctgtccgggggcggaataattgggctggaacgatgaatcctgcaaagccttcacttcctgggtcgaaagagctctcaactaaccctacgcgtcctgcccttgcaccggaactgtcgtcggtgcggtcgtgcattgcgctggcgtaaatttatgcaaggaacgggccgacttgggtacccgggggagcacggagaaaccgggattcggtgctagattaaggaagattcagccatcagtatggagacgcctcatgagaacgcccacgcgagtgctgatcgaaatcgctactgccctcctcgtcgtctgcatcggcgcctccagcgcggcgcttggcgccggcaaatccggccgcagccccgacggcctcagctgcggcttcacggtcccagagaaggcgtctcccgcagctcgctgcgctgcgatcaagcgccaatgtggcggcaagttctacgcaaatgcgtgcggtgacagattgatctccgcagcaagctgagagcgccgaaggttcagcagactcaagccgccttcgtttgcaccgcatcgcaaaactgcgccagacgatcggcgagccgcagcgttgccggactcgcattgggcgaggccatcagtgcgagctcggtcttgttgatcggtgcaaagccttccttcgccgtcagcacgcggtggtctgagaggatcgacatctccgacaggatgctcagccccatgccggcggcgaccgcggcctggatgccggcgaggctcgatgacgtgtaggcggtgtgccaggcgcggcccgcgctttccagcgcgtggatggcgccggcgcgatagatgcagccgagcggaaagccgatcagcggcacggacggcacgtcgacgtcgaccggatggctcttgctggtgacccagtgcacccgctccggccacaccgcgaccgcgcccttctcgccggcctcccgcttgtagagcgcaaggtcgagctcgccgcgttcgagatcgtgggcgaggtgcttgctctggcccgcgcgcacgtcgaggcgcaggcgtggatgcgagcgcgagaacgcgcccagcagcttcgccaggcggtaggccgcgaaatcctcgggaataccgagccggatcgcgccctcgccgtcgggctggcgcaacacgtcgcgcgcctcctcggcgagcgagagcagccggcgcgcataggaaagcagccgctcgcccgcctcggtcgggcgcacgtccttgccgtcgcgatgcagcagcacctggccgacatcctcctccaggcgcttgatctgctggctcacggtcgattgcgtgcggtggacgcgcgcgccggcgcgggtgaagccgccggcctcgacgaccgagacgaagctgcgcagcagctccagatcgagcattgcggcctccattcgaaaatccactgatacggagttaatcatttaatttccaaatggcaagcgatctccctagatcgagggctcaggagaatgccgcatgtcgctcgctccctcggtttctgttcctcgcagccgtttcaacacgctgccgctcgctatcggtctgttctgcctgctctggagctacgccttcatcgccggcaagatcggcgtcacccatcgcccgccgctgattctgctcgccgcccgcttctcgctcgcaggcattctgatcctgggcgccacgctgatacggggcgatgattggtccctgtcctggcgcgacgctgcggtcttcgcagtgctcggcatcgccaacaacgcgctctatctcgggctcggctacaccggcctgcaatcggtttccgccggtcttggtggcctgatcgtctcggcgaacccggtgttcacggccgcgctcgccgcgcttctcctcggcgagggcatgacctggcgcaaggcgggcggcctcatgcttggcgtgatcggcgtgacggcgattgtctggcaccgtctctcggtcggcacggactcgctgcacggcatcctcttcacgctggcctcgctggcttcgatcgtcgccggcaccatcctgttcaagctgctcgcgccgaaggggtcgttgtggatcggcaacggcgtccagaacctcgccgccggcatcgtgctgacgccggtcgcgttcaccttcgccgatatccacgcgatcgactacacgccgagtctgatcggcgcgttcgccttcctcgtgctcggcggctcgatcctcgcctactggctctggtttcatctgctgaaggtgtgtggggcctccgctgccagcgcctatcatttcctgatgccaccgctcggcatgctgttcgcgtttgtcgtgctcggagagcatgtcgaggcgcgcgatctcttgggaatcatcccggtggcgctcggcatctatctggtgacgcgaccggcgaaggcggcggcgtctgcaagctgagaaagccctgctgtctccccaacgtccggctagtctttccggaacacgatcgacgccatccatcccgtcatcagcgccatcgccactgttgcaaggccgtagagcaacccgttgtgccgcgcactgttggcgacgaactgctcgaagccgaccttgacgatctcgaaggcggtgtcggtcttgccgatgaacgccccgttcgcaaacagcttgatctcgacctgataggtgccgatcgggacctctcccggcagtggaatgccggtccggaacagggtcggcgtcaggaacgtcaccgcgctcgaatcctcgcggtagaggccgcgctgggtgcgcaggcgaatgaaggccgagcggaacacatcgtggggcaccacgtcggcgtaatcgccgccgactcgctgcgtcagcagcacgttgttgagcccgatctgctgtcgccgcgcgatctcgggcgaggtgatcgcatcgaaggggcggttggcgaacagcgcgagatagctcggcacctgcaggaactgccggtagtcggtgttgatccagatcccgaaggtgcgctccttgcgccgcgtcaccatgtccgcgcgcgggcccatcacggtgaccacgagatcgtaggccgtgcggtcggccggcgtcgtggcgtccttttccaccgagccgaacagcaccagctcctcgcccgaatagttcggcgtcaccgtgacccgatggttggagactgacacgatcagccgctcggcccgcgcggcgccgccgagcagcaggacgagagcgatggcgagaagcacgcgaatcatccgctcactccgagctcgcggatggtgaagaggtccgagggctggatcaccagctcgatcgcaaagcggattccgaccgagaggatcaagaggccgagcagcagccgcagctgctcgccgcggatcttctggccggcgcgggcaccgaactgcgcaccggtaacgccgcccaccatcaggatcagcgccagcacggcgtcgaccaggtgattggtcacggcgtgcagcatggtcgcgaacagcatcgtgaccagcgtcagcaccatcgaggttccgatcaccgtcgaggtcgggactctgagcagatagatcatgaccggcaccaggatgaagccgccgccgatgcccatgatggcgccgatgaagccgatcgcgatgccgacgaccacgaccggaattaccgagagatagatcttcgagcgcttgaaccgcatcttcagcggcaggccgtggatccagttgtgcgtgcggcgtggcggcagcgcgccgcgtcgggtgcgcatcaaggcgcgcaggccctcgtagaacatcaggccgccgaccgtggtgagcagcacgacgtaggacagcgcaatcatcagatcgagctggccgagcgcgcgcagctgcgtgaacgcccaaaccccgagcgccgtgccggtcaccccgccgcagagcagcacggtcgccagcgccggatcgatcgcgcgccgccgccagtaagagagcgcgccggaaaaggacgaggccgcgatgtggctggcgacggaggcgaccgcgacggccggcgtgatgccgatgaagatcagcagcggcgtcatcagaaaaccgccgccgatcccgaacatgcccgagacgaagccgaccgccgcgcccatggcgagcaccaggaagacgttgaccgggaggtcggcgatcggaaggtagagctgcatcgaaggaccacgctccggcgagacggatcgattgcgcggaatgcccgccggacggtcggaacgattgccgcgcccttcaatagcggaatttgccggccggcgggaccgggaatttcgggcgtggtgaatgggcgcgacggcggcatcgacgcttttgctcctcaccccgaggagccggcgcagcaggcgtctcgaagggcgaggcccggaccgagaggcgggcctgcatggttcgagacgcgcgcgagggcgcgctcctcaccatgaggggagagatttcaatgcgccgcggatgccgagcgcttggttgcgacttgcttcggcgccggcttggcgttcgcctgcggcgcgctgtcccagcctccggcgggcgtcgcaacgttgacggcgtcgtcgggctggggctcggcgctgaaggtctggatcgcgagcttggccgcagcgagcgattgcgggtcgaggcgcttggcgacgtcgtcgcgcttgccggcggcgtccgcatcgccctgcgcggccgccaggctgaaccatttgtaggactcggcgaggttctgttcgacgccgatgccgcgggcatagagaatgccgaggttgaactggctgtcggcgacgccgcgatcggccgccttgcggaaccactgggccgcgctcttgtagttcgcgccgcgtccgccgccgtcggcatcgagcaccgcgaggttgtgcatcgccttcgcgttgccgcgctccgcagcctgcgtgtagtagcgtcgggcgatgtcggcgtccttcttcacgccgaggcccttttcgtacagcgttccgagccggaagatcgcgggcaccacgccggcctgcgccgcgcggtcgtaccatttggcggcttcgtcgtagttcgtggcgacgcccttgccttcggcgaagcgcaggccgatttcgtaggccgcggtcgcatcgcccttcatcgcggcggtgcgcaaggccgggccgccgattccgtcgggcaatctctcgctcggcggcacctggaccaggccgagcttggcgcggctcgtccccgacaacgcgccggtgatttcgccggcggccggcggcagcggagccgcggcgggtgcgggcgggatttcgaccgaggccgcgctgcccggattggccgcttgcgccggcgcggcattgttctgggactgccgtccgatcggcgtcggcgatgtcatcgacggcgtcacctgctccggtgttgccggctttgtttcgactggaggcggcggggcgggcgccgccggctcgctcggaatgttctgcatcgcctgcggcgccggcggcgggccgtcgccgtcgagcaggttcatcgccattttgaaggtaccgagcacgatcacgaccacgctcgcgccgaccagcagcgaacggatcttcgaggtgatggtcgaaccgccgtccttgcccgtttccttcgaacggtcggtccccgccttggcggcgcggccggtcttttccggctgggctgcggcagcctgggcggcacggcgcgcggcggcgatgaagctcgatgacgacaccggctctttcggcccggcgggaatttcgctgatcgcgctctcggacgccgcgatgcgctccgatggcgtggcgacgcgtccgcctggccgtgtgcctggctcgagcggatgatccggcggcaattccggcgccagggcggcgcgtggcggggccgtatgcggctccaggatctcgctgatcgcgcgcggcggaatggggggcatcgccggtaccgggggcggcgcggcgggagcggcggcatggaattcgcgcggcgcggcgacgaaggcggcggcctgtgcggcttgcgcggcggcggggttgggcagctctggcttcggatcgtatttcggcggctgtgcttgcggccgcggctcgcgcgccatcggcgcgggctccatcggagccgcggacggcatcggctgcggagcggcgggctgcggcgcagtgcgcaccccgcgaagatcgccctcgatcatcgagaggcgatcgacgacgtggcccagcgcgctgtggacggcttcgagcgaatcctgggtgtgccggttggtctcggcctggctgaaacggatgtcggagagctcgcgcttgacgagatcgaccatgtcgggatcggcggccggcgcggagttgcggctttcggccagcgcggcataggtcgcctgctgccgctccaggtgcctgaggatgtcgtgcagcccgtcctcgacgcggctcaggttgccgttgcgcggatcggaggcggcctcgatccgttccagcagatacgagacgcgctgctcgagatgggcgaaggtggaggccgagtcgttgccgacctgcatgcggtcgaagcggtccgacagcgcgcggattgcggcttcgagatgctcggtgctttcggacggctgaggccgctcgcgggtttcgagcgcggcggtgagcgcggcaatgcgctgttccagcaccgtaaagctgtcaccctggccggaggcgcgggtgatctggtcgaccttggacgacagcagctgcacgtcttcggacagccgcgcgagcgcttcgttggaggcgacattggagacgatggcgcgcagcgcggagatcgcgccttcgagctgctgaacggtcgaaggatcgtcattcgcgcgcaggatcaggtcgagcttggctccgagattgcggatcgcctcgtcatagccggtgagctgctcggcaggcgtcagcgtgcgcagcacctgcttgatctcggacagcgcgtgctcgatccccgacagcacctggccgtcggtgccgttggaccgcgtctcgtcgatccgacggtgcagcgagcggatctcgttctcgatcgattcgatcgcgcgccgcggcatcgcctcggtgatggcggcacggatttcggcaagctcgctgcggaaggcgttgatcgcctgctcggtattgtcgggacgctgcagcgactcgatctggctcgtgatcttgagcagatggcgctcgagcgaggagaaatccggccccggctgcggaggcggcggcggcgcgtaggcagggccgggcggcgccactggaggcgcgtaaggagccgccgtgggtgcaatcggcggcgcggcgcgcggcggcatctgcctcggcgtaaagccatcgagctcgctctggcgcgcggtgatctcggcgaccgcgacgtcgaatgaagccggactaaggggaggggagttgcgatagacttgagccgccgcgcgctcgaccgcatcggcctggcgctggcgcgcctcgatgggcgaggccgcaggagccggacgcggcgcctgaggctgttgcggacgggagatttgcgacaggcgtgcgtcgagccgcgagatcgcgtcgttgagctggcgcgcgacgccctgctcgcgcgagatctcctggcgcggcgtgggcttcgaaatccgttcgatctgctgggtaatcgcgtcgagccgctggtgaatgtcggcgacttcgcggctctcctgactcggcatgtgctgcggacgctggtcgtaggccgcgcgaaagttcggcggggcagtctcgccgagcgtggagttcagccagtcgttgagcgacatgccggccctgcgcgcagcagcttcggcccgctcccggacggatggatcgatgccgtcagcactccacgatacgcgcgaattcatgactctgtccggttccgactccggcgccccacccggcgcctccagcctccccacgcgtgccggttgcaaacacaatcgaatttggcgcgggtcgtctgcctcgaaaaccgactttttcctgttacggtaaataacgggttaaggaatgcaggcccggtgtcttaaagttggccgcgggaacttggggcctggcgttcggccttcgcccagtggtcggtgcgctgcctgccctgcatgcggggagggctggggctgggaagagggtgcttcggccccggcaatccgcaagaggacaagccccctcagtcggcgcttcgcgccgatctctcccgcaagcgggagagctgaccagcaccgccggcgccggtctaccccttcccctcgcgcttgccatcctccagcggcaccaccgtgcccttgccactctccgccgacagcgcctccagcgcctcctcgcagaaatcggccaccatctgctcgtggcgggccccgagacggagcagcaagaggttgccaaggtcgagccggccttctgccctgccgtcgggaaagcgcttcttcaggatccgctcgtagttggcatggcggtcgcgatggtgctccaggcgggccatcaggtcggtccgcaggggctcgatgtcgatgctgtcgagcgcgtgcaggcgcaccagcaggtcgtccttggtcgaggctggcgtgcttggccgcgcggcccagtgccgcagcgctgttctaccctcgggcgtcagcgtataaacgagcttgttgggcttgcctgtttgcacgacctcgcggccctggatgtagccgcggtcgcgcagcttggagagctcgcggtagatctgctggtggtcggccttccagaagaagccgatcgaggaatcgaaggtcttggcgagctcgtagccagtcatcggacgttccgtcaggcatgcgaggattgcgtcgcccagtgccatgatcggcctccttcttcggttcgaccaagttgcttgactttatgcgcatcggcgcatatgcgtcaatatgcatatgaggcagcatgcaggcgggccgaaggcccggctgaaaaatccagcgcaatcaactcccccgctactgtgcatggggttgttttcgcactttgcccttggcctagggaggcacctgagaatgaccggcctcgattcctggtacgcctacatgaagtcccacgaccgcgccgcgctccgggacctgctgcatcccgatgccgtgttcgagagccccgtcgtgcattcaccgcagcgcgggcgcgacatcaccttcaaatatctctccagcgccgagaaggtgctcggcggccccggcttcacctatgtcggcgagtggaagaacgagcgcggtgccgtgcttgaattcaagacccagatcgacggcatcgagatcaacggggtcgacatcatcagcttcgacagcgagggacgcatcacccatttcaaggtgatggtgcgcccgctcaaggcgatcaacatgctgcaccgcctgatggcggagcagcttgccgccgcccaaccataagcccaacatcatccccacaaggcccatgccgggagaacgccatgccgacctataaagcccccgtcgaagacgtgaacttcctgctcaacgacgtcttccagatcgaccgctacgacaatctgccgggcttctccgacgcgtcgagcgacgtgcgcgaagccattctcggcgaagccgccaagctcgccgaagaggtgctgcagccgctcaatcgcgtcggcgatctcgaaggctgcaagcgcgccgaggacggcagcgtcaccacgccgaaaggcttcaaggaggcgttcaagcaggtcgccgagggcggctggctcggcctctcggcgccgaccgaatatggcgggcagggcctgccggtgacgctctcccaggcggtcaacgagttccagatctccgccaacatggcgttctcgatgtatggcggcctcaccatgggggcgaccgcggcgctgctggtgcatggctctccggagcagaagaagacctatgtgccgaagatgattgcgggtgagtggaccggcaccatgaacctgaccgagccgcattgcggcaccgatctcggcatgctccgcaccaaggcggtgcggcaggcggacgtcagcttcaagatcacgggcaccaagatcttcatctcggccggcgagcatgatctcgccgacaacatcatccacctcgtgcttgcccgcatcgagggcgcgcccgccggcatcaagggcgtctcgctgttcgtggtgccgaaattcctggtcaatgccgacggttcgctggggcaacgcaacggcgtcgtctgcggctcgatcgagcacaagatgggcatccacggcaattccacctgcgtgatgaactacgacaacgccacgggctggctgatcggcgaagagaacaagggcatgcagggcatgttcgtgatgatgaacgaggcccgcctcggcgtcggcgtgcaggggctcgcgcagtccgaggtcgcctatcagaacgcggtcgcctatgcccgcgagcgcatccagggccgttcgctgaccggtgcgaaggcgccggacaagccggccgatccgatcatcgtgcatccggacgtgcgccgcacgctgctctcgatccgcgccttcaacgaggccgcgcgggccttcgtgatctggaccgcgctgaagagcgacgtcgcccatcgctccgaggatccgaaggaccgccaggccgccgacgaccacatgggcctgatgacgccggtgctgaagggcttcctcaccgattacggcttcgccaacgcggtgcaggcgcagcagatgtatggcggtcacggctacatcgccgagcagggcatggagcagttcgtgcgcgatgcccgcattgcgatgatctatgagggcgccaacggcatccaggcgctggacctcgtcggccgcaagctgccgcgcgacggcggccgcgccatcatggccttcttcggcgaggtcatggcctttgccaaggagaacggcggcgacgaggcgctcaagcccttcatcgccccgctgtcgacctcgctcggccatctccagcaggcgacgacctggctgatgcagaacgcgatggcgaagccggataatgccggtgccgctgcaaccgattacctgcatctcttcggcttcgtcgcgctcggctacatgtgggcgaagatggcgaaggtgacgaatgcgaagattgccgagagcggggcgacgccctatctctccacgaaactcgtcaccggccgtttcttcatggagcggatgcttccggagaccgcggccaatctcgcgcgcatccaggccggctgcgccaccatcatggaattgccggcggaagcgttctgagcctgcttccgctgcctgctcccaatcgtctcgaaaatcacatcaggagggcgtcatgcctgaggcattcatctacgatcacgttcgcaccccccgtggccgcggcaaggcggacggcgcgctgcacgaagtcactgcgctggcacttgccacggtgccgctgaaggcgctgaaggaccgtaacaacctgccggaagattcggtcgacgacgtcgtgctcggcgtggtcgatcccgtcggcgaggcgggttccgacatcgcgcgcttcgccgcgctgaaggccggtctcggcgaagccgtgcccggcgtgcagatcagccgcttctgcgcctccggcctcgacgccgtgaactttgctgccgcacagatcatgagcggccagcatgagctcgtgatcggcggcggcgccgaatcgatgagtcgcgtcggcatcggcgcctcaggcggcgcctggccgatggacccgtcgatcgcggtgccggcatatttcatgccgcagggcgtctcggccgatctgatcgcgaccaagtacggcttctcgcgcgacgacgtcgacgcctatgccgtgcagagccagcagcgcgcggccaaggcctgggacgagggacgcttcgacaagtcggtcgtgccggtgaaggacatcaacggcctcaccatcctcgccaaggacgagcacatgcgtccctcgacgacgatgcagtcgctggcacagctgcagccgtcgttcacgatgatggcgcagatgggcggcttcgacggcgtcgcagtgcagtcgcacccggagatcgagcgcgtcaattacgtgcaccatgccggcaactcctcgggcatcgtcgacggcgccggcgccgtgctgctcggcagcaaggaagccggcagcaagtacggcctgaagccgcgcgcaaagatccgtgcgttcgccaacatcggctcggagcccgcgatgatgctgaccggtccggtcgacgtcaccgagaagctcttcgcgcgttcgggcatgaagaagacggacatcgatctgttcgagctcaacgaggctttcgcatccgtcgtgctccgctacatccaggccttcgacatcgacaacgccaagatcaacgtcaatggcggcgccatcgccctcggccatccgctcggcgcaaccggcgcgatgatcctcggcaccgtgctcgacgagctcgagcgtaccaacaagtccaccgccctcgtcacgctgtgcatcggcggcggcatgggcaccgcgaccatcatcgagcgcgtgtaagggcagggagcaaccaacatgtcgtacaagaacttcaaggttgagaccgattccgacggcatcgcgctcgtcacctgggatatcccgggccgttcgatgaacgtgctcgacgagacctccaccaacgaactcgaggcgatcgtcaaggcgaccacggcggatgctgcggtgaagggcgtcgtcatcacctcggccaaggaggccttctgcgccggggcggacctctccatgctcgaaggcatgaaccaggcctacgcaaaagtcttcaaggagcagggcgagaccgcggcgaaccagatgctgttcgaccagagccggcgcttctcgcaggtgctgcgctcgatcgaaacctcaggcaagccctgggcggccgcgatcaacggcctcgcgctcggtggcggcttcgagatcacgctgtgctgccactatcgggtcgcggcggagaatcccaagacccgcctcggcctgcccgaggtcaaggtcggcttgttccccggcgccggcggcacgcagcgggtgccgcgtcttgtgccgccgcaggacgccatgacgatcctgctcaagggcgatcctgtgacggtggagaaggccaaggcgctgaatttgattcacgccgtcgttcccgccgccgatctcgtcaaggccgcgaaggactggatcaagggtggcggcaaggccgtcgcgccctgggacgagaaaggcttcaagcttccgggcggtccggtgttctccaaggccggcatgatgatgttcccggctggcaacgccatctatcgccgcgagacttacgacaattacccggccgctcgcgcgatcatgagctgcgtctatgagggcctgcagctgccgatcgatgccgcactgcgtgtggagtcgcgctacttcacttcggtgctgcgatccaaggaagcggcggcgatgatccgcagcctgttcctgtcgatgcaggagctcaataagggcgcgcgccgtccgaaggacgtggccccgaccaaggtgaagaagatcgccgtgatcggcgccggcttcatgggcgcgagcgtcggctacgtctcggcccgcgccggcctcgacgtcgtcctgatcgaccgcgaccaggagagcgccgacaagggtaaggcgcatgcgcagaaggtgatcgaggagcagatcaagaagggccgcgccaagcctgcggatgccgaagcactgctcgcgcggatcacgccgaccgcggactacgccgcgctgaaggacgtcgatctcgtcatcgaggccgtgttcgaggaccgcaaggtcaaggcggacacctttgccaaggcgcagcaatatctcaagcccgacgtgatcttcgcctccaacacctcgacgctgccgatcacctcgctggccgagagcttcaaggaccagggcaagttcatcggcatccacttcttctcgcccgtcgagaagatgatgctggtcgagatcatcctcggcaagaacaccggtgacgtcgcactcgcgaccgcgctcgattacgtccgccagatcggcaagacgccgatcgtggtcaacgactccagaggcttcttcgccaaccgctgcgtcggccgctacgtcgccgaaggcaacgagatgttcctggaaggcgtgccgccggcgatgatcgagaactgcgccaagatggccggcatgcctgtcggcccgctctcgctctcggacgaggtcgcgctcgacctcggcctcaagatcatgaaggcgacggaagccgatcttggccccaatgccatcaatcccgaccagaagaagctgatggtggagatggtcgagaagcagggccgcctcggccgcaagaacggcaagggcttctacgattaccctgagaagggcaagggccagaagagcctgtggccgggcttgtcagcgctgcagccgaagcaactcgaccctgacacgctcgacgtcgaggagctgaagcagcgctttttggtggtacaggcggtggaagccgcgcgcacggtggaggaccacgtcatcaccgatccgcgcgaggcggatgtcggctcgatcctcggcttcggcttcgcgccgttcaccggcggcacgctgtcctatatcgacttcatgggcacgaagaagttcgtcgagctctgccgcaagctcgaggccaagtacggctcgcgcttcacgccgccgaagctgctggaggagatggcagccaagggcgagaccttctatggtcgcttcgcgccgaagaaggcagcggcttgagtagcacgtgtagcggggattgcgctgcacgctttcatggtggcgcaggaacgacaggcaggccggatcatcgatccggcctttctgttgtgccggccttcgcctgctaaccggttccctgccgcaccagcgccgctgcagatcctcgctgccgtcaggcgctccgcactggcatcccgcttgctaacgcattcacaagatgaccattcgcattggaagtgtcccgcaatgagcctcacaccgtttcaggatggtgcggccggcgtgcgcgcaagatattctccgatgttggtcctcgatcggccgcgcgcaggtcccagaatcatgcggcggcgcagaaaaatcccgtcctggatcggttgggccttactcgttttgaccgccgatgtggttatggctttgcttgcctggttcgccgttggtttcgtcctgcattgagagttctcctctgtacagatgaaacgtcgctgcgaggtaggcgaactggcccatcatgaggcaagcggtcacgatcggaatacccgcccaaaatccgaactccgagctctggagcacggttgctgcaacaatcgcagtcgccggtgaaacgagcaacagagcccagacccgaaagaacagtcccgtcgcaagtcccgcgattccgctcgcgaccaagagaagtagtacgatcgtcacgatagaatcccaattcagcagtccgcgttgcggttcctagctgaagttgagccaacgagattgctctcacaaggatggtgacgactgcggagcggacaaggcggggttattgttaaccgggacaatgcgtatcaaattgacatcgccacgccgagacgcgggtcttcaagtcggtatctttcaagccggtatcttgatgaactgtcggccgccgcaactgctggtccatgaggtcgccgtggccggaacttgtgccccacgctgtcacgggcggtctatcggcgttcatctggacaatcaccggaccttcggtcacgatttgatcgttgtcgagtcccagcgccgggagcaggtcgctggacttcagcttcagatcgtccccgcgatttcgagcttcatgcgcctctgtcgacctcgccccgctcatatgacaatgctgcttccagagcagcaatgtgggggacagcgagcaggcaccgggcgaacgggagagttcgcggtatttgcgcccgaggcttttctcggccgaaagagcaactacatgcacctgctttgatagtcaagattgatgcagctgcatcaaatgaggtaagagtcggacgacgagcttgagcgggaccatgaaacgcagaccatcgaccgaggcaacggccgcctggatccgcctgatgcgggtgcagagccgcgtgctcgattgcgtcgagcaggacttgaagaaagccggctttccaccactggcctggtatgacgcgctgctcgaattgtcgcgggcgccctcgggcgaactgcgcccggtcgaactcgagcggcagatgctgatcccccaatattccacatcgcggctgatcgaccgcctggtcgatgagggccttgcctcgcggcgcgaatgcaagatcgacaagcgcggccagttcgtggagatcacggaagccggccgcgagctgcagaagcggatgtggggcgcctattccgctgcgatcgaaaaatatgtcggttcgaaactgtcagatgccgacgccgtcaagctcagcggtctgctcgaccgcctgggctgctcgtgcggcgagatgaaactgccgcccgcgggcgccaacgaaagcatgccgtcgcgatgatcgcgcggcaaacccgctcgcccgcgcacccggtgggttcgcggacgatccctgtcacccgcgcgcgttcggtcgaagcgccgtttgaatagagtttgagatggcgcgagaccagatcgatatgacgcctctgcaatcgcgcgacgaactcgtcgcgtggttcgaggccggctgcaaggacccgtcggaattccgcatgggcaccgagcacgagaagacgccgttcacgctcgaaggccaccgtcccgtgccttacgaaggcgcacgcggaatcggcgcgctgctcgaaggcatgaagctcctgctcggttgggagccgatcatggagaagggcaacatcatcggtctctacgacgtcaccggcggtggcgcgatctcgctcgagcccggcggacagttcgagctgtccggcgcgccggtcgagaacgtgcaccagacccagagcgagttgatggcgcatcttgcacaggtgcgcgagatcgcaacgccgctcggcatcggcttcctcgggcttggcatgacgccgacctggtcgcgcgccgacatcccggtgatgcccaagggccgctacaagatcatgaccaactacatgccgaaggtcggtcagtacggcctcgacatgatgtaccggacctgcaccgtgcagaccaatctcgacttctcctccgaagccgacatggtcaagaagctgcgcgtctcgctcgcgctccagccggtcgcgactgcgctgttcgccaattcgccattcaccgaaggcaagccgaacggctttctctctttccggtccgagatctggcgcgacaccgacaacgcccgcgcgggcatgatgccgtgggctttcgaggacggcatggggttcgagcgctatgtcgactacgcgctcgacgtgccgatgtatttcgtcaagcgcggcgaggagtacatcgacgtgtcgggctcctcgttccgcgcgttcttcgagggccgcaacaacaatcttcccggcgagcgtccgacgctgtccgactgggccaatcatctctcgacgatcttcccggaagtgcggctcaagcgctatctggagatgcgcggctccgacggggggccatggggccgcttgccggcgctgcccgccttctgggtcggaatcctgtacgacgacgcttcgctcgatgccgcctgggacctggtgaagcactggaccgcacatgaacgtcaggctctgcgcgatgacgtgccgcgtctcggcttcaaggcgcggatcaaggaccgttatctcttcgagatcgccaaggagtgcctcgttctggctcatgccggcctgcggcggcgcagccggatcgaccagctcggccgcgacgagacccggcacctcgagccactcgatcgcatcgtcgattccggcaaaactcccgcggaggaaatgctggagaaattcaacggtccctggaagggttcggtggaaccagcctatgtggagtacgcgttctagggcgctgaattggatcgtgatcgcggctcaggttattgtttgagcatgatcttctccgaaactcgctgcacacttctcggcatcatgctctcaacctataggccaacgagcgggacttgagccgttcatcgcccgtacaggtttgcggcgatcaaatgaccggccgaaaaacctgagcttcgtcaataactcgaaagctgtttcgatgcggaagggccgcctatccggggccgtcatggccagcgtcgtggcatctgccgcgctgctttcgctcgcatttgcgggcgtgccggcgcttgcccagacggcgttcgatcggcccggtggcgactacttcagcacaccggtcgcctcgggcgatcccgaagattgcgcgctgctgtgcgagcgcgaccgccgctgccgcgcctggagcttcagctatcccgacgtcgaaggcgggtctgccgtttgctggctcaagaacaccgtgcccgcacgcgtgccggggagttgctgtatctccggagtgcgcggtgcgggcgtgattgagccgcggatcgagggcgtcgaaacctcgatcgaccgccctggcggcgatctgcgcaacttcgacttgaaggacggggagggtgtggaggtctgcaaggctgcatgcaccgccgacaacaaatgccgcgccttcacctatgcccgccccggctacaccgggcgcgaagcgcgctgtttcctgaagaaggaaatcaagcccccgcgccgcaaggcgggattcacgtcgggcgtggttcgttagtcgtctcgtcccccgtacgtgccgcggcgcttttcgagctgcgttgcagagcgcggtccacccggcgccggattcgatgcgtcatggatcccggctcatgcgtccgcctcaatcaccgtcagctccggccatagcgccttccatcgcgcgaccttcgccgcgtaattggcggcggaaaaattcagcgcccggttgggtcgtacgatcagctttgcgatgtcgtcgaatccgtggggcgcatagacgtcgaactctccacctgagggccggatccccagttgcgtattctccgtgaggaaccggtcgataccgtcagtcgagcgcgccagcggcggatagggcaggccatgcttgtcggggtaccataaatgcactcgcgcctggttgcggatctcgaccttggcgccgagatgcgcaagacgcgcatgcagcccgcggatcacagtgtcttccgcttcccacgaggtatcggggtcaaaatagaacacgtcgtagtcggcgatgccgtggctgatcgcacggccggtaagcgcgttccaaaccgtctgcacgaggcaacctgcgacaagccacgcatcgggcagcgcgagccgatcgagttcatcgacgatcgcggcgttgaccggattctgcagcgccaacgcgaggaattcgtcgcgggtcattggaaatcgcagggtaggctaagatgcgcgcccggcgtcgtgccaccatctctcaacgttgcgacagaagcagtgggtacgcttcgggccttgccatcccatgatcgacgcttcgatcaatgcacggcggtgaagaaccgcgccagcctgaaaccggacagccaagtccacaccggttggctgcgcatgccgagatcccaggagccgaccacagcgtccgcacgaccgatcaggttgtcgatcggcagcaggccgacgccgcccgaccgcagcggcacacggctgtcggcggaattgtcgcggttgtcgcccagcacgaagagatggccggccggcacggtcacttcaggcgtgttgtccagcggaccgctgtcgcgcatcttgaagatcaaatgcgaaacaccgttcggcagcgtctcgacatagcggtaggcgggttcgcttcggccacggtcgtcctcggcggtgccgatgccatcgggcttcagctcggccggacggtcgttgatgaagagctggccctgccgcatctggatgcgatcgcccggcaagcccacgacgcgcttgacccaggcctgcgagcgatcgccgggccagcggaagaccacgacgtcaccgagtttcggtgtttccgcgaagacgcggccgctttcgggcaggctgatctggatcggcagtgacgaggtgccgtaaccataggggaatttcgaggcgagcagcgcatcgccgatcaagagcgtcggctccatggagcctgacggcacatagaacggttcggcgagcgcgcccttggcgatgaagaccgcggcgacgatgccggcgagctgagcaagttgcccggcccagccgctgctcttccgcttgggggtggcagtgaccttctcttcaacgctcatgcgcccgtcccacccacggtaatgcgttccatcagcagcgacggctggccaacgccgacgggcacgccctggccgttcttgccgcaggttccgattccggtgtcgagcgcaaggtcgttgccgatcatgcggatgcgatgcaggtcggtcgggccgttgccgatcagcatggcgcccttcaacggggcgccgatcttgccgttctcgatcttgtaggcttccgtgcactggaacacgtacttgcccgaggtgatgtcgacctggccgccgccgaaattcgcggcgaacacgccgttcttcacggaggcaaggatttcggccggatcgcggtcgccggcgagcatgtaggtgttggtcatgcgcggcatcggcacgtgggcgtaaccctggcggcggccgttgccggtcggcttcatgttcatcagccgcgcgttctggcggtcctgcatgtagccgacgaggatgccgtcctcgatcagcacggtacgattggtcggcgtgccctcgtcgtcgatcgacagcgagccgcgccgcgaggcgatcgtgccgtcgtcgaccacggtgacgcccttcgcggcaacctgctggcccatcaggcctgcgaaggcggacgtcttcttgcggttgaagtcgccctcgagtccatgaccgaccgcttcatgcagcatcacgccgggccagccggcaccgagcacgacgtccatttcccccgcgggggccgggatcgattccagattgaccagcgcctcgcgcaacgcgccatcggcagcctcgcgccaggatttcgtctcgatgaattcggcatagccggcgcggccgccataacccttgctgccgctctcctggcggtcgccttggcccgcgacgacggaaatgttcacgcgcaccagcggacggatgtcgcgatagctttcgccatcggggcgaaggatctcgacgacctgccaggtcgcgcccaggctgacgctgacctgccgcacccgcggatccttgtcgcgcaaataggcgtcgatctcggcgagcagcttgaccttggtctcgaagcccggcgcatccagcggattgtcgtcgccatagagccgcacattggtgtgcgggggcggcgcggcgaagctgccggaatagccgccgcgcacggccgaaactgcatccgccgcgcgcatcagcgccggcagggacacgtcggaggagtgcgcatatccgaccgcatcgtccttgacggcgcgcaagccgaagccctgcgaggtgtcgtaggtcgcctgcttgagccgcccattgtcgaacatcagggcttcggtctggctgtactccaggaacagctcgccgtcgtcggcgcccgaaagcccccgcgcgatctcgtggcgaacctggtcgcggtcgagattggcgcggtcgagcagggaggttgtggcagggttggtcatgcgtccgtccattagccggggtatgtacggcaagataatgatttcgcgccggttccgcgagggcgcgaagcctcacattacggaaacaataggattgcccgcgacgctacggcagcttgtcatatccctcacccagcccgttcagactgagcggaaagccgatgccttcttcgggggtctcgaagatgatgaaggtcgcggtcttggcgctgcgcagctggcccagcagcttgtcttccaggacgacctcggcgacgcagccattgggcaggcagcggacgaagccggcgcggccgacatcctggttgtcgagcttgaggccgaggccggagggcaggagcacgccgagcggggcgaccacgcgcatcaagcggctcttctggtcggcggtcttgagcacgatcacggtcaggccggcattggaacggtcctccgccaccacgctctggatcagggcgcattgctcggtctgggcgccgggcggggtgtcgcagcggatctgccagtcgccatggacggagcggaccgcgccttgcgcatgagcgaggcccgggagcgccggcaggacgatcgaagccagcagggccagcgccgggaggccgttggccggccttgccatcgatctcgaaagccccatcgggtcggtccctctgctcgcctggctcgctcgtgcttggcggaccaatccggcgcactgatacgggaatgacggcgtcttgaaggcgattcccaagcaaaatccgcgccgcccacgccgccatcgcccgcacgaatcaggctgctgcgcggccattcgcctgtgcctaccgcgagcaattccgctgtcaagccgcagcatcccggccaacggtatttttgtctgatgttactaggaaatatcttgcgggtgatggctgacagacgaagctcaagactgcattgcgatagatcaagaattatggtttgagaggcttgatttcgcgttctagcgatctggccccagttcctcttagaggtattcttgcgtggcggtttgtcagaccggcggatcgaataagtgcttcccgcaaacagggggatgcatctggggtgatttcgtaaggggagcgcgaacggcatgaggatgtcgatgggtcgggtgggccggcaattgctgggattggccaccatcttcgtggcggtggctggcatcatgctggcgacggggggtgcggcattcgccgagctcgggcagccggcgccgtgggagtggacgctgcagcagtccggttccccggtgatggacaacatcatctggttccacaacttcctgttcgtgctgatcaccctgatcacactgtttgtcctggcgctgctcgtcatcgtggtggtcaagttcaacgcgcgggccaatccggtgccgtcgcggaccacccataacacgctgatcgaggtggcctggacactggttccggtgctcatcttggtcggcatctcggtgccgtcgttccggcttctgttcctggagctcgacgtgccgaaggccgacctgaccatcaaggcgaccggcaagcagtggtactggtcctatgcctatcctgataacggcaaattcgagttcgactcgctgatggcgcaggacaagcaaccccgcctgctcggcgtcgacaacgagatggtggtgccggtcaacaaggtgattcgggtccagacgaccggcgccgatgtcatccacgcctttgcggtgccggctttcggcgtcaagatcgatgccattcccggccgcctgaacgagacctggttcaaggccaccaagaccggcatgtactacggtcagtgctcggagctttgcggcaaggaccacgccttcatgccgatcgccgtgcgagtggtgagcgatcaggagttcgcctcctgggtcgaagcggcgaagaagaaatatgcgagcggcggcaccagcacctacgcctccgctgctggcccgacgcagtaggcgtcgggtgacggcttgagggactgaaagcgacaaaagggcgggacctccagaggtccgaacgggacgcaaggcaggatttgaaaatggcaacgagcgcagcggcacacggcgatcacgcgcaggcccacggacatgacgagcacgcccatccgaccggatggcggcgctacgtctattcgaccaaccacaaggacatcggcacgatgtacctgatcttcgcggtcattgccggcatcatcggtgccgcgatgtcgatcgcgatccgggtcgagctgatgtatccgggcgtgcagatcttccacgaggcccacacctacaacgtgttcgtgacctctcacggcctgatcatgatcttcttcatggtcatgcctgcgatgatcggcggctttggcaactggttcgtgccgctgatgatcggcgcgcccgacatggctttcccgcgcatgaacaacatctcgttctggctgctgccggcgtccttcgcgctgctgctgatgtcgaccttcgtcgagggcgagccgggctccaacggtgtcggcgccggctggaccatgtacgtgccgctgtcgagctctggccatccggggcccgccgtcgatttcgcgatcctggcgctgcatcttgcgggcgcctcgtcgattctcggcgccatcaacttcatcaccaccatcttcaacatgcgtgcgccgggcatgaccctgcacaagatgccgctgttcgtgtggtctatcctggtgacggtgttcctgctgctgttgtcgcttccggtgctcgccggcgcgatcaccatgctgctcaccgaccgcaatttcggcacgacgttcttcgcgcctgacggcggcggcgacccggtgctgttccagcatctgttctggttcttcggtcatcccgaagtgtacatcctgatcctgccgggcttcggcatgatcagccagatcgtctccaccttctcgcgcaagcccgtgttcggctatctcggcatggcctacgcgatggtcgcgatcggcggcatcggcttcgtggtgtgggcgcaccacatgtacacggtcggcatgtcctcggcgacgcaggcctacttcgtcgcggccacgatggtcatcgccgttccgaccggcgtgaagatcttctcgtgggtcgcaacgatgtggggcggctcgatcgagttccgcgccccgatgatttgggcggtgggcttcatcttcctgttcacgatcggcggtgtcaccggcgtcgtgctggcgaacgcgggcgtcgaccgcgtgctccaggacacctactacgtcgttgcgcacttccactacgtgctgtcgctcggcgcggtgttcgcgatcttcgccggctggtactactggttcccgaagatgtcgggctacatgtacaacgagactttggccaaggcgcacttctgggtcaccttcgtcggcgtcaatatggtgtttttcccgcagcacttcctcggtctgtcgggcatgccgcgccgctatatcgactatcccgatgccttcgcgggctggaatctggtctcgtcgatcggctcctacatctccggtttcggcgtgctgatcttcctgtactgcgtgttcgacgctttcgcccgcaaggtgccggctgccgacaacccctggggtgcgggcgcgaccacgctggaatggacgctgacctcgccgccgccgttccaccagttcgaagtgctgccccgcgtgcagtaagccatctcccgcggcgcccgtgacgggcgccgcggcgctataacgaagcgagtagatctaagtgtccgtcctcgaccagaacgccatcgacatcaatccccgcatctccgaagcggaggttggcgattatatcgcgctgctcaagccgcgggtgatgtccctggtgatcttcaccgcgctggtcgggatggcgatggcgccagggcactttcacccggtgctggcgatcacctctctgctctgcatcgcggtcggtgccggcgcctccggggcgctcaacatggcgctggagggcgacatcgacgccaagatgtcgcgcacggcaaaccgcccgatcccgcgcggccgcatcacacgtcccgaagccatggcgttcggcacgacgctcgccttcttctcggtgatgacgctcggcatcctcgtcaattgggtcgcgggcgcgctgctcgccttcaccatcttcttctacgtcgtgatctacacgatcggcttgaaacgctggaccgcgcagaacatcgtgatcggcggcgccgccggcgcgctgccgccggtggtggcctgggcttcggtcacgggcacggtcgatgtcgaaccgctgctgctgttcgccatcatcttcttctggaccccgccgcatttctgggcgctggcgctgtttcgttccgacgactacgcgcgcgccggcattccgatgctgcccaacgtcgccggtcccgacgcgacgcggctccagatcctgctctacaccgtcgtgctgatcgcggtcgccgcggcgccatgggcgcttggctatttcgacgccgtctacggcatcgtctcgctgatcctgggggctggcatgctggtgctcgcgatcaacgtctacctgcgtcgcgaacgcagccagtcgctgcgcgcgacccgcaagctgtttgcattctcgatcctgtatctgttcgcgctgttcgcgaccttgctggccgaggtcgtgtaccgggcgctcgtgccgatggcagggggcgcatgatcacagcgatggccgacaaacccgagccagacggaatcgtcctcaccgaggcgcagcggaagagccgtcgtcagcgttcgatcgcaatcgcgctcgcgctcggcgtgctcgtggtgctgttcttcgccgtcaccatggtcaagggaccggcggtactcgtgcggccgatgtaggaaacatgaatcacgagccgatcatatcacgggacgtcagcgccaagccggccgatcgtaagccggccgggagccgtgcgctgcggcgcgatgtggtggtggcttccatctgcggcggcgtggtcgcgctgatggtcggtgcttcctacgcggcggtgccgttctacaactggttctgccgtgccaccggcttcaacggcacgacgcaggttgcgacctctgcgccggcctccggcccgatcgcgcggaagatatcggtgcgcttcgattccaacgtcgcgcccggcctgccctggaagttcgagccggagcagagcgagatcgaggtcaatatcggccaggtcgtgaccgtcttctacaccgtgaccaaccaggccgcgcgcacaacggccgcgcaggccgcgtacaatgtcgcgccgctgacggtcggctcatatttccagaagatcaactgcttctgcttcaccgagcagaccctggctccgggcgagaagcgcgagatgccggtcgtgttctacgtcgatccatcgatcgccgacgaccgcgagaatgatgcgttgaacaccatcacgctgtcctacacgttttatccggtgagggatccggtggtgaagccgctggcttcgggcgaaggcgacaagcgcaagggaaatctctgaccgccgggcgcgcgctcgggatgtcggaagcaaggggataagtgcctgccaggcacgggattgaggagagagacggaatggctacggcgcacaccaagcatcacgactatcatctggtcgatccctctccctggccggcggtcggctcgctctcggcgttcatcatggccgtcggcgcggtcgcctggatgcaccacatgttctctgcggcgccgatcgtgttcggcgtcggtaccgtcggcgtgctctacaccatggcgagctggtggggggacgtgatgaaggaggcccagtacaagggcgaccacacccgcgtcgtgcagctgcatcatcgctacggcatgatcctcttcatcgcctccgaggtgatgttcttcgtcgcttggttctgggcctatttcaacgccgcgctgttcccggccgacgcggtgcaggcgacccgcgacgccgtgttcggctgcggtctcgggacccaggctggcgcctgctcggtccccggcacttggccgccgaagggcatcgagactttcgatccctggcatctgccgctcctgaacacgctgatcctgctcacctcaggcaccactgtgacctgggcgcaccatgcgctgctcgagaacgaccgccagggcctgaaatacggcctgatcctcacggtcgtacttggagccctcttcacctgcgtgcaggcctacgagtacagccatgcggcgttctccttcgccggcaacgtctacggtgcgaccttcttcatggcgacgggcttccacggtttccatgtgctggtcggcaccatattcctgctggtctgcctgttccgcgcctatgccggccatttcacgccgaagcagcatctcggcttcgaattcgccgcctggtactggcacttcgttgacgtggtctggctgttcctgttcctttgcatctacgtctggggacgcggcgccgagaccatggctcacgctgcccactaagccagattgaacgaccagaaagggcggccctgcggccgccctttcgcgttccggccgccggaagtttcggccgaaagtgtgatagagtccgccatcatgaacgacaccgccggcacctccccgtccgaaaccaccgtcctgcagagcgcgatgcgcgggcttgcctgcaagtgcccgcgctgtggccagggcaagctttatgcgggcttcctgacgctcgcccccgcttgcgaccgttgcggtctcgactacgccttcatcgataccggagatggcccggcaatcttcattatcatgctcgccggcgccatcgtcgtcggctgcgcgctcgtcgtcgaggtcaagtaccagccgccgttctggctccatgcggcgctctggctgccgctgatcctcgccaccacgctgctgccgctgcgtgcgatgaaatcgctgctgatcgcgctgcaattccaccacaaggcggcgcccggccggctggttgatcgcgcgaaatgaacgaggccgcgcgcaagggccgcgtggccggcttcgcgctgttcacgctgttcctgacagccgtgtgcgtcgcgctcggtgtctggcagttgcagcgtcggacagccaagcacgagctgattgcggccctcaccgagcggcttgcggcggcacccgtcgcgctgcctttgccggtgctatggtctggtctcaatcccgcccgcgacgaattccggcgcgtcagcttcacggcgacgtatgcgccgctgcccgatgcgatggtctattccgcgggctccgcggtgcgcaaggacgcctccggccccggcacctgggcgttcctgccggcgcggcttccgagcggcgagaccgtcgtgatcgatgcgggctttatcgagaacacgatgcaggatcgcgatgtcgaggatcgtgcggtgaagaagctcgtcacgggtgagccggtcacgctcaccggctacctgcgctttcccgaggcgccaggctggctgacgccgggggagaatcgcgccaagcggctctggttcgtgcgcgatcatctggcaatggcaagcgcgctcggctggggcgctgttgcgccgttctatgttgacctcgagcagccagcacctgcgaatggcattccgcgtccggggccgctcgtcgtgaatctgaaggacgatcacctgcaatacgccatcacctggttcacgcttgcgggcgccgtgctgatcgccttcgccgtgtgggcaagaggccgccggcggagctgagctcatccgaagattttccgtggaacccggtatcgcccggggtttattattcagcgcacattcacgagtgtggtcccaagccgccgccgattctccgcggcagacaggattgcggcgtgagcgacttcgatcagatgggaattgtcgtcgactgggtggacgcctgccggaagggcgacctcatgacgttgctcggcctctacgcggatgacgcccaggccgaatgtacgtgtaacggcacccagcgctatagcggtcgaagcgagctcgaggcgtattggcagccgcggctcagcactttctcggcggcgggtttcgggcttgaggagattcatccggcacccgacggcgtcgacctcgaatactccgttgccggcgcgttgcgcattcacgtctcgttccgcttcagcccggaaggcaagatccgcagcacgctgtgcgaaccggcgctgcagaacgtgcgagatggctgctggtgccggctggcctcatgacgccgggtcccgacttgccttagccggaaggcggcagcgcacataagtccgttcgttcatgcgcagcagggacagcgatccgctgagcgcgcgcacgcgctcttgcatgccggtcaggccccggccgaagacgttgccggccggaaaaccggcgccatcgtcggaaatctcgatgacgaccgtctcaccggtgacgatcgcctgcacatgggcgctgcctgccttggcgtggcgtagcacattggtcagtgcctcctgtgtcacccgatagacggtctgtgccgacggcccctcgatcacgttcaggtccgggtcgatcgtgtccgtcaggacgatatgcggcgcctgcttgcgaaagttccgaagcagcgtctgcacgctggtcgaaaggcccagttcctcgatgtagagcggtcggagccggtcgaggatacggcggttggtttgctggagtgcctcgaccgattgcagcagatcctgcgccgggttgccgagatttcccacgggcggtgaggcctcgacgagcgcgatcgtgcccgcgcggatgctgaacagcagcggcccgagttcgtcgtgcaattcgcgggcgagatcgcgtcgctcgtcgtcctggagcgacaccaggcggtgcatcagatcgcgattgtcccggctcaattgcgccagcgttgcagcgagcgcattcgcctcttcgcagccctgccggatctccggcggccccctgaccggaatcggcctggtgtagtcgccctgtcgtattcgcgtgagaccttcgccgagatcctgcatggggcgcagggcagatcccgacaagacgtaggcgatcgtgccggtaagagccatcagcacggccaccaggccggtgaacgccagaaagccgatccacttctcgaacagatcggccgacatgtccgacaggaagacgatgtcgccgacacgttggccatcgatcatgaccggggatgccgcgtcgatttcgggaatggcgagaaggcggatgaaccattgcggcacgccatgcgacttgcgcgagtcgtccttcggtgacggcgtgggacctgctcccagggcacggaattgaatatccgaggaggtgtccaaggaatggacaaaggcgtcgagcgtctgccgcggattgtccgatgcacgcaaggtgttgttgagcgcggtggcgatggcctggatcgatcgccttcccggctcgcgttcctcggccagctggcccgttgcgaatatctggagcagcacgccgcccaggatcagcaccgccaggaagctcgcgccgagcggaagaaacagttgcgtcctgaacgagagtcgctgccacattaggtcaattctaacgcgcatcggcggaatttactctttccatttcttcccgtcggtctatgagtcgaaaaacgagagagtgcgcgatgcaagataccgccaagctggcgaccagggtcctgatcgtcgacgaccatcccgtggtgctgtccggttgccggaccttgttcgcttccgaccagtcgatacgcattgacgaagcgaccgatgccaaatccgggcatcgcgcctatgtcagcaagcggcccgacgtcaccgtgatcgacatcagcctgcccgatgtctccggcttcgagctgatgcgacggatccgcaaggacgatcccgccgccaagatcatcatgttcagcatgaacgacgatcccgccttcgtggtgcgcgccgtggagcttggggcccagggctacgtctccaagggcgatgatcccaggctcctgctaaaagcggtgcgcaaggtggtcgcgggggacaatttcatctcgccgcagcttgcggaagccgtcacgttttccggcgcggcaatcaaggccaatccggcctcgcagatgacgccgcgggagctcgaaattctccgcctgctcggacgcggcgacaagatcgtcgaggtcgccgaggcgctcggcatctcctacaagaccgtcgccaacaccacgtctctgctcaagcagaagctgggcgccaaaaatcactccgacctgattcggattgccgtggaaatcgggatgaactgagcttccgcccagcgaccgaaccggctgctccaggatgcagcggttcggtcgacggatcgacgccgccgttggccgggcaatgcatgggcaacgggctgacacccatccgcaaacacaatgggccgaggctgcattcgttcctgcgagaggaaaacttttcgggaaaaaatggtatttcctgtcgagcctcgccgcgtgtgaagtccttgtgccttgggatgcctcgggaaaaataggaacattcttcggcgcgcgcgatttggctcttgacgatttcgtgacaggcgaggaaagctcgccgaaacggtcggcggtcatcgaccccggacaggcaaccggtctgcacacaacgacagaccttccaagagaagggctgcggcaatgccgcagccctttttcgctgggcgagggtgggccagaagcggtttgccgatgccgcaaaacgctttatggtgggcgagcctctggctttgaacaagtaacttcgtaaaatcaaaggcttaggcgtcgggttgcggcccggccggcctttggagggcagtttgactcgttatatctcgacccggggcgaggcccctgaactcggcttctgtgatgtgatgctgaccgggctggcccgcgacggcggcctttatgtgccgacgacatggccgcagcttccgaccgagaccatcgccgccttcttcggccgcccctattgggaggtcgcggtcgatgtgattcgccccttcgccggcggcgagatcaccgacgttgaactcggccggatggcgaacgaggcctatgccaccttccgccatcccgcagtggtgccgctgcgccagatgtcgccgcatcagttcgtgctggagctgttccacggcccaacgctcgccttcaaggatgtggccatgcagctgatctcgcggctgatggaccatgtactggccaagcgcggccagcgcaccaccatcgtggtcgcgacatcaggcgataccggcggggccgcggtcgaagcctttgccgggctcgagaatgtcgatctcatcgtgctgtttccgcacgggcgcatctccgaggtgcagcggcggatgatgacgaccacgggtgccgccaacgtccatgcgctcgcggtcgagggcaactttgacgattgccaagcgctcgtgaaagcgatgttcaacaatcatcgcttccgcgatgcgacctcgttgtcaggcgtcaactccatcaactgggcgcgtatcgtcgctcaggtggtctactatttcacctctgccgttgccgtcggcgcgccggcgcgcgcggtcgatttcgtcgtgccgacggggaatttcggcgacatcttcgcgggctacgtcgccaagcgcatgggactgccggtgcggaccctgcgcatcgccgccaacgtcaacgacatcctggcgcgcacgctgaagactggtatctacgaagtgcgcgaggtgcatgcgacggcgtcgccgtcgatggacatccagatctcgtcgaatttcgagcggctgctgttcgaggcaggccggcgcgatgcggctggcgtgcgccgcttgatggagtcgctcaagcagtccggtcgcttcgtgctgcccgatgcgacgctggccgcgatccgcgaggagttcgacgcagggcgcgccgacgagaccgagacggctgccgcgatccgcgccgcctggcgcgaagcaggcgaactggtcgacccccatacggcggtggcgctcgccgtcgcggaccgcgacaccaccgacacgcgggtgccgagcatcgtgctctccaccgcccacccggccaaattccccgacgctgtcgaggcggcctgcggccagcggccgcaattgccggcctggctcgacggcttgatgaccaaatccgaacacatgagggtgatgaagaacgatcaggccgagatcgagcggttcgtgctgtcggtcagccgcgccgcaaagcaaggagttgccggatgagcgtcgagatttccaagcttgcctccggcctgaccgtcgttaccgacgagatgccccatcttgaaaccgcggcgctcggcgtctgggccggcgtcgggggacgcgacgaaaagccgaacgagcacggcatctcacatttgctcgagcacatggcattcaaaggcacgaccaagcgctcctcgcgcgagatcgtcgaggagatcgaggcggttggcggcgacctcaacgccggcacctcgaccgagaccacgtcctattacgcgcgggtgctgaaggcggacgtgccgctcgcgctcgacgtgctcgccgacatcctcgccaatcccgccttcgagcccgacgagctggagcgcgagaagaacgtcatcgtgcaggagatcggtgccgcgcaggacacgcccgacgatgtcgtgttcgagcacctgaacgagctctgctatcccgaccagccgatgggccgatccctgcttggcacggccaagacgctgcgcgccttcaaccgcgacatgctgcagggctatctgtcgacgcattatcgcgggcccgacatggtggtggcggcggccggcgcggtcgatcacaaggaggtggtcgccgaggtcgagaagcgctttgccagcttcgaggggacgccggggccgaagccgcagaccgctcagttcggcaagggcgggaccaaggtggtgcatcgcgagctcgagcaggcgcatctgacgctggcgctggaaggcgtgccgcagaccgatccgtcgctgttctcgctccaggtcttcaccaatatcctcggcggcggaatgtcctcgcgcctgttccaggaggtgcgtgagaagcgcgctctctgctactccatctattcgttccacgcgccctataccgacaccggcttcttcggcctctacaccggcaccgatccagccgacgctccggagatgatggaagtcgtggtcgacatcatgaacgattcggtggagacgttgaccgaggccgagatcgcccgggccaaggcgcagatgaaggctggccttctgatggcgctggagagctgctcctcccgtgccgagcaactggcccggcatgtgctcgcctacgggcggccgcagacggcgcaggaactggtgactcgcatcgatgccgtcagcatcgaatcgaccagggacgcggcacgtgcgctgctgtcgcggagcaggcccgccgttgtcgcactgggcagcggcaggggtctggacaccgcggtatctttcgcggaaggattgacccgggcgcgcgccaaggcgcggctgcactaggagccgcccaagggcgcccgccccccggaagcatcaccatggctctctttcgcctgccatccagtggacccgccgccctcgcgccgcgcggcaacggtctgctgctgcgcgccccgcaaatgtccgacttcctgcaatgggcccatctgcgcgaaaccagccgtgactatctcacgccctgggagccgatctggccctccgacgatctcacccggtccggcttccgccgccgcctgcgccgctattccgaggacattgccgcggaccgctcctatccgtttctggtgttccgtgagctcgacggcgcactagtaggcggaatcacgctcgccaatgtccggcgtggcatcgtgcaggccggcaccatcggttactgggtcggccagccgtatgcccatcgcggctacatgacgtcggctctgcgggtgttgttgccgacgctgttcggcgagctcaatctgcaccgggtcgaggccgcctgcattcccaccaatgcgccctcgatccgggtgctggagaagtgcggcttctcacgcgaggggctggcgcgccgctatctctgcatcaatggagtctggcaggatcatctgctgttcggcctgctgcacgaggatttccgcggctgagctgcaatctcccgtgcggccatattctcgacgatccggcctcgttgctaccctgtccgcttgccttgtccgcgcaccctgtttgttggccttgggttcgccgattttggcgatataacggcgcgggccggccggtggatcggccggatgttcggatggagttatggggtcgatggtgaaggagcttcggtcatcgcggaatgcatcgcggcggggaacagcggtcgcgttgatgctgtcggctgcgctcgcctctgtctccccggcggcggcccagtccttaaccgaccgcttcaagagcctgttcggcggcaagtccgacgagtcggcgcagcccactccggcgcccgcgcccggtcagcccgccgaagaagatgacttggattgcccgcaggtcaccgtgcgctccggcgcctccacctatgcggtcggtgcgagcggcaagcaggccgtcggtaacgacatccgcttccaggccacgatcaccaagatggcacgcgagtgtgcccggaacggcggcgatatcaccgctcggatcggcattcagggccgcgtcatcgcaggccccgccggggcgcctgcgaccgtcgaggtccccttgcgcgtcgcggtcgtgcagggtggcatcggcgagaaggtcattgcctccaaggcctaccggaccacagtctcgatgtcggagggcggcagtgtacccttcactttcgtcgccgaggacctggcctatccgatgccgtcacccgcggtcgccgacaactatatcttctatgtcggcttcgacccgcaggcgctttcgcccgagccgaagggacggaagaagaagtaggcgaggtcttgcggcaatctcagccgtcgttgccggcgaaggcgggcaacccagcaaacaaaaaagccggcgctcgtcgcgccggcctttttgttcggaaggcgttcgccctcaattcagcttctgtcgaacctcgttgatgcccttggccagcaggtcgtcggcgacttggcccctgacggattgcgacaggatcgcggaagcggcctgcacggcggcttccgcggcagcggcacggacgtcggcgagagcctgagcctcggcgagcgcgatcttgccctccgcggtcttggtccgtcgtgcaacgaagtcttccattttcgccttggcctcggctgcgattcgctctgcttcggcgtttgcgttggcgataatgtcggcggcctcgcgttcagccgatgcagtgcgcgccttgtaatcggccagcaccttggctgcctcttgcttgaggcgcgccgcctcgtccagctcggccttgatgcgagcggcacgatgatcgagcgccgacatcgcagtcttgaacaccccgacatagccgaagatcaccatcaggatcacgaaggcgacggcgacccagaactcaggtgtgaagaacatctcgactaacccttcaaggatgcgtcaacggcggcattgaccgacgctgcatccggaacgacgcccgtgagctgctgaacgatggtgccggccgcatcagccgcgatgccgcgcacgttgctcatggcggtcgcgcgggtcgaggcgatcgtcttctccgcctcggcgagcttggcggccagctgctgctccagcgtcttgcgttcggcgtccgcctgcgcattcgccttttcgcgggattcgttgccgatcgcctgagcacgcgcgcgcgccgccgcgagctcgccttcataggccttgagcgcggcctcggactgatccttcagcttctgcgcttcggcgagatcgccttcgatcttgttctgacgcgcctcgatcgcaccgccgacacgcggcagcgcgagccgggagacgatcagatacagcgcgacgaaggcgatcgcgagcgacaccagttgcgaggcaaaggtgctgctctcgaacggcggaaagccaccgccgtggtgaccgccatcggcctccgtgtgagcgccggtacccgtggcgccgccatgactctcagccatggagttctcctgttgctgtcagacgcgccgcctcccaccaggaagcggcgcgaaacgcgttcagagcgggacgaacagcagcagcagagcgatcagcagcgagaagatgccgagcgcttcggtcacggcgaagccgaaaatcaggttgccgaactggccctgggcagctgccgggttgcgcatcgctgcggacaggtaattgccgaagatgaaggccacgccgatgccggcgccgcccatgccgatgcacgcgatgcccgcgccgagaaatttcgctgcttgcggatccatttttgactccttcgaagaaagacaggtgtgggtggaaaagcacccggatcactcagtgtccagggtgaatggcgtcgttgaggtagatacaggtcaagatcgcaaacacataggcttgcaggaacgcgaccagcaattcgagcgcggtgagcgcgacggcaagtgccagcggcatcactccgccgatccagccgaccacgccaagagaggcgccgagcatcgcgacgaagccggcgaacaccttcagcgcgatgtggccggccagcatgttcgcgaacagtcgaacgctgtgcgagaccgggcgcaggaagaacgacagcacctcgatcgccatgaccagcggcaggatgtaacccggaacgcccgagggcacgaacactttcaggaacttcaggccgttcttgtagaggccgtagatcaggaccgtgaagaacaccagcagcgcaagcgccgcggtgacgatgaggtggctcgtaacagtgaacgtgtagggaacgatgccgaccaggttcgagacgcagatgaacatgaacagcgagaagatcagcgggaagaaccgcatgccgtccgcgcccgcagtgctccggatcatgctggccacgaactcataggagagttccgacaccgactgcaggcgccccggaacgagttgcttgccgctggtgagcagcagcagcgcaatgatccccaccgccacaaacatgtagagagaggcattggtgaaggcgatcgtgtgatcgccgatacggccgatcgtaaagagcggttcgacgttgaactggtggatcgggtcgattttcatccgcgcggcatctctcgtctgccggacgagccgacctatcaaggtcggccggccggccgtgccggcgagcggcacgtcagttaatctggccaagccagttacgaaccaccgcgcctgttctgaccggcgcctgccgttctcaccacattcaccacgccggcggcgaagccaagcaacaggaacacgatgaacccgaaaggcgacgtcgacagcaagtggtcgaagccccagccaatccccgccccgacagcgaccccggcgatcaactccgaggataaccgaaaaccaagcgccatcgccgaggctctggccgctctgtctccatcgtcacctgcgggttgctcggtcctggtccggcggtcgcgaaactcggacaaccgttgatccaggctcccgagccgttcggaaagcgcagcttcctccgacgaccgatcgcgatctccatcctcgccgtgtcccgtgccctgtgtcatgcaacgaagacccgaaacgctgcggctgaatggaaattacgcccgtcaccctcaaaagccgcgcggaccatactgatggcccataatcaagtcaagccaagtcacgattgcgtctacttcagttatgtagctgatttatatgaatatattggcatgtgcgacagcgctgcacacagcgtgacgccgcaccgcagcaggtctgctcatgttcggccgatgtagccgtgctttcgccgggttgccgcgatcaaagaagccacggcgttcgttggtttcagtggtgggttttgggccacggattcccgatgccggtgtagaattgcaaagccgccggggcggagacagcgatgagaccagcgacgtcatccacaacatcatggctagcggtggttgccgccgtgttcgtcgtcagcggcagccccgtagccgcgcaatctgctccagacggcgaaaatggccgctacagcatgacgcccatccccgagggcgtgctgcggctcgacacgcgcactggcacggtagcgacctgcaccagaagcggcgcaggctgggcctgctacgcggtgccggacgagcggaccgcactcgacgccgagattggaaggctccaggccgaggtcgaacggctgaagggacagctggcggcagggccgactgtgtcgggcaaaatcgacgaggcgctgccgaaatccgacccgctgaagaaggccgaacccaaggtcgccgagggcgagcgcaagatcgagattccgttgccgagcgatcaggacgtcgatcgcgtgatgtcgttcctcgagagggcctggcggcggctgatcgacatggccaaccgcgtgcagaaggacgtgtcggggaaaatctagcgcgtcgcgagccgccttttgggggggcgcaacgtgcccgccaactgacgcaacggaatggggatggcgggcacgtcgcttgttcgaacgatcgagacctttcatgacatcagccaaatccgtcacgcgctcggcagcatcgtccgtgcaagcctccaccatcgcttcgtcattgctgacagtacagacgccgggccgcggattcagcgatctcaccggcgaagccgcaaagttcgtcgccgaggtgcacgcaggcgagggcgcattgacccttttcgttcgccacacctctgcctcgctgacgatccaggagaacgccgatccttccgtgctcgtcgatctcaccaccgtgctgtcccggctcgcgccggaagacggcgggtggacgcacgatgcggaagggcccgacgacatgcccgcccatatcaaggcgatgctgacgcagacttcgcttcatgttccggtcctgaacggcaggcttgcgctcggcacctggcaggcgatctatctgatcgagcatcgcagccgcccgcaccgccgtgagatcgtcctgcaattcatcggtagcctgcagtaagcactcaaaacaaaaccggccgcggagtccgcggccggttcgtgttgccgatcgatgatttcgatcagttcgccttgatgtcgacgtccttggtctccggcaggaacaggaagccgatgacgacggtgatcgaggcgaagatgatcgggtaccagaggcccgcatagatgtcgcccgtcgaggccacgatggcgaaggcggttgccggcagcaagccgccgaaccagccgttgccgatgtggtagggcagcgacatcgaggtgtagcggatgcgggtcgggaacagttcgaccagcattgccgcgatcgggccgtacaccatggtgacgaacagcaccaggacgaacagcagcccgacgacagctgccacctgcgggcggaagacgtcgaacggatgcgacatcttcacgatgccggcgtcaccagccttcggatagccagctgcctgcacggcggcgaggacggccgggttgctgtccttggcgctcgtgtagggaacttccttgccgttgaccatcaccttcacgccggagccagccggggctggcgtggtcgagtacttgaccgacgactgtgacaggaaagcgcgagcggtatcgcacggcgcggtgaagacgcgggtgccgaccggattgaacagatcgccgcagcccgcttgatcggccaccacctcgaccttgacctgctcgatggccttctccagcgccgggttggcattggtggtgatcatcttgaagatcgggaagaaggtaagtgccgcgatcaggcagccgccgaggatgatcggcttgcggccgatcttgtcggaaagcatgccgaacacgatgaagaagccggtgccgagcagcagcgaccaggcgaccaggaggttggcggtgtagccgtcgaccttcaggatcgattgcaggaagaacagcgcatagaactggccggtgtaccagaccacgccctggcccattacgccgccgagcaaagcgagcagcacgagcttgccgttctgccaattcccgaaggcttccgtcagcggcgccttcgagcccttaccttcttccttcatcttctggaagattggcgattcgttgaggcgtagccggatccagacggagatgccgagcagaaccaccgagaccaggaacggaatgcgccagccccacttcgcgaactcggcctcgccggttgcggtgcgggtgaacaggatcaccagcagcgacaggaacaggccgagcgttgcggtggtctgaatgaaggatgtgtagtagccgcgcttgccgttcggcgcgtgctctgcgacgtaggtcgccgcaccgccatattcgccaccaagcgccaggccctgggcgaggcgcagcacgatcaggatgatcggggcggcgatgccgatggtggccgcgttggggagcaggccgacgatgaaggtcgacaggcccatgatcaggatggtgaccaggaaggtgtatttgcggccgacgatgtcgccgacacggccgaacacgatggcgccgaacggacgaaccaggaagcccgcggcaaacgccagcagcgcgaagatgtcgcgagtggccggcggataatccgagaagaactgcgcgccgatgatgccggcgagcgagccatagagatagaagtcgtaccactcgaagacggtaccgagcgaggaggcgagaatgacgaaccgttcgtccttcgtcatcccccccgcgcgtgcatcagacacagccactgtcgacatgttgaatcgctccccaaaaatgcgtttccctcgcgccccgggcgtccggacgtgccggatcaacccaggtcttggccacaaggtaacatcggcgtgaaacccgccccaatacgactttcggccttgcgcactgtcgcgcagctgacgttgcggtatctgggactagcgcgcaggtcatcaggcaggtgattaaccccattgcggcaaagggataatgtgcccttgcatgccacggcggctcggggaagaattgacgcaccccgggatatgcgcgcgggtcggcacgaacgatagcaagagaacgatgaacgctccctcgactcatctcgtcatcgccgatgaccatcccctgtttcgcgacgcgctgcggcaggcggtggccggggttctggcctcggcaaggatcgatgaggccggatcgtttgaggatctgaccaagcttctggagcagacctcggacgtcgacctgatcctgctcgacctctcgatgcccgggatctccggcttttccggcctgatctacctgcgcgcgcaatatccggcgattccggtcgtgatcgtctcggcgtccgacgacagcgcgacaatccgccgctcactcgatttcggcgcctccggcttcattccgaagcgattcggcgtcgagacgctgcgcgatgccatcctcaaggtgatggagggcgacgtctgggttccggccgacacggatctgtcggccgcggccgaccccgagatgacgcgcctgcgcgaccgtctggtgactctgacgccgcagcaggtccgggtcctgatgatgctgtcggagggccttctcaacaagcagatcgcgtatgaactcggcgtctccgaggccaccatcaaggcccacgtatcggccattctgcaaaagctcggcgtcgagagccgcacccaggccgtgattgccgcggccaagatcgccggcggccagtggaagcaggggagtgccgacgggatgagccgctagagtgtggtcagaaggccgttggctgctctgatatccgccgtctcggacccatcggcaaagcccttgagcgacgattggagcaatcgcttcgcttcctcccgctgcccgcgttcggcaaacagtcgggcgagatcgatcgcggtgcgcagttcccaggctgtggcgcccttgcggcggctcaaagccagggattgcatcaactggtcctctgcttgctcgcccccaggccgtggcagcgacaagagggtcatacctttcattcgaagcagttcgggcatgtagagatgatcgccgctttgcttgaccagccggatcgcgtcatcgatcaggattgcgccctgttcgaactgtccaagcgccaccaagccctgaacgagcgcgatgttgaatgtcgtggtgagcagttcgtagccggccccgtggagctcgcgcaggcaagcattgatcgtctggatgccatgcgcggcgtttcctcgccggatcgccagctctcccttcacgccgcggccaaccacaagatagggacccatcgaccgagatctggcatgtgcgatgaacagatcgatgctctcttccgcggcgtcgaggtcgcctccccaaagtgagatcgagaccgcccagatcagcgcgatacagagcgtgatcgggtgctccatctgcgcggcctcggcgatcgtctgctgcgccagctgcagcgcttccgcgggccggccctgcaaccagagctcgcgggccagcgtgatgccggcccggttgcgatgatcgaagccgtggacggtgctgattcgctccgtgcccggaccttgccaggcgacctccagcatcttaagcgcgtcccgatgctcgccggccaggtggagcgagactcccatgagcgaacgagagagggcgattgagccggcatcgccaagcgatcgcgcgaccgcaaggctttgctgcgcatagccaagcgcggcctcgaaccgcccgatccgttcgtggaagatatgcatccgaccgagcaactggagctggttcggtgcgtcgccgcgcgccgcggcaatcgcaaggctcctgttcagggcgctccgcgccgcttcgctgccgccgcgggtgaacatcaaggtcagtccgagagcggcctggatgtgcatttcctcggcgctgccacgcgaggagggggcaatcgcaagcagcgcccgttctgaccagcgtcggcattcgattagcagcgacattgccaggaagatcggcgccgcggcagcggcgagcgcaatgccgatgtcgaaatcaccctctgcgccgaagcaccattccaacgcggcacgcacattgtgaagcgccgagaagtgagccgctcgctcgtccgcgctcggcacggccgcccatgtcgtcccggcctgttccagccatcgccggtaaaaagtcgcatggcgggcggcgagggcggcgtcggccggttcgatctcgagcagataggcgcgcgtcgtgtcgagcaggcggtagcgcatcatggcgcctatggggcgcggcgcgaccatcgatttggcaacgagactgtcgacggcatcgaacaggcgggtgcggtcgacgcgctcgtccggcacgacctcgagtgccgcatcgatggtgaagtgaccggcgaagaccgcaagtctgcgcagcacgaggcgctcaagatccgacagcagccggtagctccagtcgagcgtggcctgcaacgtcttctgccgtggtggcgccgttcgctggccttgccagagtagattgaggcgctcgtcgagcagcgcagccgtttgctccaggccgtaggcttcgacccggccagcggcgagctcgatcgccaacgccatgccgtcgagcttgcggcagatcccggcgatgatcacggcattggcatcatcgagcgttatctgcgcgccgctggctgcggcacgttcgaggaacagttgaagcgcgggatagacttgtgctgcagcgatcgtcactccggcgccgtcgggcggaacggcgagcggggccaatcgatagacctgctcgccctcaacgcgcagggcttcacggctggtcgcgaggatatggacgttcggcgccgcatggaagatctcagccgccaacggcgccgcagcggcaatgacgtgctcgcaattgtcgaggatcagcagcatccgcttgtcccgcagatgcgccagcagcgcgggcaggggatcctcggcctcggccggcaagccaagcatcagcaggattgatgtgatcacgagatggggatcgctcagtgcggcaaggtccacgaaatgtgcggcgtcggagaaagtcgtgagcagatcatgggcgagcgccaccgcgacggcggtcttgccgacgccacctggcccggcgaccgtgacgaaacgtgcggtcaggagcttctcggagatggcggcgagcgcctcgtcgcgtccgaccatccgctgcagccggttcgggagtttgactggcggcaactcggcccgaggtgcggagcgacgcgcggccggaagctgcgcttgcgaaatcggcgccacgaaacaatagccgcggccggagagcgtggcgatgtagcgcgcgccatccttgccgtcgccgagcgcctttcgaagggctgcgacgtgaaagcgtaggttgctctcttcgaccgtgatgccgggccaaactatcgccatcagctcccatttgctgacgacctcgttcggccgcgacatcagcgccaggagcgtgtcgaatgctttcgcgccgagcggcacggcgacgccgtcgcgcatcacgagcctttcatgcggcctcacggagaatggcccgaacgatagagttcccgtcgtggtgccggccggctcggtcatggcgaaatcttcgtcccttcaagaaggttcgatagccagatgatcgcgatccggcaaggccgtccgtgcatcggcgcgatcgcggatgcaggccttgtgaggcgcgtaaggtcgcatctcacaacttctcacaagtccaaacgggcacgctgcggcggccgctgctagtcagtggcgtgacggcgaaggagtccatgatgacacaggcggcaaaggtactctacacggccaggacccacaccagcggcgggcgccacgacggcatatcgcgcagctcagacggtcgcttggacgtcaagctgtcgccgccgggcggcgcgggcatcggtaccaatcccgagcaattgttcgccgccggctggtcggcctgcttcgaaggcgcgatggagatcgcagcgcgcaagcggaagatcgagcttcccagaaaatgcgctgttgatgccgaaatcgatctcatgctggacgagggcgcctattcgctccgggcgcttctcaatgtcagcctgccgggcctagatcgcgagatcgcaagcggcatcgtcgacgatgcgcatcggacctgtccttattccaaagcagttcgtggcaatgtcgatgtcacgatcgccctgatctgaggcgcactaccaatcacaacaaggcagcaagatcatgaagcaaaccatcaaccagcagcgccgcagcttccttggcatcgcggcgggaaccgtcgccgccggtctcggcgtgattgagttcgctcgcgccgagacggaagcgaggtcgtcctctgcatcaaatgcgtccttcagcacgatcaagcaggtcgatgcgggcgtcctcaacgtcggttatgccgaggtgggaccgtcgaacggccccgtcgcgatcctgctgcacggctggccttacgacattcacgcgttcgtggacgtcgcgccgatcctggcaaaagccggctatcgcgtgatcatcccttacctgcgcggctatggcacgacgcgcttcctctcgggagagacgccgcgcaacggcgagcctgccgcaatggccgccgacatcatcgcggtcatggacaagctcgacatcaagaaggccgtcgtcgccggcttcgattggggcgcgcgtaccgctgacatcatcgccgcgctgtggccggagcgctgccgtgcgctagtgtcggtcagcggctatctgatctccagccaggctgccggcaatgcgccgctgccgccatcggctgagctgcaatggtggtaccagttctatttcgccaccgagcgcggccgggccggatacgagaagtacacgcatgattttgccaagctgatctggaggctcgcctcgccccagtggaagttcgacgacgccacgttcgcccggagcgcggcggcgctcgacaacaaggatcacgtcgcgatcacgatccacaattaccgctggcggctgggtctcgcccagggcgaagcgaaatacgaacatctcgaaaagaagttggccggggctcccgtcatcgacgtgccgacgatcaccatggaaggcgacgccaatggcgcgccacaccccgatccaagcgcctatgcgaagaagttttcaggtcgttacgagtttcgtctgatcaccgggggcatcggccacaatctcccgcaagaagcgccgcaagcctttgccaaggccgtcatcgacgtcgacggtgcctggtgatcgatgcgatgctcggtccagcgtgactggaccaaggatatgccgaatccagattgaagaaaaagtcatgacgtccttcgaaaccgaaaacaagaagcgctcctatgccacggcgattacgctggccgtgctcctcctcgtcattgtcttgacttgcgtgccatgtctggtctcgatcgctctggctgcggaacctgcgcaaaatgcggccgaggcctcgccgattttcggcgtcacgattccgtcggactacaggcagtgggagttgatcgcacctgccgaagaggccgcgccgctcgacgagcttcgcgccgtcgtcggcaaccagaccgcattggaggcgtatcaagccggcaagctcccgtttccggacggcaccattctggtcaagcgtgcctggaagcggaagaagtcgccggaatttgcgtccgcaacgattcctggtgccgccaccacggtccaggtgatggtcaaggactccaagacgtacgccgcaacgggaggatggggctttggccgcttcgtcgatggcaaaccggtcgacgaggctcagcatcgcacctgcttcgcgtgccatgaagcgcgcgccaagggccgcgattatgtgttcacgcggctggcaccttaggccacctggagatcgcgttattgaaaacatggttcatcagcggcagctcgaccgactactgaccttgcgcctcactccgccgccaccatctgctgcgtgcgccactggccgagcagggcgcgaagcgaggccggcttcaccggcttgttcagcaccgcgactcgctcctcgcgcgccgcgacctgtacggcggggctgcgatcggcagtgatcaggatcgcggggatgccatcgccgaagcggcgacggatctcgcggatggccgcgatgccgttgccgcgatcgaggtgatagtcgacgagcaggccggtgacgcgcttgccggccgcctcgatcgcggcgatcgcgccttccggatcggcaaccgcgatcacttcggcgtcccaggccatcagcagcgtgcgcatgccgtcgagaatcgccgcatcgttctcgatgcagacgatcagcgcgcccgagatcggcgtgcgcgccagcggcgttgcgctggtcacggccgcggtgtgggtgatcgccttcgccgtcggcaccgtcaccaagaagaccgagccgccgctggcattggcgtcgatggcgatgccatggttgagcacgcgcgccagccgctccacgatcgagagccccagccccaggccgcgcgcgatccgcgccccctgttccaggcgatggaattccttgaagatctcgccgcgcttgaccggggggatgccgaccccggtgtcgtagacgcagatcttgagcgcggcgccgcggcggcggcagccgaccagcacgcggccgcgcggggtgtacttgattgcattcgagatcaggttctggagcaggcgccgcagcagcaggcggtccgactcgaccggcagcgagcagggcacgaaggtgagctccaggcccttggcgcgggcaatcggcgcaaactcgatctccagcgaacgcatcaggtcggccatcttgaagctcgagatcgaggtcgtcatcgcgccggcgtcgagcctggagatgtcgagcagtgcgccgaggatctcctcgatcgcctgcagcgattcgtcgatgttctccaccagccgcgtctcctcgccattgtgctggcgctcgaccaggctggtgacatagagccgggccgcattcagcggctggaggatgtcgtggctggcggcggcgaggaaacgcgtcttggagatgctggcgtcttcggccgcgctcttggccagtgccagctcggagttcagccgggtcagctcctcggtgcggtcgcgcacgcgcttttccagcgtcgcattggcgcgctccagcgcttccgccgcttcgaagctgggcgtgacgtcggtgaaggtgatgacgaagccgccgccgggcatgtggttcgtgagcacctcgatcaccatgtggcgctccggcaggcgttcgagataaggctcgctgtcggtggtgtaggcggcaaggcgccgctccagcgcggcgtcgcgctcgaacggatcctcgggatcgcccacaccgataaactccagaatctcacgcagcggcgtgccgaactggatcaaatgcgggggaacgttgaggagatctccgaactgccggttggagcagatcagctgcagatcggcatcgaacacggcgatgccctggcgcacatggttgagggccgtctggaggatctcgcggttgaaatgcagcgctgcgtgggagtcgtcgagcagcttcagcgcggccttggcggagaccgtccgcttgcgcagcagcagcgacatcacgagacgcgaggaggcagcgccgatcgaggaggcgatcaggtgctcggcatgctgcagcagctcgaaatcagcaggcgctccaggctccagccgcacgtttcgccgcgccgagaatgcctcgaaggaatgccgcgcgcgctcgggtccgagatattgcgccacagtggtctggatgtcctgcacggtgacgctggtgcgccagcggcggaagctcggggagatcggcgcgagcgtattgggcacgaacagatcggcctgcaacagctcgatggacgacggctgacgcgccagcgacagcagcacataggtcaggatgttgagcgacagcgaccagatgacgccgtgcatcagcggcggcaggtcggcaccgaacagcgcctgcggccgtagcgcctcgatgccgaacgggccgtgctggagcagcatgatgcctgatgtcgaggaatccatgaagctcggcatgaacagcgtatagagccacaccgcgaagccgaccagcatgccgccgatggcgccgcgcgcggttgcgcgtcgccacagcagcccgccgaagaagctcggtgcaagctgggcgatggcggcaaaggagagcaggccgatggccgcgagctgggtactgccgagcgcgcgatagtagaaataggccatcaccatgatggcgaagatcgcgagccggcgcgaacgcagcaggaagtcgctgaaatcggcaccgccggcgcgtccctccggccggcgttgcagcaccagcggcaccacgaggtcgttcgagaccatgatggagagcgcgacacattcgacgatcaccatcgcggtcgccgccgacaggccgccgacgaagatgacgacgctgagcaggtccgcgcccccctccatcggcagggccagcacgtacatgtcggggtcggcggcgccgaacgggaaagtgacgaggccggcaatcgcgatcgggatcacgaacaggttgatggcgaccaggtaaagcgggaacagccaccgcgcgcgcccgacctcggcgtccgaggagttctccaccacgctgacgtgaaactggcgcggcagcagcatgatcgcacacagcgacagcagcgtcatggtcaggaagttgccgatcgacggcgaatagttgatggtgcgcaccgcctccggggtcttcatggcgcgctcgatcagttcgtgcggcgagaacatccagaaggtgacgaagatgccggcggcgaggaaggcgacgagcttgatgatggattccgtcgcgaccgccagcatcaggccgtgctggtgctcggtggcgtcggtttgccgcgtgccgaacagcacggcgaacgccgccattgccagcgtcaccatcagcgccacgtcgccgacgagcgggatgtgggagaaggcctggtcttcggtcaggatcgtttcgagcgaggaggccacggccttgagctggagcgcgatgtagggcaccgagccgatgatcgcgattccggcgacggtcgccgccaccgcctggctcttgccgtagcgggcgccgatgaagtctgcgatcgaggtgatgttgtgggctttggccagctggatcatgcggcgcagcacgccggcgccgagcccgatcatcaggatcgggccgacatagatcgcgaggaagtcggtcgaggtccgggtggcgaagccgaccgagccgaagaaggtccacgaggtgcagtagatcgccagcgacagcggatagatcagcccggaggcgcgcctggccggcgagcggcggtcgccatggctcgccaccaggaacaggaagccgatatagccgaaggcgacggcgatcacgccccagtcgtgcagcatggtgagcgtgcttctcccctgggcgctgccagcgccccgaacttattttccccgtgaacctagcgcgtcggacgaggggaggcgacagcgaaatgccgggtggcggcaggaaccggggcttgtcgtcaaggtgcaagcgtgcaccgtgggcgcctccccgctggagggggagggtcgatcgggcgcagcgcgagcgggtgaagtgatctccacgcgggcagcgttcgaggtggagagaccattatccaacctcgtctcacattcgctgcgctcaaggtgcgccggcccacgggcgagctacgcccgtcccggcccctccaggggagggtaagggcctattccgccgcgagcgacttcgcgcgcagcggcaggccgaggcggtcccacacttgaagcagcgcttcggcgagttgatcgatcaggccgtcatcgtggtagggcgagggcgtgatgcgcagccgctcggtgcccttggcgacggtcgggtagttgatcggctggatgtagatcccgtgctcttcgagcagcaggtcggaggcctgcttgcacttctcggggtcaccgacgaacagcggcacgatgtgggtgtcactcgacatcaccggcaggccggcggcattgaggatcgccttgacgcgggcggcgcggtcctggtggcgctcgcgctcccagctcgaggtcttcaggtgcctgatcgcggcggtggccgccgagcagaccgcgggcggcagagcggtggtgaagatgaagcccggcgcgtaggagcgcacggcatcgatgatctggccgttggccgcgatgtagccgccgaggcagccgaatgctttcgccagcgtgccctcgaggatgtcgatgcgatgcatgacgccgtcgcgctcggcgatgccgccgccgcgcgggccgtacatgccgacggcgtggacctcgtcgacataggtcatcgccccatacttctcggcgagatcgcagatcttggcgagcggggcgacgtcgccatccatggaatagaggctctcgcagacgatcagcttcggccgatcggggccggccgctttcaacagctcttccagatgcgccagatcgttgtggcggaacacgacccgctcgcagccggactggcggatgccctcgatcatcgaattgtggttgagctcgtccgacaggatcaggcagttcgggatgagctttgcgatggtcgggatgcccgtctggttcgagacgtagcccgaggtgaacagcagcgcggcctccttgccgtggaggtcggcgagctcggcttcgagctggaccagcggatggtgcgtgccggcgatgttgcgggtgccgccggcgcctgtgccgacgcgcgtggctgtctcaaccatggcgccgaccaccttcggatgctggcccatgccgagataatcgttggaacaccagatcacgacgtcgcgcttgcccctgggcgagtgccagaccgcgtgcgggaaccggccggcggtgcgttcgaggtcggcgaacacgcgatagcgccgctcggtgtggagacgatcgagggcggaatcgaagaactggttgtaatccatcggcgaaacctgcagcggaacctggcccaaggtggccgttcgatttttagagcttttcgagctccaatgtccatgcgccagcacacatttgaggcaaggcgagcgggtatattgatagcggcggatggcgcgggattgttgatttggatcaaccgcctagcgcttctgcagcccaggaccgggtttcttcggggaggtcagggctgtcgtggacattttgtctatggtgcgctcgccgttcatgattggcggaccggccacaccgacgccgcagctcccgcagggtcggccagcgcggcgcactcgcgcgaaaggacgccccgatgaaacgtgtcatgatcctcaacggccccaacctcaacatgcttggcatccgtgagccgcacatctacggcaccacgacgctcacagaggtcaacacaagctgcgagcaggctgccgccatgctcgggctcaagcttgccttccaccagtccaaccatgagggtgtgctcgtcgacctgatccaatcggcgcggcaggacgccgacgccatcgtcatcaacccggccggtctctccttcacctcggtctcgatcatggacgcgatcaagacgttcgagggtccggtgctggaggtgcacatctccaacatccacgcccgcgacgaatatcaccgccactcgaagatctcgttcgtggcgaccggcgtgatctgcgggctggggccgttcgggtacatcgcagctctgcacgcgatcgcgaacatgaagtgagctggcgcggcagcggagatctgctcctcgcaacaagggcggcgtgtgacggaggcaactcgcggcgtctgggtggcgtcgagggcgcctttgtcgcgatcatgtatggtgtcgctgacgataggctgcgtgcatcccgacgcgctttctcgacgcgactttctcgcgggtcgtcgccacatacgaatgcgactagtctggtctttgcgcgtttgtcttgtctccaatatcgctggcaaacgccgccgccgccggcgacctcggctatgtcgtgctcgacgccgatctcggtggtcaggattccggcgaattgctccagcagatccgcagcctcgaggggacggtcggcgcacggctggtgttcgagcattaaagcggtcgtctgccgggcttcgagtttcacctgcgcggtttagcgaaacgcctcgtttgacaaaagccccgcgcttgtctatatatttcgcatgcgaaataatagcggcgcgggacaccaccggctgatctacctgctgagcgtcgcgaaccggcgcttgcagcgctggatggctgcgcggccggagagcgcggtgacgccggcacaggccgggctgctcttcattctcggcaagcaggatggcgtgcttatgggcgaggcgggcgcggcgcttgatctggggccgggcggcatctcgggcctcgtcgaccgcaccgcagccgcaaagctgatcgagcggcgggctgatcgcgaagacggccgcgcctggcggatctggttgacgccgaaggggcgcgccgcgctggcgcaggccaaagcaggtgcggcagaggtcaacgcggcgctgacggaaggatttacggcagcggagatcgacatcgtcgcgcgctggctgacgagcattccgcacaagtttccaagaggagcagacgaatgaccgagcacgtccggatcgataacagcggcggaattctcacgttgacattggcgcgccccgacaagaagaacgcgctgaccgatgcgatgtacggcaagctcggcgatgcaatcgaatctgccgagttcgatccgtccgcccgcgtgatcctgattcgcggcgagggcgacatgttcaccgccggcaacgatgtcggggagttcgccgctgtcgcagccggaaaatcggaaggcagccgcaacgtcgtgcgcttcatccagtcgctggcgcgctgcacccggccgctggtcgcggccgtgcagggccgcgccgtcggcgtcggcaccacgatgctgctgcattgcgatctcgtcgtcctcgccgacaatgcgcaattatcgacgccgttcgtcaacctcgcgctcgtgccggaggctgcttccagtctgctgatgccggcgcgtatcggccatgcgcgcgcctatgagatgtttgcgctcggcgagaccgtgccggccaagtcggcgctggaatgggggcttgccaaccgtgtggttccgctcgagaggctcgatgccgaggcgcttgcactggcgcagcgtcttgcgcgccagccggccggtgccctcacagcgaccaagcggctgatgcgcaacggagaggctctggtcgctcagatgcaggccgaaggcgagcagttcgcgcagcgcctgcgcactgccgaggcgcgtgaggcgttcacggcattcgccgagcgccgccctccggatttcacgaaagtggcgtaaaggcccaagttcctgggaccggtacttcccgggacacacatcatttgaataaaccttaacgaaactttggcatgtccccctgcaagatgaccgctcgcgacgagtaggtcttttggtccatgtcaatttttaagaaatcggtaagcacgctcctcctggttctgatgacgctgctggccgccggtgcgctgaccagcacggccatacagatggtcggggccttcggccgttacagcgacagcctggagaccgagcggctcgcgaatgccgacaaggcgatattccatggcgtgctcgcgttgcgtaacaatcgcggcgacgcgcagagcgcgctgctaggcgaggacgatccgcgcgccaagctcggtgccgcggagaaggcggagcaggccggcttcgacgccatcatcgccgcgctctccaccgtcgaattcgcccggcgcgacgaactcgcggccacgctgaagcagcgctggagcgaggccgcgccgaaattccagctgttctatgacgaggccaagctgccgcgcgccgaccgcaaagtggagcgcacggcaccctggtacgatgcggtgaccaaggtgatcgagccggccaatctggcgtccaccgcggtgtcgaaccgggcctggatgaacgatcccttcatcgcccgcatgatccaggtccgccggctcgcctggcaggtgcgagatcgctacggcatccagtgctcgaccttgcgcccgaacgtcaatgccagcaagccgctcgacgagaggcagaagcagacggtggcaagctggaacggcatcattaccgccggctggaccggcatggaggaggtgctggcggcgcctgacgtgacgaccgacctcgttaacaccgccaaggaggcgcgcgccaggaccgacggtgtcctcaagcagatcggcgacatcaccaggaacttggacggcagcggccgtcccgcgatgccggcttcggaatggaacgcgttgtgccagtctccgttcgcctccatcgtcgcggtcgcgaacaaggcactcgacctgtcgatcgcgcgcgccgacacggttcaggcgaaggccctcaccaatctggtcgtgcaatcgctcgcattcctgctcgcgctggccgtgaccctgaccggcgtgttcgtggtgcgcaaccgtctcgtgcggccggtgggcgctatcctcgacgccatcgcccgcatcagcgcacgtgactatgagacgccggtgccgcaaccccgccatcgcgacgagttcggcaccatggctgctgcgcttgaaagcctgcgcgagagcgcggcgacggcggaacggctgggccgggagcgcgaatcgcaacaggcgctgcagctcgcccgctccggcagcgtcgacgcagcctgccgcagctttgatgatgcggtgcaggcggtcatccagagcgtcgtggcctcgacgcaggagctcgatgccaccgcaaccggcgtacgctcgctggtctcggaatcgagcagccagaccgccgcggtttcatccgccgccgagcaggccaccaacaatctcgagactatcgctgccgcgaccgaggagctctccgcatccgtcggcgagatttccgcgcaggtgcagtcgagcgcacgggaggcccgcgaagctgtcgcacaggctgagcagaccaatgcgacggtggagatcctcgaccagactgcaagccgcatcggcgaggtcgtcaagatgatcaacgccatcgccggccagaccaaccttctggccctgaacgccaccatcgaagctgcgcgggcaggcgaggccggccgcggcttcgccgtgnnnnnnnnnntgcaggtgaggtcaagagcctcgctgcgcagacggcgacagcgaccgaagagatatcgcgccaggtcgaggagatccagggcgcgaccggccaggctgttgctgcgatccgctcgatcggcggcgccatcagcggcatcgacgagaagatgaccgcgatcgccgccgcggtcgagcagcaacgcgcggcgaccaccgagatttcgcgcaatttccagcaggcagctcagggcacccgcgaggtcaccgacaccatcggcagcgtcgcgagacttaatcaggagaccggcaacgccggcacggtgctgtcggagtccgtcaagaagatgtcggccgacgcggatcgcctccgcgtcgcggtcgagggcttcctgggagcggtgaagaccgcataagattgatctctccgtcgagtgacgagcgggcattgccgccggtccgcgcggcaggtacatctgtgccgccacagctcgctagcggcaccagacagaagacacgtcagggatggagagttcgatgccggtcaccccacacaaggccccgcgtccctatcgcggcgtgttccccgtcgcgcccaccattttcgacgagcgcggtgaactcgacctcgaaggccagcgccgctgcatcgatttcatgatcgatgccggctcccacggcgtctgcatcctcgccaatttctccgagcaattcgtgctcaccgatgcggaacgagaggccgtgatgcacgccgtgctggagcatgtcgcaggccgggttcccgtgatcgtcaccaccacgcatttcagctcggccgtctgcgcggcccgcagcaagcaagcggaggcggcgggcgccgctatggtgatggtgatgccgccctatcacggcgcgacgttccgggtccccgagaaaggcatcatcgaattctttaaggtcctctccggcgcgatcgacattcccatcatgattcaggacgcacccgttgccggcacgccgctgtcggtcgagctgctcgcgcgactggcgcgcgacttctccaacatccgctacttcaagatcgaggtggccggcgcggccgcaaagctccgcagcctgatcgaggccggcggcaaggacatcgaaggcccatgggacggcgaggaggcaatcacgctgctggccgacctcgacgccggcgccaccggcgcgatgactggcggcggctatgccgacggcatccggcagatcgtggacccctatttcgccggcgatcgcgaaaaggccaaggccgcctacgagcgctggctgccgctgatcaactacgagaaccgccaatgcggcctgatcgcctgcaaggtgatgatgcaggccggcgggatcatcaagtcggatgcggtgcgccatccgctccagccgctgcatccggcaatgcgggcgggcctgctggagcttgcgaaggagcgcgacgcactggcgctgcggtggggaaagtagctctctccgccgtcattgcgaggagcgcaaccgaggaagtaatccagagcaccttgcggagacaatctggactatctggattgcttcgctgcgctcgcaatgaccagtttggaggttactcggccagcagccactcgccaatgacgcggaagcgcgccttggcatcatcttgcctgaacagcgcgatacggtcgatcatcaagctctcgagcttcagccctgcaaatcgcccccgcagcatctcgaggatcggcccgcgccgctcgacatccagccgcccggtcagcgtcatgtggaagcggaactcctccatcacgtaagggtagccccagcggtcgagataatcgcgctgccgctggctcagcttctcgggccgtcgacgtgcgcgatcctccgccgtcagcgcggcgcgaaacggatcgaaatcgcgcacgcaatcggcggcgagctgttgcagtgcatcgaccggttcggccggaatgacggcaatgaatccgctgatggaatccacaatcggccgaatcacggggcgcggtcgtgacctgccggcgaatgccgcgcaggcggccatcagctccacctcggtcttgccggacgctagcaccatcggcgctttcagcgtcgcgtgaaaaccgtacttgcgggggtcggcggtgacgtcgctccagtccgcagcgagctgcaaagcgtcggcgggaaaggctagttcgttgccggtgcaggcatcatagccgagcagctccgcgccgaagcgggagagggcgctgttgcggcctgcggcaaaatagatcgcgtagcggggaagacctgtcatcgcctcagcatagccaatttaggcggccacgatagcctggcgcggcgccgctgccgcggtgagcagccgagttgcatcgctgagatgcacgagcttgccacctgagatcaccgcgatcagccgcgggcgtagcgccatgctgccgtcgacgaggagaatgtcggcgcggcatccttccgcgagcatgccgcgatcggcaaggccggtcgcgcgcgcggggccggcggagaccaggtcccaggccttcgccagcggcagcacgccgtcggcagcgagccggaacgcggcgagcagctgcgcgggataataatagtccgacgccagcaccgagcagaggcccttggcgatcatgtccgatgctctggtccagccggtgtggctgccgccgcgcacgacgttgggcgcgccgtagacgatggcgtcaccggcatccgcagcagcgcgcgccgtctcctcgttgatcggaaactccgcgatgtgagcgccgagttcgcgaaaatgccggcgcatcgccggcgtcgcatcgtcatgcgaaagcattcgcaccccggcagcgcgggcgaccgcagccagccgcgataccgaggccggcacagcgtcggcgcgcgaaaccacgcgctcgaccagccgatcgaactcgtcgatcgaaaggcaggtccgctccaccatgcggttgcgcttgcggggcttggccatgtcggcgacggtcccgtccatgtggtcgttgaaggcgaacaggtcgacgcggccgtcagcgagccactggctgatctcggcctcggcgtcgagattgtaggtttcgtggcgcaggtggaagcgggtatcggcagcgaattgcgggcgctgccgctcgatggcttccagcagtccgcgcgcattgtcggcgctgcgcaggcccggctcccaggaacaggtcgtggcgtgaaacaccgtggtgatgccgttgctgatcgcctggcgatcgctgtcggcaagcgcgacgtcgattgggaaattgacgcctgcgcggggcatcatctgccgctcgaaggcatcgccgtgcaaatcgacgatgcccggcagcaccagcaggtcgcgggcatctagcgccagccgcgcacggcctcgagaagcatcgacctgggcgatatccgttccggataccagaagtgaggtttcgacgaactcggtgccgatcagggcccggccgctttcgaggactatgtctgtcacgcgatcgcgcttcgtttgccggcgggagaattggtgagagggctcgcctgtgcttcgtatgtcgcaagaaaatcttcaatcccgagcttgcgaaaatccggcagcgcccggcgcaacttgtcgtgatcccagtcccaccacgcgagcctggcaagccgcccagcgatctcctccgagaagcgccgccgcacgatccgggccggattgccggcaacgatggtgtaggccggcacgtccttggtgacgatggcgccggcggcaatcacagcgccggtgccgatgttgcgacccggcagcacgacggcgccgtggccgatccagacgtcgtggccgatatggatgtgatgctggcgccgccactcgaagaattcggcatcgtcgctctcgccctcgaaataggcgctggagcggtaggtgaaatgcgcctgtgtcgcgcggtgcatcggatggttgcccggattgatgcgcgtcattgccgcgatcgagcagaactttccgacagtggtgtaggtgatctgcgaatcgttcacgacataggagtaatcgcccatcgccacttcatgcaggatggtgcgtgcgccgacctcggtataggcgccgagccgggtctcatgcagcacggccgaagggtcgatggtcggctgaaccgagagaattttggccatgtcgtatccctggtgcgaaggcgggcgttcctcttcgagcggcttgatgacaatgtcatgacgtcgagatgacgggggatgaaccgcacaggatcgccgcaccgcaacggtactgtcacacaagtgttaagcaccgacgttagcggttgggcccagcaaatctggagcctggcatgctggtggtggatggtctgacgtgtcgcttcggcacaaaagccgctgtggacgacacctcgtttcaagtgtcccccggcggcttcgtcggtgtgatcgggcgatccggcgccggcaagtcgaccttgctgcggagcatcaatcgactggtgacgccgaccgagggacgcatcctgttcgatggcgtcgacgtcaccgcattgcgcggcaaagagttgcgccaatggcgggcgcggtcagcgatgatcttccagcagttcaatctggtcggccggctcgatgtcctcacgaacgtcctgatgggacggctagcgaccatgccggcctggcgctcactgtcccaaatttggccggagcaggacaaggcgctggcgatgtccgcgctggaacagttcgatatcgcgtcgcttgccgcccagcgcgccgaccagctctccggcggtcagcagcagcgcgtggcgatcgcgcgcgccctggtgcaacagcccgatattattctggccgacgagccgattgcctcgctcgacccgcgcaacaccaaggtcgtgatggatgcgcttctgcgcatcaacaagcatttcggcatcaccgtgctctgcaatctgcattcgctcgatctcgcccgcagctactgcgaccgcctgatcggcatggccgcgggccgcgtggtgttcgacggcgcgccgtcgatgctgaccgatcaggtcgcgcgcgagctctacgatctcgaagccaacgaggtcatgggtggcgcgccggccgccgcgcccgagggtgttccggcgctcggcagcgctgccgccgcctgagcggcgggagcgcacactcaacgtctcgcgttaaacgaactccagctgaagaagaggggtatcatgattactcgtcgattggttcttgccggtgccgcggccctggccttcaccacctccgcctccgccgaagactggcggaagaaatacccggagatcactctggccgtcgttccggcggagaatgcctccggtgtgaccgagcggtttacgcccttcatcaactatctgtcgaaggagctcggtacgaaggtcacgctgcgcgtcaccaacgactatgccgccgtgatcgaaggccagcgcgccggaaacattcacatcggctattacggccctgcagcctttgcccgcgcccggctgaccggtgtcaagaccgatgcgtttgcgatcgaggtcaatgctgacggctcgaagggctactactcggtcttttacgtgctcgcgaaatcgccctaccagaagatcgaggacctcaagggcaagaacctcgggttggtcgacccgaactcgacgtcgggcaacaacatgccccgcttcaagctgaaccagatgggcgtcgatcccgaggcctatttctccaaggtcgtcttcaccgggagccatgaaaacgcggtgctggcgctggcgcaaggcactgtggacgtcgccgccaactggtggaacgccgaggatgattccaacctgacccgcatgctcaacaagggcatggtgaagaacgccgacggcgcgccgatgaagaaggaggacttccgcgtcatcgtgaaatcggacatgatcatcaattcgcccgttgcctatctcagcgaccttccggacgacatgaaaaccgcgatcaagaaggctttcctggacgccgcgcagaaggaccccgaagccttcaagaagctctccgacggcaagaacaagccctgggatccggtcaccaacgaagagtacaacaaaacgatcgagctgattaagttcgtcgaccatctgcgcaagaaggcgtcctgatcgtagggacacatcgcccaagccgggtcaatcgacccggctctttccatgatcggctcgcctcccaccgaatgacaattgcggtttcgatccttcccgagcagcagctgactgtgctgaatgcggtctatcgcaaggcggtcgcacgcaagcggttacggctgctgcttggcactgtgctgttcatcgccgcgctgcttgtcgctgcggtcggcgccgaagtgaacttgcgcaccttattcacccatttcggcaatttcgtcagctacttcgatcgtattctcacgctcgacactggccagcgcgtctggaccgatctcggcgagtggttctggggctggcgcaaatggctgaagctgctcgccgaaacgcttctggtgagctatgtcggtacgttgatcggggctatcctcgccttcggcttgaacttctttgcggccgcgaacaccgcgccggcgcgctggctgctcttcgtcgtgcgtcgcctgcttgaattcgcccgcaccgtgccgagcatcgtattcgcgttgatcttcgtcattgccttcggcctcggaccgatggcgggcgtgctggcgatcgccatccactcgaccggcgcgctcggcaaattgttctccgagatcgtcgagaatgcggacatgaggccggtcgaaggcgtgcgctcgaccggggcaagctggctgtcctgcatgcgctttgccgtgctgccgcaggtgatcgcaggctatgccagctacgcgctgctgcgcttcgagatcaatgtacgagaagcctcggtgatgggctttgtcggggccggcggcatcggacaggagctgattgttgcgatccgcaagttctactattcggacgtcagcgcgatccttctgaccatcatcgtcacggtcttccttatcgacatcggcaccggctggctgcgcggccgcctgttcggcagcgaggcgcggacatgagccgccaccccgaggtcgatacggtacagcttcgcgcgcgccacccgaatgtcttcaaccggccggcgtcggcgcggctcgcgacgccggcgatgcttgccgccgcgctcgcgctcctggtgttcgggctggtcgacctcgacttttcgccgtcgcgtttcgttgccggcgtcaatcagcttggctggatcacgatgatgatgatcccgcccgatcccggctcgtcgctgccgctctatctgaaggcgctcggagagacgctgtcgatcgcgctgctcggtaccacgctcgccgccctgttcgcactcccggtgagcctgcttgccgcgcgcaacatcgtgccgtcgggcttcttccgtttcccggtccggcgcttcctcgattcgattcgcggcgtcgacacgctgatctgggcgctagtctggatcaatgtcgtgggtctcgggccgtttgccggggtgctggcgatcgcggtgtcggatttcggcgcgttcggcaaattgttctcggaagcgatcgaggccgccgaccagaaggaggtcgagggcatccgtgcctccggcggcagtgccctgcacgagatccgtttcggtctgatgccgcaggtgctgcccgtcatcgccggccaggtgctctactatatcgaatcgaacacccgatcggccaccatcatcggcatcgtcggcgccggcggtatcggcctgcaactagccgagcagatccgcgtgctggaatggcagaaagtctcgttcctgatcctgatgatcctgatcgcagtcgccgcgatcgatttcatctcgggcaagctgcgctttgcgatcatcgggcgaaggccggtggtgtagaagatcctttccgtcatggccgggcttgacccggccatccacgctctttttgtgggatcggaacggagaatgcccggctcaagcccgggtatgaccggaacgtggaactggctgcggccgcctacgactccaccaagaactccacccgctccgccgcgaagcgcgaatgcttggtcagcagcgccttgcccgcgagatcgtggtcggtggcgtcgaccacgagaatcggccgacccagcgccagatcgagccgtacggcatcggtcgcgtcgacaatgccggcggtgattcgggtcgcgccgcggcggtagtcgcgcacgccgtaatgcgcgagcagcttggtcatggagtgcgtggctgcgaacacggcgcccgcgtccggaaacagttccgccgagagccaggtggtcgagacgcagatcggcgtgcgatcagcgaggcggatcgcctcgattcgcaccagcggtgcgccggtcttcaaccccagctcccgcgcgagctcgcgcgtcgcgatatcatcgcttgcctcgatcagacgcccatgcggctcccgtcctccggcgccgacgatctcggaaaatcgcgtgcgcgagcgcaagggataggcgagcttctgcgcctcgacataggttccgctgccgcgctcggcgcgcacgagaccgcgctcggcgagcgcagccagcgcgcgccgcacggtgtgacggttgacgcgataggcctcggcgatctccacctcaccgggaagcttgtcgcccgccgcaaagcggccgtccgcgatgccgcgctcgatgccgtcggcgacgagacgccagagcgcgacgcccgaagaggctgtgtcctgcatgctcatgtcgcggaagcctactccagaaatcacatcattgtcacgaaacggtcatggcgcgtccgtatgaagttgtctattatcatagacaacttcggcgcggcaagttcggtggagcaggtgacgcagcacaacaatcagcaagcccagcgcagggccgcgatggcggtgctggcgcacgcggaggcgggcgagatcgccgctcgcctccgcaacctggcactcccggcccatcaggatctgcgcgcgcccgaaaacggcctcgtcatgctgcgcggcagggtcgggggcgacggagcaccgttcaatctcggcgaagccacggtgtcgcgcgccgcggtgcggcttgcgaccggcgagatcggcttcggctatacgctgggacgcgacggtgagaaggcgcggctgatcgcgctatgcgatgcgctggtgcaatcccgtgaattcggcagcgcgctggagcgcgacgtgattgccccgttgcgcgaccagctcatgatcaagcgtcagcgggccgcggaagagaccgctgcgacgaaggttgatttctacaccatggtgcgcggtgaggggtgagatcatgaccacgattgcagaactgccgcccggtttcgtagacaaggtgttgtcggcacagtcgaccttccgctcggtcatggatgcgatggcgcggccgggttcggtccggcgcattgtgccgggagcggggacgccagggccgatgatgcggggcaccgctgcgatcgcgctgacgctgttcgatcacgacacgccgctctggctcgacgcgcggatggcggagagctcggacgtggtgaagtggctcaagtttcacaccggcgccccggtggtgcaggacacgtccattgcaggcttcgcgctgatcggcgatggcgcagctttgccctcgctggagcgttttgcgctcggcaccagcgaatatccggatcgatcgaccacggtgattctccaggtcgattcgctcgatgccgggcgcggcttcgagctgcgcggccccggcatcgacggtgtcgcgacgctcaaggcgtcgatcacgccttacgatctattcgagcgcctgcatgtcaacgaggcgctgtttccgcgcggcatcgatgtggtgctggtcgcggatgatgccgtggttgcgatcccccgcactacgcgcgtcgtgagcaaggaaagctgaaaaatgtatgtcgcagtcaagggcggcgaacgcgccatcgagaacgcccaccgcctgctcgcccataagcggcgcggcgaccagggcgttccggaggtcacgctcgcccagatctccgagcagctcggtctcgccgtcgaccgcgtcatgagcgaaggctcgctctacgaccgcgagcttgcggcgctcgcgatcaagcaggcgcgtggcgacctgatcgaagcgatcttcctggttcgcgctttccgcgccacgatgccgcgcttcggcagcagcgagccggtggacaccggcaccatgcgagtacggcggcgggtatcggccacgttcaaggacattcccggcgggcagattctcgggccgaccttcgactacacgcatcgcctgctcgatcccttgcttgccgaaggccttgcgccggaagcgccggcgacggccgacgcgcacaccgcgccaacgccgcgcgtgacggacattctcgggcgcgatgggctgatcgaatgttcgccgccggccgacgacggcgcaagcgtcggcgatcttacccgcgagccgctgaactttccggcggatcgtgatttgcggctgcagaacctcgcgcgcggcgacgagggtttcctccttgcgatgggctattccacccagcgcggctatggccgcaatcaccccttcgtcggcgagattcgcttcggtgaggtcgaggtcgaactgttcgccgaggacgccggctttgcggtgccgctgggctcgatcgagctgaccgagtgccagatggtcaaccagttcaagggctccgcgaccgaagcgccgtgcttcacccgcggctatggcctcgccttcggtcagagtgagcgcaagaccatgtcgatggcgctggtcgaccgggcattgcgtgcccgtgagctcggcgaagaggtgcgtgcaccggcccaggacgaggagttcgtgatgtcgcattcggacaacgtccaggcgaccggcttcgtcgagcatctgaagctgccgcattatgtcgacttccagtccgagctcggcctgttgcgcaagctgcgtcaagagtttgccgatgccagcacgcccgatgccatgaaggaggccgcggaatgaacgcgcccgcctacaatttcgcctatctcgacgagcagaccaagcggatgatccgtcgcgccatcctgaaggcgatcgcgatccccggctaccaggtgccgttcgccagccgcgagatgccgatgccctatggctggggcaccggcggcgtacaggtgacggctgcgatcctcgggcccgaggacgtgctgaaggtgatcgatcagggctccgacgacaccaccaacgcgatctcgatccgcaagttcttcgccaagaccgccggtgtcgccacgacgacggcgacgaatgaagctaccgtgatccagacccgtcaccgcattccggaaacggcgctgcacgagaaccaggtgctggtctatcaggtgccgatccccgagccgctgcgtttcctcgaaccgcgcgagaccgagacgcggcgcatgcacgcgctcgccgaatacggcctgatgcacgtgaagctctacgaggacatcgcccgcttcggtcacatcgcgacggcctacgcctatcccgtgaaggtcaacgcccgttatgtgatggatccgtcgccgacccctaaattcgacaatcccaagatggacaattgcccggcgctgcaattgttcggcgccggccgcgagaagcggatttacgcgatcccgccttacacccaggtggtctcgctcgatttcgaggatcatccgttcgagccgtaccgtttcaacgcgccctgtgcgttgtgtggcgcagagaactcctacctcgacgagatcgtcaccgacgacaagggaggacggatgttcgtctgctcggacacagactattgcgaaggccgtcaggccaccggccatcacggcagcctcagcgccgcgccgtacaaggagaaggcgcatggttgatcaagccgcgcttgaaagcgaccagccgctgctgacggcgaaatccctcggcaagtccttcggccgcatcgccgcctgccgcgacgtttccttcgcgctctatcccggcgaggtgctggcgattgtcggcgagtcagggtcgggtaagtcgacgctgttgcagatgctgtcgggccagctggcgccgagcgccggccatgtgtcctaccgcatgcgcgacggcgtcacccgtgatctcacgacgctcggtgaagccgagcgacgtttcctgtttcgaaccgattgggggttcgtacaccaggatcccgcgcagggcctgcgcatggcggtctcggccggtgccaatgtcggcgagcgtctgatggcggtgggctggaatcactacggccgcatccgcgacacggcgtccgattggcttagccgggtcgagatcgacgtcgcgcgcatcgacgatgctccgcgcacctattccggcggcatgcgccagcgtcttcagatcgcccgcaacctcgtcaccgagccgcggctggtattcatggacgagccgaccggcggcctcgacgtctccgtgcaggcgcggctgctcgatcttgtgcgcagcctggtcgccgagctgcatctggccgtcatcatcgtcacgcatgatcttgccgtggctcgccttttgtcgcaccgggtgatggtgatgaaaggcgggcgcgtcatcgagaccggcctcacggaccaggtgctcgacgatccccgagagccctatacgcagctccttgtctcctccattctgccaccatgagtgcttcgatgaccgcgatgatcgacgttgccaatgcccagaagacctttacgatgcacttgcagggcggcatcgagctgcccgtcgtgcgcggcgtgaccttccacgtcaatcctggcgaatgcgtcgtcctctccgggccgtcaggcgccggcaaatcgtccatcctgaagatgatcttcggcaattaccgctgcgatagcggccgcatcggcatccgccatcgcggcgtggtcatcgaccttgccactgccgagccgcggcagatcctcaatgtgcggcgtgccacgatcggctatgtcagccagttcctgcgggcggtgccgcgcgttgccaccatcgacgtcgtcgccgagccgctgatcgccggcggcatgacacgcgccgaagcgcagcagcgtgccggcgcgcttctgcagcgtctcaacatccccgagcggctctggcagctgccgcccgccaccttctccggcggcgagcagcagcgcgtgaacatcgcgcgcggtttcatctcggatctgccgatcctgctgctggacgagccgaccgcctcgctcgatgcagccaatcgcgccgtggtggtcgagttggtcgccgcgaaaaaacgccaaggtgtcgccatggtcgccattgtccatgacgacgaaatccgtcatctgatcgccgaccgcatcgtcgacgtcaccagctttgccgccgcggcctgaggaaatggaaatgaatgccaagccgaaagaagccgtgatcggcaatgccaggatcgtgctgggcgacggggtgatcgagcaggggtggcttgctcttgccgacggacgcatcgccgaaatcggtgagggcagggctcccgtcggtgcggaggatgccggcggcgatctgatcatgccgggcctggtcgagctccacaccgaccatctcgaagcgcattacgtaccgcggccgaaagtgttctggaacccggttgcggccgtggtctcgtatgacggccagctcgcgacgtcgggcatcacaacggttttcgattcgctacgggtctggcgcgaggacggcgccgaggaggtcgatggccgcgccggcgtgctcgctgccgcgatcaccacggcgcgcgaggccagcctgctgcgcgcggaccatttcctgcatctgcgctgcgagatcccgatgccgagcgtggtcgaggaagccaaggagctgatcgaccgccccgacgtcaagctgatgtcgctgatggatcacacgccgggacagcgtcagttccgggacgaggtcaagctgcgtgactattatcgcgggaaggggggcggcaagaccgacgccgagctcgacgagctgttcgcaaagcgcttcgagtaccagaagcaatatgcggcggccaacatgcgccagatcgtggcgctggcgcacaagtacaacattccgctggcaagccacgacgacactaccgaggagaacgtcgccgacgccgtgcgcgatcgtgtctcggttgcggagtttccgacgacgctcgaagccgcgcgcggcctgcatcaggccggcatcgacatcctcatgggtgcccccaatgtcgtgcgcggcggctcgcactccggcaacatcgccgcggtcgatctcgcgcgcgagggtctgctcgacattctctcctcagactacatcccgtcgagcctcctgatggccgcgctgcaattgccggagcatgtaccggcgatcagccttcccgcggcggtgcgcaccgtgacgaaggcgcctgccgaggcggtcggcctcaccgaccgcggcgaagtcgcgatcggcaagcgcgcggacctgatccgcgtgcatgtcgcgggtcacattcccgtggtgcgcagcgtctggcgcgaaggaagtcgcgttgcatgagcgagatggtcgcaaccgcacgggacgaggcgggcgcgatcggccccggccggctcgtgctggtggtcggccccagcggcgccggcaaggatacgttgctgcggctggcacaagcagcctgcatcgatgaccccgatatcgtcttcccgcgccgcgtcgtgacacgagagtcctccgatgcggaggacaatatcgccgtgagccccgacgagtttcgtcgcgcgcgcgaacagggcgatttcgcagtgtactgggacgcccatgggcattcctacgcgctgccgctcgatatcaacgacgatatccgcgcggggcgcactgttgtcgtcaacgtctcgcgcaccgtgatcgccgccttgcgccgggcctatgtcaatgtcgtcgtggtcgcgattacggcgccgccggacgtgctggtgcagcggcttgccgcccgtgcccggcaaagcgacggcaacatcgtcgagaggctgtcgcgcagtgtcggcgacgtgccggcgcaggccgatgtcaccatcctcaattcggggagcgcggactatcacagccgccagctggtgcgcgcgatcaggaatgaatgctggcaagagtagccgccggtacgacaaggagagagcggaatgacggtgatcgagacggtcgaacagctggaagagatctacggccccaccaatgatgcctcgaccgtgaaagtcgccgaccatgtcactccgctctatcgcatctttatcgagaaggcgccgttcgccgcgctcgcgacgattggacccgaaggtatcgactgctcgccgcgcggcgatcttcccggcttcgtccgcatccatgatcccaggacgctgatgctgccggaccgtcgcggcaacaaccgggtcgattccctgcgcaatatcgtgcgcgacccgcgcgtgtcgctgatgttcctgattccgggctccggcaatgcggtccgtgccaacggccgcgcttatctttcgatcgacccggaactcctggcctcgttcaaggtggagggcaaggcgccgcgcagcgtcatggtgatgaacgtggaagaaatctacttccagtgcgcccgagccatcgtccgttccgacctctggaatcccgacaagcgggtcgatccgaagatgttgccgacgcccggacagatcctcgccgagatgagcgagaacaaggtcggcggggcggagtacgaccgcatctggccggaacgcgcagcggcgacgatgtggtgagcccgctcgcgcctttccctctccccggaggcggggagcggtgaggagcgcgcgccctaattgaacgccatcccgccgctcagcgcgaccgtctgcccggtcatgtaggcgttgtcgaccagcagcattacggctttcgctacctcctcgggcgtcccgaagcggccgagcgggatgcggctgacgagctgtggttgatcgcgcatcatgtcggtctcgatcagtgacggcgcgaccgcattgacggtgatgctctccttcacgaggcgggccgcatagcctcgcgtgaggccctccatgccggccttggatgcgttgtagtggggcccgatcgagccggcgccgcgcgccgcgcccgaggagatgttgacgatccggccccattttcgggcccgcatcgatggcagcaccgcctgcgtgcagaggaaagcggatttcaggttgaccaggatcgttcggtcgaaatcctcctccgtgagatcgtcgatgccgcgcgggatggcgataccggcgttgttgatgaggatgtcaatgggcccgagttcggctgtgacgtcctccaccatggcagccacttgctcgcgctgcgacacgtcggcagtgacgacaatggctcggccgcgctgcttgccgatctcgcgggccaactgcccggcctcctctatccgctcgcggcaattgatcgccacggccgcgccggcttccgcaaacgcgcgacagacggcggcgccgatcccgcgtgaaccgccggtaaccagcgccgtgcgccccttgagtgtccctgacatgaatgctccgcttgatcagacgaggcggggatcgtcaggcggccgccgcgcgcattcaattcacaagctcgctacacgagatcagcctctgcgcctcgctctggtgcgcgccgccttcttcgcggccgcggagcgggacctggctcccttggtgcggctcgcctttcgggctgcggccgaacgcgatgcggcggttcgccggctcgccgcccgcttgccttgcttcgacagcgcgctgcgcgatgcagtcgaacgtggctctttcttcagaacgttcgcgacagcgcgcgatactttcggccggcgcttcggcgtacgtttgccctggccgacctcgtacgcgtatttggcactgcggcgcgttgacttcttggtccgcccttttcgcggtggcggtaggtcgacgccggcgcggcgcgcctcggagaggccgatggcaatggcttgcttggtcgaccgcgcaccatgcttgcccttccggatcctgtcgatctggtccttgacgaattcgccggcctgcgtgctcgccgatttgccaactcgtttgtcccgcctggctttgcgaacaacttcctgtcttggcatgggtcgaactccccttcctagttcgaggaatatctgaccgcaacgcgcaagacagaagatcgatccgtctagctcctcagcgccgccagcaactcatccggacgctcggccatgatcatgtgaccggcgcccggcacgatgactgttttcgcatgcgggatcgcagccgcgagcgccttgccggccttggcgggcgtcatcatgtcccgctcgccgaggatcagcgtcgtcggcaccttcacgctcgcggcggcttgaagtgcgttcgtataggaattgcacgcggacagatccctgaacagcacgcccggctcgcaagccttcagcaccgcctgcgcgctgccatgcatccacaggcccggcgcaaggctgccgccgagttcggccctgaagccgaggccccagatcgagaccatgtcgtttgcatcctgtgagttggcttcggcttccttgagcagatccgggccgactgtcatggtcgcggcggtgccgatcaggctcagggcggaaaccttttccgggtggcgcgccgccgtctccagcgagatcagcgagcccatggaatggcctatcaaatgcgccttcgaagcgcccgccgcatcgagcagcgccgcggtccagtcggccatctcggcgatgctgccgagcgatggccccgccgagcggccgtggcccggcaggtcgggcgccagcacgccaaagccgtgatgggcgaaccagcgcgtatgcagcgcccacgtcgaacgatcgaagccggcgccgtggatgaaaacgaccgcaggcagcgacttgtcgaagtcgcggccgccggttgccgcgaacacttcagtgccgttgacggagagcttcatgacgtcagaccttttgcgagatgcgcagtgcctgcgcgagatcgtcaatgatgtcgcttgccgtctcgatgccgaccgacagccgcaccagctcctcgccgatgccggcggccttgagctgctcggcgtccatttgctgatgcgtggtcgatgcggggtggatcaccagcgtcttggcgtcgccgacattggcgagatggctgaccatgcgcaagctctcgatgaacttgcggcccgccggccggccgcccttaatgccgaaggagatgattgagccggcgccgcgcggcaggagttgtttcgcgagttggtagtccgtgtgcgtctccagcgagggatgcagcacccagtcgaccgccttattggatttcagcgcttccagtacgagatgcgtgttctgcatgtggcggtccatgcgtacgggaagcgtttcgatgccctgcaacagctggaacgcgttcgtcggcgagaggcaggcgccgaaatcgcgcagaccctcggtgcgcgcgcgcatgatgaaggctgcggtgccgaactgctcgtcgaagactataccgtggtagccgccatagggctccgtcagcacgccgaacttgcctgatgcgcgccagtcgaagcggccgccatcgacgatcgcgccgccgatcgcgatgccgtggccgccgatccacttggtcgccgaatgcatgacgatgtcggcccctagctcgatcggccggctgagatagggtgtggcaaaagtgttgtcgatcagcagcgggatcttggcctcatgcgcgatcgccgcgaccttcgggatatcgagcacttccaggccgggattgccgatcgtctcgccgatcacgagcttggtgttcggcttgatcgccgcgcggaatgcatcgaggtcgcgcggtttgacgaacgtcgtggtgatgccgaaacgcggcagcgtatgcgcgagcaggttgatggtgccgccatagagcgaactcgacgccacgatgtggtcgccggcattgagcagcgtcgcgatggccagatgcagcgcggccatgccgctcgcggtgcagatcgcgccgacgccgccctcaagcgccgcgattcgctcctcgaggacgcccgtagtcggattggagatgcgtgtgtagatgtgcccggcgcgctccaggttgaacagcgcggccgcgtgatcggaatcctggaacacgtaggacgtggtctggtagatcggcactgcgcgggcgccggtgacgggatccggatgctgcccggcatgcaggctcagggtctcgaaggcaggcggctttggcgcgggcatgcgtggcctcgttggtcggtcggcgatggggcgttgtgccacaaaacggagcgccgcgtcagcccattgatggagagggtgcgctccctctcccggcaaaccgggcgagatgaagcgaacaccgtctgcgccttaacctccgattgcctgttcgatgatccgcgcctcccgcaatagaacctccgcgacctcctgttcgcgtcttggcccgagccgtgttcgcactgcggaaacggtcatggccgcggcggggcggccgtcgggggtcttgatccaggttgaaatcgacttcgtgccctgcaccagcccgatctctcgcctgccgtatcccagccgtcgtgcggcggtcacctcgccgaggaccgtcgcgatgtcggttttgtacgcttcgaacctcttctcgttggccgcgacgatccttcgcgcgtcctgcgccggcatcgcggcgagaatggcgacgccggcgctggagacgccgagcggcctgcgggcaccgacctcgatggacagcacctgtatcggatagattccgatccggcgatccacgcacagcgtatcgttgccggtccgcacggtcaggaacagcgtgtcgccgatctcgctggacgcgcgttgcagcgaggggtttgcggcgatcagcaatcgcgacggccgcggccgtgccagcgccagttcaggcacctggttgccgatcgcgtagtggccgctccgctcgtttcgctcgacgatgccctcctcgatcagcacgtgcacgatgcgatgcacggtggggcgggtgaggccggtggcctgcaccacctcggccaatggcacaccggcctcacggcctgcggcaagaatgcgcagcaccgcgagggcgcgccggattgcctgtgcgcccgagcgcggttccgatgcactgttgcgtgctggccttctgggatttgccttgtccataatatggacaagaacgccacaattcactcgacaggacaagcgcgcatctggagattgcgcggcgatcgggcgccatgcgcaatgtcaggcgctcgagatgaactggaagcgccgccgggaggttaacatgagattaatctggattgccatagctgccgtcactgcgatgctggcgggacctgcgtcaggccaggaatggccggcgcgcaacgtcaagctgatcgtgccctatcccgccggcggcaacgtcgacagcgccgcgcggatcgtcgccgataagctccaggaaaagctcggccagccctttgtcatcgagaacaaggccggagccggcggcatgatcgcgggcgaggctttcgccaagtccgcgcctgacggctacacgctgttcgtcggcgctaacggacccgtgctgtttgcgaccgagatcaacaagcgcgacgcctacaactggaagaaggacttcctcccgatctccacgatctcgatgacgccgctggtgctcgaggttcatccgtcggtacaggcaacgacgctcaaggagtttctcgatctcgccaagcgcgagcccggcaagctgaccatggcctcgcccggccccggcaccaccaaccatctgctcagcgagctgatgcagtcgaatctcggcctgcaatgggtcactgcgcactatcgcggcaatgcgccggcgatcaatgatctgctcggtggtcaggtccagttcgcgttcgaccagctcacggtcagcctgcagcatatcaaggccggcctgttccgtgcgctcgccgtcaccagcccgcaccgcctgaagtccctgcctgatgtgccgaccttcgccgagctcggctacaaggaattcgacggacagacctttaccggcctgttcgcgcccgcgggcacgccggctcccatcgtcgacaagctgcacgagacgctggtcgcgatcctcaaggaccccgccgtgatcgacaagttcgagaagctcggtggcgaagccacgccgatgacgccagccgaattcaaggcctatctcgaacgcgaggacgccaagtggattcccgtggtgcgcaaggccaatatcagggcggactgatcgatgcggatcgatcccaccgagctcggcgcggagcgcatctaccggctgatgaccggcatcgtggtgccgcgcccgatcgcgtgggtgacgagcctgtccagcaagggcgtgctcaatctcgcgcccttcagcgccttcaccttcgtttcgcagaagccgccgatgctcgcgatcagcgtcggccgcaagggcgccaactacaaggacaccgggcacaacatcctcgacaccgaggagtatgtcatccacatcgccgacacgcctctgatgaatgcggtgcacgatagctcggtcgagcacccgcctgaaatcagcgaggtcgagcatctcgggctcgaaacgctgccctgcgatctcgtcaaggtgcgccggcttgccgccgcaccgatcgcgatggaatgccgcttccggcagtgcctcgaattcggcgaggccaagagccggctcatcgtcggtgaggtcgtgatgttccatttgcgcgacggcctcgtgaacgacggcaaggtcgagaccaaggcgctcgatccgatcgcacgcatcggcggcccgcgctacgcgcggctcggcgagatcgtgacgctcaacaccgtcttccagactcccaaatcgaaagactgaatgcgcgggtctgtcttgggccccgctgcctcacgatcattggaggaatacaatgcgactcctgagctatctcctggacggagagccgcgctatggcgcggccgtcgaaggcggcgtggtcgatctgaccaaacgcatcggccgtgacttttgcgacctgaaggcgctgatcgcggcgaatgcgcttggcgatgcgcaggaagcggtcgccggacagaagcccgattacgcgctggacaagctcgtcctgctgccgccggtactggcgccggaaaagctctggtgcatcggcgtcaactatgccgagcgcaatgcggaatacaaagacaattcggacctgcccaaatatcccagcctgttcgtgcgcagcatgtcctccatgacgggctccggccagccgttggagaaacccaaagtctcggatcagctcgactatgaaggcgagctcgtcatcgtgatcgggcagggcggccgccacatcccgcgagagaaagcatggtcgcacattttcggcatgacgctgtgcaacgagggcacgatccgcgactggctgcgccacggcaagttcaacgtcacgcagggcaagaatttcgaccgctccggcagcatcggtccctggatcgtcaccgcggacgagctcgacccgcgcggcccccacgacatcgtcacgcgtgtcaacggcgaggtacggcagcaggacacgaccgagcggctgatgttcccgttcgatctcctgatctcctatctctcaacattcgcgacgctgaagcccggcgacatgatcgtgacgggtacgccgactggggccggcgcgcgctttgatccgccgcgctggctcaaggctggcgacgtcgtcgaggtcgaatccagccgcatcggcgtgctgcgcaacaccgttgccgcggagcaataggccatgctggacgctgccacgatcgaacgtctcgccgcccggcttgacgaggccgaacgcaccaagacgctgatcccgatgttctcgaaggaatatccggatttcagcatcgaggatgcctacgccgtccagcgcgcctggaccaagctgcagctcggccgcggccggatcatcaaggggcacaagatcggcctgacctcgaaggcgatgcagaacgcggtcggcatcagcgagcccgattacggcgtgctgttcgcggatatgttctatgccgacgcgacgcctgttccgttcgaccgctttcacgcgccgcgcatcgaggtcgagctcgccttcgtgctgaaggcacctctgcgcgggcccgattgcaccatcttcgatgtgctgaacgccaccgactacgtcacccccgcgctggagatactggagacgcgcatgcaccgcgtcgatccggagacagggaagacccgcaaggtcatggacacgatctcggacaacgcggccaacgccgcgctggtgctcggcggaaggccgatccgcccgatggatgcggacctgcgctggatcggggcgctgctgttccgcaacggcgaggtcgaggagaccgggcttgccgccggcgtgctcaatcatccggcgaatggcatcgcctggctcgctaatcgcctcgcgccgcatgacgagcatctggcggccggcgaggtcgtgctggcgggctcgttcatccggcccgtcgacatccgccgcggtgataccttccatgccgactacggcgccttcggctcggtgtcgtgccagttcgtctgacccaataacaggagggagcgtatcatgagtgctcacacgcggcgcaggagcatccacatcggcggcttcaagcacgtcaaccccattccgaacgcctgccgcatcggcaatctcgtgatgtccggcgtcattcttggccgcgatcccgcgaccaacacgatgcccgagagtctcgacgcgcaatgcgccaacatgttcgcgcatatgaaggcgacggttgaggccgccggcggcacgaccgacgacatcatcaagatgacggtgtggctgaaggaccgcgccaatcgcgatcccgtcaatgtcgagtggctcaagatgtttccggacgagcattcccggcccgcgcgccacgcgctgccgatggacaacatggatggcggcgcgctggtgcagtgcgacttcaccgccgtgatcgactaaaggagctttgggcatgccgacctatctgccgttcgatcccaatccgcgccgtcccggcaaggcgccgccgccgaagaccgtcgacagccagtttcacgtgctgggtccgatcgagagatatccggagcgtcccggcgccgcctatcgaatgccaacggcgacctgggaggcggcgctgcgcatgcacaaagcactcggcatcgagcgcggcatcatcgtgcagaccacgacctacggcgccgaccacgccgtcgtgctcgacggcctcgcagcgatgggcccgaactatcgcggctgcgccaacgcgctggtgttcgccgaagcgagcgattcctatctcgccaagctggacgatgccggcgtgcgcggcgcgcgcttcagcttccgccaggagctcggcgccgtactatcggatgccgatttcgcccgcgccattgcgcgcatccgcgagctcggctggtacgtcaagatccagccggagaaggacggcatcatgtcgagcgttgccaagtacgaggatctcgacgtgcccgtgctgatcgaccacatggcgcgcccggatcccgaagccggcaagaacgatccgaatttgcgcaagatgctggagctgctcggcaagggcaatttctgggtgatgctgtcgctcggcgaaaagacctcgaagaccggtgcaccctatgacgacgtgatcccgatcgcgcgcgcctacatcgaggccgctcccgaccgctgcgtctgggccagcgactggccgcatccggtatcggtcaagcagccgccgaacgatgccgacctgctcgagctgatgtaccgctacgcgccggaccaggcggagctggaaaagatcctggtgcacaatccggccaagttgttcgggtttgcggactagaaggttctaagcgcaccttcatcgccgcaacaatcggcctcacatcggctgcttcgccagccggtcccgcacctcggccgcgatctcgaacgagcgcagccgcgcggcgtggtcgtagatttgccccgtcgtcatcaattcgtccgcgccggtctcggcaatcagcgccctcagcttctcttccacgacggcgggtgagcccaccgcggagcacgacagcgcttgcgcaacgccggccttttccgcgggcgaccacagcgcgtccatgtcgtccaccgggggcggcagcggccccggcgtgccgcggcgcaggttgatgaactgctgctgcagcgatgagaacatccgctgcgcctcgacctcgctgtcggccgcgaacacgttgacgccgatcatcgcatggggcttgtcgagctgcgccgacggctcgaagcgcgcgcgatattcgcgcagcgccggcatcatcatctgcggggcgaaatgcgaggcgaacgcgaagggcagacccagcatcgaggcgagctgcgcgccgaaggtgctggagccaaggatccacagcggcaccttcgttcccatgcctggcaccgcgcggatcgtctggttcggctgcacgtcgccgagcagggcctgcaattccagcacgtcgtgcggaaagttctcggacgtggtggcgagatcgcgccgcagcgcccgggccgtgaactggtcggtgcccggcgcgcggccgagcccgagatcgatccgcccgggataaagcgactccagcgtgccgaactgctcggcgatgaccagcggggaatggttcggcagcatgatgccgccggagccgacccggatcgtcttcgtcccgcccgcaacatggccgatcaccacagacgtcgccgcgctcgcgattccggtcatgttgtggtgctcggcgagccagaaccgcttgtagccccacttctcggcatgctgcgcgagatcgagcgagttacggaacgcctgggcggcatcgccgccctggcggatcggcgcgaggtcgaggatggagaaggggatcatgtgaggggacctgtgaagggacgtactgcgcgcgagacctcacatataggaggccgacggcgggaatgctgcacgaactctgctgcgcgatccggatcttgatggcgccgcgtgtcctctgagctgttcaagcagcccgcaccccggttcacaacactgttattgcgacctgtggcgcccctgatctcgattgggcgtttctcgcctgttgttgtaacttgccggacagcagagctgccaggaggaaccgacatgaccacggtcgcaatcaaccgccggagcctgctcgccgctggcgggtccgtcctcgcaaccggagttttgacttcgggcgtttccgggttgctgctgccggcacgtgcggcaggcctcgcaccgaccgaaacgatgtcgggcggggcgaacaactatcgaaagggcgcgccggtcgtggagcggattggcaagggcggcttctggatgagcggcaccgtccgccgcgccggcgacggcgcgccgctcgccgggcagcgcatccagatctgggcgcacacggtcgaaggccaggagcacgagccgcagagccacggggccacgctcaccgacaaggacggcaagttccggctcgagatgccgcagatcattcccgttttcggccagccgcacggccatctcgcctatgacagcggcgagttcaagaccgtgttcctgcggccggtgatgcgaagcgccaaggaaaccagcctcgaagcgcacttcgtgcttcagccggcctgaccgggccggcgcatgacggggtggagatcggtgcgggtggtcctgatctgggccgcccttgccttggcgattggcgtgccgattgccgctgctgcaggcagcgagctgctcgcatggcgcggtccgatctatatcctcgccgggttcgccgggatcgttgcgcttgggcttgtgcttcttcagccgctgctgatcggcggctatctgccgggcctgtcggcctatcgcgggcggcgcgcgcaccactggatcggcggcgcgctggtggtggcggtcgttatccacgtcgccggcctctggttcaccagcccgcccgacatgatcgatgccctgacctacgcatcgccgacgccattctcgcctttcggcgtgaccgcgatgtgggcgatcttcgtcgtcgcgctgctggcttccctgcgccggtggttgggattgcgcctgcgaacgtggcgcttcattcacatgccgctggcgatcgtcatcgtcacggggagcgtggtccattgcctcctcatcgaggggacgatggagacgatctcaaaggcggccctgtgcgtgctggtactcacggcaaccgcgaaggtcatgattgacctgcaggtgtggcgaaagcgaaggacgctgcgcggggagagtccagcgcagcagtaggctggttgctacgagctgcttgccgcagtcggggacggggcgtaatttcgcaccatgacgctcacggctcccgatctgaaagcgttcctgctcgcgacgccgttcttcggcggcctgtcggacggaagcctcgacctgctgatatcgatgctggccgaacgccggttcgaggccggcgacaccgtcgtggcggaaggcgagccgggacgatcgatgttcatcgtcaaatccggccggctcgcggtgagcaagaggacgagtgcgggtcgcgtcatcccgctgtccgttctgcagcctggtgatttcttcggcgagatgacgctgatcgaaatgcagaaccgctccgccacggtggtcgcggaagcgccgacggtgctgtacgagctgaccgccaagaatctctacgcctgctacaagacggacatccacgcctatgtgatcgtcctgcagaacatcaaccgcgaactttgccgtcggctgcgaagggcggacaatcgcctcaccagtcgccaggcagggaacgacaattgatcatgcgtaggatggtcgaagccttgcgaacccatcatgtctggtcatcgcgcaagggacttgttgggttcgcttcgcgctccctgtcctgcgaactgagatggctagagcagcgccatcgagtgcagtgagtttctatgaaagccgaaggcaacgaggctggagagaagcaacacgattccagtaacgatcaggaaaaacgcaaacactgtcggagcctctggttcatcatccgcggcgaggaccataatagataaaattttaccgacaatcgaaaggaagtattaaccttacctgcgggacccgatggcgaatcgtaggcaaaacgccccaccttccgcaaaacctcttcctgcacaatattcggctctgtcgaaattctgatttacagcattattccgccttcccggcccgaggagagcggcgatcgtacgtcgcaacgaacgtggacgcggctgcgtctggcacggcaaggtaggaccagagcggttgaactcgtgaggtccctctcggtgtgacgaacggggctgccgcctacggccaagccgtgtcgttctggctgtggttgttacagccaagccttcgcgaagatgcaccggccgaccggacgcgcggcatcggttttcgcgaggtgacggccagaaggaactccggggagagcatgcataggccgtcaacccatcgcgcagggaaggccgagtgtttttccggtccacctgttttccgcctgcgcattgcgtgtgcgattttccgcgcgagcggaccatcggtcccagccggcccccggccctgcctgcgctcgcttcagaagcgagggcgaaaaagagcagcaagattcgggcacttcgcgccgcgaaagcgctgcttcatgtgggagagaggaacgaccgggcgctctcgcctcgccgatgtagcttgtctcagcgacgtgcggcgatcgccgtcagctccagcctgacgccggggccgagatccgcaacgccaatggcggcacgcgccggcagatggtccgcggtgaaatagcgcttccacacctggttgaacgccgccttgtcggcgagatcggccatgaagatggtcacctgcagaacgccggaaagatcggagccggctccctcgagtagggtcttcaactggcgcagcacatcgtcggtttggcccgccatgtcgagcccggtgtcctcggggacgatgccgccgagatagagcacgccgttatgctcgacgatctcgtggagcagtccttcatagggcagggagcgtttgatcacgatggcatccgtggatgttgcaggctcgctggccaggcaaaggggtcgcttcaatggggagagatggtgctgccagacaggattgaactgtcgacctctccattaccaatggagtgctctaccactgagctacggcagcatgtgctggtgaagaatcgggcgcccgaggggcctaccaagcgggccgatatctgccacaagcccccctcctgcgcaagcttgcaagctccatcaaatcgagaaaatcgggtcgatatccgggccaaaatgcccattttcgcgcgaaaccatcagctttcccccggtttcgggccgacctccccggccaattggccagttgctccggacgtcggacttgcctcatttcgcgtttcgcacgatcgcatcgcggccgcctcttgagctgccatagttcggtggcatcctgctccagatcccatgaatggacctttgatgacggaccaggtgatgacggaccaggacgacaagagcgtggggcaggcgagggcatcgcgggacgatcgcctgaaatcggcgctgcgcgagaacctgaagcggcggaaggtgcaggcacgcgaacgtgccgcgatgaccggggccttggagaacgacgacggttccctagatgaggggaccgccggcgagacctgaagttgaacgccggcggctgaaatctggagtgcatatggtggcgatcgggcaggacgaaccgcaaagaaccgaaggcgacgtgctgatgtcccggttcacccggccagaacagacttttccaaacctgacacccgccgagatcgagcgcatcaggcagttcggcgaaatccgcacctatgcggatgacgcgttcctgttcgagaccggcaagcccggccccgggatgttcgtcgtgctgaagggccatgtcgccatcacccagcgcgacgggctcggtcatgtcacaccggtgatcgaccaggggcccgggcaattcgtggccgaactcagccagctctcaggccacccggcgctggtcgacggccgcgccgagggcgaggtcgagactctgctgttgccgccggaccggctgcgcgcgctgctagtcgccgaagccgagctcggtgagcgcatcatgcgcgcgctgatcctgcgccgggtcaatctgatccagggcggcgtcggcggtcctgtgctgttcggcccgtcgaactccgccggcgtggtgcggttgcagggcttcctcacccgcaacggtcagccgcatcatctgcttgatcccgagcgcgatcgcgacgccgccgagctcattacgcgctattcgccgcagcccgaggactggccgttggtcgtcaccgctgacggcgccgtgctgcgcaaccccgatgagaccgagcttgcgcgcgccatcggcatgatcggcgggccgaagggcgaccgcatctacgacgttgccgtcgtcggctgcggacccgcggggctcgccaccgcggtgtatgccgcgtccgaagggctgtcggtcgccgtgctcgacacccgcgccttcggcggtcaggccggcgccagcgcgcgcatcgagaactatctgggttttccgaccggcatttccggtcaggcgctgaccgcgcgcgccttcacccaggcgcagaagttcggcgccgacatcatgattcccgtcacggtgaagtcgctcgactgcacgcgcaaggacggcgcgttttcggtcgcgctcgaaggcagcgaccccttgcgctcgcgttcggtcgtcgttgcgagcggcgcgcgctatcgccggcctgatatcgcgaacctcgacaagttcgaggaacgcggcgtctggtactgggcctcgccagtcgaggcgcggctctgcgcaggcgaagaggtcgctctggtcggcgccggcaattcggccggccaggccgccgtgttcctgtcgggtcatgccaaacgcgtgctgatgatcatccgcggcggcggcctgggtgccagcatgtcgcgctatctcatcgagcgcatcgaagcgaccccgaacattgaattgatgttcaacaccgagatcaccgcgctggaaggcgacgaggcttcgctgctgcgtcggatccgctggaagagccggttgtcggatgacgaagactcagccgacatccgcaatctctttctgttcgtcggcgccgatcccgccaccaactggctcgacggctgcggcgtgacgctcgatcgcggcggcttcgtcgtgaccggcgcgcagtccgagcagaaccagggcaagctggtggcgccgctggaaacctccgtgcccggcgtctacgccgtcggcgacgtccgctccggctcggtcaagcgcgtcggtggggccatcggggagggcgcccaagtcgtggcctccctgcatggctatctcggcgacgccgcaaagccggcgctttaggcaaggacaagacaagcaaatggcaagtcgaatgaggcttgccatctcgccgcatcctgccgactatcccctcatcccgaggagccgcgaagcggcgtctcgaaggataaaggcccgggtgcatctgggccgttcatggttcgagacggcgctcacgcgcctcctcaccatgaggatctaccagcaaaaaacccaacgggaggaccaaatggctgaagtcgtcgtgctctacaaaacacccaaggatgctgccgccttcgacaagcactacgccgaaacgcacatcccgctcgcgaagaagcttccaggcctgaagaaatacgccgtcagcaagggaccggtttcatctcccgcaggtccctccggaattcatctcgtcgccgtcctaacgttcgacagcgtggccgatatccaggcggcattcggcagcccggaaggcaaggcgaccggcgccgacgtgccgaaattcgccagcggcggcgccgacatcttgatcttcgacaccaaggaagtgtgagagatcgatccaactttcgtcgaaagcctgccgtcgtttgtgacagcggtgcaaaaaaatcagtcatgcgtttgtcgttcgcaggacggcgcatggctgcgctcatgcatgtgacgacaacgcatgtagcaatccgatgaggaccgtaataccatcctccgcgtctcgatggagacgaggagaaatgtgatggtccttgggttgagcctgcctgctcttacgctgatccatgtcgtcatcagcctgatcgccatcgttgccggcctggtcgtgatgttcggcctgctcggctcgaagcccatgccgggcctcactgcgatcttcctgctgttcaccatcctcaccagcgcgaccggtttcctgtttccattcaaggagctgctgccctcgcacatcatcggcatcatctcgctggtgctgctcgcggtcgcctgcgtcgctctctacggcatgaagctcaaaggcgtctggcgtccggtctatatcgtgaccgcgatgatctcgctctacttcaacgtcttcgtgctggtgatccaatcgttcctgaaggtgccggcgctcgccgcgctcgcaccggccgtagcgccggcgccgccctccggtcccgtgttcgccgtcgtgcagggcatcgtgctggtgttcttcgtcgtgctcacaataggtgcgtggcgccgcttcaggccgatggcgtttgcctgatcacacgattctcaacgtcccctcgtgatgcgggccatcgcattcgggatcccgcgcaactaactgcggatcgccggcgcgagctcgtcctcgcctcatgcaactgatcttcatcgaaagagagacatccatgcccaccatcaccaccaaagacggcgtcgagatcttctacaaggactggggatcgggccagccgatcgtgttcagccatggctggccgctgtcgtcggacgattgggacgcgcagatgatgtacttcgttacgcgcggctatcgcgtcatcgcccatgaccgccggggccacggccgctcggcgcaggtcgccgacggtcacgacatggatcattatgccgacgatctcgctgcgctcactgcacatctcgatctcaacaatgccatccatgtcgggcattccaccggcggcggcgaagtcgtgcactacatcgcccgccacggcgagagccgggtggcgaaggccgcgatcctctcggcggtgccgccgctgatggtgcagaccgctgccaatccgggcggtttgccgaagagcgtgttcgacgatttccaggcccagctcgcggccggccgctcggccttctatcgcgacatcgccgccggcccgttctacggctacaatcgccccggcgtaaaaccactcgaagcggtgatccagaattggtggcgccagggcatgatgggcagcgccaaggcgcattacgacggcatcgtggcgttctcgcagactgatttcaccgaggacctcaagaagatcaacgtgcccgtgctggtgatgcacggcgatgacgaccagatcgtgccttacgccgattccgccccgctgtcggccaagctgctgaagaagggtatcctgaaaacctacaagggcttcccgcacggcatgccgactacgcacgccgaaaccatcaacgccgatctcctggcgttcttcaaggagtgagagagctcacttcaatattgccttgattgcatcgaaggtgcgctagacgaaagcttccggcttctctcgcgcaccttcgccgctccagctctcgctgccgacgcgcatcctcgatgatcgtcgtttcgaagtggcgctccaggaacagcgccggcgctgtgcggctcagccgctcgcaagttttctgcaatttccgctggcgcaagccgggatcgtcgtgggcttttgcccctgccggcaatggcttggcgtgattcctgaccgatctcccgacgaccttggaagccttcaaatcgtttccggctcttgcaaatttgcactcagtgcacatttagatccgtcgcgggcgttttcgcctcgtgaaagccgcgggaggcatggcatgatcgactggaccacggcaggcatccccacgctcggcggcatgaccgccgtcgtgaccggagcgacgggcgggctcggttacgagacggcgatggcgctcgctggcgccggtgccatcgtcatactcaccggacgcaacgacgcaaagggcctgcaggcgatcgaaggcatttgcgagcggtttcccgacgcgctgatcgcctacgagcatctcgacctcgcaagccttgcctcgatcgccgattttgcccggcgctttgctgccgacaacgaacggctcgatctcctcgtcaacaatgccggcgtgatggccgtgccgaagcggcagcagacggaggatggattcgagatgcagctcggcatcaattatctcggtcattacgccctgacggcgcggctgttgccgcagcttcgccgcgccattgcgccccgcgtcgtcaatctctccagccttgcgcaccgcgccggtgcgatcaatttcgaggatctgcaaggcaaacactgctatcgtccgtggcgcgcctactgccagtccaagctggcgatgctgatgtttgcgctggagctccaacgtcgcagcgtcgccgccggctggggtctgatgagccttgctgctcatcccggctacgcgcggactgacctcattgcgaacgggccgggtgccaacacgttccaagggcgggtcggccggctgctgcagcctttgatcagccagtccgctgccgaaggcgcgctgcccacgctgttcgccgcgacctcccctgacgctgagccgggtggctactacggtccaagcgggttttgcgaattgaaggggatcccggggccggcaaggatcatgccgcaggcggaggatctcgcggtggcggccatgctgtgggatgcctcggcgaccttgaccggtctatccttcgatgagatcgcggcggccgcgtgagcggcgaatccctggggcatcccgatgcgagtcatgatcttcggcgcgaccggcatggtcgggcagggcgttttgcgcgaatgtctcgtcgatccgggcatcgatcatgtgctcgtggtcggccgcagcccgaccggtgtgcggaacgccaagctcacggagatcatccacgatgacttcctgaattattccgcgatcgaaggcaggctcaccggctacgacgcctgctttttctgcctcggcgtctcctcgatcggcatgagcgaggagcgctaccgccaccttacctacgacctcacgctcgcggcggccacgatgctggcacggctcaatccgcggatgattttcacctatgtcaccggcgccggcaccgattccacggagcagggctcgcggatgtgggcgcggatcaagggcaagaccgagaacgaccttctcaaactgccgttcaaagccgcctacatgtttcgccccgcagcgatccagcccctgcacggcgcccggtccaagaccgcctgggtgcaggccgtctatgccgtgagcggaccgctctggtcggtgctgcgccggatatcgccgcggcttgtgacctcgaccgagcagatcggccgagccatgatccgcgtggccagagaggggtatccgcgcaaggtgctggaggtggaggatatcaatagcctctagggcgtcgggccgctagtttggacggaaatttcggggcctacgcgcgttgagccccatcccacaaggagaagcgccggcgatgtcgccccagctcaaactgatcgcgctcgatgccgacgatctcgccgtgatctcgacccatgtccaggatgcccgcgtccagacgtccgacatcatctggcggcagagcgagaagcggctcgtggtcggaatgagccggctggactgggagcagacattggagggcgaggccgagccgcgaaggctggtcgccgcgctccgtttcgaccgtgtgctcgcctgcaagtcgcgcaacatcgatctcgccgcgccggacaaggtgctggacctcgtcgggatcgaatttcacccccaggacgggcgtcacgaggagcccagcggcagcgccctgcttttgttcgccgagggcggcgccatccgcctcgacgtcgaatgcctggaatgcgagctgaccgacctcggagcggacgcgctggggacgggaccgggcatcgaggaatgaggcggtatgccagcgcccggtagaccggtgtccttccggcggcccgccggtacgacatctcgcaagggttgacggcggggggccggcgcgccattgagcagggggttggtgcgccgatccgccctccaagaccagctggaagccaagcgaaatatgcccgttcgcctcgaccgcagcagcgacgattttgaccagcgattcgccgccttcctcggcgccaagcgcgaggcttcggccgatgtcgaggctgccgcgcgggtgatcgtcgacgacgtcgccaagcgtggcgatgcggccctgctcgaagccacggcaaagttcgaccgcttgaagctggatgccgggggcttgcgcgtttccgcagcccagatcgaggacgccgtgaaggcctgcgaggcggcgacgctggatgcgctcaagcttgcgcgggatcgcatagagacctatcaccgccgtcagcttccgaaggacgagcgcttcaccgacccgctcggcgtcgagctcggctggcgctacaccgcaatcgaatccgccggcctctatgtgccgggcggcaccgcggcctatccatcctccgtgctgatgaatgcggtgcccgcaaaagtggccggcgtgtcgcgtctggtgatggtggtgccttcgcccgacggcaagctcaatcccctggtgctggcggccgcgcatctcgggggcgtcaccgagatctaccgcgtcggcggcgcgcaggcgatcgccgcgctcgcgcacggcacagcgaccatcgcgccggtcgcaaagatcgtcggccccggcaacgcctatgtcgccgccgccaagcggctggtgttcggcaaggtcggcatcgacatgatcgccggcccctcggaggtgctcgtgatcgccgacgacaccggcaatgccgactggatcgccgccgacctgctggcgcaggccgagcacgatgccagtgcacaatcgatcctgatcacggactccgcgcgccttgccgccgatgtcgagaaggcggtcgaagcgcaattgaagacgttgccgcgcgccgcgatcgcgggcgcctcctgggcagagttcggcgcggtcatcttggtgaagaacctcggcgaggcgatcccgctcgcggacgccatcgcggccgagcatctcgagatcatgactgacgatcccgatgcgctcgccgcgaagatacgcaatgcgggtgccgtcttccttggtccccatacgcccgaggcgatcggcgattatgtcggcggctccaatcacgtgctgccgacggcccgctcggcgcgattttcctcagggctctcggtgcacgatttcataaagcgcacctcgatcctgaaatgcggcccagatcaattgcgtgcgctgggcccggccgcgatgacgctcggcaaggcggaggggctggacgcccattcgcgttcgattggattgcgcctcaatctgtcatgacaaagccgcccgtacaggacgactcgaccaaccgcatcgtcggcgtcacgctcgacgaggaatcgatcggccgttccgggcctgacatcgagcatgagcgcgcgatcgcgatctacgatctgatcgagcagaacctgttcgcgcccgagggcgcggagggaaagggcccgttcacgctgcatatcggcatcaccggcaaccggctgatgttcgacatccgccgcgaggacggcacgcccgtggtcgcgcatctcttgtcgctgacgccgttccggcggatcgtgaaggattatttcatgatctgcgacagctattatcaggcgatccgcaccgcgaccccggacaagatcgaggccatcgacatgggccgccgcggcatccatgacgagggatcgcgcacgctccaggaacggctgaagggcaaggtgcgggtcgatttcgagacctcgcgccggctgttcacgctcatcaccgtccttcattggaaaggctgatcgcgcatgatcccgaaaggtgggaaccggttttcggatcggatcatgcgcaaagataaaagagcgtgagcgatggctgcgccctcacgcgcaagcaatccgcaatcggtgctgttcgcctgtgcgatgaacagcgtgcgctcgccgatggccgcaagcctgttgctgcacatgtttccccagggcctctacgtgaagtcggccggcaccaggaaaggcgagctcgacccgttcgccgtggccgtgatggccgagctcggccaggatatctcggctcacaagccccagaccttcgaggagctggaggattgggaggggctgaatttcgacctcatcatcacgctctcgcccgaggcgcatcacaaggcgctggagctgacgcggacgctcgcggccgacgtcgagtactggccgacgcaggatcccaccacgatcgaaggcagccgtgagcagaagctcgcggcctatcgcgaggtctgcgaccaactcctgatgcgcatccggagacggttcgccaagacaggcgcggcgagcggctagcacgcggtgttcgtaacaccggcgtcacaggatgcaggcacagccatgtcgagaggctcgaatcaccaaacctcgggttcccgggttgtgaaatcagcccccttccgataggttccgcgcgcaattcaccccccgcttcatctcccaaatcacctgatgcttggccgccccaaattcgtacttgcctccggttcgccgcggcgcctgtcgctgctcaaccaggccggcatcgagccggacgcgctcaggccggccgacgtcgacgagacgccgaggcggggcgagctgccgcgcgcctgcgccaaccggctcgcgcgggccaaggctgacgccgcgctgaaatcggtgcagctcgacgacgagctgcgcggcgccttcatcctcgccgccgacaccgtggtcgcggtcggccgccgcatcctgcccaaggccaacctcgtggacgaggccgcgcaatgcctgcggctgctgtcgggccgcaaccaccgtgtctacaccgcgatctgcctcgtcacgccgcgcgaggccttccgccagcgcctggtcgagacccgcgtccgcttcaagcgcctatccgaggacgacatccaggcctatatcggctcgggcgaatggcgcggcaaagccggcggctacgccgtgcagggcattgccggctccttcgtggtcaagatggtggggtcctacaccaacgtcgtcggcctgccgctctacgagaccacggcgctcctcggcggcgagggctttccgatccgcttcggctggctcaataccaccgccgtgtaaggccgaaggcgcggcccgaacaaagctgcaaaacaaccccatgcacagtagacgggccgcgacggccccatgcgccggcgcctcgggaacccgtttcctgacaggcgcttgaagcccttcacctcgtataagctgccgacaccatgaatgaccaagccgaaaagcccgccaccccgcggaaggcctgcccgatctgcggcaagccgcagtcggagaagacccgcccgttctgctcctcccgctgccgcgacgtcgacctgaaccgctggctgaagggctcctatgtcatccccggccgcgatgacgacgtcgatgaggaagaatagcaacactttcaatcgcttgtgagtatctatggcgcgcggcgcgccagccgcagccgggccgccgtaccttgtgcacagccgggccgcgcccggcgaagactgttggcgaagccgggtggacaggccgccccgcgcccactataaaccgcccgctcgatgggctttggcccctctcttggagcacgcccaggtagctcagttggtagagcatgcgactgaaaatcgcagtgtcggtggttcgattccgcccctgggcaccattggcctttccggcccggttctttctcctccgcgcgcgttcgccgatcagcaagaaccctcgtaaaatcgtgcttttcagcacatattgacgctcagtacggttcgcgaccgttcgagcgcatccggcggcttcgggtacactgtgggtacactggaagcgccgggtacactggctggcggcccgattgcgagggagcttcccgtggatgaattgagcgacacaaaaatccgcaacgcgacgaaggcagacaaggaatatgcgatagccgacggccagggcctcagcatcgtggttcggcccaatggcaccaagctctggctgtaccgctaccgtttcggcgggaagcgcaagaatatgtcgttcgggacctttcccggtgtcggactcaaggccgcgcgcgacaagcgccatgacgccgaaaagctgctcgatcaaggccgagatccggtcgcagtgcgtgaggccaagcgacaggaagacgaaaagctcaagcacacttttcgggtagtcggggaagaatgggcgaccacgaagctcgaaaaagaaaacaaggccaaggcgacgatcaaacgggaacgttggaatctcgctcagctcaatcgtgagatcggcgaccgaccgctttgcgaaatcgctccgccggaattgctgacagcattccggcgcgtcgaggcccgtggccgatactacaccgtcgggcgcctacgctcgaccgcttcgcgggtgttccaatttggcgtcggcgcctcgtattgcagcagcgaccccactcgcgacttgaagcacgcgctcaccaaagctcctaagggcaatccgcgtcccgcgctgaccgatcccgacgacgtcggcgacctgatgcgccgggttgaagtctacgacgccaagaacggcggactggtgcgctacgcgctcaagctgatcgccttgacgatggtgcggcccggcgagttgcggctagctgagtggaccgagttcgacgagaagaaccgcatatggctgatccccgccgaaaaaatgaagatgcgcgatgatcacgaagtaccgctctcccgccaagcgctagccatccttgccgagttgcgacctttgaccggccgcggccgctacttgttctcccatgacaatgatgtgcctatgtccgacaacacgatcaacaaggccctgcggatcatgggctacgacaccggccccggtggtgaccactgtgcgcatggcttccgctccagcgcctcgaccttgctcaacgaagaaggtgcattcgacggcgatgtggtggaagctcagctcgctcatgaaacggacgaaaaaaagcggcggcgccgcgacgaggtggtgcggcgccagcttgccaagggcgacaagaacaagattcgcggcatctacaatcgggcagcctattggaatgaacgcgtgcgcctgatgcagcattgggccaatcgtctcgaccacctgcgcaagggaattgccgtgccgctgcgcagatcggcctaaagcatagctcgtgattcaactcgcggaagcgaggcatgatattcgtcgatactgtcgagatcgatgagcgtcttgcctcccattttgtacgccctgatccgttcccccgcgattagctcataagctttcgttttgccgaattttccataacgacagccgtctttaaactcgacgagccggcgcctcttattgtcgtcgttatcagccatcgttcgggtgcttcggtgatatttggcatagtggatcagaaccccagaccctgaaaggctcttcaattcacccgcgtactccggcgtgccggagagtaaaaattggatagttggagcgcctccgccggtctcgtgctgcccgatcctcgacctcgtttttgagcgatctgtcctctcaaggctgaaacaggggttcgattcnnnnnnnnnntaaatttcaataacttagaacttgcatcgaaaagtcgtcgaatatccgttgaataagcgccggcgaatggcggcgaactttgctacactaattcagtgatccgatcacctagctctctgtcatagttgatacccaacgtgacgcgcgaagcggatcgcagtcagcgccaacagaagagtgctagagttggcgctgcgatcattcgcggttcgaatccgccactacgtcgcgcctgggatgccaacgcacccattcgcaatttgttttcaatcttgaaggaaagtccgatgacgcgtcgggatcaacgtgagggtcagacctcaagcgtatttccgatgaacatcgtggggtgggcgaggagctttgcgccgggaactgcttctttagcggctggtgctttggcgcttcttgccgttggccttttcggctggcgcgctggactcgggcccaggcaaatccttgagttcggtggcgctgtcctcgtcctcggctttgccggggctgtgctggcgacgctcgtaggaacgcgtcggcacacaactcttcaatccaatgctctgtcctggattgtggtggtctttatcgccatcgttctcacgctgctgcttcttgcagcgtttacgcctcttttgcctcaaggatcaatttttctagcccgaacactagggtgggcggaattgcttccggtatccgatcatttgcgccctgtcgcaaacgacgtccatctcgaaagtctcggagacctcgtcgctccgatatcgaatagcaaggatgccatatctcgagtgaaggcgttcaacgatcgaggcacattgagaatcgctgacggtggcagattgatcgcgagtaataatgatccgcgaaccatcgcggttcacacccttgagttagataatggggagatcgtaacgaacggcgcgagcctcactattgaagttgtagacctaaagtcgaacggtggccgcttggtctcttttgatccgaacaacagcgcttctaatggagcgaacgcgctgaaggtcggtaagacgactctcatcgtgcatggatccatctcgggccagctcaaagtcgatcttgctgggcagggagggtcaaatggggacaacggccagccgggagcggcaggtgctgacggaggtgccggcgctaacgcatcatctggtgtcggttgcgaacgaggcgcggagcgaggaagggatggtcagccaggtcatccaggtgctgcgggatcccccggtggcaggggcggtgatggtggttcgctgattgtcaatgctcgggatcctgctgcggcgagatcagcgatcgacttctcagctcctggagggctgggtggccaaggtggcaatggtggacctggtggaccgggcggccggggaggcagcggcggtggtccgcgtggtttttgctcgggtggcgcgcccaatggagttagtggccctcaagggccaacgggacctaacggagcaaatggccagactgggcgagacgggaatctggttgtcgagcctattccaacaaacttttagtctgcgaccagtactgactgcgagcatcgtcttaagttgagagcctaaaccgccgcaaagttactagccctttccaaggtgtgcggattggtgcagcgcataagcaagtcgcagcgtaaaatccttggcttaagatattgattacaaggcatcatttgccccggggcgaaacgaatgctgcccgtaacatggtgtaggtttattttcctgaagcacgggtcattttctgtcgacgcgagggggccacagtaatttccgccctagcttagcgttgcgcccaggttgtcatgcttgtgggccggtggcaatttcccaagaatttttctcgggacgcgatcccaaatcacctccgagcggcgcaagtctctttagagaaggctctggtccgcgaccaatggacgatgaggcgacgcatcttacccccggcgaggttcgccgcatcatcagccggctgcgcgggccggatctcgtgcggcttgcggtgcttgcccgggtctgggcgaccggtctgcgtcagcatgatgcggacgacttgctcaacgcggccctcgaccgtgtcctgtccggacggcggccctggccgatcgatgtaccgctgcctgccttcctatcgcaggtgatgcgcagcatcgcaagccaatggcggcaggagaatcgtcgcgaaccgctcaaggaggatgagaccggggaggtatttgaggaagagattcaaagtccggccgcctgctacgagatgagcgacttgatttcgcggatgcggcaggcactcgcgaccgacccgccggcgcttggcatcttcgaacacatgctcgcggatagcgaccgcgaggatgcgcaggccgccctaggcatgaacgccacacaatatgatacggcgcgccggcgaatggtgcgccagctatttgaagcatttcacgcaggatggaatcatgagcccaagcgtcactgacgatcgcacccttgcccttcttgcggagggcgtcctcgacgccagccccgaggatatcgtgcgcgtcgccgtcgccaatggcgttgacgtggccgcgctcgagacgaaagttcgcgccatgatcgcggcgcgcatggctgcggccgagctatcggaacgggtcagtttctcggtcggcgagaccgtggccctgcgctccgaccccaagcgggtcggcgtggtgacctcgatcacgccgagcaaccgcgagactcgttacggcgtgttcattgacgggcgcgtggagacactctacgcgagtcaattgctgcccgcagacatcgcgccggcggcaatcggtgcgaccgtcaacgagttgaatgcgcgattgacggcactgcagctcgccgcgcccagcctcgccaacctctattcgctccaagccggccgcatcgatttcatctcctaccagtttcgcccggtgctgaagttcatccgtgccgatcggcctcgccttctggtcgccgatgaagtcggcgtcggtaagaccatcgaagctggactgctgctgcgcgagttgcaggcgcgccgtccgttgagatcggtgttgatcgtctgctccaaggcgctggtcgtcgaagagaaatggcatcgcgagatgcgccgcttcgacgaggagttcgtagctctgtccagtacggatttacgtcactgcctggaccagacggacttggatggggaatggcctgagcgctacgcccgcgcaatcctgcctttttccctcgtcaacgagaacttggtgcacggctttccgacccggcgcggccgggcgcggtcgaaagggcttgtgacgctcgacacgccgccacgatttgatctactgatcgttgacgaggcgcacaatgcgcgcaacaccgacaccaacctctatcacggcctgagacttctcgccgataatgccgaggccgtcgtgttgctgaccgccacgcccgttcagctcggcaccggcgatcttttctcgttgcttaacctgcttcgacctgacctggtcatcgaccgtccgacgttcgaacgtatggccgcgccgaatagcgagatcaatgccgcggtcgcggcgatccgcgctggccgggcccgctggcagcaggaggcgctcgatcatctaagccgcgccgcggcgaccgattggggccgggtcatgctcggaccctctccggaatatcgcgccgtgacggccgcaatccgtgaaacgcgcgacgacgacggccgcgttcgcctcatccatcgctccgaggcgctgcacagcttcgcctcgatgatcagtcgtacccggcgccgcgacattggcgcgttcacgacgcgcaagccgcggaccgaagccgtaccattcactctcgagcaacaagctgtccatgacgcgatccttgaggttcagcgcgccgtctatcagcggacgcatggctcagggccgctcggattcctcatgacgacgattcggcggcaggctgcgagctcgttgcaagggcttgtgccgttcctggagacgatcctcacccgccgcttgtcggagatcgaacgcgtcgagatcgacgacgaagccatggacgcactggacgccggtgttgacgcgatcaagaacgatatcgctgcggtcctggcgcaggcgcgccttttgcctgagggcgatccaaaactggatcgactgctcagcatcgtcgcagaaaagggcaggatggcaaaccggcggttgctggtgttcagcgcgttccgccacacgctcaactacctagagaccgctttgcgccgtcaaggcatacgtgtgggtctcattcacggcgatattgttgacgacgaccgccgggcgcttcggcgcgcgtttgcgctggcgccgaccgacctcgatgccgtcgacgttctgctatcctcagaggtcggttcggaaggattggacttccagttttgcgacgccctggtgaactatgacattccttggaatccgatgcggatcgagcagcgcattggccgtatcgatcgctatggacaggccagtgagactgtcgcgatctacaatttggtgacgcccggcaccgtcgacttcgacatctatgagcgttgcctcttgcggatcggaatcttcgagcgcgccatcggcggcagtgaggcgattttgggagagatcgcgacgcgactgcagcaggtggctgaggacttctcgttaaccgacggtgagcggagcgctcgactccagcagcttgctgataatgaaatacggcaaatcgctgagaccgaagcgctggaagaacgcgaggccgagttgttcggcgtgcggatatcgcggcgaatcgacgatgagatcgcaagggcttcgagccactggctggagccggcggcattggaacggctcgtcagtctccatcttgagcgcacattggaggtcggccgcactccaatttcgggtcagggcccaatcaaaaccctacgactgtcggcggaagcccgccgccgacttgtgccgtcgcgagcgcggggtgtgcgcccaagcctcgccgaacgagattgggaagcgtggctgcgcggcgatcaacagatgcttggtctcacctttgaccaagaggccgccaatgccgatcggaaactagcgttcattacgcccgtgcatccgctgactcaggccgcagcgcgtgccctggttggtgacgaggaggttcatgtgtcactcgccgcgccagcatccggcttggccctcggcgctcatcccttcgcgatctaccagtggcaactcgtcgggctgaaggaggacgcaatccttgtgcccgtcgtcgccgacatcgacgttgcacacgccattatggaactgcttctcgcggcgcgagacaccacgtctgccgtgccgcccaccgcgtcgatgctcgaggcgctcgacagctggcatcacgagctttggttggcacgacgcgcggcgcacattgccgagacagctgagatcgcccggtttcgtcgcaatagccttgatgtgagccatagggcacgcatggcggttcttgaggagcagctctcgcttgcgagcgaagagcgaattcggcgtatgcgtaccgcccaaatcgcgcgcgctgccgccgaccaccaggaggcactagcaaacctggcgcgagacgaagagcgggcagacatccttgcccggcgggttgccgccggcgtgatcgagttggaggccgactgatgctgagcttcgagtcatggttcgacgagctgcggcaggtaaacgctgatctcctggcagctgcaaaaaaggctaaggccgacaagtttcttcgtcggtcggccgtggagaaatatgccgaaccgacgcatttcatctttgagctgttgcagaacgccgacgaccaagaagcaaagaaggtccaattcaaactgttgccacatcgcgccgagttcttgcattggggcaggccgttcaagcgcgatgatgtcgagcggatcacgcgccttggtgacagcgacaaatccaacgaagtccacaagatcggaagctttgggattggcttcaaatcggtattcgccgtgacggagcggcccgaagtgtattgtcaactcaatggccgaccattcgccttcgctattgaggagctcattgtgccagttgcactagccccagccgcgcgtcagggagaagagacgcttttcctcctcccttacagcaagaaacaaagcgttgatcgatcgtccgaggcggcggcacaactgaagaagactggtcccgaagtcctgatgttcctcaaccatatcgaggagctggtttgggaagacgatgcaggcaatggagaacggtaccgctgcgtacgcggcgcggatgggattacagtcttcgagcgaaccgcgctcggcgccggaaagaaacagcccgatgcgacgggctatcgtgtatttcggcgaccggtgacgctgccggacgggaaaccatcagaagtttgcatagcgtttcaattaaacgcgcgcggcaaagccgttggcgaaagtggtcccgcgaagctctgggtttatttcgaaacagaagagcagatcgggtttcggttccgtgtgcatggaccattcaagctcacagacaatcgagccaacatcatgcgcagcgagccgttcaaccagcaattaattggcgaactatccagtcttgcggccagtgctctgactgagcttcgggacgaaaagcggcttgtgcgggaaacgttgaatgcgttgccaattccggccgatgagatcgcggaaagttggaccgagcttggcgattccatttggcgaatgctgcgcgaagaaaagatgctgccgacggcagccgaggcctatgctgatccgccttctctgtggcagggcacccaggacctgcgggcagttttggaggacgaagatcttacggtgattgctagccgggaaaaatcttggaccgtctcggcagggcagcgcaacggccggatcgatcgccttctttctcatgtcggagttgaagaactcacgctcgacggtctactcaaacagctggaaagcgtagcacagcgcgttgaccggctagagtcatggctcgctgcccacgacattgcttggctacaacgcctatatttgctcttgaatggtatcaagggttatcaagtctcgcggctcgcttacgtaccgatagtgcgcaccgccgatcggaactacgtatgcgccagcgaggtgcggtttgcgccggtggatgagagcgccgaccgcgagattgaggtgcgtggagtgaagcttgttgctcctggtctcttagccggtaggaagcaggttcgcgacgaggttacggcatttctgcgacgcattggggtcaaggacgtcgacgaggaggattacattcgcgcgcttgtggctgagcactaccagccgggcggctgtgttgcggacatgaaggcgcacctgcgccacatagaacgctttgctgtctggctcaccgctcatccgttcaaagtggtcttatttcaagacgcgagcctcttcctagcagaaggatcagacaaactgcacaagggagaggcgctctatttggacaaaccgttccatgagacgggcctctcagccgtttttggccctcagggtccattagcgaacacgaaaaagccactcgctaaacgttatcgaggcacgaagggtgtgctcgatttcgcgcgcgctcttggggtcaagcaacacttgcgcccagcaagcgtgtcgacgagcaatcacccagagagaggcgccctttgggccgactactaccgctatggtgcacgatggggtaattcgacgaatgttgattggggcattccggacctggaacgtttgcttgccacgcccgacgcagcagtgtcgctatgcttgtggcgaagccttcaggctttcgatcgctccgttttcttcgcgaagttccgacatgcggagagttatcccgtgcgcgaaaaacccgcatctttcgtttatcacctcagatccttcgcatggataccttccaccaaagggggcttccgaaagcctgcggatattaccgaggaggaactgccgggcgagttcgataccgacgaccgcaccggctggcttgaaatgcttgggcttggtaacaacgcgaagcgcaaggcagctgagtaccaacagcaacgcgaggccgtgctgcgtgccggcatcccggatgaattcgccgaacgcttccaggatctatcagaggaagagaaacggtcggtcctcgaagcgggcttccaggagttggcgacgagcacatcctcgcagccgacatttcccgaacgcgaggcttccaatcctgagcggcgcgcgtcgcgcatggccgaacgcgcacgcgatgcgccaccgaagacgtatgaggcccgtgaacgcagcgtccgcacaagtgatagggatgcccgcaagctagcggagccctatcttgtcgatctctatacaaacgccgatgacgagatggtctgccaagcctgccatctggcgatgccgttcaaccttccggatggttcgccctatttcgaggctccggaagtattgtccgaggctccggtcgagctggtagaaaaccaccttgcactctgcccaacgtgctgcgccaagtggcatcatgcgcgggccacttccgatgccaacatcattgccgcattaaaatctgcgcacgcgccacagatctcggtgacgcttgcgggtgaaccaacggttatccgctttgttcaggttcatctcgaagaccttcgtaccatcatttccgtcacagtcgacggcgcaattcctgtcaattccaaatgaaatcctgaccttcgttcagcagctgagcctgccgcggtagcgaattggcgagagcggcacaaatggctgcctgaatttcgcggcccatcattttcaaacgctaaggcgagcctggctgacccgttgcttcttcagcattatcgtcattctgtttctgctgcgatgcgactggccgtctttggattttgtctttgagcctcttattcacttcttcagccgtcttcttcgctaattcgggcccgcaaacgctgtgaacggcattcattactaaccgcaaaatcctgcgctcatggcgattgagttcgctttcgtcgatcaaggattttggtcgagctgcttttgcccgcaggtttgaaacttcctccttctttcggcgaagcgtctcattctcggtttcgggcctgcctgccgatatcgccttttcgatctgcttttcgcgttcatcgatatcatgaagcgtgtgcactcgttgcgagtcagaagcaaagccctcgagggtcgtccgttctatgtcatcaataaattcgtccgcatcctgttcgatcaactccactgaacgatttcggtcgctggacttttgatgagcgcgtttctggagatctttcgcccattcgattagagtgtgctctgcctggcgccaggcctcgttatcctcaaagaagtccctccgcgagttcgggatgatgcggggatcgagaatatgcacttccccagagaaccatccattaaaccgcgaagttgtcttaccgattttatcgaagatccgggcgaacgttcggtgatcgccgacttgaatattgttcgcgcggaagcggatcccgcgcacctcctcggagttgatagtcccgacgagatcgtgagctttcgacagccacgcaatccaaagcggggagggcgatggatccacataggtttcaatgtcggttatttctacacgcttgttcgtccggtttcctgcctcgtgatacgttttgtacggcttgttaattttgtctgggcggccattgtgcattagcgtgaggtttacaatcttgcgtgcgccgtgctctttcaggaaggcgttgatcttcgaattcccgtacacgaacgattgcatatgaaactcgactggagccacctgacgtagatatgttctcacgtcttcagcgttcaaaaactggcaagccttgggatcgaccccgacgagcctcacctcaaaaaatggctggcccggtttgcggtcgacctgacgatgttttgtcaaccgggtaagtaattcagtggctgtttcaatcgcctcggtggccgttggcgaaatgctctggcgtattgcggcggcatcgaaggtaagctcggtttgcactgcttcgtctttggacgccgtcgtaaagcttagcctttcgcagtaggcaagcccagccaagcgtccgatgccacgaaaaccggcgtcatctccgattttcttcttggacgcgccgatggaaaggagagagctacgcgcctcggatatggggagtccgatgccattgtcgcggatcgcgacctctcgtttttcgggatcgattgtgatgacgatctcaccgaagttgggctcaaggatgtgggcgcgctccgcccgtctgatcgcatcgaaagagttctgaatgtattcgcggatggcatcgagggcgtccgggtacatcccggtggtaaggacgtcaagaattctcgacccgataacgatatcgctcatggaagcctacttcccacccttgggctgcgcgtatgctggcctcgggaaattaactttcacaaccgccgacgtgaagaccggatgctgcaccatcaatgtcccctgcggaagccgcgagagagatgctttctgtgtgctattgagcataccgtaatcagacgccttcctaatctccacagcagatgttctgccgaaaacgttcgtcgcgcaattgccgataacgcggtcatgaacgccggatcggaactgttcagcgccgaagagaacaatgccgagcgagcgaccgcgctcggttatttcgagtagcttttcagttaaggacccaccacccttgttcggtgcgtatttgttgagctcgtctgcgaaaattacgactcggccgaggtcaggctgttcatcctgctggtcgtcgccccctccgagcttcgcattgataatttgctcgacaacgtcgcctacaactaaagtttgcaggtagtcgggcaacggttcgatatcgactacgaccaccttgcctggcccgataaacttgaggatatccgatgtggggcgctggcgacgttcggtctgtcgactggcagcttcctcgctgaaaatgtcattcttggtccgtgtcttgatcaaacggaagaacttccgccaagactgaactgtgatcgaagcctgccgtccgccgcctccgcctgtctgcgttctgtttctcagatcttgccggagcgcctcccaattgccgaacgtttgtccttcggcgatatcatccgaacaggactccatcgtatgggtatcgtcctcgacatcggtcaggaggagcgatagccgttttcgcccgtattcgatcggatagatgtaatgaaagcacttgttgctttcgatctgccgccgatggacctcccgaggaagcttcgactggttatatgcctgagattgcacatccgagtagggataaaagtaggtaacgttgctaaagggcgtcgcggtgagccggcacttttcccaatttcgcttgtcggtttccgagaggtccgcgggcttggcctcctcgtcaattgatagaagatcgaagcccttcacgttgaagatcacaagtgacacgtcttcagatcggcgttgctgcaaggcactacaaagaaacattgcatagcttgtcttggtagcgagacccgaaatacccgcaatattcaggtgggcgccttccgggccgatcacataattcgcttcgaaatcgacgatgatctcctcgccattagacatcgtaaaccagccggcgggtatcggctgccggaggctagataggcccaacgagcgccgcacgccttcggcgtctgcccattcgacgggagcgccgttgcggatcggcatttcgaaatctttatcgtttgacagtatttcagcctcggcgattgttgtcccgatgcgctcgttgcgcggcgtggattgtacgtcgccgaagtccgatgacacccaatctgaaaggtacccgcccgagtccgtcaggtacttaagttcggttatgatcgcatatgtcgtgctatctttgatgtgtcgtatcatgacaacatcgaacggtttgatgacgacgtctttctcgatccagaactcaaccttgttggtcgtagagggacttttttcggtggcgacgactcgcccaatagtacctgccattataagagccctttgaaatacacatccgacaggaagccagacttcaggaaaagctccgtcaggtagatgggatagatgtggtttgcccaacggctgtcagtgccatatggcgtgacgttgcgctcagagagaatgagtgcagaaagatgatcaacgcggtcgcggtcgagcccgttctcctgttcatcaccattggcgagcacttcgaccttgatgattccggctagcggattcgtcatcatccgtcgcggtcggatgcgcagataccaaaccccaaggacgtcttcgaattcgtcgtgcccagccttgaagaccggagtgcgctgaccgtattcaaggttctgcaagaaagttcccaaatgcttgctgcctcgagcaccgataaccggctggcttggcgtgaaggacttgctgatgccgaccacgttcgccagctgagtaatcggaaaatcattccgccgcagcacttctcgtcgaaattgcaggcttccatcgacaacgagcatcgcgtcgtcgcgaagatccctgtcgtccatcatccgcctgactgcgcccaattcgaaatcgtgcatcgaatccagaatcttcttggtcccgatgctgatgtaatcttcgttttgaccagacccactctgtccggtggcgtaagtagcaagtatgaattccagtttcctattagcgagctcggccttcagcgcattcctatcggtttgctcaagcgtgtcgggaaaaacgagcatgttctcgtaccggagatgcttgtgcattggaccaaccgaaccatcatccgctcgcttgagcactgccactccaacctggccggctaacaccggatagtatcggccgtcaggcaggatcacgtcactgaaccgaaagactcgtctcgatccgtccatgaagtaggtcaggatggtcggaaccttctcgtctacgccggtggtcgggaccgtgctgatcgtattgctctcgggattttcaaacattcgtccccgaatgcgagagtcgtactcgcggtactcagaatccgggtcctggtcgaggttccgcttttcgtaaggcaagcatttgaatctcgatccttcaaaaacgtcttgcattacatcgctgacggtcttttgcggcatgtgtaggcgtgttccaaatgcagctggcgaatccgcaatggcggacagaattacaggcagagacagcgatcctcgttgccgattttttcgataacaggcttctttcggccggatagctccttcatatcggcaatacccgagtttgaaaaggcagaaacgggcgtccctcactgctaaagtactgtaaaagttggggaaagtagttgcaatcgcgctggctgcgatgccaggaggattgcagtttatagtggcgcgggttccgacaggttgatcagaggttagtcgttggttcgcgatgtaagagctttgtttcaccgacagcagagcgtcgcaccgtggatgagagcccagctgctcggttgagaatagtggccggcacatgaaaaggttcagggacgagggagtgcgatgcagttcgtggatttgctgtctcagttggaagagccaaaatttttgcgtctgtttcggcacttgatcaatctgcgcactgacaagttacccgacaatctgtgtctgccaccagtcgctttggacgtcgccgacgcggaaatggttgcgcgaaccatagggaaggttagcgctctgcgcagttgggctacaacttgggtattccagattgagcacgcgccgccgattctttggtccaacggcgacttttttgatgattttgtcgagaagcgactcaacgcggcgtttagaaatttaaaagagaaggcggatcctctgaactttctccacgcaggattcaacgattcggatcggcccttgcaatatccgatagcccaaggattggagtattatctttttacaaatgtctgttgtgatctcggcgagtacgcgctttctcgcttttcagagacagcgcatcggatattttatgaggtgcttggcataccgcgcgataggcacccgacatttggaatcgggacaccgcagaccgcattcaatcaggacgaggctgcaatcaaggagttcgctgttggtttgctcaatatgcccagcagctactaccttgtggcgagggaaggacgaatatcgattgttccaaccactgagcatggctggttcgatgcctcaaccgacgcaaatgcagttagtcgggttaacgagcgacggcttgcgactgtagcgacgagctctcttccaaatttcgatcagcggatggctgagctcgaaaccttgattaatagtccatctacaaaagaggcggatcttcaagaattcttccgcgtttatccgcaattcctgttcgcgttggacgagcgatattgcgaaatcaagccgcacgtttgcctcttcgaccaacgccgcaatcgattggtgccagatttcatggcacgaattgagagtgagcatatttgggacgtgattgagctaaagcgaccacaacacgcatttgtcggcgataccaaagatttggagagactatcggcctttgccgcgcgtggaattgcgcaattattggaatatcgtgacttctttgcgtcgcgaagcaatcgcgcccgtgtcagcaactcgttcggctcagcgccttacgagccagctctcgtcctggtgatagggcgcggccgcgcgcgggatccgcttcactggacggccgcaacgcctggtttcccatctgtcaaagtagtttcctacgactatcttttccagcgggctcaagagtgccgtgcctatctgtctggcgtgcaatagaaacgctacttcaccgctattcgcggcataaacgcacgtgaatgtcgctgtccagacgcgaacctccaatctagtcgactctcctgctctcgcggggccgtagccaaacgcatcttgtgagtcacgggctccgcacgccggcctgcatgctcatccacacgctgcagtccatttcgcaaagtcccaaaatttcagaaggaagagcaggtagacgtcggccccaatcagcacgattccgagccaaatcgaattcctgtgaacccgacgactttgcatccagcgcaacggttgcaacaattgactggtcggattgtcgtctccaatcggatagagaaagggccatgcccatcggaaatccagataatcccgcgccatcgcgacgacgccgaagaaatacagcatccatggaagtgttccgtcacgaggattcgcgggacaagtcccgccccgcgacacgtaccagaaggtacccaacaggatgagcaatatggcgccattcatcaccatccaatatgcgcgtagcaaagcctcgcgctgaacttcctgttccggaatctgctcaccccagattccgtggcggacggctcctgaatggcgaatttgactgacgattagcaaaatcagccccagcgccaacaacgaaacgtacgaaacgaagaaccagaggtaaccgaccttatgagtcaggtcgaggccaagcgaattcgccattaggaagaagggagccgccgtcaggaccaattggatatagtccattgcaaagccccaagggtgcgcttgcgcaagcggaagcctggcgtagcggatgtcgagaaacttcacgctctgatggtaaaagactgcggccgtcaccaggaacaccacgatcatctcgatattcaaggcccaaagccaagcgggtggagagcttatttgctgaagcagaacctccttcagctttgcgataacgctgccaccagcaatcgcgaaactcgtcgcgaagaccaccgcaaagagccgcttcagattgtcaacggtccgctcgccctgcctgaccagatcaggcaattgcctggcagcgcgttgggccggggtttcgagtgcggcgttgccgttcgggtcccggttgggtggcggcggcggtccagcgtcgccgccctgcgggttggcggtggcttgctggccttggttggcgggagggggccggtccacgacgccgttggtggcatccgtatcctggtttgcgccgccgttcgtctccgtcatgctggaaattcctgtgtggacgggtaaaactctgcgaatccaatcggttcgagaaaaaaatcgtgtatcgcgccaatcttccgatcgacaagcgcgccttcggacgctagtgtcgtatggcgcggggacagttgcaatgccgaacaagcgtatacttttgattgagcctggttataaaaacaaatacccgcccatcgggttgatgaagatcgcccaatatcatcgtggcaagagtgacaccgtggtcttcgtcaagggcgtcgatgaccgttcggtgcttcttcggcattgggaccgggtctatgtaacgacgctgttctcgttcgagtatgcaaagatctccgaggccatcgacttcgccgtcgaggtggtccacggccaaacacagcgtgttttcgtcggtggcatcgcggcctcgctcatgcatggtcggttcctgtcggagacccgctggcgaggcattcgcttcatcaaggggcttctcgataagccgcctgccatcgcgttggggctggacgagtatgacggagacttctacgccggcgatatgagtggtaccccgatcgaagacctcattccggattacgacatcctgaagcaggtgagttatgagtatcctgttcgcgatgcctacttcgcgtacgcatcgcgtggctgcatccgcaaatgccacttctgtggcgtgccgaagcttgagggggcgcagcgagatgcaacgccgttgaccgaattcgtcaaggcggttgacgcaatgtatggtcagcgtcgtgatctgctcttgatggacaacaacattgtcgcttcagcccgattcaaggagatcatcgcggagatccgggatctcggctttgcgccgggcgctaagctggccaagggcgaccgaagcgtccagcgccgcgtcgatttcaaccagggcgtagatgcgagaatactttgcaaagatcgaatgtacctgagggagttgtcgtctatttgcctcagtcctcttcggatcgcgttcgaccaccttggcctcaaggggccgtatgagaccgcaatcagatattcccatgagttcggcatgaacgacctgtcgaactacatgctctacaatttccacgactccccgctcgacctgttcgaaagaatgcatttgaacgtccggttgaacgaagagctgggtatccggatctattcttttccaatgcgctaccagccgaccgatcttcccgaccgttcgcacgtcggtgagaagtggaatcggtatatcctgcgttctgttcaaatcgtgctgcaagcaacccaaggagtggtctcgggcgagccggacttcttcaaagctgcattcggttctaccgcggacgagttcgaggcaatcctgttgcggccgcaccacatgattttcaatcggcgctggttcgaattctacgaaggaagggcggaatttgacgactatctctccacgattggcaagctgtccgcaacggaaagatccgagctgatcgagtttctgtgcggccggatgccggggcgctacaagcaggatctcagctcgctgagcggatcggtgctcaaggcggcgagattttacgttcccttggaacgcgagcgcgagctcgaaattcgacggctgcagcgtgaacgcagggatgcttcgcccgatatccgtctttcgcccggggaaatcgtcgaagacgccggccttgaggagcaggaattcacggcgccgccgatcacggtgcggcggcgctccaaggagattgtcgcatgaagctgaacgccaaaccggacgctccggtccggcccgtgtcccccgacgacgtcagagtaggaaaggacgtcatcgagatcttgaccagcggcatgtacgtatctccgctatcggtctaccgcgaatacgtacaaaattccgcagactcaatcgaccaggtcgaaggaggggcaggcgtcccctcgggacgtgtcgcgttggatatagatcacgccgcgcgcagcgtggtcatccgcgacgacggcggcggaataccggccgacaaggtgggggacgtgctgttggccgtaggcggatcgcgcaagcgaggcacagcagcaagaggcttccgtggcgtcggtcgactgtcggggctcgcctactgccggcagatcgagttcgtcaccaaggccaagggcgccgaccggatttcgcgcgtcgtctgggattgccggaagctgagggaattagtctcgggcaacaacggctcggacgacctgcggaccgtcatggccggcgcggtgtccatctcgaccgagagcgtcgctcgcgacgagccgtcgttcttcgaggttcgcatgagcgacgtggcccgcctccggagcgacctgctgctgaacgaacgtctgatcgccgattatctcgctcaggtggctccggtcccgttctcgccggagttctcgttcgcgtcccggatcgacgacgaattgcggaagcggttgaagttgtcgcgccttcagctcagcgtcaacgggcaggccgtcacccggccgcatcgtgacgaactgctggcggggtcggtcgacaagtcttcccgcatcaaggagatcgaattcttcgaactggccgacgtcgacggcgaagtcggtgccatcggatggctcgcccatcacgactacgtccgaagcctgtcggccaatctcggtgtgcgcggcctgcgcgctcgagtcggcgacctgcaggtcggcgaatccaatctgttcgaggaatcgtacaaggagacgcgattcaattcgtggacgatcggcgaaatccatatgctcgaccggcggatcgttcccaatgctcgacgggacaatttcgaagctaatcaccattacgcgaacgtgttggttcagatagggcccgtcgcggccaggatctcgcagcgctgccgccaggcatcgttgtcgaggacggcgctacaggtggtcgacaatctgatccagcagatcgaggaccgcctgaagcagaagcggccacgcatcgagcgggcggagctttcgagactgaaggctgcggccgtccgcgccactgcaaaggccagcaaaatcgaggacgaggacgaccaaaggaagtcgctggcgaggcttgccaagttgcaaaagaaactctccggtctgacgccccgtcggggaccggcgacggtcgccgtgtccgaggtcgcatcgctcatcgcgaaattcgtgacgagccgcgagcaacgggaaaagctggtggccgcactcggcaaactcgtcgactagccggtcgaaaggcgatatcgcgtttcctcggcagccgtactacagttcgcccaaagggggctacagcttgcacgatcaacctcggagcgatgcggcgacatgcgcggtgaggcgccaaattgtgcgtccgctggatcgtgagcccatgtgcggaagctgtcggaacccagcgtcattcggagcgcgcggatgaagctcgatccactggttcgcgactatcgggcctatctggacgaattggccggcgtcgtggactcggccgcgacccgcttctatctcgacacctcgttgctgttatggctcgtccggctcggggccacggcgcgccaggaattcctgacttggtgccaagcgcggtcggtgaaggtgccggtgtggtcggctcacgaattccatcatcatatcgtcgagaatacgctcggcaccaacgtgaagaagctgctcgccgagacccagaagaaggtcgacgagttcgtcagattggcggccgagcgggcggacgagggcatctgtcgcgacaagggatacgcaggacgcgaatccttcgtcagcgacgtcgagcaggccttcgtgaagttcagggagttcgcgaaagtcgtcggcgacgatgccggctacggcgcggccgcacaggaagtcatcgatttcataaacgcgcacgtgctcgcttcggatttggctccgatcgtcgaaacgcttggcgaagtcggagagttccgctacgagcatcggatacctccgggctttcgggacaacaaggacgaaaacaggttcggcgacgcggtcatttgggaagagatccagagagacgtaaaagcctcgaatccaacagtccccgttgacgtcgtcttcatatcgcgggacgacaagacggactgggtatcggccgcgcgcacggtggcggtcgacgacaagcgcaggaaggcaaaccgcgaccaagatctcgatgtgatccgtccgcatccgcttttggtccacgagttctctgcggtgtcgagcaacggtcgaatctacattctccagcccggctttctcgcatctgtcgtcgactacgcgtcgcgaacgacgggctcgcggaattccgttgcgacctggatcgccgccgcgcaccggcccgatcttctgtccgaactcgcgggtgccggattggcgcaacaggctgtgacccggccggagaatactgcacaagcggcctcgcccgacgtacagcaggcgccgccgactggcgccgccgaaccggagccgacgctcagggacatcatgggcagcgacgtctcgggcgatgtcgccgcgtacgcgcaagcgctgccccgcgaccaggaacggacgatccgggacgcgcaggacgagctggtgtctggcaacgggtctccgatcaagttcggtagactgctcgccgaattggcgctcgagggtcgtgccgaagtctccgaccggatccttgcgatcgtggaagggttgaagagcagagtgaatccgacgtcgttgaaccggttcgtcctcgcgatcgccgcgtccacatacttcgacaagtacgccgaactcctcaagaggccccggcaggaacttcgctcgatcgtcgttgcgttcgagagcgacgacgcctaccgatccaccttcgtcaatttgcggagttttctcgaagagaagggggccgagcttccgtacatgccaggttcgggtcgccagaagatgccgttcaaattcgagtttctcgatgggtcgtcttcgccacagatcatcaggcaagtgcgcgtgggtgaccagacggcattcatcgattccgtggcggaggcgagcgaccgaaatttgaccaagctgctcgggaagtccgcctcggaaggatgctccggcaaggaaatccggatgctgattgcggcgcaatatttcattcctcccgatcttctttccgatcagttggacaagaagaagtactcgtggctagcgggcacaggcctcgtcccgatcgatactaccagcgagggcggattaagcgcgacggacgacgacgaggacatcgatcgtgaatgacgaaaatgcagtggtcccagcgggcggctctcccatgaccatgcccatcccccacatcggcgccttcgtgctggagacgctgaccctaggcatgtatggcgagcctcgtcacacgttgcgtgaatatgtgcagaattcgttcgacgggatacgcgcagctcagcggacgcgcttcctgaccgaacgggggcaagtcactatatccatcggggaggacgagatcacgatccgggacaacggtatcggagttccgacaagccaggcctggaagacgttgacgtcgatcggcgcgtctaagaaggatcgacagcgggacgccggcttcagaggcatcggacgcctggcgggaatggcgtattgcgacgaactgatctttcggacgaccttcccaggcgaggccgagaccagcacgttgacgttcgactgcgacgcgttgttgaaggccatgaatccagacgaaggcggcgacgtagagctttcgggcctgttgtcccgctccatccggatgaccacgaccgccgacgaatctcagaaggatcagcacttctttgaagtaacactgaaggggttgtcgaaggcgccggagattctcaagaacgctgacgaagtgcgcgactatctcgctgagaccgtgccggtggatttccatcctgactgggaacggaggaaggccatagaagaccgctaccgcgacaatttcggggcctcgctggaaacgatcgacgttttcgttaaggtgaatgactctgccgagcagatcttcaaacactacggagagtcgtacgaacatgccaaaggggagatggagctcgagtccatagaatatttcagcggcagcggaaaccgcttctgggcatgggtaggcacgatgagcgagtcggcggccgtgaccgactggcgtacgcgcgggttgcgcgtgcgggtccgtaacatccaggtcgacggcacggaaatctccgagagtctgttcagtcgggtcaagccgtcgtacggaagatttagcacgtattatgtcggcgaaatctacattgatcccgagagcgtgataccgaacgcgcgtcgggacggcttcgaggagactaggaattggctcgacatccggtccgagttgataacctccgtctgccagccgctcgcagcgcgagcctatagcgcttcgcagctcggccagctcgacgtcgacaaggtcgtgggcgagatcaacgatctgatcgaaaggggcaatgcgatcgccgacagcacgaagtcgtcgtacgatcaggtcgtcggactgatgaattccgcgaaacgattgcgaaaacgcgccgcctccgcattgaagatcgtggacgacctcgatgcatccgccgtcggcgaaggacagcccgggcttcagaagtccgttgcgctccaggatgccgcgaagtccgtcgagaccgtcgaaacgcaggcgcggatgctagtcgggcggttcctcggtgaagacgacaagctgacggcgcttaaggcgaggctcagggaggagattcttcaagaagtactggacgtggtgaacgccttcgtcgatcccgcgacgtttcagaagatcaaacgacagctactcaagagcaaatagcgctcccctggcttatcgacgatggacatgaaggcttcggtcggcgtcgcccaaatgactgacgagcattgcgtcgccgagccatccgcccctttgagttaaaagggggcgccggtcccgaaagcgggtgccatccttcccgcctccgcttcgctgcggccatccagctgtgcgatgacgacacattaggtgctgcgcaaacctgaagtagcttcgatcgtatcgtacgatgtcatcgccgttaccttgcagcagagacagaagcgaatgactttatagctcgaacggcccgtcactcctgatcatcaaataggagtggcagttgatcctccggttcgacatcggcaaatcctgaaacggaaattccgataagtcgtattgccttctttggcggcatcagttgcttcagcagttcgagcgccaggccagagagagcgctgacagtgtcgatgaggcctactgacttgctgcgggtgatcagttcgaagtcagaaaacttcaccttgagcgtcgctgtccgtccccgcgcgcctgtagtttcgcagtgacgccagaccttctcgaccagcggctgcaattccgccgccagggcttcgtagtcggcgaggtcctgcgagaatgtcgtctcggcgccgacggacttacggacccggttggcgcgaacaggacgctcgtcgatgccgcgcgagatccagtaatagtaagttccggctttcccgaaattggcggtcatgaactcaagtgtctgcttacgcatatccctgccaatgaagatgccgaggccattcatcttcgcactcgtcgccggacctattccgtggaatttgccgacggcgagatcctcgacgaagcttggccccatcttcggcgtgatgacgaactgtccattcggcttacgttgatcggacgcgagtttggccaggaacttgttgtaggagatgcccgccgatgcggtcagtcctgtctcgctcaggatctccgctctgatcatggtcgcgatctcggtcgcgatcgtgatgcgttggatgttttcggtgacgtccagataggcctcgtcgagcgacagcggctcgatgatttccgtgtgctcggcgaaaatcgaccggatctgtcgcgagaactccttgtagacctcgaagcgtggcttcacgaaaatcaaatccggacattgccgcttggcggtgaccgaaggcatcgccgaccgaaccccgaacttgcgcgcctcgtagctcgcagcggcgacgacgccgcgctccctggatccgcccacggcgaccggtttgccgcgcaagtccggattgtcccgctgctcgaccgaagcgtagaacgcatccatgtcgatatgaatgattctgcgctgtcgcgtctcggcagtgttctgttcatggtccggcgggttcatgcatcgatgatactcgaatccgctttgagcgtccggccgaaactcggccgggcgtttcaatgtaacccaccttactcgcgcgctcggttaaagcctgttgcccgatttccgaatgaaatgggaaggcgaagcttcatcgcacgctcgtcgcggtcggctttttgaaatgcgatctccttgcgtacaaatcttgccagttcatcggcggcagcctgcatgaagtgctcgcgtggcgtctttgcaatctttttttgctcaatcatcgtcctgctccaataaacgtcacactacggcaacgggagagcggccgctaggttcgaggagatggaagcaaaaaccccggcgtttcagccggggtctcgcggtcgcgtcggcgtacatccggccggcaatttccgccaactctcggctatgttcttgaagaaactatgacttgcgcggcgaagtcgtgctgtgggtctattcggccgggcactccggacagctatctccaatcgagtcgagcacctccgcgatcgcgattgctgcagcctgcgaagagacgcccgcgggcggatcctggcgggcgatgtcgaaggcgcgctcgcgggcgtgtggatcggcgcggtcctgcatccagccgtgctcctcgcattcgcgaatggcgccggcttcctgcagcaccgagatcgcccagccgcgcagcgtccggatcgcagatcggcgctctctggtcatcagcatttggaattctcctgccggaagaatcctggcaccccttcattggccagggattcggaatccgggaggctgggttcttcgtcggatggcttctgcttgtccgcaaggaatctagcgccacatccctcgcatgcgagctccgatgtcgatccgtggaccttgagctgggctgcgtgcggcggcgcccgtgggcgcgagcggccagtttgttcgctcgaacagtccgagcagcttttcgggaatgaagcgggttctcgatgcgtagacgtgccgatcaccttgggcatgctgaccgtgtgtgaagaagcgctgcggcaccaccaggtggaggtcgtcctttgctcgcgtcatcacgacgtaaaggaggcgccgttcttcctccagctcggcggaggtgccggctccgaggtcggacggcatgcagccgtcgaccacgttgagaacgtaaaccgacttccactcctgtcccttggccgagtggatggtcgacaggatcagatagtcctcgtccagcagcggcacgccggcctggtcgctggtcgcgtccggcggatccagggtgagttccgtcaggaagcgttcgcgcgaaggatatccgccagctatctgttcgagttgaatgaggtcggcgcgccggacctcggcgtcttcatggatgcgatccagatgtggatcataccagaggcgggcccgctccaaaaccgagggccattccgaataccgaaggtttcccaccgcatcgatgaaggtggcccagtcttcgccggcgcgcggcggtgagggaagggtgcaaagtgcgccgagtgggtcgctagcctcggccatctgatcgaggacgcgctgagcggacgcaggaccgacaccgggcaacagatgcagtacgcgaaaaccggcgacacgatcgcgcgggttctccacgaaccgcagtagagcgagcatgtccttgacgtgcgcagcgtcaagaaatttcaggccgccgaatttgacgaacgggatgttccggcgcgtaagctcgacctccagcggcccgctgtgcgaggaggtgcgtaagagcaccgcctgctgcttgagaagagtgccttcctcgcgggtttcgaggatgcgttcgacgatgtagcgcgcctggtcagcttcgtcccgcacggcgacgaggcgaggcttcgcggacgaagtacgttcggtccaaaggttcttggtgaagcgctccctggcaagctcaatgacgccatttgctgcggaaaggatcggctgggtcgaacgatagttgcggtcgagcgtgatgatctcagccttcgggctgaattgctcagggaagtccagaatgttgcgcacagtggctgcacggaaggaatagatcgattgcgcgtcatcaccgaccacggtgaggccgcgtcctccaggcttcagagcaaggagaaccgacgattgcaggcggttcgtgtcctgatactcatcgaccagcacgtgatcgaagcggccgccgatgtcgtcggctatggcggcgtcggacatcatctgagcccagtagagaaggagatcgtcgtagtcgagaacgttgttcttttgcttggcctcgacatacgccgcaaaaagctccttgagctcggtggcccagccggagcaccacgggtaagatgctccgagcacatgttcaagttcgctctcggcgttgacacagcgcgagtagatggaaaggcaagtacccttggtgggaaagcggctttcggtcttagaaagcccgcgctcgtgcctgacgaggttcaccagatccgcagagtcctcgcgatcgtgaatagtgaaagcgggattgaggccgatctgctcggcatattcgcgaagcagccgggcaccgataccgtggaaggtgccggcccaactcagcgcgtccgtcatgatgccggcgttagcaccgaggaccttgcgggcgatccgctcgactcgtttggccatctccgacgcagcccgccgcgagaacgtcatcaacaggatccggcgaggatcggcgccgcggacgatcagatgcgcaacacggtgggcgagcgtgttcgtcttgccagatcccgcccctgcgatgaccagcaggggagttccgacgtgattgttgccggagacgccatgctcgacggctcggcgctgctccggattaagcgtctcaagatatgatgtggccgtcgacgcgagcacgaatcagttcccctgctgaaattcaacgctcgatgattcccgctggaaccgcaacaagttcgactacgctgcggctgccgtcagagcacgtggtaaattcttagctttgtccctccacttgctccaacgtgcggtcaaaaggcagcctacgctgctaccttgtcttccttatcggccccgcgcatgacgatctggagcgcatgatcgggcagcggacgctgcagtgccttcgcctcgtcccaaggagcgcgcatccatgcatcgcgttcctcctcggtggtgaggatcaccggcatcgccttcgaatgaatcggcgcgacgatggcgttcggcgcggtcgtcaagaaaccgtagaccaggtgcggcccgggaatcggcttcgactttgtgccgcggtcccctttgaactcggtccagatgccggcgaagcagaacaacggtcgactttcgtcgagcgcgaaccagacgacgtccttcttcttggtttccggattcgtctcaggcgcgtactcggcgaaactgttcgccggcaccagacagcgattctccggcttcagccaaccgcgccagtggggagaggatgtgtttcggatgttggtcacgggtgggccaccggtccgcggcgggggcggcatgccccagcgcatcaacaccatctcctccgcatcaccgacgttgcggaccaccggtgccggatagtcagggaaaacaccggtcatcggcggtaaatttccgacgtactggttcatgcgcctgaacaagccggcaatggccgcctggttggtcgtgatcgaatagagattgcacatttcagcgttcgctctcgacgatcatcggcatcggctttgttcgcccgaggctcgacatgtctgaaaatcgctggtctgcgtacccggccgtcaagatgccttcctcacgccgtttggttcgaacgatcgcaacatgatgccgtcgagaatcttgcgagctgcggcgcggatcttttgctcggcatccgccggcatcggtggcagcttataggtcgcaacgaggtcggcaagctccttatgaacatccgcacggaagccgcgcgggtcatccgccatttccgacacgagctgaaagagcgtcatgagcatgaactggatcgccatgtcggctcccacgtgctcggcctgatcatccgtgatgaaagaaagcttgtcctgatgcttcatcgctcttcgtcgaactccgacatttatccagtgtaggttcgaaagcgcccgcgcatgtaggcgtgcgagacggccttcttcaattctgcgatctcggattccaaaaggttgttcgcaacgatcagcgcgcgaacagccgcgcgcggatcgccgtcgcaaacggcgattgcctgatcgacggcggtctccagcccatcatcctgttcgttcggctgagagaccgaggacatggcccctcttccaggttgaccgtcgacagtctatgttcttattttgttctcatggagtcaagccgccattttaagccgccctggacgctggtccgggaaaattcggagtgctacgtggtcaaggacgccaacggcgtgatcttggcgtggctctattgtcgcgatgacagccagcgctacagcttcggcgtgagcaaactctcttcagatgaagcccgccgcatcggcaaagcgatcgcgcgcattcccgaattcatgatgccgcgccaaggcttctacccgcgtggggctgggccgcgctggcgcgccgatcggccgtaccatgttgcgctggaagaccgttacatccgtgagcactgggatgaaatctatgcgctctgtcggctgaacagcctgccgttcaacgggacgggcgaagttatacagaatgatggcgtttggagagtctatgagtttgcctggcagatggatgcgatcttgttctgggagcgctttgaggggcgctggctgcgcggcacggagtttcattatccggagcgacccgagaatctgccgtcactcaagccgcttcagaactggccaaaattcaatccacgcaatttgcgataaccacagatgccaaggtcataagcatgcatcgatcgctcgtcatactgatgtttctattgggatccagtacggccttcggaaatgatctcgttggccaggccagcatcatcgacggcgatacgctggaaattcatgggacgcgtatccggctctggggcatcgatgcccctgagagcagccagctatgccgaggtgcggatagcaacctgtatcgctgtggcgcgaacgcagccaatgatctcgacaccttcatcgcgcggcgaccagtgagttgtacgccggtctcagaagatcaatacggccggagtgtagcgatctgctcggtcgggggcgccgatctcggggaatggcttgttcgcagtggtcttgcgctggattggccgcaatattcgaaagggaagtacaactctgcccagcgcgatgccgaccgttcggggcgcggggtgtgggcgggcagctacgtggcgccatggttgtttcgcgggtgcatcagggccggcggcgctccgaccaactgttcggatgacgcaaacgcacatccttgagtgcgcccgcagtcggcgattcggagcttggttatctaagagctgaaccaacatcggcgtgagctggcgcctctcatgcgactcacgctaagcagtcgccttctcacggtacaaagggaataccatgattgcgaccgcccacgaattgccgacttcaggttatgcgcttgaagtcgacggtcgactcaaagccgaatttgcgaccagggacggagccgagatgggtgcggtagagttgaagaagcgttttcccatgcttcagatcaagatctatgacgcgcagaccaagacgcgggaagaagtgctgtttccgcaggcctagttcctgatgatctgccgggcgtgtatacgcttgctatcggcagacgctcgctcgcatgccgatcggaatatgtcaaatcgatttcaggagttcggtcgcctcgccgagggccgtgccgatgatcggtttgaatgagtccttgatcgcgagctccgcgatggtcacattgacgaagtccggtttcaatcgttcgatcgcgctcagcgttttggtgacgtcatccttgtggtgcttcagcgctttgatgatggaatcgcgatcgtgacgagccgcagctgcaatgtcaaaaatgtcacgcggcttgatggtcgcgccgcggtagtgaatcttcttggcaatgatctcggcgaccgtttccaggtcgacttcctcgccctcgatcgtctgcctcgtcgtcgggatgtccgtgacgtcgtgagccacgatgaagtcgatttcgccgagaccctcgaaagccagtttgaggaaacctgtgccgtcgccgccgtagtccgatggcctgatctcgaactcgaaatcgtgcagcttgggatcgagaaaggacaggagctgcgcatcaggcaggaagatatcgacgtcgtggctctcgcggtggccgacttgcagcatcatcgccgtgccgccgccgaacgaccatgaatcgatgatgagctgttcggagttgacctggcgtatcagcgagcaggcgatgcgaaaaaggcgcgcccagtctggtccgtccgcgctcacgcggcgagtggataggattcgccggagaattgcgcgaatgtctttgcggcggtgacgagctctgtttcgctgatgtgaaatgcgcccgcaaaggccttctgcaactccggcgcaacttcgccgaaaaatgccgacatctgtcccggccaggccttggcggcctcaggatgcgtcagacagtgggcaagcgtcggcgcgtccagcttcttgctgtacggcgcattcacggtcgtcagaacagacgcgggaaacttgcccatgaccttcactgtctcaaaatacatccaagccgcaggccacatattaaggatgggccggcgcggaaccaagtcaacagcttggctcctagccgtcaacaaaggctgaaccgcctggcttctggttcgtggaactataagcatttgatttttatcgcataatttggccgaaggaaaagccgaagccggcggcatatagggaactcgaaccaaccggatgccgcctgggcgtcggaaggttggggcgtctccctccgggaccgggctgtcggctccgctgaaaccccggctttacgccgggttttccccctttcgggctccatccctgacgcggtgtctgcggctcgctcgaccgcctcgtaacccgtcgtgggcgcggaggcagcgccaagcgagagcaagagtgcgggccgatcaggtcatgacgggttgagggccggaggagagtcttccggcgcccgtcgtggagattgctcccatgaacatgcagattcttgatgcccgccgcgacgccagtggcggttacagggtggacgtgagccgcggcgagcgcgtcggccgggtctcttccgagtggttttcccgtccggcagaccagcgctatctgtcactcaacgaactagcaagcacggtgcgtgatcgcaccgaccgcagccgcacgcgcgtggtcgaaagcgcgctcatccatgtggaagcaaaccgcaccgatcccgagcgattggccttgatgctgcccggctcggacaagcccgtcgcgccgacccattggagcttcggtcagcttgcaagccaagttggtgctccggccgcttacctccggcaactccccgcggcactcgcaggcatcaacctgcaatacggcctgaccgccgatcgcgccgaacaaatcaagacgctcgagaccgacgatggccgtgttgagcttcgtgccgtcaccagcccggactatggccggatctttgaccatgaactcgttgaggcggtgcagcgcatcgccggcaacggcacaggtgatacacgctggaaggtgccgggggtgctcgactggtcaaccagaatctacaatccacgtgtcgatatttcaaagagcacgacgaccctctatgcatcggatagagatgttttccttttcctggtcgatgacctgaatccgatcgaagccggccgtctcccggacggctcgcccgatctctatttccgaggcttctactgctggaactcggaggtcggggcgaagacgctcggcatggcaagcttctatctccgcgcagtctgccaaaatcgcaatctgtggggtgtggaagatttcgaggaaatcatcattcgccattccaaatacgcctcgtcccgctttgcccacgaagcggccccggcgctgctcaacttcgccaactcgtcacccatgcccttcgtcaacggcatcaaggccgcgcgcgagcggatcgtggcgcatagtgatgaggatcgcaccgagtttctgcgtcgtcgcggcttctccaaggccgatacagccaaggtgatagaaacggtgctggcggaggagggccgcccgcctgaaagcatcttcgatttcgtgcagggcatcacggccgtcgcgcgcgataggccgcatcaggatgctcgcctcgatatggaggcaaaggcgaagaagctgttggatcgcgccgcctgacccctgccaagccaggacgatctttcgtgccttcttctttcttcctggcttctttcttcacgcttctcggttcgtctcctgcgtggcgctgccctcttagagtaagagggcggcgcttcgctccttgaacgggttggaggtcgagagaaggtctcggccgcccgttctcggagaaactgaaatggcaaaggccgttcagaaaatcaaaatgtcgtcctcgcgcgacattccattccacaagctggtgctcagccagtcgaacgtccgccgcaccaagtccggcatctcgatcgaagacctcgccgaggacattgcccgccggaagctgctacagagcctcaacgtccggcccatccttgatgccgatggccaggaaaccgacatgtgggaggtgccggccggcggccgacgctatcgtgcgctcgaattgttggtgaagcagaagcgccttgcaaagactgcgccgataccctgcgtcgtcggcgaagccggcggcgggatttccgcggaagaggactcgcttgccgagaacgtgcatcgcgtcgcgcttcatcctctcgaccagtttcgtgcattccagaccctgcgcgagcaatgcaaatccgaggaggagatcgcggccatctttttcgtctcagtcggcgtcgtgaagcagcggcttcggcttgcggcagtttccccaaaactgctcgacgtgtacgccgacgacggcatgtcgctcgagcagttgatggcgttctccgtcacggacgatcacgctcggcaggagcaggtctgggagaacgtcaaccgctcgggctatgacgagccgtatcagatcaggcgcgttctgaccgagcgggcggtgcaggcatccgacaagcgcgcccgtttcgtcggcctcaccgcctacgaggcggccggcggcaatgtgctgcgcgatctgttcgaagaggacggcggcggttggctcgaggacatcgcgctgctcgagcgtctcgtcgccgagaagctccgctctgaggccgagacgatcgcggccgaaaattggaagtggatcgaggtcgccccgagcttcccctacggtcacgatcacgggctgcgccggctcgaaggcgaaccggccgatctcaccatcgacgaacaggtaagcctcgatgcgctccaggccgagtatacagcgctacaggagaaatacgaggatgccgacgaaataccggatgaggcggacacgcggctcggcgaactcgaggaggccatcgcggccttcgaggaccggccgcatattttcgacgcggccgccatgccgcatgccggcgccttcgtcagcattgatacggatgggacggtgcaggtcgtgcgcggctatgtccgccgcgaggacgaactggcgttcgttgcggcactagttcggcccgatcctgaagccggctcggcaacgcctggctccgacgatggcgatcaacccgtgcccccggttcagggcagcgtgattagcatggccgggcaggtatcgccggatgaggaagaggatgatgccatccggcccttgcccgatcggcttgtcatcgaactcaccgcgcaccgaacgttggccctgcaggacgcggtcgcggcccaaccgcatgtcgcgatgaccgcgctcttgcaaaagctctgcctcgatgccttctatcggacttacggtccgggctgtatcgaggccggcgtgcgtcatgtgcagctttcgatccaggcgcccgaattgaaggatagcgcgtcggccaagtcgatcgccgctcggtacgagggctggagagccgacatgccggccgacgaggctgccctgtgggattggttggtcgcgctcgacgattcgagccggttagcgttgctcgcccattgtgtttccttcggcgtgaacgcccttttcgagaaggccgatcgccatggcgggcccggcattaccacccatggactgcagcgccggcttgatcaagctgatcgtctcgcccgtgcggttggtctggacatggcggagtccgggtggcgtccgacggtcgacaattatctcggccgcgtaaccaagggccgcatcctcgatgccgtccgtgaggcaaggggtgaatcttcggcccaactcatcgaccatctcaagaagtcggagatggctaaggaagccgagcgcctgctcgaaggcaccggctggctccccgagccgctgcgcatcgccgccgtggcttcgccttcggagaatcccgactctgccgcagagccgcttcccgaatttctctccggcgatgaggaatcaaccgagggcgtcgagagtgagcagccgcaggccgtcgccgccgaatagctcatcgctgcggggcggcgtgccgccgccccgcagttctccgccggatgctcgactatcacgggcaagcccggactatcgtgctgacctggcggctctgacacgcccttcatctgacgttctctctcatccatcccatgtcggctcgcctcctgtcgaaggagcttgcgccgctgcatcaaaggagacccaagatggccgactactattccccggccgtgatccagcagacgatacccgaggcggacatgaccccgctcgaacgtctgctgctatcctacgtgttcgacgccgaacgcgacggagacgggtggtatttcttctccgacctgggcccggcagacatgaccgtgatcgagcgcgcggcgctggaagccgcgcaagctgcgtccgagctcgatgtcgacaatacggccaatgcgttcgtcagaaagcatctcgcgggtatagagaatgacgaactccaggatactcacttggacatagatcttagcgagacttcctggcagctcatccttcaggatatcgtgcgacgttcgtcgaccctcaaatacgtgtcggcggtatcgtccttcacctgctcacggatgcgtgccgacggcttcggtggtgctgtcgtcgtgatctcggccgacaccattctcggcaagtccacgaacgatcttctcgaggaattcatcgaccaggtctcaccttgcaccgatggctgatccttgccttggtgcgcaaagcattgtccgccgcaggcctcccgactatcgccatgcctaaggttgccgcgcgcagcgcgattcactgcccgcgtgatgctttttgagaacccagcatctgtccatcccctgagcacgttgcggcgtttcccgtctgggcgcggcgcatctgatgtcaacgggcgagccgttcccgctgcggccgagcggccttgcgtgacatccgatgctggaccgcgcccggtcgccagttcgccgcaacgcgaatctcaggaggcgataggcaatgtgcagggttctcaacaagcatcacgcaggcattccggcaggcgccgtctacatcgggcgcggcagcaaatggggcaatccgttccggatcggcggcgacggcgaccgcgcggccgtcatcgccaagtacgagcgatggctggcgaaccagcaccatctgctgcgcgcgcttgatgaactgcgcggacgcgatctcgtgtgcttctgcgcaccgcgcgcctgccatggtgatctcttgctgcgtctcgccaacgccacgcgcgaggtgcgcgtcacgtggtggcgcgccatggaggccgcggcatgagagcgagagcagggccgggccctaggcgagcccggcgcgcgggagagcgagccgccgggatggttcgcccgctctcggagtctccaacatgtcgaaaacgtacagggagttcgattttcgaaagtctgtcgcccatcacgccgaggccaagcgcctcttccacagtcgtgcgagatcccagctccgccgtattgcggccgcgctggggcttgagcctggttcctacgacctccgttccaaccaggctggcgttgccgtttccggcgaaattaccctccacggcgatcacctctacgtgcaggtctcccaatcggcgatgggccaccacagcggcgttttgtttcggacctgcaagggccggaaagactatgtcggtggcccgaacaatttcgcatcgctcgatttgctcaacaggcccgacgaactcgcgcattggatccgcggggtgtgccatatttgatgtcatccgccgccgcacagccgctgtcacgtcgtggacaggccgtcaccgttatcgctgcggcgcgcgagtcagccgatggacacgagcctggcgttatgccgtcggacggctttcggcagaccaggcgcagcgattgatgctcgactgccggtatgcagcgggctggcatccgctgctcgttctgaccgtgggggatacgctcgagcaagcccgcgaagagatcgccgatcatcccgatctgctccgtctcgtcgcggacggctgcgcccgcgtcggcgacaaatgggagccctactacggcgaactgttggaagcgcgatgctgggcaatcaacctcgccaagaattatgccatcgacgagggcatcacattcgttctgctcaatgatgagcacgattccaacatgtgatcgctggttcggatagttcgctcaaagggtccggcgctggtcgccggaccctttctttctggctgagatccagagggagaggtgggccgggaagggtttgagccgcggcggtgtcaggagagtgccgggcggttcggcttttcccgctctccgaaagacatcttgccatgaccgaatctctcgtcagcggcgccagcgccgcgccgctctcgatgcgtgccaccgcagccgtcgcgtccgcgatcgtcagcgccgcacgccagcttttgaccgaactcgaacagggacgtcgcatcgatgccgccgtcctgcgcaatgccatgcaggcagcgttcggcggctccgatgcgaccggggtgtgggactggaaggccgcctatgatgcctgcgaagcggcgaccgtcctgttcctgcgacggcatggcgctgccatgcgcgccaggtcggcgtcgccggcggccatgctgtcaatgctgatgcggatcgcaagtctccttccgacccaaacgcgccggtccgaggaaagccaattcctccagcagttctcgacgccgatcggattggcgtatgtctcgagcgtcgccgccgcgatgacgccagccgatgtcgtgctggagccgtcagccggcaccggccatctcgccgtcttcgcagagttcgacggcgcctcgctcgttctcaatgagatcgccgagagccgtgccggcattctcgggcagatctttcctgccgtgtccaccacgcactttgacgccgcccatatcgacgactacctcgatgcacgcatcgtgccgagcgttgtcctgatgaacccgccattctcggccacggttcatgtcgatcgcgcgatggcggacgcggcattgaggcacgtcggctcggcgttagcccgtcttcgagaaggcggacgcctggtcgcgatcacaggcgcgaacgtcgcacccgacaatcccgtgtggactgattccttcaagcggcttcaagaacagagccgcgtcgtgttctcggcggcgattgacggcgcggtgtatgccaagcacggcaccaccgttgacacccgcctgaccgtcatcgatcgcgtgccggcggacgacgccgcgtcattgccggcatccgctggcatcgcgcgagacctgccgactttgctcgactgggtgatccggggcgtgccggcacgtcgcgcaattaccggcacgccgactgcggcggtgccagcgattgccagccccgcaacgccccggaccgtccgcgcctacgtcgcgcggcgccagcccgcaacggcggcgccagcatccgatctcgtggcggcggaagtcgcctatgaggccgtcgactggacgcccaccgatgccagcaagatcaccgacgcgctttatgaatcctacgcattgcagtcagtccgcattccgggcgcgcaggcccatcccacaaggctcgtgcagtcggctgcaatggcctcggtcgcgccgccaaagccttcttatcggccgcatttgccagccagggtcctagcggatggcattctgtcggacgcgcagctcgaaagcgtcatctatactggcgaagcgcattcggaatttctcgctggttcctggacggtcgatgcgacctttgacgtcgtcgcggccgcgcgcgaggacgcggataatgccgttcgctttcgtcgaggctggtttctgggcgatggcaccggggcgggcaagggacggcaggtcgccgggattctgctggacaactggctcaagggccgtcgtcgtgctgtctggatcagcaaatccgacaagctgatcgaggatgcgcagcgcgattggtccgcgttcggggcggagcggttgctcgtgacgccgctttcccgtttccggcagggcacgccaatccggcttggggaaggcgtcctatttaccacctacgctacgctacggaccgacgaccgcggcgaaaagctttcgcgagtcgggcagatcgtcgaatggttgggctctgatttcgacggagtgatcgtcttcgacgagagccacgccatgcagaacgcggttggcggcaaaggcgagcggggtgaccaagcggcctctcagcagggccgcgcgggcctgcggctccagcatgctttgccgaatgcccgtgtcgtctacgtctccgcgaccggcgccaccacggtgcacaatcttgcctatgcccagcggctgggactgtggggcggcgaagactttccattttcgaccagggccgagtttgtcgaggcgatcgaggagggcggtgtcgcggccatggaggtgctggcgcgcgacctcaaggcgctcggcctctatgctgcgcgttcgctatcttacgagggcgtcgaatacgagctggttgagcaccagcttacggctgaacaggttcgcatctacgatgcatacgccggcgcatttggcattatccataacaatctcgatgcggccatgcgcgccgccaacatcaccggcgagaccggtacgctgaacgcgcaggcgaagtccgcggcgcgatccgccttcgaaagcgccaagcagcgcttcttcggccatctcttgacctcgatgaagacaccctcgttgatctgctcgatcgaacgcgatcttgatgctggccatgcggccgtcatccagatcgtctcgaccggcgaggcactgatggagcgccggctcgcggagattccgaccgaggagtggggcgatgtgcaggtcgacatcaccccgcgggagtatgtcctcgattatctcgcccattccttcccggtccagctctacgagcccttcaccgactcagagggcgatctttcctcccggcccgtctatcgcgacggtcagccggtcgagagcagggatgcggtcaagcgccgcgaccgcctgatcgaaaagctcgcatcgctcccgcccgtggcgggtgcgctcgaccagattgtccagcggttcggcacagacatggtcgccgaggtcacgggacgttctcgccgtgttgttcgtaagcggaatcagttgatggtcgaaaaccgcgcggcctcggccaatctcgccgagaccgcggccttcatggacgacgccaaacgcatccttgttttcagcgacgccggcggcacgggacgttcgtaccacgccgaactgtcggctcggaatcgcagattgcgtgttcactacctcctcgaacccggctggaaggcggatgccgccatccagggcctgggtcgcacgaaccgcaccaaccaggcgcagccgccgctgttccggcccattgcgacgaacgtcaaggcggaaaagcgctttctctctaccattgcccgccggctcgacacgttgggcgccatcacccgaggtcagcgccagaccggagggcagggcatgttccgccctgaggacaacctcgaaagccattacggccgtgacgcgctgcgccaactgtacctgcttctcgttcgcggcaaggtagaaggttgctcgctcggggcattcgaggacgcgaccggtttgaaactgatggatgccaacggcatcaaggatgaacttccgccgattacgacattcttgaacaggctgctggcgttgaccatcgacctgcaaaacgtgttgttcgccgcgttcgagcaactgctctccgctcgcatcgaaggcgccatcacgtccggcacttacgatgccggcctggagacgctgctcgccgagagcttcgtcgttactgaccggcgtgccatctacacccatccggggaccggcgcggaaacacggctcctgaccatcatcgaacggcggcgcaatcgtcccgtgacgctcgaggaggcgttcgatcggctcaccgattcttccgccatcccgttgatcaacgaccgctcgggccgcgccgctcttcaagtcccggcgccgagcttcatgctcgatgacggcgagattgaacggcgcgtgcggctaatccggccgatggaacataacagcctttcgtcgaagatgatggcggaaagccattgggcggaagttgaccgcgaacgtttcagcgcggcctggcaggccgagctccatgacgtgcccgaattctcggaaagcaccatccatgtcgttgccggcttgctgttgccgatctggaagcgcctgccggacgagtcgacgcgcgtctaccggcttcagaccgatgctggcgagcgcgtcatcggccgcaaggtctcgccggcctgggtggcgacggtgctggctggcgacgcaccggcgctgacgccggacgccgccttcgccgcgctgctcgaaggtcgcacggtactcagcctggccgagggcctccagcttcgccgagtccgtgtcatgggtagacaccgcatcgagctgtctggattcaacgacacgatgcgcgatcgcctcaggacgtatggcctcttcagcgagatcatctcctggaagctgcgcatgttcgtgcccactgacgagggcggcgtcgaagtcctggcgaaggtgcttgagcactacccaatcgagcgcatcgctgaacgggaggccgcgtgatgcgccgcgacgcctccgaactggcgcatcgcctcgcgcgcgaggccggggcggtgtgccgccactacctttccaatggaaagcgcaagggacggtattggctggttggtgatgtccataatacgctgggccgctcgatgttcgtacggctccagaactcgccgaaggggctggcgggcaagtggaccgatgccgccaccggcgagcatggcgatctcctcgacgtcattcgacatagccttggactctgtgacttccgcgaagttgccgaggaggcgaggcggtttctcaagctgccccgcactgaatcggagccggtaccacaacgaccaccagcgcgttccgtcgtcgcggcgggatcgcaagaagccgcgagacggttgtttgcaatctcaggtccgatcgaaggcaccatggtagagacctatctgcgtggccgcggaatatctcgtgtgcaccatggtggcagcctccgcttccatccgcgttgctactaccggcctgacgatcacctgccgaccgagacatggccagcgatgattgcctgcgtcaccgacctcgacggccagatcaccggcgtgcatcgcacctggctcgatccagacggctttgatcgcattcggctcggcaaggcgccgatcgacacaccgcgacgggccatgggcgatctgctcggcaatgcggtacgtttcggcgcagcagacgacgacgtgatcgttgcgggagaaggcatcgagacgatgttgtcgctacgttgtgcgctgccaacattgccaatggccgcggcgctgtcggccaaccacctcgcggcgatgctgctgtcttcgagcttacgtcggctctatatcgcgcgggacgccgatgccgctggagatatggtgcaagctgttctgttgcaacgcgcgcaaaccgccggcatcgaagcgatcccgctatcgcctcggttgggcgacttcaacgaggatctgcacatcttcggcctcgacaccctccgggcagcattgcggattcagttggcaccggaggacgtctcccgctttctgctcctcccggcccctgtggcttagctggcgttcagctcccatcacgtcgacaactcggtcgcgcggtggcccaaatgccggagaggcgcgaccacggccttctagagggcgatcggacggcaggcggctcggtccggcaatggctgcggggcggctattttccgccggccctctcgggcctttgcatcgcgaagcaaaatagccgccccacagccatccttcgctggcgctgcggccctccgcgctgctccgggtgccagcccgtcccgcccgccgtctcagtgatcgccacgaaggccgcgatggacgcggccgatccggcaaaaggacctcatcccatgaccgatcgcgacgacatcgacttacagcatacggcatctccgaccgacctcgtcctcaacgaattgcagctctttggctaccgtccattcgatgaccagcccgatccgagacctctacccgaaggcaagatgatcgcgggcgccgttgccgacatcttcgacgcattggtcgccaccctgaacgatacaaggctcgaacctgacctgccggacctgctctggtcgaccgtcaatctctttcaccgggccacggaccgcatagaacgcgaactggacaacaacgagcagggccaacgcaaaagccagcgcgagcagaacggctcggaagtacgatcagtcgagctcgaacgcctgacggccgaaggcatcaccttgatcgagcgccgcaactgcctcgaactcttccgagagcaggccatcgagctcttcgaggtccacaccggctcagcctggcgcccccgatcggggtcattggtcaaccatcggacacttaccgcggcaatgatcgactcccgcgactttctcgcagccaaacgccgcaccgagactgaggtcatgttgccggcagggccgaaggtcgcactcaccggaggcctcgacttcaacgatcaccagctgatctgggatcgcctcgacaaggttcacgccaagcatcccgacatggtcctgatccacggcggctcaccgaaaggcgcggagctcatcgccagcaaatgggcgactaatcgcaaggtaccgcaaattgcgttcaagccggactggaccaagcacgcgaaggcggcgcccttcaagcgtaacgacgccatgctcgaactactgccgataggcgtcatgcatttcccgggcaccggaatccaggacaaccttgccgacaaggcaaaacgcttcggcattgcggtctggaaatttggcggcgcatagccgccttcactcacgccaccatcaaggcggggttgcatcgccgcaactccgcctcgtttctcctcctctatgtccaaggttgcgccgcggtggtggtggaaggcgcgaccgttccccctatgcaacatggagccaccaccatgatagctctcggactcctcctcaacgctgctggtctcggcgtgatctgctggctgatgttcacgctggcagtttacatcctgccatttttcgtggcgctcaatgctggcttttgggcctaccatagtggcgccggagtactcggcactccaattgttgccatcgctgttggcggcctgacgctggcgatcgcgcaaatcgcgttcgccatgacgcagtctctgaccttgcgagccatcattgcggccgtgttcgctttaccggcgacacttgctggctatcatctcgcccttgcgatggcacacttcggagtgccctctccagtttggcagcaggtcttcgcttgcctcggcgcggtctttatcggcggcacagcatggacgcgattgaccatcttgaccgagccccagccgccagattcgggcacggcggtcgcgagcgatcctcaagcagttctcgccgcggtgcatcggaagtgatcctgcgcccctcttcaattgattggttgtagatccggacgtccgaagtcggagcagcgaacttaagtggaaaggtagttcgcgaccttcttcggagcgcttcgatcaggcagcgctgattgcgtccggtacacatcgacgcggcttgcaccggtcgttggcggttggctttgtgctgacgactaccgcctttcgccctctttcgcttcttttcctatgccgaatcgtaccgacttcttgtctggtcgaaccaagccccgccatcttctcccgggtttgtggttcagcacgcgacgcaccgggcctctgtgatggctcgatctggccgaagaccggctgcgcctcgatcgcctgagccgcaacgccgtcgcatcgactttcttcccctgggctttgcccattcctcgcgaggcaagaaagtcgctgcgacggcatcctccgctgcgctgcggcccttcgggtgcgtcgccgatcgtcctcggcctgcagatcgccatcgaggccgcggtggtcgcgggc

SEQ ID NO: 309 - DNA, 29758 bp, Bradyrhizobium colbertium
  misc_feature (4377)..(4386): n is a, c, g, or t
  misc_feature (10323)..(10332): n is a, c, g, or t
  misc_feature (12109)..(12118): n is a, c, g, or t
  misc_feature (28037)..(28046): n is a, c, g, or t
agcgcgaagggacggcgcgcaaattcctcgagctttttattggaggccatgtcggcaaagcgtggatcgtcgggcggcacgacctggtgcatcatgtcgtcgacgacgacgtggcgctcgccgctcggggtgatgcgcagaaggcgtgtcgggcaggtgccggacgagcaatcgtcgttccagatctgcgagatcagccattcggcttcgggcgtgcgcagctgatactcatggatcgtcacggtgcccttcggattgggcgcgagcgcgtcaccggtccagaccttgtcggggtcgctcgtgacgttgcgataactcgtcttgtacgaaaaggcggagtccgctgccaaacagggcgacgcaatcaacccgagcatcggggctgcgagaattgtcagggctgccagtcgcatagtcatctccttggcgttggcgcgtgttatttgccggaacaccggtcaatctgcatggtgcggtccatcattaccggggaatcgggacatcgaacgaacagccgtcgacggcaacgtggttgacgatcagtccggtcttgagcgcccggcgcgcgacgtcataggatgcatagctgcctgaggcagtcgcgtcggtcggcgacggcttgtcgagttcgaggaagcaagccttgccgccatccatcgtgcgcacctgcaggccttcatagatggcgatccgcatcgggcagagtttcacggtggcgccgacggcagggaaggccgtcttcgcctcgcattggcttgcggtatcgaggacgctgaagacgaccgagcgacggctgctccagatcacgaagtgcgcttcgttggcgggggcgttcgcgccggcgaaccgacgatcgccccgttgctcataatgacggttgttctcgtcgatcgcatccttccaaatgtcgatataagtcgccgtcgcgggcgagggcacctgaaggttcgcatacgacatggagcgccacgcaccgggatcggcggtgacggtttgggcctgtgcgtgcgatgcctccatgaacgcaaaacttccgctgatcgttgctgagaaaagaatacaacatctaatatattgtatcaatgacgagatgggccgcgccataaacgggcccgcctattcgtagcgtggcctgcccggcagccaccaccagaaatcctttggggagctctcgcggttgcgccaggcgacgctcgtcctcgggggatagaccggctgcatcgaccagatgtgattgtcatagtagaaatttgccgttccccgccgcaggcggcggccgccgcgatcgaggaaatcggttgcgcaatggacgacaggaccgtgatatcgagcgatcctcgcggtttgcgcatcgagcgcgcccggcttgcagccgaatagccagaccgacgcgggataggccgggcccggctgtgcggccgcgatgagccggagataggccgcgttcgcctcgggctgggtcggataggcaaatcgctcggtcaggatcggggcgaaggtcgaccgatccggcgcgtattcgagccgtccgggaacgacccgctcggggacgtacagtgcatcgggaccggcggggatgatgggcggttcttcgcgtgccgcgcatccggcgagcgttgcgatcaggggcaggagtgcgaacagcctttttcgtgtcatggcgtcgcctcggcttgtactgcgacattcgtggctgccttgcgggcagctcgccagtcccagggcatctggaaggcactcgaccagagaccgcgataggccttgcgagcctgctgttcggccgcggcgtagtccccgatgacgggctcgccgtccgtggcgggagcgaggacggcgacaccctcgcgcaacatgtcggccgaaagatcgcgatgggctgcggtagcacagcgtgcgacacgctcgccgggttcatcccggatcacggcgcaggcaagccaggtgttcaaggttgccgtcacaagccacgctcggaccatcgtgccgcaaggccatggctgccggccgagtgtggcgatctggtctgacgcgcatgcgtcgattccgtagagacggaagatcgtcttcgtctcgatgtcgcggaagcggatgccgtcgatcacctcgacgcgcaacggcggcagttgcgcggcgagcttcggttggtaaagactggccggatcgccgccgttttgggcgtggcagggcagcgccgtgcaggcggcgagggcagctgccgccaggacccgggcctcacgcagcggcatcgtcgcgcgatccgaggtcgagcttgtggaacgcattcgcgatgatgtccgtcgtatagacggtctcgccgtccttgcccttgtaggatccgtccgcaacccggcattcggcatagacggcgtcgcccttggcgacgttggcgagcacccattccgccgccttctcgttgaggatggtgaccgtcacccaatcggtctcctcgcgtcgctcgccttttccatcggtccacgcccgatcggtggcgacgctgactttcgccgctttgttgaacgctttcggcgcctggccgacgcggccgcgcaggatgaacagattggtcgttcgcaaggcttgatctccctgttgtgcgttgatcggagtctattggggcggcggcgtcgcggccgccgagggcgatgcctggcggatggcgcgaaggatgatggtgtttgggtcgggaagatcggggaaagcccacaggccggtacggctcttctgcgcgacatgctgcgcctcgagatagggggcatggacgggagatccgtcgggcttcagcgcagcgaaggcgaagcccgtcgcgatcagcgcggtgccgagatcgatccgcgagcccttgcccgcaccttcggtccgcacggcgacgcaaaagacgaacgcggtcctcgtctgcggcaactcggcggcctcatagcattggggtctcagatctcggatcagcgcgacaagcatggcgagcgaggcctcgccgcaatcgcgcttgatcccgtgcgcgttggtgaaggacgtgccgcgcaggcaggattggacaccgtagagccggtaggtggtgccggcgttcgaccagctgtcgccggtgtcgaaggcggcgtcgggcgggaccggaaaccatccggacgacgtgacttgcgccaagaccggggttgccgcaagggcggagagaagcgcaaaggttatcagtcgcgccctcgccatctcagtagccctgcagtgagaaatagaaacgctgggcgccgtttgccgtcgagatgtcgacataataggggtcgcttcgaagcgcgcgcgagcttgtcggatactcggtcgtgcagccgtcatggccgccaaagcaggtctgccgtggcttcgtgaagtcgacgcacagattgccgttcgccgccggcgtcaatccgccatttccgtccgaaccgccctgcgctgctgtcatcccggcgggacatggctgatacggctcgtatccgagaccgcttgcgttgccctccgggcatgtcggccagctgcccccatgggcgaggcgacggaagaggtcctgcatcaccggcacgcagtagggaataccggaccagctcggcgcgctggcggctgcgcataacagcaccttgcagccgaatgaggcgtcctgggcgtgcgccgcgcgcatcggcacgagacccagcaatgccattccgatcatcaaggtaggtgctgcgcgcttcatcctttgctcccgaagaggacatgtcgcgggtcgatgttttgacctgttgccaacgtatcaacattcaatatattgtctatgagaaaaatggagacgggcgggcgtggggattcgctgtgtagcgatcggactatgcgtcatggtgacgtgctccggggttgaggcgcaggatgtcgccggaccccgaaagctagccgtcgtcgacgattccggccgcgtcctcccgcttggggcgagcgatgccgcgcctcagcgggtcggacgaagtgaacggacgacgccatgccctgacgccaggcctctgagcactgacgacgcccgcgccctcatcacccgtatcgcgaccgaagagaatttcttccccgacttcgtgatgtcggtcgccaaaagcgagagccagttcaattcgacggcgctttcggacaagggcgcctatggcctgatgcagctcgagcccgaaaccgcgcagcggttcaaggtcgatatctgcgatcccaccggcaatgtgcttggcggggtgcgctttctcaggacgctgcacgagaagtatcgcaatcccctcttcatcctcgcagcctacaacgccggcgaggacgcggtcgaaaagaaccgtggcgtcccgccattccccgagacggtccgtttcgtcgcgcaggttctcaacgacttctacaccnnnnnnnnnngcccgctgcaccagccccgaccgccaaggcggcaggctgggacaacggattcgtcatgcatatcgactgaacggaggaacggatgaagacatcgtttgcacgcgttacactggcaggatcgctgctcctggtgacggcagccgacgcgttcgcgcaatcgacgggcggcacactccagccggtccagtccacgcttcagcagctcgtctcgaccttgacgggaccgatcgccaccgctctggcgaccctcgccgtgatcgcctgcggcctgtttgcctggagcggacggctcacctggggcatcgccggcagcgtgatcttcggcatcgtgctggtgttcggctcggcgcaaatcgtgcagttctttcagtcggcggtcggccaatgaccgaagacgagctcgaggatccgctgatcacaccccttgtcaaggcgctcacacgcgcaccgacgctgatgggtgtcccctacatgtatttcatgttcaacggggtcgtctccagcatctgctttcttgtctcccacaatctcttcatgctgctggtcgcgatcccgctgcatctgttcggctatgtcatgacgcttcgggatgatcgcatctttgaaatcctgttcgtcaaatcgaccaaatgcccaccccgctcgcggtccttctgggccgccgacagctattcggtgtgaggtgcgacgatggtggcgcgagcacttctcgatgagctgacctacggagcggtctcgcgacgcgagcgacccgtggcgtcgcacgtgccctatacgaggcatgtcgacgaccacatcatccggacccgggacggtctcgtcctgacgatcttcaagctcgacggttattcgttcgaaacctccgacatcagtgaagtgaatgcgcgcctgctcggccgcaacgacatcgtccgcacgcttgccaattctcgctttgcgctggtttcccacatcgtgcgccgggaggtgcagccgcgcatcgattccaccttcgacaacgcgttctgcgccgagctcgatgagcgctacaacgccgcgctctcgaagcgccggatgttcgtcaacgatctctacctgacgatcgtgcgcaggccgctgcagggacaggcgggcaccttcgacatgatgctgacgaagctgctcggccgcaaggacgaggccggcgaatcggtcgcgcgccagacggccctcaacgagctgcgcgacgtcgcgaccgccgtgcgcgagagccttgctgcctatggcgtgcgccagcttggcgtcgtcaaccgcgacggcgtgtggttctccgagccgctcgaattcctcgtccagctcctcaatggcgggctctcgcgtcccatgcatctgccgcggatggatcttgccgatgcgctcgccatgaagcgcgtcttcttcggccgcaacgcgatcgagatcaaaggggcgggcccggcggacacgcgcttcggcgcgatggtgtcgatccgcgaatatcccgcccagaccgggccgggctccttcgacaacctccttcgggtcccgcacgagttcatcgcgacgcagagcttcgcgatcgtcgatcgtccggaagcggcaaagcagatcgaccgggtgtcgcgccaggtcgacatgtcggacgaagcaggatcggtcattgccgagcatcttgacgacgcacgcgatgagctactgggatcggaggcgatctacggcgagcaccatatgacggtcatgtgtctcggccgcgatcttgccgaagtgggcgcggccgttaccgccgtcggcgcggcgctcacggatcggtcggtgatctgggtgcgggaggatctcaactgcgagcccgccttctggtcgcagcttcccggcaactttgcctacatcgcacgcaaaggggtgatttcgtcgaaaaatttcgccggcttcacgtccctgcacaattacccgagcggccgtccgagcgacaatcattggggaccggcaatttcggtgttcgagacgacgtcgcagaccgcctactattacaatcatcacgtccgcgacatcggcaatttcacagtggtcggtccaaccggatcgggcaagacagtgtttctgtcgttcatcgcggcgcagacccagcgcatcgtgccgcgtccgaagctcgtcttcgtcgacaaggatcgcggcgccgaaatcttcatccgtgcgctcggcggccaatacgagacgctggtgccgggcgaaccgaccggcttcaatccgctgtcgcttcccgacaccgcggcgaaccgtgaattcctctaccagctcttcgccttcatgctgcggcccgccaatggcggcgacttgacggcctccgaggagcaggtgatccgcaatgcgatcgcggccgcgctctcggccggacccgaggggcggacgctcaaggcattttcgacgctgctgcgtggtcgcatccgggcgggggaaggcgatctgctcgcacgcctcgaaagctggatgcgccccgaccagcggggctggctcttcaacaacgaagaggaccagttctcgatctcgagcgtgttcggcttcgacatgacccgcgtcctcgacgatccggtcatccgcaccgctgcgctgatgtacatcttccatcgcacggaggaattgctcaccggcgacccggtgatgatcttcctggacgagggctggcgcctgctcgatgacgacgtcttcgccttcttcatccgcgacaagctgaaaaccatccgcaagcagaacggcattatcggcttcggcacccagtcggccgccgatatcgttcgctcgaaggcctcgaacacgctgatcgagcagaccagcacgaacatcttcttcccgaacccgaaggcggacgacgaaagctacaagcaggccttccggctgtcgggacgcgaggtgaactggatccgctcgactgcggccgagagccgctccttcctgatcaagcacggacgcgacagcgtcgtcgcgcggctgaacctcgcgggcatgcccgatctcatcaaggtcctttccggccgcaccgagaccgtcgccgaactggatgcgatcagggcgaaggtcggagacgatcctgcggcctggttgccgatctttctgggaaggagcgagccatgaagctatcggccattctcgccgtcctgctcgtcgtcggcgccacgccggcttttgcgaatataccggtcaacgatgcggcccaactgacgcagaagtccgacacggcgagcacgaccatcaagctcgtgccggtgacgacgcagcgcaaggaggccaacagcggcgtcaaatgcgcggtcacgacgggcaagaaagcgagcatcaccaatccggcggtgcagcctcaagcgggcgccggcgcccagtccatccagtcgtatggtcccgatctgccgctgagcaaggacgcgaccgcgcagggcgccgcgctcaacagtcaaaccctgttccagtccagcggcgacgtggtcggcggcctcgacgccagccgatcgacgatcaccgcggcgaaatcggggttccagaccgccaccggccaggtcggtaccgcacagacggtgatggccgcgctcgacatgaacagcgccgcgcggctgcagaacaatctcgtctggaacaatgtgatcggctcggcgaacctctgggtcacggcgatcaacgctctcaacctggcgcagaccagcgatatgagccgtgccgccatgggaatgcgcgcgacggcgagcccgccgacgacgacgcaggggccggcctgcccggccgggacgatcggggcgggcacgccgagcgatccctgccgttctccatcgacatgccagaccacgccacccggcgccacgcctgatcccgcctgcgtatccgcccgctatgtcgataccaacaacaacgtcctgttctttctcgcgcaaatccagaatgcggcaaatgccgcggccacattgaccggtcgctagggaggttccgatgcgcacactattcgctactgcagttcttttcacggccctcggactgacgcccggcatggcgcaggtcccggtgattgacaacgccaatctcgcgaaggcgcaacagatcgcgaccgacaccaagtcgatcctgacggccgatcagcagatcatgcaatttacccagaagacgctgcaggcggtgaccggcgatcgcacgtcgcaggcgcaggggtcgctggcgcagatggcgctcggcagcggtttcagcatggcccaggcgccatcgctggggtcggtgatctcgggcggagcgctgtcctttgccggcatgggcgccggctcccagaacatcgtctcgacgctgatcaacggcctgcagctcgtacagacgatcaccgggctggcaaatggccagacccatgcggtcgacacggcttacaagaactcggtgaacgtcgccgcgacgctctccggcctgatcaactcgacacagagcgccgtccagacgcgatcgcaggccttcacccagggtgggcaacagatcggcagcgcccaggacctcaagggcagcgtcgaccagaacacgcaggtccagatccagacgggccagaccgtcaacgagctgaacggtgtcgtgaacaatgcggcggctgccgccaaccaggcaaaccttgaccggatcgccgcggagtcctccgccgcccgcgccatgaagtttacccagtgatgtaggggcaggggctttgtcaccacgcgttatcgcagttgccatcgtcgtcgctctcgtcctcggctttgccgccggacgcgcctacttctcatccggccacccgagcgccgccaacaatccgagcaccgcaacacaggatgacgcagccgccgctgcctcccgggcgatgaccttcacccagccgaaggcacccgccaaatgacgatcactttgcgctgctgcattctatgtctcctggccgtcgcactcgcgggctgcgcttataagcctctcaaagcgccgtgttctcccgacgaaggcggaacgccgctcgcctataccgacactccatcgcaccaggtcccggcggcgttcacggcgctcgacagctgcggcccgatgcggccgatctgagggaagcgatgggaaacaccttcaacatcacctcgctcctgcagtcggtcgaccagattggacagaactatgttcaaagtgcctaccaggcgctttcgaatgctgcgacctccggcggagcgacgagcgccgccggtcttcttctgacgctctatgtgatcttctggggcatcggaatctggcaggggaccgcaaccggcggtcctgccgatcatgcgtttcgactgtttcgcgccttcgtgatctatgcgctcgcgaccagctggagcgacttccagacgctcgcctacaacgcgttgaacagcgggccatcggcgatcggcaatgcgctgctcagcgtggtcaccacgccgaacaacaccggaacggcggcaaacctgacgtcggtcaacggtgtgcagtcggcgttgcagaacatgtgggacacgacgaactcggcgaccgaagcctttctccagaacgccggcatcacgaactggggtccgtacatcttcgcggcggtcttctacgtcgtcatggcgatcctgataggcttcgcaatcttcctgatcgtgctgtcgaagctgttcatgtggctgctgctggcgctcgccccggttttcatcatcctgctgctgttcggcgccacctcgcgcttcttctcgggctggctgagctcgatcgcgcagtatttcgtcgtgcaggtgctcgtctacgcattcctcgccttctatgtctcgctgatccagcagtcgatcgacgcactgaatggcgtcgccaattcgaaatcggcaacctgggcaacgatcggacccgtggtgttgctggcgatcatcggcatcctgctcttgagtcagatcaacaacgtcgcggctgcggtcgccggcggcgtgccgatcttcgcgnnnnnnnnnngtcggattgcgcgcaacgtcgtgggcccagtcggccgagtttcgccgcctcgccgatcagattcgtaattcagcatcgacgccgactccgggcggaggaggacggccatgagcgacgcgaccgcatccgaaccgaagcgcattgatccgcgctattatgccgatggagcgacctgggagcacgacatcgcgcgccgcaatcgcaactcgcgcgcgctcgcctggatcgtcgccgccgtgatgagcgtggtcgccgtcgtcgctctcggcgtccttgcgctgctcgtcccgctgaagacctacgagccctatatggtcgtggtcgacaagacgacgggcttcgtcgaggtcaagcgccctatggccgaaggcgcactgacgcaggacgaagccgtcacgatgttcaacgtcgtgcgttacatcaaggcgcgtgagacctacgatcctcgcgccctcaaggataatttcgacctcgcgcagctgctcgccacgggtgatgccgcgcgcgagctgaccgagatttattcgccagccaatccgaacaacccggtgaagctgcacggcacgaacagcgagatcgcggtcaatatcaagtcggtcaccttcccgaacaaccgcacggccttggtgcggttctcgacggacgaaaaaaccgcgaccaacgtcgtgacgcggaattgggtttcgctcgtgcgcttccgctatagcggcgcgccgatgcgcaacgaatggcgtttcgacaatccgctcggcttccaggtgctggaatatcggcgtgatcaggaatccgcgccgtcgccgggcacggccggagcgcagcaatgatcgcacggatcctcggcaccgctcttgccctatgccttgcaacggcacccgccttcgcagaggccctgccccggccggggcggaccgactcgcgcgtgcgcgacgtcagctacaacaaggacaatgtcacggcgatcgacgcgagctacggcacctcgacgatgatccagctgcagtccgatgagaagatcgagacgttggcactcggcgactccgtcgcctggaaggtcgagccgaaccgcaagggcgatatcatcttcgtcaagccgattgagaagaacgcgcagtccaatctcaatgtcgtgaccgacaagcgcatctatgtgtttctgttgcgatcgaatacgcgtccggcaggcaatcagatctatgcggtgcgctttcgtttccccgaggacgagacgaatgcgaagctccttgcggaggccaaggagcgggccgccaacccgaacctggcgagcctcaacatcgccaacgcgaacagcaattacggctacaagggctcgtccgcgaacaagcccgtcgccgtcttcgacgatggaacgaagacctggttccgcttcgagggcgagacaccggcaatctacattgtcgacgccgatcgcaacgaaagcctcgtgaattttcgtaccgagggcccatacgtcgtggtcgacaaggtctcgccgcagtggacgctgcggaacggacaggaatcgacctgcatcttcaatcgccggctgacgaacgtccatgagccaaacggactggagccctatgcgccgcagcgcgtcggcatggccgcaaacgggggagggtgacgggcgatgccgacgcctgacgattatcgctcattcgaactcgaggcctcggccgcgacctcagtggcccgcggcagcacgacggtcggccgattcctgaaattcggtatcccgctcggcgccgtcctcgtcgccgcgtggatgatctacaannnnnnnnnngacgagcatgacgacgccggacaaggaggaattcacgacaacgcagttccccgcgccgtcgctttccgcgccgcggccgcagaccaatcaggggacgatcgtcatcccgaaagctcctgacgtccctccgccgccaccggtgcccccgccggtcaccatccagccgccggcggcgcccgaacctcctctgacgcttaatcccccgaatgacgacgaagcacgccggctcgccgagctcgaacgtcagcgtaaggaagaagaggagcgccggaaatgggagcgcctgcgcgcgccgcaggtgatctccgacaatgccgcagcgacggccggttcggtcaatcctgacagcaatggatcctcgaacgcaacgcagccggacgatgatccgaaccggcgcttcctcgcttcggtgtcggccgccggcgtcgatacggcgcgagccaccaagaacccgcgcatcgacgcgcttgtcgcgcagggaacgatgatccgcggcgttctcgaaacggcggtgcaaagcgatctgccgggcatggtccgcgccgtggtgacggagaacgtctggtcgttcgacggacgccgaattctcattcccgccgggacgcgcctcgtcggcgaatacaagtcgggtatcacacagggccagacgcgcgtcttcgtcgtctggacccgccttctgcgctccgacggcgtttccgtgcagctcggctcgaacgggaccgacgatctcggtcgcgccggcaatgcgggcttcgtcgacaatcactatgtcgaacgcttcggcgccgcgatcatgctgtcggtcgtcggcggcgcggcacaattcctgagtgcctatggccagaacaataacaacattggcaacggaacgatcataaccacgaccgatccggtaaccggcgcaattacccagacgcagactggggtcaatcagaaccagctgagcctgcaggcgcgccagatcgcggcccagaacgtttcgcagacactgaccaacatcgcgcaggaggcacttcgcaactcgattaacattccgccgacgatctatctcgaccaggggacgcggatcatcgtcttcgttcgccgggacctcgatttctcggccttctatcccgacccggtcaaggaagccttgcaggagatcagacgtgaacgcgccggccagaagcctgacggtcttcattgaccgggcgctggagccggtgcgcccctggctcgaggacgatcaggttgtcgagatctgtgcaaacggaccgggcgaggtctgggtcgagcgcttcggccaagcggcgatggaacgccatgtcgtcgatcagctgaccgaacaggcgatccgccatctcgccgagcgggtcgcgggtcattccggtcagagcgtcaacgaggagcacccgcttctgtcggccgcactgccaaccggcgagcgttttcagggcgtgattccgccagcgacgactggcggcgggggctttgcgatccgcaaacaggtgatcaaggagatgcggctcgatgactatcgcaagctcggctcgttcaaacaggtggaaacggcgggcgagggcgcgctctcggacatcgatcgccagttgtgtgagcatctcgacgcgggccgcatcgaggagttcatcaggctggcagtcgtcaaccgctattcgatcctcctgtcgggcggcacgagctcgggcaagacgacgttcctcaacgcgatcctcaaggaagtgcctgaagacgagcgcatcatcaccatcgaggacacgcgtgaggtcaaaccgatccaaaagaactacctgccgcttgtcgcgtcgaagggagatcagggcgaagcgcgcgtaaccgtcgagatgctgctgcaggcctccttgcgcctgcgccccgaccgcatctttctcggtgagatccgtggctcggaggcctattcgttcctgcgtgcgatcaacactggccacccgggaagcatcacgacggtccacgccgacagtcccgccggcgccttcgaacaactggcgctcatggtgatgcaggctggtcttggcctgcggcgcgaggagatcgtcgcctacatcaaatctgtccttccgatcgtcatccagcaaaccaaggtcggcggctggcgcgggacctcggcgatccatttctcgcgcatggccgaatggcggcaggagcgcgaagcggggagcagccatggcacgcatcgtcgtctttagacttggggtcgcgctgatctgcgcggtcgcgttttgcctgttgtggagcctcgcctacgagattgccgtcggctggcgttgggcgccgacccgctttccgagcgaaggcgccacccgctgggctttgctgcgcatgcagaacgcggaccgctcggcgggcttcttcctggtcgcctggcagcatttctatgagcgcatcctctatgcgccgactcggatcgaaacgctgatccgcggcgcatatgcggccggaggtgttgtcgctctcgggatcgcgggcctcatcttcggcatcgtcaatcgccggcagatgccctatggcgcggcgcggtttgggaccctgatggaggccgccaagcagggcctgacaaagaagcagggcatcatcctcggcacgctgaacggcgccaccatccggtcggacgaacccgcgcatatcctcgtcgtcggcccctcacgatccggaaagggcaccggcttcgtgcttcccaacggctacctctggcaaggctcggccgtcttcttcgacccgaagcgcgagaatttcgacgcgctggcgaaccatcgcaaggcgatcggcaacaaggtcttcatgttttcgcccggctctcccgacacgcaccggtacaatcccctcgatttcgtccggcgcgacgagcgcatggccaccgactgcctggtcgtcgcctccttcgtgatccccgagaaggccgatgatacctgggccggcgccggccgcctgctgctctcgtcgctgatcggctatgtcctcgcatccccactcaccaagggcgcggagcacatgcgcacggtcgcgcgcatgacgacgacgggcaaggacatctcgacggtcctgcgtgcgatcgtgaagaccgagcgctcgcatctgccgacctgggtcatcgatagcttcaatcaatatatcgcgctcgagcccgagacgcggaacagcgcggtcttcaacgtcaacatggcgatgagcctgtggaacaatgggctcatatcggcggcgacggaaacatcggacttcgacattcgcgagctccgccgcacccccatgaccatcttcatcggctgcacgatcgccgagctctccatcttccggccgctgatccgtatcctgttccagcagattcacgacctgctgatggagaagatccctggcgccgacgagccgcaccaggtgctgctcatgctcgacgaattctaccatgtcggccgcatggattcgctgatctcgaaaatcaccatctcggccgggtacggttttcggatggcgatcgtgatgcaggatatcgcgcagctcgatgagctctatggacgcagcacgcggattacgacggtctccggttcgcagatcaaactcttcatccagatcaacgatctcgacacatccgaattcgtctcggagatgctcggcgagacgacgcaggtctacaagacgcccgtcatgcggccggggcaggggattttcgcgccgcgcgtctggacaccgcactacacaccgcgaccgttgcgcagcccgctcgagctgcgcgagatgtcagcgcggttgtcgattctcatggtgaagaactccccgtcgttcgaactcaccaagatccgccactatctcgataagccgtaccgggctctctatgaggcggcaaagggttcgccaccgtccctgccgcggctcaaggaatggcaggacgaggagttgtccggagcgatcgctccacgatcggacacagaaacaatcacggccgaagagcctgctccgcccaagtccacggccgcgaagaaggctgtatcgcagcccgcgcggcgcaaagccccggcccggcgcaagaaggagcctgcagcggccggagcgaccgagagtgcgccacgtccagagcaggagccgccgaggccgctggagttgggacctcagcggacaacgttgcgcccgcctgccaggacgatttcgcttggcgcagcgccgacgccgccaaccggcgaaaactgcgatgtgcgcgaaatccttgcagccgcgacggacgggcaggacgatgaattcgattcgatgatgaaggttctacgcgcagagtcgacgcccaaagttcgcgcggccgccgaagctctgcgctccttgaatcaatcgtttggcgacgacgcgccgcgagcgcctgattgagcgacccgaacaagaacttcgatgatcataacgccgaatgatccttcacggcgtcctcaagcgcggccttcatgccgagaaaccgttcatcgacggcgccgggattgtcgcgattgagcgcgatcatctgtgctcgggcttcgccgcctcgaacgacttcgaaggcgttcgcctcgatcccgtcgacgatggcgtccgcaacggccgacgccggctcgcggctaaagcccagctccggtccggcacgattcgactgcatcatgggcgtgtcggttccgccggggtaggcggtgaggacgtggattccttcaccttttagctcgcggcgaagcgcttctccgaaccgggccaaacccgccttcgtcgccgcataggtggcgtagaacggcgcgccgatgagcgcgatgccggaggcgacgttgacgatcatcgcatctccgctctgacgcagagccggaagcgcttcacgcgtcagcagtatcggcgcgacgaggtcgacctcgatcatcgcctgcagctcttcttcaggagtgttttcgaggcgtccagccctgaccccaccggcattgttgatgaggatgtcgagaccgccgagcgctgaaatcgcgtgtttgagtgtggcatcgcggccagcgggggtggaaacgtccgcggcgacgctcgagaccgcggcgccggtgcggccgagctcggcgacggccgtcgcaagcgcagcctcgcgccggccactgacgacgacgctcgcgccctttgcaacgagcgcctgtgcgagcgcgaaaccgattccgctcgagccaccggtgatgaggacacgcttgcccttgatgttcattgtttcacctcttcgatcttgtcctgggtcctcgtgtcgaaatcggcggcgtcgtggcgttcacgaagctgttccgacggtgcacctgccatgcggttgaccattcgaccgcgtttcacagccggccgcgccaggatggcgtccgcccagcgttgcacatgcttgtagtcttgcactgagagaaactcggctgcgccatactgccagccttttgcgagcccgccataccagggaaacaccgcgatatctgcgatcgtgtattcctggccggcgaggtaatcgctgtcagcgaggcgcctgtcgagaacgtcgagttggcgcttcacctccatggcgaagcggtcgatggcgtattcgatcttgctgggagcataggcgtagaagtggccaaaaccgccgccaagatacggcgcgcttcccatttgccagaatagccagttcagcgtttcggtacgcgtgggcagatccttcggcaggaacgcatcgaacttctcggccagataaagcaggatcgaacccgactcgaagacacggatcggggccgcgccactgcggtcgatcagggcagggatcttcgagttcggattgacggcaacgaagccgcttccaaactgatcgccttcgctgatcttgatgagccatgcatcatactctgcgccagagtgaccaagcgcgagcagttcctccagcatgatggtgattttaacgccgttcggcgtgcccagcgaatagagctgcagcggatgtttgccgatcggcagatccttgtcgtgagtggcgcccgagatgggccggttgatgttggcgaacgcgccaccgctgggcttggtccacgtccaaatcttcggcggtgtatagtcagaggagctcgtcatcttgttctccgcaacgtcttcggtccgctcacgctgccggcggatagttcgacgggaagagcgagcgcttggtctcgtcatcattcaccgtcttgaatgtatggttcttaccgactgcgcgtgcccgtgcgactgcagggcgagcgtctactgtttgaaacagccgcttgagattgggatagggaccaagaggatcttccgctcctttgagcacccgagaggcacggtccaaccagccccaggccgagatgtctgcaatcgtgtaatcgtcgccgacgatataggtcctgccttcgaggtggtcgttcagcacctgatagtgccgctcggcctccctgcgatagcgattgacggcgtagtctaatccttcgggggcggcgaattggaaatggacggcctggcctgagaacgggccgaggcccgacgccaaaaagagcgaccacgacaggagttcgggacgatcctccggtttgccgagaaatttcccggtcttttccgcgaggtagatcaggatcgcggtcgagtcgaacacgcgagcctctttgccgccggggccctcggtgtcgatgattgccggcaccttgccgttgggattgatggcgcggaacgacggcgagtgctgttcgcccttgctggtgtcgacggggacagcctcatagggaagaccagcctcctcaagaaacagcgcaaccttcgcggggttgggcgtcgggtggaaatagaagcggatcatgagtctctcctttaggtttggacggatgaatgcacgggcgatggagcaggcctggaggcaagcagcaccccgatgacgatgacggcgatcgatagcccttcggcgagagtgggtgtctcagcgagaactggaatcgcaagcatcgctacgacggcgggcagcagcgcgatgatggcagttgctgccgaaggccccagctgcgagacggcgcgattgaacgagaatatcgcgacaccgctcatcagcacgccttggtagatgatctgcagcagaagctcggaccaggaggcgagggcgaagcggctaagcccgaaaaacagatagaccggtagaaagagagctgctgaccaaatgcagatcagggcggccgcctgcgttgcagtgaggccgcttgcgcgaaatatcagcgtataggcggcccacaagccgccggcgccgacgagtgccgccactcccactggatccggcgcgccgcgattgagcgccgcggcggaaagcaggcatgccaatcccgcaaggatcgcggcataccctatccatcgcatggggccttgcgattgccgcatgaatacgaaggcgaagacacctgcgaaaaccggcatgattgtcggcgcaatcgaagccgcctccgcggccgacgtaagccttagtccaagcgcgacgagcaggacaaaagggacgccccagagcatagcaaagacgaacccctgtctccatgccgcccaagggagccgcgacgatccgcgcatgatcgtcggagcaagaagaagcgctccgatgccgaagcgcaaagccgtgatatcccaaatccggagttcgcgtgtaacgctgaagcgcgtggccacgaaccagccggagaaaataatcaccgaaaggcccgcccaagcataaccggtaacgcgcgtgggtccggccgagtggacggaggcactttcggttggcacgtccctgaccgatacctcacagttcgccatgactcatgccgccttgcgagagcgcaaagcggcgagaatctcctcgggctcgaggcgttgggtgtagtcgacgtcgatatgggcgagtgtgacgcggccgttgccggtcacgacgtaggtcgatggaactggaagctcccaactatcgtcgccgttaatctcgggaagcgccttgttgacggagcgcagtgccgcacggatttcttcgggcagcgaatagacaagaccgaagctgcgggccacccggttttccagatcactgaggacatggaaggtgagggcgttcgtctccgctgtcgacaaggttcggtcgggcgcctgaggagaaatcgcgacgaggcttgcccccgcggctgcgatctgcggcaggatggcctgataggctcgcagctgaatattgcaatacggacaccagccgccacgatagaaggtgatcacggtcgggccctgtgccaggagtgccgaaagggtcacagagccacctttcgcatccggcagtgaaaagtccggagcaatgtctccttcggtgattgcattgtcgcgggcgaagctttgccgaagctcttcgatcttggcggtgtacaatgcgaagcgacccgccggagccgtttgcacaaactgggctttaaaggcgtcgagctcttgtttcagtcccatgtggctttccccctgggttcagcgtttcggcgaaaactgtcggcattgagttttattacgttcgttctagaatgcaatctcgttacattcatgccagggtaaattctgcagaggggtccggacggacgaagaatggctaggccgcgcgaattcgaagagggtgtcgtgctcgacgccgccatggagtgtttctggaaccggggctacgaggccacgtcgatgcgggatctcgtcgacaaaacggggatcactggagcaagtctgtacaatgccttcggcgacaagcgggcaatctatcagcgcgcgcttgatcgctacgtcgaggggagcgttgcagcccgtcttgcgcgctgcgaggagctccctccgctcgaggcgatcgtcgcctttttcgacgatatcgtgtcgcgatcggtcgaggatcgttcccgaaaaggatgcatgcttgtcaacgcagcgctggacgtcgcaccccatgatgacgaattccagcgtattgtcgcggaggtcatgacgcgtatcgagcttttcttccgcgattgcgttcagaagggccaggagcagggcgccatcacgtcgacgatgtcggcggaagaactgggccggcaccttttgggtgtgttgctcggggttcgcgttctggcccgagtccgtccggatcggattttgctggaaggcgtcgtgcgtcccgcgatcgagcttctcgatataggctccagtccgcgacaccgagatcattgagcttggtgtctcgctgacgtgatttcgactgtcgaagccgcggcgcgacaagcgagatgccagcgcgcagcgcgttgaatccaacaagtcagctatttggcggcggcttcctccgggtcgaatcgcatcacaagtctgcgcgtttgtaacgtcagggcacattgccgcgtagttggggagacgcgtgtaggcaaaaggagccctaagtgtgcgtagtcctcaactcgacaaaccatcaacacagcgtgtcgtaatcgtcggcgcgggctttgcggggcttgccgccgcaaagcagttgggcggatcaggcttcgatgtgaccgttgtcgaccgccacaactatcatttgttccagcctctattatatcaggtcgcgaccgcaggattgtcgccagcggacattgcatcgccgatccgcagcatccttagcaggtacaagaacattcgggtcgttctcgcgaatgtttccggcgtgtcgatcgacgaagggacggtgatcgctgaagaacgtcagataccctacgatgttctcattctggcgacaggagctcagcacgcctattttggtcatgacgaatggtcggtgcatgctccgggcttaaaaagggtggatgacgccacttatttgcgccgccgaattctggtcgcatttgaaagagctgaaagcgaagtggacgaagcaaggcggcaggcgttgcttacgttcgtcgttgttggcggcggcccgacgggtgttgagatggctggggcgattgcggaactggcgcggaaagcgctcgcggcggacttccggcatatcgatcctcgaaacgcccgtattatccttgtccaggccgcaccgaggttgcttccgacatttccggaaccactctccgagcgggccaaatttgcgcttgagcggctcggtgtcgacgtgcgcctgaatcagtccgttacgtcctgtgatggtgagggcgtacgtctgggcgaagtgcccatcgaagccgcgacaatcgtgtgggccgcgggcgtcatggcatcgccggccggaagatggctgcaagcggaggcggacaatgccggtcgcgtacgcgtcggcgaggatctcactcttcctggccacccggagatcttcgtgattggcgacactgccaattgcattggcaatgatggccggccgttaccaggcgttgcaccagtggccaagcagcagggagaattcgtcggccagcttctcaaggcccgcgccgccggcagaacgcttccgcgttttcgctatcgtgacttcggagcgatggcgacgatcggcaggaagagcgccgtggctcaactcggcccgatacggctgcacggtctgcctgcctggctcctttggtcggccgcgcacatctactacctgatcggctttcgcaaccgaataacagtcgtgttgaactgggcgtggaactacgtgacgtttcagcgcggaacccggcttattaccggtttgtccggctcgcgcgtcgaagatatggctgcccccgctccgatggagcccgatggcgtgggaaatctcaatcgttagaagcagcgcattctctcggttcgcccaagatctgtcgatcgtcgtgccgtcgacgctctacaatggcggtcaccaacgaagagctcttgcgccgatgaaataagctacgccagcaacgattagaacggcgagaggataccaagcgacgacgaacaatgggctgtcgtcggtacagttggccgcatagaacgttgcgccaatgccgcttgccgctaatccggctactgcaccggtgagtcccggttcggatggggcacctctgcggagcgcagcgaagatgcacaggaggggaccggcagacaacagcgggatcactgtcaaacagtgcgtcgcgttatggcccacgagattgtcttcccacgaccgggacggcagcaccatcagttcaaccgcgaccgcgcccacgaggatcacgggcgtgatcaacaagctccatgagcgatggttgcctgcgctatcgggacgcgccaaactcaacgtcgcgtaggtcccggttatggccaacgtcaatgtgaccacgaatttgaagaggaacctgatggaggtgagcgccgagaggatatcagagcgaaaacccagaaacacagcaaacgccagcgctgcgagcaacgcgccgcaaagcagtccacagagcaaaacccaatgaagggagcgttggggccgtaggtcgctggtgagggtgttgatgaattcgtctgttttcaagcttcatgactccgatagagcgatgccagcattttaagcgcgcggtgaagcgcaacccgaacagcaccctcgctcatcttcaattgcgcggccgtgtccctgatactatttccctcgatggagactgattgcacgattgcccgttgctgcgtcttcaactgcgacagcaatcggtccatttcgcgggccgacagcccgtcatccttctcctcctcgccgagaatttcgaggaagtcatcgatcgggacaatgacatgccgaccgcgacgacgcagggcatcgacgaacttgttgcgcgtgatcgcggcgatccacggacgaatcggacgcgacgggtcccacgtcgtgcgcttgagatggattgtgaggagaacttcctgcacaatatcttctgcttcagtctccgcgacgccgacgatgcggcagcggcgacaagccattgaccgcaaacatggggtgacggaaacaagaaaccggtggtacgcctccgcgtcgccctcgatcgcagctcgcatccagaccgaccattccccgtcacggtccctaatcttcaagccttcgccccctcgcgaatcgtagttgcgctgctgcgccagcgtctggatcgttctcccttgccggtcgcggtgtgttgaggatcagatttagaacactcgatctacaacgaatatgacgtttatccaagccattggacggggatgtcggcgtgggacgatcccggcaaaattgcccgctccctggtccgtaggcttgattgagagctggacacgttcgccttgcgctagagcactcaatcaaagtttcgagaagctcgggctggaaggtcaccggcgaagcacgaacgatgttcgtcgtgctctattctcaatggatcgacgagaggatccgaagcggacagtgacccgcgaaatcgtggatttcgaaattttctcccaaagtttgagccggcatgccttgggggctatgcctccactgttgtctcgacgaaggcctcgaagccctgttcgcataagatagattacggaacctaagccattgatttcattaatcatttgaagtcttgcaggctttcagacgcgccacaaaaagtcgattgatcgccgtcaggtggcggcaagtcgcgctacactttagccgctgccatgacaccgacgtcgcctcgagattctgacgtcgctcatcgcaggcgacgttaacgcaggaggccggaccggatgccgagcgcaacggcatggtatttgttgacggcttcaagtttctctcgcgtcgatgcgagatgtttgcgcacggtcgaaacagagataccgagaatggcggcaatctcccaatccgtttttccttcggccgcccaggcaaggcagtctcgctcgcgtgccgtcaccagggccaggcgtgcttcgccttgatttgatcgcgacgccgttagctccaggagttggccggccgcgatgtttgttgcgaaagcaagcgtcccgagctcatcaggcgagacgtccatagagttcgctccaaacgaaaatgcgagttgcacaccgccgagcaggccaatcggcacgacatatccttcgcgcaggccgaattccgacgcttcacccctgatcatttcgacgtccgctctttcggcgccaagatcgtaagcatgagcccaagtgaacggataccatttgctgcgtagcagttgcacaataggatcgcggaagagatacccgcgttccaggtagcgcagcgaccaatccttgggcatggtgctgacgagaacgttgccggcgacggcctccggcgatagtggcggatgcaccgcgggcacgcggccggcaaagatcgatgtgaagccgaacttcgcggccgtttccactaagcgctctttgacggcttctgcatcgggagcgcgagatattcgcataatgacatcccagcttgccctcggtgtgacataggggttcgactcgcgtcgccctgtcgaccgaggcagtgaccgtcttatctgcgaatgtttttgcgtcttgcgcataggagaacgtttagcgaggggtcgctccaccctcgttggacgactcgtagctggaaagaagccatacgccgacgatgatgacccccatcgcgatgtagaaccatcgggcggttgtcgcaggaagcaacgcgagggcgccgatgatgagcaccggtcccacgatcgcctcgacaagcgcatgcaatttaagcggaaccagcctgacgaggctgagcggcatatccgtcaggactgtcatcgtcaaatgaacgacggcaaggatgtatgaaacgacggctggagcgccagatattccaagaatagtcggagccagcacgaaaatcagtaccgtgatgtaatcgagaatggcgtgctgttgggtcgatatgatcttcatttcccttttcctcttccggcacgcgtcgacgcatccggcgattgcaatgcggtgttgatcagtgcgtcgcgcatggcctgcagttcgactgccggcaggccggactttgcgagaacgaggaggccttggaggcttgccgtgcactgcaatgcacgcaggcgtcttgagtcctctgatagcaggcgagatggtcgcaacggcagggagagcgctctctcaaacagcgaacgcacagacgcgattccaatcttgagacgctccgccaccttcgggtcggccgctccaagttcgagcgcagtgttgccgatgaaacatccccgccaaaggtcgtcggtcggcttcgcaatggcgaggattccatcgaccagcgacacaagtgcgctttcggcattatcctctgccgcgagaagcgattcgaagtgcgccgttagcgtctcaagatagagatcaagtgtttcgatgaagagctcgtgctttgaaccgaacgcgttgtagaaacttgctcggccaagcctcatcatttcgagcagctccgggaggttcgtcccctcgtaaccgtgctgccagaatgcttctagcgcccgtttctttgcgccttccgggtcaaagctctttgtcctcatttggcgatactgtaccaaatggtctaatatgacaaggtggccctccaacttgtgatgaatgtcgcggggctgaacggccgcaggcacatcgtttttcgcgctcgatgcaagggacattcaaaagcgcgtggtgaatgcggtcagccaggatggcgaccagtcgaccagcaccgtttcgagccggtggtcagcgcccgtcaaaatcgcgacggccattgcgatgaagagaagacccattccgtattttgcattcttgccagctccgagcaggccggagcggagacgaagcacggtctcgcgagacaacaatcccagggcgatcaacggcacactgctgccgataccgaatgcagccatagtcaccgcaaccgcgccgagattctctccacgcgcggccaacaaagatgctgcgccaagggtcggaccaacacagggtgcccagacaaaccccaggagaaggccgacgccaaattgaccggaaatgccttgcgatgagaagccgccgaagtgctgatcgacccagtttccagcaggacctgccgccacggccagacgagtttgaagcgcgggaagaagcagcaggccgcccacaagtgccagcacgattgcgccagcgttccgaaacacgcccccatcgatcccaagcgtgaagccaatggtcgcgacaaagatgccgacggccgtgaacgatagcgccagaccaaaggcgagcgcgattggcgcaagcctgtgctgtgcaaccgcggcgcccagcaccacaggaagcagagggataacgcagggagacaggaccgaaacgcatcccgccaggaacgcgaggcccagcgtgccgaacatgatcagcgcccctagatcgacttatcgagttgatcctcgatcgcagcttcagtcgtctcgccggtcgaacgcgccacttcctgtttacccttgaacgaaatcagggtgctttgggcgcgaacattgaatttccgcaagagatccttttgcgagtcgaagtcgatggtaaaggcgacgatgggcgcaaatttctgctctgctccgagcttctccaggatcggcttctgcgccctgcaggtcgggcaccacggggcggtaatttccagaagcacaggctttccagaagcctgtgcggcctcgaaggctttaccgtcaaaggggcgcgcgtcgaaggcgagcgccggcagcgcgtaaatcagggcggttgaggcaaaaatggccaatttgagggaacgcacgacgttcatggttatgtctccagggggactcgctactcccctcttcgtcgcgcgcgcaccttttgttacaagaccggcacatttttcaaccatcctgacggtggacgatttctatcgttgcgactgccccttgatggattgagcccgctcattctcggcctcgagttcacgaacgatcttttcctgctcgttgcgcagcttcgtaagcgcatcggtttgggtcagtgatgccggaataggtcgagcgggatnnnnnnnnnnagctgctgcctcgcgcgcctcttgcgccgccgatctctgtgcgccggcgacgatcgcgcgttccgccctaagctctcgctgcgatgttgcgtcgatgcccgtcgccgattcctctcgtcgttccgcagcgatcgctcggtcggccagtcgagctgcgtccgcggcctcgcggtcctcgcgctgctggataccgttcgcccgctcgatgagccggtcggcattgacgccggcaatcgcctcgacctctgcacgcgtcatctgctgaacaccatgctcggaggctcgctgaagatcgatgcggttcgcaagcgtctcgaggtatcgcgaagaggcttcacgaaactgctgcttcgtctcgctgtccagcaggtcgctcgttcgcgataccgtttcattcatgagccgcagatcctttgccatctgctccgatgtcactgccatggtcgggttctccttcgtcagctgctccacacgtttcccgatcgtctgcacgatggacccgacggtctgggccatcaacaagcgctcgagcatatccttggcgaccgggctcgccggctgttcgctcgcgaccgtttgccaggcctggacgccttcatttacgaccttcaggtcctgcgccgtcacaggcaggcgaattggattggtccgagcaaccgcgatccgctggcgggcattgtcgatgagccggcgattggcaggatccgcggcataggcgcgatcgcgcgcctcgcgggtcggacgcggccgttccgccgcgtcaacgatggccttgtccttcgggccgtagctctgcgacgacgcacgctcgcgcgccgaggtcgcaacgatcttgagaccttccgcctgtgcgtgctgggcatagacctggcgccattcgctgaaggtgtcgcgacccggatgcagcttctggccggattcacttttcacggcgacgacggcatgcacatggacatggccctgcgcctccttgtcggtatggacgccgaacatgaatttgtgatcggcgaagcgatcgtgcaggaaggcgcgggccgcgcgcgtcagcgcctcgacgtcggtgccggccttcgccgaaacgatcagatgcatcgtatcgcgcgaggattgcgagcgcagcgttggcccccattcccgcgcggcggtcctggtctcggcgacattggcgatcgccttgccccggtcgtcgatcgccgggcccttctcgatgagtttgttgagacggtaggtcacaccatcgcgaccatggctggtggcgcccggaacaatgccgatcgcctcctgcgccaggccggttgcggccgtgatccgctccttcgcgcgtgcttcggatgccatgtcgaggcgcttctgcgtgaagcccctgccctcttcgccaacgcgctcttcgcggacccggaaacgctccttgcccgggccagccatcgccgtcacgacgcgcgcctcaagcatgccgtcacgcgtggcatcgatgcggtaggcatgccgatgaccctcgaagccggctgcgaccgccttttcgagaatcgccctgccctcgggtgtgtcggcgacaccctggagggtcaatcgcaccgcgccgacgtcatggctctcggcccgcttggcgaagttactcgaccaggccttgatttcgtcggcaaccgcctcgcgatcggcgaggatccggccgtcatgcgtctcgagcgcgacgtcctcgcgctgcacgtatt

SEQ ID NO: 310 - DNA, 10147 bp, Bradyrhizobium colbertium
  misc_feature (4812)..(4821): n is a, c, g, or t
ccctcgaactgtgccgacttcgcctcgaaggtctcggcaagcgaaggaaatttcggcacgaccaaccagttcggatgtctcggcgcctttcagttctgcccggggacattcgagcaatattacagcggcagcgcccagagcttcctcaacaatccttcggcgcagaccgccgcctggacgcaatacgaacaaaacgaatggtcgaaagcccagaacaacggtctcacatccatcgtcgggcaacaggtctgctcgggtggcaagtgcgcgaccatcgatcagtccgccatcctcatggcgtgccagtttggctgcggctcaaagggaaagctcgccaactatgtggcgagcggcgattgcaacgcacgcaacgtgaaggacggaaatggcgtcagcgtctgcacctatctcctgcgcggcgccggctatgacgtgtcctgcttcaccggtcagcaatccaatgtgtgcgtgcagacgccgaccggccctggcgatttcccgacctctaccgggatcgcgtcgaatccgccatcggcttcgaccgcgtcgatcatcgtcggcccgaccgagatctgagatcggcgcctagttgagctcggtcggatcgcgcagaatgaaacgtgagaatccgttgagttgttcttcaacctcggcgcagagattgccgcctctgtaatgcgcgtggaccagcgcccagaacacgacttcgtctgagcggccggcaaacagggctttttgcagggtgcggccaattatggtcaccgcgcggatgggctcgtatcgagcatgcaactcggatgcgacaatcctggtatcggcagttcgaatcaatgttagttcctcagctactacaggctgcgctaggcagccgtcggccatgacgcgtcgttgagaacggaatgcgtgcagccgcgcgcatcatgcagggcggcaagggtctcgcggttgaaggacatccgcagagcgacgacctcgtcccttcccatgcgcgtcggaaatccaaggggccgcacgaagaagcgaagttgcatcgcgatgaccataagacgccaatcgatgacggcgctcaccgtatcgacccgattggccatcccccattcgacgacaccttgggcaagctcgaggaacgggctatccccgcgcggacgcatttcgcgatgcccttgagcaaccgcaaaccgcgtccactcgaagacgcgcggaccccgcggcggccgctgccggcacagatcgttcagaacatctgtcagaagatgcggccgcgtcgtcggcagcaaacgctggtagccgacaatctcgtcatcgcgcaggcatatctggtgaacggcatgcgcatcgtcaaattgatcgtgctcaaggccgtctggatggctcaggtcggtccagcctttctcctcaacgaaaacgctgtgcctgaacttgtagactcgctccatcagcgcggcttgtcggctgatttcggagccggaaagaacaatcagcatggatcaactcctcggcttgtcgggggagccgagttgttccatgaagcgcgccgtcaaaatatggtcacaaaccaccattgcgcggtagtgcggtccgatatcgatcgcctcggttgagtcgcgccgacatccgatctccgacagaccaattaggcgctgcgcgccaattccgtctccgtgacggcatcgaagatttgctccgaccctggcggctgctcgtaaaacatcggaatgaattccgccatgccctgcgcgcgctgaagcaacatctcggtcatggaatcgcgatccacggcggcggaaaacaggaagccctgccccaacctgcagcccatcgacacaagctgctcggcctgcgcctcagtttcgatcccctccgcgatcacacgaatgtcgagtttgcgcgcaatgtcgatgatgccctgcacgatggcgaggctggcatcgtggcgtttcaggcgagcaacaaatgtttgatcaatcttgatcgcatcgactggaacgttgaggagatgcgtaagcgaagcgtgtcctgttccgaaatcgtcaagcgccacgcggatcccgctcgcgcgcagccgctcgaccacgcgatccacatcaccgttgcggcaaccgatcgagacgttctcgctgacctcgataatgatgtggctgagcggcacaccgacccggccaaaactcgcctcgagcttgctcagcaaatcaccgctgtaaaagtccgcagtcgaaacgttcacgccgacatgctggaagggaatgccaaggtcaatccagtggcgcacgtccctcgccacgacgtccagcatcctgcttgtcagctcaaccgccacccgtgcgtccgacgtcgcatcgcgaaagcgcgcggcgggtacgatttcgccatttggtttgcgaagccggcacagcgcttcgacaccgacgatctcgcgcgtgtcgaggcgcatcacaggctgatagtgcgcatcgatccggccttccccaagggctgccgacacatccttgatcgtcgcttgccggttgacgatccgcgtgtcgatccccggccagaaccgcacaaagccgccgcgtcctgtctcctttgcgtgatacagcgcgaaatcggcattcttgtagaccgcttccgcgctctcatcgcctgtcgagacaacggcgcccccgattgtgcccgacggaacgatggcgttgccgtcgcagtcggcaggcgcgcgaagagcctcgaggatccgatgcgccgtctcatccagatcggccagggcctccggccgccgtatgacgacagcgaactcgtcgcccccgagccgaaacgtcacgtccggagacacggccgcggcaatccgcgcgctcgcggtctgcagaagtccatcacccgcgcgatggccgaacgtatcgttgacgatcttgaggttgtcgaggtcgacgacgaacagaccccacgatcccggatcatcgcacgcgaggctcttgagggcgatgttgaaggcggcccggtttggaagagcggtcagcgcatcgacgcttgcccgccgctcgcgctccaaagcccgttcgtgacggcgcatggcgatcgcacacaaatccacgcagctcgcgaacaccgccagctcatcgtcgcagggaccgcgagcctccgggaagaacaccgccagcgcaccgatgggctcaccgtcatcaatcacgggcgccgaccagcaggccttgaggccaaggcttgtcgggaaagcgcaatatttcgtccatttcggatcagccgagatatcggttaccaagaccggctttcgcgtgtaagccgcgacaccgcatgatccgacctccgggccgatcatcacgccttccatgcgagcacaatattcaggggccaaactgggagcagccaacgggtgcaacaaaccggcgcggcagacattgaccacgctgcagatggcgccgggtgacgctttttccacttccaggcaaatctgtgcggccgtctcggtgagcgaggcgccgtcggcaataagccttaagatgcgattttcaatcccttgcaagagcaggtggccgccttagccgcaattgattcgtttaattctttgcgatccttgtaatttctctgggttaaattgccgtgagccgcgtctctagaatttgagcgtgtttgcgagcctctacgaagcttagttaactgatcttctattgaggaaacagcaacatggccggcacttcgaggtttcagtggccgcgctgcttcgggcaccaggtctcatcctcgcgcggaatggcaacgtcctttcttgtcgggaagtaaccaaggacattgcaaagatcgcgatagacgatccgccggcgttctttctccgcttcagccaggtcctgctgttcctggtgttctgcgctggaaatcccatccggccgacatcgcggacaggtcgccatgtgaatcacgcgttcccacgcgacaagggcatccacgtaaaccttgtgggcctcgacggctctcccttcgagctttttccacggtaactctcgatcgtccgccaacccgtcctctcccccgggaaaacgtccgcggtacgcccccgcaaacgaactctctctgactcttggtgatcggggagttggaaaaccgctgttagacggccccgtggcctttagttcgggtgaacctgttgcatacgccacaggctccccgaccataaggtcaaggagtgcggcgccgtaacggccgacgccaaccgctaacaggggttttccaagccccagggcagcgcgtactgccccgcacgactcataaccgctcgttcgctcggcttctagatgctttcgataaatcgtgacttaccaatcgcctagcaggcacttcgggtagccttagggtggagcgtctcccctctggggccgggctggcggctgagctgaagcccctgccgggtcttccccctaccgggcagccatccctgacgcacgcctgcggcggccggcgcgagggagtggccagcggtgccgctggcgcctcgccggacgcaagggaggcttcgccgcgccgatcgtccaacgtcttggatctcttgtcagcgcgcccttgcatccggcaggcttcgcggcctgccggttgcgtcctgcaaggtgcgggatgaggaaaatcaaccgaagaaagggcgagcgcgcgcctgcggcgcgcctcgggagaaggaatggagaagcacgaaatcgaaatcctgcgcgagaaggtgacctgcgccatcgtcctcgaggccgccggctggaaggtcgatctgaaggagagcacccgccgcgccgtgaagttcaggcgcggcgacggcgaaattatcatcgtgatccatgacgnnnnnnnnnncccggtcccagccgcctcgatttccgagcgttggcagcggcgagtgaagccccggcccggctcggcgacctggcgctatctcacctcggagcgcgcgctgctcgacgatgtcgttgctcatgcaacggcggccgactgcctgcgggaaggcccgcacggcagcatgtgggccgcccatcggtcggccaacggcgccctcacgggatgggaggaacgcgggtcggcctggcgcgggtttgccactgacggcgccaaggagctcttccgcctcggaccggcgagcgccgagcggatctgcgtcaccgaggcggcgatcgacgcgatgagccttgctgcgatcgaggtcctgcgcgccgatacgctctatgtcagcaccggcggcggctggtcgcccctgaccgacgaggcgcttcgccggatcgccgcgcgaggcggcgtcaccgttgtcgccgcaaccgacaacaatcggcaaggcgacatctacgccgagcgcatccgtgcgatcgccgcggagaccggcgccggctacgtccggtcgcggccgcgaggggatgattggaatgaagacctgaaaaccttgctggcgcgcttctcagcgcaccggcttgcagcccttgcataaagcgatcggaggtttcgagcgtcttgctttaggtgctgaatagggctcggttgcccaacaggaattctttgagggtgatcggtttcacgccgcttgcgttgaagacttcgtcggttacctggccgaacgacaccttcgtttttccgaacgcctgcgcgagcacggacgcgtgcttcaccagccgcgcatttccaaagggatgcttgctcagtctgtccgcccacgcctcgatcgaaatatcgctttcgtatcggacaggtgtttcgaacacatcggatacgatcgcggccacctgacgaaaggtcagcgcttcgggcccggttacataacgggtcgtccccacgtaggcgtccggattttgcagcactgatgcagcaaaccgcgcaatgtcctcgcccgccacccatgacagcggcgtgtcgccatcgccgaacggcgcttccagcactccacgcgcgaccatgtccgatcccgcgaggaattcgaggttttcatagaagaaaccgcccatgagatgcgcgacgttcaggccagccatgtcgaacatctgcgaggccagccaatgctccctcgcctcgtcgctcggactgccctcccgtgccgggatcagcgacagatcgacgagtatccgcagtttggcgtcgcgagcggcgattgccatattgatcgccgcctcgagcagacccggccgcatcggatagcaaaagagcgcgcgatcgacatctttcagggcatcgcgcagactctgaaggttcatgaagtcaccgacaacggtctcgatgccaagtttgtcgagcgcctcgcttctgtgatcgcgggtgcgaaccagtgcccgaacggttgctcccgcctcccgcaggaaccgcgcggtataaccgccgacgcctccgtgcaagccggtcgctccggtgacaagtatcgtggctttggacatggattactctttcacagttgttcgctggcgcgggactgccgggtagtcgacatcgagcaggtcacgataggatgccttcgcccgtttccgcgcagcggcgacactccgctgcacatcctctggcatgaacattccggtgttccacgctgcggtgtagcgcaggccgtcctcaatccgtcgacggtcgaaatcattcagaatttctttggtgccccagatcgcaagtggcgatttgctcgcgatgtcgtcagccaacgcccttgctgccgcgaccgtgccatcggcatcagatgccatcgcgttggcgaacccaaaacggtgcgcctcctcggcgggcatcctgcgtccggtcatcgccagctcccgcacgatgccaggcggtatcagcgcggatagccgctgcagtacccccaggtcggcgaccatgcccatctggatttcctgaatgctaaagtaggcgcccgtcgcggctagacgcaggtcacaagcacagacgagatcgagcgcgccgccgatgcaggtaccatgtatcgcagcaatgatcggaaatcgcgcctgctccatggcggacatcacttcgtgcattcgaagtaacatcagccgcaaacttgcccgaaatcgaccgggctcgacatcatcatctccaccgagaaaacgttccagcaactccacgtcgatgcctgacgagaagttcgcgccctccccccgaatgatcgccgcccttacgctgccggcctgatcaagctcccgaattgcttcagggaaacggatccagaaatcttcagtaagcgaattcgccgcctgcggacgacacagcacgatctccgcgatcggtccttcacgatagacggcaaaacctggttcactcattagactgctcttcggtcacttggacgcagcagtcagcatgcgtgcacgatagcgctgcatcgcaggacttggctctcgcgtcaggtttgccggcgagacgaactcactgcactcggaacaggcgagacgcggtgcggttacacatccacatccgacgtgtcgtgtaacctgcggcggacctttcccgtccgacagccatttgtcgccgaatacgatgatggtgctgatgatcggatgtagatcgcgtcccatctccgtcatcacatattcagaaccgcgccccttgtccttggcacgggtttcgaaaatgccggcctccaccagtcgcttaagccgttcggagatcacttggggtgtcgcgccggtataggcgacgaattcgtcgaaaagtgtcgtccccgcgaacgcttcacgcacgaccagcatggtccatcgatctcccaggatgctcatcgttctcgcgaccgaacaaatctgatcccccacctggtcccaattcactggcgctctcctgtagagaggcaccagaacagatatgaaaatcatagtcaacataagatatgaaaatcatagtcagcctgtatcgacggccattgggtctccgccaatggctgcatgccgtcctcggtcctcgcggaggaaaaaagggagaaggaaggagaatgaaggtccggctgccgcatgcccggccggcgcgtcaagggaggctccgcccgcttcgcggcccttgaccctgcggaccggagaggcggccgcccggcggtgtttgaaaacaccactgggaaggacgaaccatgccgctgtttacgatcgagaccacctatcgcctgccggtctaccgccaccgcacctatgaagccgatagcctcgaggctgcttgccgccttgctgtcgacgatgaaggctggggcgatgccgaagaggacgtcgattcctcgggcgaaacctatgtcaccggagcatgggatggccgcgactgcgcttacagcggcccggcgctggccgtgccgtcgcatttcgacgagaccgtccagcgcaaggcggatcatttcgagatcctgctcggcctggtcaaggttcttcgcggcgcggctgacggaaaacacagcgcctattggatcggtcgcgccggttcggccatcgccaaggcggaagcgatccttgccggttcgcgtgatcccgcttctgacgtgtccatgccgcggccgcacatcctcgtgtccttcgatgagagcgaggtgcgttcgacgatcggggagatcatcgccggcgacgagaccctcgcgatgttctcggcggattcgatcggtgacgacgacatccataccgcctgcgtggcggccgtcgcagcagccgacttcgcggaagagagaggatcggtcctgttcaaagcggccatcgctgccattcgctcggtttggagagcgcctgattggggagaaagacgaagggagatggaaagggaggaatgacgtgccgcatgcccggccggcgcgtcaagggaggcttcgcccgcttcgcggcccttgacccgccggaccggagaggcggccgcgaaggaggggtcagaagggctgaagaggatggcgaaccggaagggtgagccgcgctccggcccgacgaggctgaaaggagcccaccatgacccgctcttcgatccgcaaggtctatcaaggcgccgccgaccgccggcagatgttccgcatgttcgatcggcacaaggagcgaccgaaccgcacggacgacgacgcgaccgcgctttacgcgggcgagtggttcgagatcggcacagccgagcatgactacatgttcgagatcctgccgccattgtggatgcgcggtgatatgttcgccatgcgcgaattcctcaccggcagtgtcacgagcgtgttcttcgagctgaagatcgacggccgcgtccgctatttccacgcctattgcgaccttggcgaccggcagtcgcccgaacggatgcgcgccgcgatcatcgagcgcgagtcgcgtccggtccgcgccatgacgcgcgaggagcgcctcgagcatatctggtcgagcacgcacgatccctatcgtggctatgccgactggcgctttcccgccgcagagcgcggcaagcgcatcgtgatcgtctacggccaggatggcaggcatgatttccgcttgctcgaccggctgaccgacgcggatatcgcggtgaagctgccggtgcatctgcgctacctgcccgacgcgatcgcggcataggtgccgcgatgttcaccttctccgtgacggcgatccacgccgtgatcacgcgcgggcggatcgacgcccgcatgaacggcggcttccgcaatccccattacggcctggcgcccggcaaggacgaaaagcccggcgtctggctggtcggtgacgaaggcgtctacatcatgtccaacggcaagctcgccgatgggcaacgctccttcgtcatctatgccgaggaatgcgatccgaagaccaaccccgattactggcactacaagcgccagtatttcggcggcgatgacggcatcgacttcctcgatgccgaactgctcgtgcggtcgatcgaggcactagcctcggccacgcacctcacgatcgagatgaccgacgacagcatggcgatcacgccgatccgccgctgaccgctcgggccacgcggcccgttcccgcaacctctcgcgaccatcgcgccagccggaatccccggcgggatcgatggcgcgcgccttcaacacaggagaccttatgatggcgcacgatgatcccttcactctcgaccttttcggcaacaccgctctctcgtcaggcctcggcctcggcgtaaccgcctttggcggaacgttcgcgaacgatgacgatgatgagcccgatccctcgactccggctccggc

SEQ ID NO: 311 - DNA, 3594 bp, Bradyrhizobium colbertium
  misc_feature (3397)..(3406): n is a, c, g, or t
ggcgctgtgctgctcctcgctctgacgctgacgaccgaattgctgtcccgccggccaacgcttcgctcggcgagcgctgccgcagccgctatggatctcgctgaagctgcgcaaagaaatgctgaggtgctcagggccatgggtatggttccgcaaatggccgatgtttgggagcaacggcgcgatgatcatgggtacaactacgcccgcgtcgctgacgtggccggaggcttaggggcgatcacgaaggtcgtccgcttaggccttcagtcgagcgtgctggccacaggagctttgctggtcattcagggcgaagcaacaggcggtatcatgatcgcaagttcaatcctgctggctcgcgcactcgcgcctgtcgagcttgcaatcgccaattggaagggctttgtggcggcccgccaaagctggagccgtttgcgtatcttcctgctccggtcgccgcagaagcgtccgtccattaggctgcccccgccacttcgcgaaatcagcgtcgactttgtcagcttggcggctccgggaggagaacgtttgttgctgcgcgatatcaacttctccctatcggcagggcaggtcttggccgtggtcggcccgtccggggccggaaagtcgtcacttgcgcgcgcgctcgtcggagtgtggcaggcgatgaggggcaggatcagacttgatggcgccccgctggatcaatggtcgcccgatcagctcggccgccacataggttacctgccccaggacgttgagctgttcgaaggcaccgtcgcccagaatatctcgcgcttttcagctagtgcgaactcggaagcgatcatttcggctgccacggctgccggggttcacaatctcatatgctctctgcccgatgggtatgataccaatatcggtccgcggggtacgtcgctctcggccggccaacgccagcgcgttgcgcttgcgcgcgctcttttcggcgacccgttcctggtcgtgctggatgaaccaaattccagtttggacgccgacggcgaggcggcgctgctggagggcatccggcgcgggcgcgagaagggaatggcgttcgttatcatggcgcatcgccagagcatcctagccgctgtggatcgcatccttgttctgggagcaggccaaatgcgggcgtttggcgcaagggacgaggtgctgaaggcgttgcgacaaggagtggagccggccgatagagcagagcaactgccccaaaacgcgcgaacgcttgcaccgcaatcgggtgcatcgttacgaatcacgcgggtgggcacatgatggccagctccgcggacatgcgtcgttcagttcgtcgtcatctgctgttgagctcgttcggcgctgctctgctgataggcggatttggtggctgggcttctaccacagaactcgctggcgccgttgtcgcctcaggatctttggtcgttcgctccagtgtcaagaaagtccagcacccgacgggcggcgtcgtcggagagttacgggttcatgagggcgacgtcgtcggcgcgggagacgtgctgatcagactcgacgaaactgtaacgcgtgcaaatctggctgctgttgaaaatagcctgatggaattatatgcgcgacaagctcgattgactgccgagcgcgacgctttgggcacagtcgaacaaccgtcctctctgcgtggcttctcggacgccgcgcgagccgccgaggtgctcgcaggcgagcgaagactgttcgagctgcgccaaacggcacgggcggggcaaaaagcccagcttcgcgagaagatcggccaaatcacagagcagatccagggcctgaccgagcaaattgcgggcaaaaagcaggagaccgagttgatcagccgggagcttgtcggcgtgcgcgagctttgggccaaaaatctcattccgatccagcgcgtaaccgcattagagcgggatgcagcacgcatcaagggagagcacggccagcttgtggcgtcgacggcggaagccaagggaaagatgtctgaaattggattgcagatcatccaggtcgatcaggatcttcgaagcgaggttgcaaaggagcttcgcgaaacggagggaaaagttggcgaattggttgagaagcgcgtctcggctcaggatcagctcaaccgaatagatatccgggcgccgcaaagcggcatggttcatcagctctcggtccacacggtcggaggagtgatcagcccaggcgagcagttgatgctgatcgttccccaggccgacgtcctcgtggtcgaggccaagattgcgccgaaagacattgatgaaatcaggctgcagcagtcagcagtcctccgtttcactgcctttaatcagcgcacgacgcccgaagttcacggaacggtgacgctggtgggagccgacgagatcacggatgacaagagtggcaagtcgtatttcaagattcaaattacaccatcttcggaggagttggttcgcctgaaacaggagaagctcgtacccgggatgcccgttgaagcgtttgtccaaaccacctccaggacagcgctgtcctatttcgcaaaacccataaccgatcaggtcactcgcgctttccgcgagcaataaaccaacgggtcgatatgactggcttgcaggggcagatcgtcagtctgctcagattccgccgctgaccttgatttgccgcccgtccgttaagagcggcgaagtggatgatggcggggccctatgcccatgccaagcggccgttgcgcatcctgcgcaggcggctgggccgtaagcgacgtccacgtcccattcgcaaagatttggagggacggattgcaacgcgttggcgccacggactgcaaatccgttgatcaacgcgttgcaaatcgttgaagtcgcgactgcggcggcagctacggagaattaggaggtgcgggcgaacgaccagggcaagagttcgtcgatccgcgactgcgggtgactggttgcgatcgcttcgagggtcgctttcatccaggcgtagggctccacgctgttgatcttgcaggtggcgatgagcgaagctatgcgggcccatgaacggccaccttcgtcgtgacctgcaaataaactatttttgcgcgtcagaatcagcggtctgatttgattttcgacggggttagtgtccatctcaacgcggccatcgtcgagaaacaaagtgaggccatcccaatggttcagcagataggctatcgccttgcccatctcgctgcccggcgacaggcgcgcagcttgctcgcgcaggaatctctcgagttcggcgacgagcggccgtgatcgctcgttgcgcgccttttgtcggatcgcggcgtcggagccagggatctccttctcgattgcatagagcgctgcgatgcgcgcgaggacggcttcggcgatgnnnnnnnnnnctggcgaccgccacctgcgccagcatcgcctcggtgggcaggccaccctccaccagatgggcgggagccggcgcctggcgcacgccagcgcatcctgtcgcgcaggcgtagcgcggtcgcaccgtctcgaccatgcgatactgggccggcgtcacgtagaggcgtctggagcgatcctcgccgatccg

SEQ ID NO: 312 - DNA, 152029 bp, Bradyrhizobium colbertium
  misc_feature (23169)..(23178): n is a, c, g, or t
  misc_feature (23497)..(23506): n is a, c, g, or t
  misc_feature (23934)..(23943): n is a, c, g, or t
  misc_feature (79856)..(79865): n is a, c, g, or t
  misc_feature (136617)..(136626): n is a, c, g, or t
agagggcggagagatcaagcaaagctcgggtgaagcagccgcgagaacgggaaggcatgtctgcgagccgacacgcgcatttgagaacggcggcgatgccgcccttgctctgtcgttgcgagcgcagcgaagcaatccagaattcgtcctcggcgacagtgtggattgcttcgtcgcagaagctcctcgcaatgacgaggcggagagggcgtgcgcaagactccaccttcttgccccggacgcaccgcagcgtccccgtgaggacacgctgctaggtcgcgatgaagctgctcgcctgaattttttgtcagaatggggaatagtcattccctatacctatcttgagtccaagagaatgacgatgaatgccacgatcgagagcacgcccggcccggatacgctgtcccagcgcctgaccgtcgtgctcgctgcggcttgcggcatggtcgccgccaacatctactatgcccagccgctgatcgccccgatcagcgccgcgctcggcctgtcgcatgcggcggcggggctgatcgtcaccatgacgcagatcggctacggcaccgggctgctgctcatcgtgccgctcggcgatctcgtcgagaaccgtgccctgatctgcgcggtgatcatgctcggcgctgcggcgttgctcgctgccgccttcgcgacccatgcgctgccgttcctgcttgccgcattgttcatcggggtcggctcggtcgccgtgcagattatcattccctatgccgcgcatctggcacccgaagccatccgcggccgcgtcgtcggcaacgtctcgaccgggctgatgctcggcatcatgctggcgcgtccggtgtcgagcttcatcactgcagcgctgtcctggcacgcggtgttcttctgctcggccgcgctgatgatcgtactcgccgccgtgctctggatgacgttgccgaagcgcaggccgctcgcgcggatgcactatggcgaattgttgctgtcgatgccgcagctggtgcgggccacgccgctgctgcggcgccgcgcgctctatcaggcgagcctgttcggcgccttcactttgttctggacggtggctccgctccagttggccggcgaattcggtttcacccagcgcggcatcgcgctgttcgcgctcgccggcgttgccggcgtattcgccgcaccgatcgccggacggctcgccgacagcggccacagccgcatcgcgacactggtcgcgatgctgctcgcggcggccggcttcctcgcgacctatatcggcgtccccggctcgatgctgaacctcgcctgtctggtcgtggctgcgattgccatcgacatcggcgtccagggcaacgtcgtgctcggcttccgcgccatcttcgcgcttgggcacgagcaccgcagccgcctcaacggcctctacatggcgacgttcttcgcggccggtgcggcgggctctggggtcggagccttcgccttcgcgcagggcggctggatgcttgcatcggccattggcctcgcgctgcccgtcgccggcctgctctatgcggcgactgaatgaccgccagcatgcccggatgtggcccattcaccaacggcgcaaggatgcaattccgtctcgcggtcactgcggcaccgtagcactttgatcgcagaccctcctggttaacgggcggcagggggaaggctgatgaagcgtgcggggctgttcggcgttcagcgggggcggccatggtcgtgccaggcgtttctgcttgggctggtggtcgtcgtaatgtccgtcctgcttcagggcatttgcgtcgcgctcggcgtcagaagcggcggactgaagccttcggccgagagcgcggtaacgaatccgcaatagaccttctcgcgcacgttgcgcccgcgcaacagtccggcaaccatacgcgaacttgccgggcgccgctaacttttcgaaaaagatttggccgcagtttctcccgcgggaatgacgagggagtcttcaatcatgaacggtcacgccatcctggagaacgtgcgccgctaccgtggcatcgcatcgctctatcgccagactgctgcattccgcccgggccagagctggtcgctgctggagcaggccagggattgggaagcgcgggcgttgtcggagctcgaagcctatttcgcgacgcgcagcgactgcgccgcctcgctcgcggcctgatctcaagccatcggcccggccgcgaaccggcgccggggaggcgccgccgcccacggggcgactacggagttgcctgcgcgtcctactgtgctagcaacgcgcggatcgacatcttcttcacgtcggccggggcacgcgatgaccaccttcaaccgcatctttacgaccgagcgtctgctccagatcatcgtggtgctgatggcgaccttggccatgaagctgatgagctgagcgcctccgccctatcgcccgccgagctcgggtacgtcgggcagatagttcgagccttccgagcccaggaagtcgaacatcgcctgtgcgggcggcagcagcaccttgtcgctgcggcggatcacgtaccattgccggacgatcggcaggcccgcaacatcgagcacgacgagccggccctcggcgagctcatgcgccacggtgtgggccgagatgaaggcgatgccgagtccggcgatcaccgcctgcttgatggtctcgttgctgctcatctccatgccgatgaccggctcgagatccgacttctggaacatgccttccatcagcgtccgcgtgcccgagccgggctcgcgggtgaggaaggtctcgtgcacgaggtcggtcaggctgagaccggaatccttctccagccagtgccccttgcgcgcgacgatgatgtgcggattgcgcccgagctggcggacgtcgacggtgacgtcggccggtggccgacccatgaccgcgaaatcgaggtcgtagccgtgcatggcctcgcggatctcttcgcgattgccgatggtgagcttgatctcgatcttcgggtatcgcttggagaacgccgcgatcgcgtgcggcacgaagtatttcgcggtcgagaccgcgccgagatgcacggtgccgccggtccgccccgcaagcaggtcgagcgcaccttggcagtccgcgatggcagcttcgacgcgctcggccagcgccagcacctccttgcctgcgtccgtcagcagcatgccgtcaccggtccgctgcaccagcggcaggccggcgaggtcctgaagctgccgaagctgctgggtcacggccggctgggtcagcccgagatggctggacgcggccgtgacgctgcccttgagcgagagcgccgcaagcgagcgcaactgccggatcgtcagatgccggagctgagcggccgcatggccgggaccattataagaaaattctttgaggctcattatgaatagaaattttccttattaagctgcccctgtcaatctcctgatgccgggactgggcgcaccaaacctccagcggggagggacaataggtgcggcgccggcaaggggatggacgcagatgattgggcaactcaggctggacgaccaccttcaacggtattcggagaccgtgccgcacgcgctagcggtggcgggcgccgtcgacgccatcgcagccgccgctatcgaaatcgcggatctcatcgcctcgggcgatctagcggatgcttcgggcctgaccaccggccgcaacagcgacggcgatctccagcgcgatctcgacgtgcaggcggatgcgatcctgcgccgccgcctcggcaggctgccgatcgcggcgctggcgtcggaggagatgcgtgaggctcagatcgtcgatcgtcagggccgcatctgcatcgcgatcgatccgctcgatggctcctccaacatcgacatcaacatgaccgtcggcaccatcttctcgatcctgccggcacccgatgatctctcgctcgccttccaccagcgcggttcggcgcagctcgccgctggcttcgtcacctacggcccccagacctcgctggtgctgacgctcggcgagggcgtcgacatcttcacgctcgaccgcaaggcgggctgcttccgcctcgcgcgcagcggcgtgcagatctccgaggcctgtgacgagttcgcgatcaacgcgtccaatcgccggcactgggatccgccggtgcgcgccttcatcgacgaatgcctcgccggtgtcgaaggccccgccaaccacgatttcaacatgcgctggatcggctcgttggtcgccgaggcctatcgcatcctcacccgcggcggcgtgtttctctatcccgcggacgcgcgcgccggctacggcgacggccgcctgcgcctgacttacgaggcgcatccgatggcgatgatcatcgagcaggccggcggctccgcaaccaccggacgcgagcgcatcctggagctgtcggcacagagtctgcaccagcgcgtcccgctgatcatgggctcgagcaacggggtgcggcgcgtcgaggaattgcattgcgatccgctgctggtcgcgagcgtctcggcgccgctattcgcgcggcgcggattcttccggctctgagcgaggcgatcccatgtccaggaagcatccgatcatctccatcacgggctcctccggcgccggcaccacctcggtcaagaaaaccttcgagcagatattcttccgtgagaaggtcaacgctgcctacattgagggcgacgcctttcatcgctacgaccgcgccgagatgcgcgcgcagatggccaaggaggccgagcgcggcaacaagcatttcagccatttcagccccgaaaccaatctgttcgaagagctcgagcgtgccttccgggattacggcgagaccgggactgcggtgacgcggcactacgtccacgacgccgaggagtccgcgctgcacggcgccgcgcccggcaccttcaccgagtggaagcggctgccggagaactccgacctgctgttctatgagggcctgcacggcgcggtggtcacggacaaggtcaatgtcgcgcgctacgccgacctcaagatcggcgtcgtgcctgtcatcaatctcgaatggatccagaagctgcaccgcgaccgcagcgcgcgcggctattcgaccgaggccgtcacggacaccatcctgcggcggatgccggattacattcactacatctgcccgcagttcaccgagaccgacatcaacttccagcgcgtgccgacggtggacacctccaatcccttcgtggcgcgctggatcccgacgccggacgaatcgatggtcgtgatccgcttcaagaacccgcgcggcatcgatttcccctatctgctctcgatgctgccgcaaagctggatgtcccgcgccaactcgatcgtgtgccccggcgccaagctcgatctcgcgatgcagctgatcctgacgccgctgatcatgcaactcatcgagcgcaagcgaagcctgaaatgatccgcgacaccaacaacgggaggatcttatgaacatctcggtacatgccgaagccgacctctatgccgtcgcacataacgacctcgcaaacgccgtccgcttcctcgcgatcgacgccatcgagacctcgcagtcggggcatcccggcctgccgatgggcatggccgacgtcgcgaccgtgctgttctcgcgcttcctgaaattcgactcggcgcatccgaactggccggaccgcgaccgctttgtgctgtcggcaggtcacggctcgatgctgctctatgcgctgctgcatctgaccggcggcgatgtcagcctggacgacatcaaggccttccggcagtggggctccaaaacgccgggccatcccgaatacggccacacggccggcgtcgagaccacgaccggcccgttggggcaagggatcgccaccgcggtcggcatggcgctcgccgagcgtatggccaatgcgcgccatggcgacggcctcgtcgatcactttacgtatgtcatcgccggcgacggctgcctgatggaaggcatcagccaggaggcgatctcgcttgccggtcatctccaactcggccggttgatcgtgctgttcgacgataacggcatctccatcgacgggccgacctcgctggcgacctccgacgaccagctggcacgctttgcagcctccggctggtcggtgcgtcgaatcgacggccacgatcccgaagccattgcgcaggcaatcgccgaagagcgcgaaaccgagaagccgtcgttgatcgcctgccgcaccatcatcggctatggtgcgcctgatcggcagggcaccgagaaggcgcacggcgcgccgcttggtaccgagcagaccgcagcagcgcgccgggcgctgggctgggactatcagcccttcgtcgtgccgatcccgatcctcaaagcctggcggatgatcgggcaacgcgggcaggtcgatcgcctcgcctggcttgatcgctatgaatgcgcaacgcccgagcagcgcgacctgttcgtcgagggcagagccgttgccttgcccgccgcctatgcactggccgcggcgaagttgcgcgagcgctttgcatccgagcgtccgaagctcgcgacgcggcaggcctcgcaacaggtgcttgatggcatcgccgggacgattcccggccttgtcggcggctccgcggacctgacacattcgaatctgacgcacgccagggcgcaggcgccggtcaatagcggtgcgttcgcgggcgactacattcattacggcattcgcgagcatggcatggccgctgcgatgaacggcctcgcgctgcatgggggcttcatcccctacggcggcacgttcctcgcgttttccgactacagccggccggcgatccggctcgcggccctgatgcggctgcgcgtcatccacgtgatgacgcacgattcgatcggcctcggcgaggacggcccgacgcaccagccggtcgagcatctcgcggcgctgcgcgtgattcccaacctgctcgtgttccggccggctgatgcggtggagacgctcgaggcctgggattgcgcattgagcgcggagcatcgtccatccgtgttgtgcctgtcgcggcaggcattgccgactttccgcagcgatgcgcgcggcaaaaatcgcgtcgcgcgcggtgcctacctcgtcgtctccccggacggcggccgcgacgtgacgttgatggcaaccggctcggaggtctcgatcgcgctggatgctgcccgcctgctagcgaccgagcacatccgtgcggccgtcgtctcggcgccgtgcttcgcgctgttcgaggaacagccggaagattaccgcgccacggtgctcggcacagcgccgcgcgtcggtatcgaggcggccgtgcagggcgattggtcacgctggatcgggatggagggcgaattcgtcggcatgcgtggcttcggcgcctcggcgcccgcagccgtgctgtaccgcgaattcggcatcacgccgcaaagcattgcggaagccgcccgccgggcgattgcgcgcaagagccaatgaccaacaaggaggacgtctcgtggcccgtatcacacttcggcaactgctcgatcatgccgccagccacggttatgccgtgccggcgttcaacatcaacaacatggagcagggcatcgcgatcatgcaggcggcggccgaggtcgatgcgcccgtgatcatgcaggcctcgcgcggcgcgcgcagctatgccggcgacctcatgctttcgcatatgatcgacgcgctggagcgaacctatccggacatcccgctctgcatgcaccaggaccacggcaatgatgaggcgacgtgcgcctcggccatcgcccatggcttcacctcggtgatgatggacggctcgctcaaggccgatgccaaaacggcggcggactacgattacaacgttgcgatcacccgccgcgtcgtcgatctcgcgcactgggtcggcgcgtcagtcgaaggcgagctcggcgtgcttggctcgctcgagcagggcggcggggagcaggaggatgggcacggcgtcgagggcacagtcggtcacgaccagctactgaccgatccggatcaagccgtcgatttcgtgcgcgcgacgaaggtcgatgcactcgcgatcgcgatgggcacctcgcacggtgcctataagttcagccgcaaaccggacggggacatcctcgcgatgcgcgtggtcgaggagatccatcggcgactgccgaatacgcatctggtcatgcacggctcctcctccgtgccgcagccgctccaggacatgttcaaccagttcggcggcgagatgccccagacctggggggtgcctgtcgaggagatcgtccggggcatcaggagcggcgtgcgcaaggtcaatatcgacacggactgccgcctcgcgatgaccgcggtgttccgtaaggtcgcgtccgaggcgcgctccgagttcgatccgcgcaagtttctcaagccggcaatggatgcgatgcgcgagctttgccgcgagcgcttcgagcaattcggcaccgcgggccatgcgagcaggatcaaggtggtcccgatgagcgagatggcgcgtcgatatcgcgccggcgaactcgatccgcgcggcgacgcccgcgagtccgtggcggcctagccaatccgaaagaccagagaaaagagcaggagagagacatgaacgcacatgcaggcacagtccgcggcaaagagcgctatcgatccggcgtgatggaatacaagcgcatgggttattgggagcccgactacacgccaaaggatacggacgtgatcgcgctgtttcgcgtcacgccacaggagggcgtcgatccgatcgaggcatcggctgcggtagccggcgaatcctcgaccgcgacctggacggtggtgtggaccgatcgcctgaccgccgcggagaaatatcgcgccaaatgctatcgcgtcgatccggtcccgggctcgcccggctcgtacttcgcctacatcgcctatgatctcgacctgttcgagccgggctcgatcgccaacctctcggcgtccatcatcggcaacgtgttcgggttcaagccgctcaaggcgttgcggctggaagatatgcgcttccccgtcgcctatgtgaagacgttccaggggcccgcgaccggcatcgtggtcgagcgcgagcgcctcgacaagttcggtcggccgttgctgggggccaccgtgaagccgaagctcggactttccggccgcaactacggccgcgtggtctacgaggcgctgaagggcgggctcgatttcaccaaggacgacgagaacatcaactcgcagcccttcatgcactggcgcgaccgtttcctttactgcatggaggcggtgaaccgcgcgcaggcggcctcaggcgaggtgaaaggcacctacctgaacgtcaccgcgggcacgatggaggacatgtacgagcgcgcggagttcgcgaaagagctcggctcggtcatcgtcatgatcgatctcgtgatcggctacaccgcgatccagtcgatggccagatgggcgcggcgcaatgatatgatcctgcatctgcatcgcgctggccactcgacctatacgcggcagaagagccacggagtgtcatttcgcgtcatcgcgaaatggatgcggcttgcgggcgtcgaccacatccacgccggcacggtggtcggcaagctcgaaggcgatccgaacaccacgcgcggctactacgacgtctgccgcgaggacttcaacccgaccaagctggaacatggcctgttcttcgaccagtcatgggccagcctcaacaagatgatgccggttgcctccggcggcatccatgccgggcagatgcaccagctgctcgatctgctgggtgaggacgtggtgctgcagttcggcggcggcaccatcggtcatcccatgggcattgcggccggggcgaccgccaatcgcgtcgcgctggaagcgatgatcctcgcccgcaatgagggacgcgactatgtccacgaagggccagagatcctcgccaaggcggctcagacctgcacgccgctgaaggccgcgctcgaggtctggaaggacgtcaccttcaactatcaatccaccgacacgccggacttcgtgccgaccgcgctggaaaccgtctgaggagatctgacatgaagatgacccagggctgcttctcgttcctgcccgatctgaccgaccagcagataacaagccaggtgcagtattgcctcgccaacggctgggcggtgaacatcgagttcaccgacgatccgcatccccgcaacacctattgggagatgtgggggctgccgatgttcgatctccaggatgccgcaggtgtgatgatggagctggccgagtgccgaaaggtgtacagcgaccgctacatccgcatcagcggcttcgattccagccatggctgggaatcggtgcggatctccttcctcgtcaaccggccgaagcaggaggccgaattcgaactggtgcgccaggaagtcggtggccgcgccgttcgctacaccacggtgcgcaagccggccgcgcaggccgcaacctgagctgttcacctccgcacggggctctccctgctccgtatccttggcggaccactgcttcgccgcttcccccgcggcgaagctccttacttcgaggagccgatgctcgacgtgcccgatgcaacgacgaccgaacccggcgagacccatttcgatctccgcaaggaggccgaagcggccgggatcacggatacgctgcaacagctcgatcaggaactgatcgggctcaagccggtgaagagccgcgtgcgccagatcgcctcactgctgctgatcgaacgtgtccggcagcgggcgggcctcgcttccgcgccgccgacgctgcacatgtcgttcaccggcaatcccggcaccggcaagaccaccgtggcgctgcgcatggcgaagatcctgcacggacttgggttcgtgcggcgcggccaggtgatctcggtgacacgcgacgatctcgtcggccagtatatcggccacaccgcgccgaagacgaaggagatattgaagaaggcgatgggcggcgtgctgttcattgacgaggcctattacctgcatcgccccgacaatgagcgtgactatgggcaggaggcgatcgagatcctgctccaggtgatggagaaccagcgcgaggacctcgtcgtgattctcgccggctatggcgagcggatgaccagttttttcgcctcgaatcccggcttccgctcgcgcatcgcccaccacatcgaattcccagactatgccggggccgagctgctcgtcatcgccgagctgatgctgaaagagcgcggctatcgcttctcggcagcagcgcgggaagccttcgagaaatacatcgcgctacgccgcacccagccgttcttctccaatgcgcgctcgatccgtaacgcggtcgaccgcattcgcctgcggcaggccgatcgtctggtgtcggatctcgaccgcatgctcgatgtcgccgatctcgaaaccatcgatgccatggacgtgttggcgagccgggtcttcagcggcggcgccgatgcgcggagtgcagagccatgaccggagagatcatcattgctccctcgatcctggctgcggatttctcgcggctcggcgaggagatttcggcaatcgacgcggccggcgccgattggatccattgcgatgtcatggacggacatttcgtaccgaacatcagcttcggtgccaacgtcatcaaggcgatccggccgcatacggagaagatcttcgacgtgcatttgatgatcgcgccgactgatccctatctcgaagcgttcgcgcaagctggagcggatatcatcacggtgcacgccgaggccggcccgcatctggaccgctcgctccaggcgatccgcgcgatcggcaagaaggccggtgtcagcctctgtcccgccacgcccgagagtgcgatcgcctatgcgctcgatcgcgtcgatctggtgctggtgatgacggtcaatccgggattcggcggccagtccttcctcgagccccagcttgaaaagatcgaacggatcaagaccatgattggcgatcggccgatccggctcgaggtcgacggcggtatcacgcccgacaatgccgctgtcgtggcggcggcgggagctgatgtgctggtcgcgggttccgccgtgtttcgcggcaagggcgttgccgagtatggtgcaaacatccaggccattcgcctcgccgctgagaggggccggatcccgaagcggcaagacaatgctgcgcagcggatgcgcgtcagcgatgggggccgatccggtagacccgcgtgaggccgagcgtccgccggcgcgtttggaactttgagccgaatacgcatttcccaggagcgagccgaaatcgggtgcggggcgcagcaaatctttcgcgcaaccgccatcggcctgacgcaaactggggcgataacccccagcaaatgcgagggagggtctcatggagaacgtacgtcgctaccgggcgctggcatccctctgtcgacagcaggcggcctaccggccgctgcagaactgggaactcctcggccaagccgaacatttcgaacatctcgccgacatcgagctcaaggcatatttcgacgcctgcaatgtgtctcaggacgaggacacccccgcagccgcgacatgggaagctcccgtcgcggcgtgatggcgccaagccggcgcggctcagtgggtcatcagtgtcgggaccgtcatggcctccagcatggcacgcgtgacgcccccgagaatgcgctcctgcaaccgggaatggccgtagccacccatcacaaggaggtcgaggctctcatcggccgcgagcgacaggatggtcggctgaatgtcggcgcgcgtcgccgacaggccgacgatgcgggtcgacagaccgcgccggccgagatgtcttgccagaccgcttgctgaagcttcgccggagccggcgtcgggttcgttgatggtgatgaccacgatttctgtggcgcgcgccaggaacggcgctgcgtcgcgcactgctcgggcggcgagacggctgccgtcccagcagatgccgatccggtttgccttgaaggctccacggaaggtgtaaggcaggaagagcaccgggccgcccgcctggaacaggatctcgcttggcacgtcgttgtcgaacgagccttgcgccggatcaggctggagcacgatgctgaggtcgtgcagccgggccatctcgccgagcgattcggctgcgtccgccgggatcgcgccgagcgggtggcaggcgtaggagatgccggcgttcgccgcttcggtcttgaacacggccagcgctgcctcggcccgttccacggcgcgctcgcgttccagctcgaacacggccgccacggccgcgcccccctccatcacgtaggctacactggttgtgacatagcccaccgcgaccgcgtcgagatgggcgttgaggtgcgccgcgagcgagatcgagccctcgattgcgggtcgcatgggacgttcggtgggaatgtggacgagaatatctttgtacatggcgcgcctccggtcgtcatccgatgatcgcagtttttcacggcgcgaaggacccatgttgagctgtatcaaacgggcaggggtgattttcctgccgcgcccgctgcctcattctttgccgagatttaatcggacggacgggaccccgtaaggtggcaacgaccatgttggggtcaaggcgacaccagctcaacatggacatttcgacatgaacgatcgcgtcaattccgacaccaccacgtctcgcaagatcttgcggccgcgccgcctcgcgctgctcggcaccgtggccgcgctgggcgtagccgccctgtcaattgcgccgggcacttcgccgttcggcatgaattccttcattgcgccggctcaggctgcggaggccgcggcgacgccaccgagcttcggcgatctggtcagcaaggtcaaacccgcggttatctccgtgcgggtcaggatcgaccgggacaacgacaagagcgcaatgctgcagcagaaccgtatggactcggacgaggacacgccgttcgaccagttctcgcggcaattcggtttccgctttccgggcggcatgaacggcatgccgcgccagcgtcaccagatgatcaccggtgaagggtccggcttcttcatctccgccgacggctatgcagtgaccaacaaccatgtcgtcgatcacgccgaatccgttcaggtcaccatggacgacggcacgacctacaaggcgaaggtcgtcggcaccgacccgaagaccgatctggcgctgatcaaggtcgatggcaggagggattttccgttcgtcaaattctccgaccagaagccgcgcatcggcgactgggtggtcgcggtcggcaatccctttggtcttggcggcaccgtgaccgccggcatcgtctcggccagcggtcgtgacatcgggaatggtccctatgacgacttcatccagatcgatgcgcccatcaacaagggcaattcaggcggcccggccttcgatatgaacggcaacgtgatcggcgtgaacacggcgatcttctcgccctcgggcggctccgtcggcatcggctttgatattccggcctcgaccgccaagctcgtcgtcgcgcaattgaaggacaagggggcggtcacccgcggttggctcggcgtgcaggtgcaacccgtgacatcggatattgcggacagcctcggcctcaaggaggcgcgcggcgcaatcgtcgacaatccgcaagatggcagcccggcggcgaaggccggcatcgaggccggtgacgtcatcaccgccgtcaacggcaccgcgatcaaggactcccgcgatcttgcccgcaccattgccaccctggcaccgggtacgtcggtgaagctcgaggtgttccgcaagggcgacagcaaaacggtgactttggcgctcggcgagctgccgaacgagcggcaagccaaagaaaatcgcaattccgacgagcgtagggggcagccgaatgccggcacgccgcgcctgggtctcagcctggcaccggctggcgacgtccagggtgcaggtcagagcggtgtcgtcgtcaccgaggtcgatccgcaggggccggcagctcagcggggcattcagaccggcgacgtcatcctcaatgtcggcggcaaggccgttgccagtgtcggcgacgtccgttcggagctggcgcaggccaagtcgtccggcaagcgcagcgtgctgttgcaggtcagaagcgcggaggcgacaagattcgtcgcggttccgctcgcctaagccgagcgcgcaacatcggttagaaaaaaggcggcccttcgggccgcctttcctgttcatcctcagaagtcccgtggacgtccggataacattcttgttagccgcagcgacgcaggtcgtctgaaagagcctcttggctcatcacagttccaattcccgttgcagacggcaatgggcgccgccaaatgtggttgcaatcttggaacttccaacctgccaccgctttgtggaacgggccggtggtacgcagttgatcggtgccgacatggatcgattgaagttctcgctgtggagcacgctgctcgtggcgccattggttctttcaggcggaaacgcgttcgggcgcgacgatggccgttacgcgaattctcccctgaagccctggttcgacagcctgcgcagtcgcctcggtccatgctgctcggacgcggatggtttcgccgttgccgatcccgactgggaatcgcacaacggacgttaccgtgtgcgtctcgacgggcagtggatcgaggtgccggacgacgccgtgatcaccgagccgaaccgggccggccgcaccatggtgtggccggtgaagacggcgttcggggtttcgatccgctgcttcatgccaggcagcatgatgtgaacaggtcagcgcgaccgtgtggaggatttacgcttcgatgatttcctcgaggacttcctggacgacttcttggatgttttcctggacgtattcttggaggtcttcttggcgctcgttcgcttcgatgccttcttcgggaccttcttgcctttcttgcgcgccttcgacagtccgatcgcgatcgcctgtttgcggctcttgacgcggccgccgcgtcctccacggccgctcttcgcggtccccttcttgtagcgccgcatctcgctcgcgacatcgctgcccgagctgcgtgagtagcgtttctttgccttgcgtgccatgcatgttctcccttggccgagaagaacccttcggtacaggcatggttccgggagcgcgtgtgcaacactccggaaggcgcgatgcagtctagaaggaattcgccagctcgatctccgcttccaacgctcggatgcgctgtgcggcctcgctgaaggagagatcacgcgaatactgagcaggctgataagcttcctcgctcagccgtttcagcttgagcccctgcgctcgcgtcatctgctcgctcaggaaaacccgcgcgtcgtatttaccttgcaccggcatctgacttctccgttccgaaatcgtgacttgactatatgttcctattttgttctaacaagccatggacaacagaattagcgaaattcgacgcaaaatcagagccttgaggcttgagatggccgacgtcgaggtgtcggtgcgcgacctcgtcgagcgcgatcgcgactgcactgaaaaggccctggcgcagatggatttgcgccggaggatcaacctcctgatcggggaatggaaggcggctggtggcaccgacgttctgcccgacattcgggaccgggtgcgcggtcgcgcatgacgaccgctggtgatcccgcacgcgtgatcggacatgcgggagaatcacggctaaattgacgcaggcaaccctcgttcgcgcacaaaccctaaacgggtcgtcgcatagtgcgtcacgcacccttcatggttccttgtcctctgtaaggatgaacacgacgcccgtaagggtggcgccgatcgcgaacgtcatcaccaaggtgagagcgacgaccacgatcgcctggcttccgccgttgtttagcaagttggccacggccgggttggacaggacaagcgtgagggtgaaggtgaggccgagggctgcgcccatcattgtatgcgtcaacagcttgatgaggccggtggctgagatcagctgatgccttctgcgcatggaccgcatcccgaattgtggcatgcaaaagccagcgtgattaccaggttcctttcgagtggaggaatcgttgtcgccggctttcatgcgacgttcatgccgggcctgcgaggatggagcccagcaaaacgggaacatcaatatgggtaaggtagtctttctctaccgctcgctggcctatcgcaacgcggccgcggacatcctgcgcaaggcgcgcaagctcccgaacggggcggagcgaagcgcggcacgccgctacgccagggcattgcgcgatctcgcgcgaacggaagcctggctggaagggcgggtcgcacgcgaaccgcggacggtccggcgcatgacgagcgctgcgtccggttaaccggacgcgcgttgcaattcggcggcgccggcggcgtcgaacttgccgggtgctgtcgtcgccgaggccttgcgcgtcaacgggacctccaggcggcacaacaggccctcggcgcgccaatcgaactgcgcctgtccgccaagctgcgactcgacgctcgcaagcaggctccgcgtgccgaagccgcgggatttcggtgtcatgaccaacggaccgccggattcctcccagctcagggtgaggagttcgtcctcaatctgccaggcgatcgaaagccgccccgatcgcgtggagagcgcgccatacttcgccgagttggtgaagagctcgtgcagcgcgagcgcaagtgtctgcgccgttgtcggcagcagctggacttcgggcccggccaatctgatctggccgccgagcgagtagggcgcaagctcctcgtcgatcagcttagagagttcggcaccctgccagctcgacagcgacaggatggtgtgcacgcgcgccagcgcattgatgcgtccctcgacggcgttgacataggccttgacctcgtcggcccgggtgagacgcacgatcgactgcgccagcgccagcgcattcttagcgcgatgatcaacttcccgcgccagcagattctgccgctcctcggcgcgcttgcgttcggtgatgtcgacggtgacgccgctgacgcgcaccacgcgcccgctctcgtcgaccgttgcagccgccgtgccgacgcaccagcgaacctcgccgtcgggccgcacgatgcggaactctgtctcataggcacgcgtgcctttgctgaattcggcgatcgccctgcgcaactgatcgacgtcatcgggatgcaacagcgcctgaacattcgccgggttgacctcgaagctctccgcgtcgacgccaaagatgcggtactgcccctcatcccacatccaatcgccgctgacccagtcccagtcccaggaccccatcttgccggcagcgatcgccatgctgcgccgctgctcgctttcgcgcagcttcgcggtggaacgctccagttccgcggtgcgagcgcggacgcggtcttcgagatcgtggttcagccgttcgagttcgcgggtcttgcggtaaagctcggcaaacacctttatcttggcgcgcagcacctccggcacgaccggaaccggcacataatcgaccgcgcccatctcgtagccgcgcaatcggtccatgtcgctgacctggatggctgagatgaagatcatcgcggtcttctggaaccgcggatgctcgcggatcatggcggcgagctcgaagccgtcgagttcgggcatgcagacgtcgaccaagatcaccgcgatctcagtcttgagcagcacctcgagcgcctcgcgtcccgacgaggcgatcacgaggttctcgccgagatccttcaggatcacctcataggcaagcagcttggcgggctgatcgtcgacgagaaggatattgaccttgtcctggtccatacggggcccaactcagcgatgcagccacatgcggatcgcaagcagcaattggtcggtgttgaccggcttggcgaggtaatcggacgcgccggcttcgaggcacttctcacggtcgcccttcatcgccttggcggtcaaggcgatgatcggaagacgggcgaaggccgggttctcgcggatcacgccgatggtctgatagccatccatctgcggcatcatgatgtccatcagcacgatcgcgatctccggattggattcgaccagtgtcaccgcctcgctgccggtcgtcgccgtcagcactttcatgccacggcgttcgagcacactcgagagggcgaagatgttgcgggcgtcgtcgtcgacgagcagggcggtcttgccgatcaggtcctcgtcggaactattcagcttctccagcatacgctgcttctcgaccggcaattccgtgatcacgcggtgcaggaacagcgcggtctcgtcgagcaggcgctcgggcgattccacccccttgaccacgatgctgcgcgccatggtgtgcagttcggcgtcctcctctgcggaaagctcgcgtccggtgaacaccacgaccgggatgttcgacagtgtctcgtcgttgcggatctgatccagcacctcgaaaccactcatgtccggcagcctgaggtcgagcaccacgcagtcgcaggggtgcatgcggagcgtcgaaagcgcgccagcgccggtgtccgtcgtcacgatctcgatatcgtcatgatgcagcagctcgcggatcgaaagctgctcggcctcgttgtcctcgacgatcagcagccgcttgcgccgcggccgcgcatactccttgatctgcgtcagcgcggcagagatgccttcgggcgtcgtcggcttgttgacgaacgagaatgcgccgcgcgccagcgcatgctggcggtcctcgtcgagcgtgatgatctgcaccgggatgtggcgggtgagcggattgtgcttgagctggctcagcacggtccagccgagcatatcaggcaggaacacgtcgagggagacggcggtcggctggtactgcttggcgagctccagcgcttccccgccgcgggccgcgaccaggacccggaagcctttgtcgcgggccagatccaccagcacccgggcgtaatgcgggtcatcctcgacgatcaggaggatgctgtcgccaggctcgaggttcaaccggtcgtcgggaagctgctcgatcacgcgctgctcgggcgcgggcggttgcagagccggagtctggctgtattgctgcggcgccggcgcggaccgcggcgcaagggtcgggccggaatatttcagcggcagatatagcgtgaaggacgagcccttgccaggcgtgctgcgcagatggatctcgccgccgagcaggctcgcgagctcgcggctgatcgcgagcccaagtccggtgccgccgtactttcggctcgtgcctgcatccgcctgctggaaggcctcgaagatcagtttctgcttctccaacgggattccgatgccggtatcggacacttcgaatgcgatcacggccggcgcggagttcagcaccggatgatccgttccccagccgccgatcgcgccggcgaccttgaggcgcacctcgccttcggcggtgaacttgaaggcgttcgagagcaggttcttcaggacctgctgcaggcgcttggagtcggtgacgatgctgcgtggcaggttcggatcgacgtcgatcttgaacgacaggttgcggttgtccgcctcgtgccggaacggccggcccacggtctccagcaggttcgcggtgagaatttcctcggcgtcgaccgtcaccgtgccggactcgatcttggagagatcgagaatgtcgctgataagattgagcaggtcggtgcccgcgccgtggatggtgcgggcgaattcgacctgcttggccgagaggttgccgtccgggttgtctgtgagctgctgacccaggatcaggatcgaattcagcggcgtacggagctcgtggctcatattggcgaggaattcggacttgtacttcgaggtcagagcgagctcggtggccttttcctcaagcgcgcggcgagcctgctcgatttcctgattcttgcgctcgacctcgacgttacgctcggccagctgctgcgccttctgctcgagctggtcgttggtctgctgcagctcgcgctgttgggtctgcagctcgccggcgagctgttgcgactgtttgagcaggccttcggtctgcatcgtcgcctcgatcgaattgagcacgattccgatggagtcggtgagctgctccaggaacgtcatctgcgaggtcgtgaaggagaccagcgaggcgagttcgatcacggccttgacctggccttcgaacaggaccggcagcaccacgaggttcttcggcgcgacgcggaacagcgccgagttgatcggcaccacgtcggccggaatgtcggagacgacgcgcggccgcttgtcgagcgcgcattggccgatcaggccttcgccgaactgcagcacgggttgatagggatagacgccgtcgctggcataagaggcgagcaacagcagctgcgggtcgttctcgttctctacctggtagatcacgccggtatgggcgttcaccagcggcgacaattcggtgagcagcatccggccgaccgtggtgagatcgcgctgtccctggagcatgttggtgaacttggcgaggttggtcttcagccagtcctgctcggtgttcacatccgtcgtcagacggaggttcgtgatcatcgtgttgatgttgtccttcagctccgcgacttcgccgcgggcgtcgacctggatcgatcgcgtcaggtcgccctttgtcaccgcggtcgcgacctcggcgatcgcgcgcacctgcgaggtgaggttggcagccagaagattcacgttgccggtgaggtccttccaggtgccggcagcgcccggcacgttggcctggccgccgagccgaccttcgacgccgacctcgcgcgccaccgacgttacctggtcggcgaaggtcgccagcgtctcggtcatgttgttgatggtgtcggcgagagcggcgacctcgccgcgcgatttcatcgtcaagttctgcttgagatcgccgttggcgaccgcggtcaccaccttgacgatgccgcgcacctgctcggtcaggttcgcggccatgaggttcaccgtgtcggtgaggtccttccatgtgccggcaaccccgggcacctgggcctggccaccgagcttgccctcggtgcctacctcgcgcgccacgcgcgtgacttcgccggcaaagccgttgagctggtccaccatggtgttgatggtgttcttgagctcgaggatttcgcctttcacgtcgacggtgatcttgcgggagaggtcgccgcgcgcaaccgccgtggtgacttcggcgatgttgcggacctgcgtcgtcaggttcgcggccaggaggttgacgttgtcggtgagatccttccacgtgccaccgacgccgggcacgacggcctgaccgccgagccggccttcggtgccgacctcgcgcgcgacgcgcgtcacctcgccggcgaaccggttgagctggtcgaccatcgtgttcagcgtatccttgagctgaaggatctcgccgcgcacatccacggtgatcttgcgggagaggtcgccgccagcgatcgcagtcgcgacttccgcgatgttgcggacctgggccgtgaggttgcccgccatcgagttcacggagtcggtgagatccttccaggtgccggcaacgccgggcacgttggcctggccgccgaggcgtccttcggtgccgacctcgcgcgcgacgcgcgtcacttcggcggcgaaggagcggagctgctcgaccatggtgttcagggtgtccttcaagagaaggatctcgccgcgcacgtcgaccgtgatcttcttcgaaaggtcgccgccggcaatggcggttgcgacctcggcgatgttgcggacctgggccgtcagattcgaagccatgaagttgacgttgtcggtgaggtccttccaggtgccggcgacgccgggcacttcggcctgtccgccgagcttaccttcggtaccgacctcgcgcgcgacgcgcgtgacttcgnnnnnnnnnnccggcctggccgccaagcttgccgtcggtgccgacctcgcgcgcgacgcgcgtgacctcgccggcgaaggcgttgagctggtcgaccatggtgttgagcgtttccttcagctgaaggatttcgcccgacacgttcacagtgatcttcttggacaggtcgcccttcgccacggcggtcgcgacctctgcgatgttgcggacctgcccggtcaggttcgaggccatcgaattgacgctgtcggtcaagtctttccacgtgccgccgacgccgcgcaccacggcctggccgccgagcttgccttcggtgccgacctcgcgcnnnnnnnnnncttcgagaggtcgccgccggcgaccgccgtcgtcacctccgcgatgttgcgcacctgcgcggtcaggttggaagccatcgagttgacgctctcggtcaggtctttccaggtgccggcaacgccgagcacgttggcctgaccgcccagccgcccctcggtgccgacttcgcgcgcgacccgcgtgacttcgccggcgaaggcgttgagctggtcgaccatggtgttgagcgtctccttcagctgaaggatctcgcccgagacgttcaccgtgatcttcttcgagaggtcgccgctcgcgatggcggtagcgacgtcggcaatgttgcgaacctgcgcggtcaggttcgaggccatgaagttgacgttgtcggtgagatccttccatgtgccggccacgccgggcacctgggcctggccaccgagcttgnnnnnnnnnngcgcgagaggtcgccgcgcgccacggccgtggtgacgttcgcgatatttcgtacctgcgcggtcaaattgccgcacatcgcgttgacggagtcggtcaaatccttccaggtgccggccacgcccggcacgatcgcctggccgccgagcttgccgtcggtgccgacctcgcgcgccacgcgcgtcacttccgaggcgaaggagcggagctggtccaccatcgtgttgatggcttccttgagctggaggatctcgccgcggacgtcgaccgtgatcttcttggagaggtcgccattggcgaccgcgatcgtcacctccgcgatgttgcgaacctggttggtcaggttgttcgccatcgagttgacgctttcagtgaggtccttccagacgccggtcacctcgggcacctgggcttggccgccgagcttgccctcggtgccgacctcgcgcgcgacgcgcgtcacctcggaggtgaacacgccgagctgcttgatcatggtgttgacgatgttcgccgactgcaggaattcgccgcgcagcggccgaccgtcgacgtcgagcttgacggtctggagcaggtcgccttgcgccaccgccgcgaccgcacgcgtaacctcgcgggtcggccacaacaaatcgtcgatcagcgtgttgacggagccttccatgtcggcccaggagcccgaggcgaggccgaacttcacgcgttgccgggtcttgccctcgcggcccaccacctggccgaccagctcgagctgctgtgccatgcgctgattggccgcgatgatctcattaaaagtgtcggcgatcttgccgtcgatgccaagatagtcaccgctcatccgcactgagaaatcgccactgcgcattgcctgcaatgcaagcagcaattcagcccgggaatcctgctccgacgaaccgttgtttttcggttttgggccgcgacgaccggagcgtgatgcacttccgggatcgaggtcgctcatactgattcccccgcaggcgtcgcccgaatcctaggcgtggcgcgtttggtcaaaatagagcgtcagccaaattcgaaatcaagcgccaacggtgcggcgcgggaatggaacctgctttgctcagcccgatccaactaacgatgatcagccgaattggttccgcccaaaatcggaagaaatgccatcgggctcccgcgctctgctctccgtacctggcgtccggctcgcggaacggagccacgagcccgactgttagcccgtgaagagaggagaacgaacatgaaagcaggactccccgctatggctatgatggtgttcgccgccggttcggccttggcacagggcggcggccccagcggccgtggggccgtgaccggcgaccccgccgcgagctccgccaatccccgggcggataccccaaccaccggcacggcgacccgatcaaacccgagcggcagcgggacctcgtcttcaggtggtaaggacgacaatggcgatgccggcagggacaagatgttggagggcgaccgcaccgcgcaaccgcagcgacatccgaacgacaagtagaggcggcgcctacctgtccgccatggtacgctcggcgtccctggcctgcacgcgcaaaatcgggagctgctcgcgcgcaaacgccgcgagcgctgcatggtcgggcgccttcagataacgctcgagcagaatgatgatcgactcgtattcgggaatctgcgcggcatagaagcttctgacgtaagtcggaccatccgacatttcgggttcgacgagactagcagtcggcgactctaccttgccgacgtgcagttctgcgccaatcgcctcctggacgcctttcagtctcttgtcgcgcttgaccgcttcctcggcgcgcagggcggccaggttcttgacctccgcattgcccttgaggtcggtgttctcaagaagaccctgttgaaatcggctgaagctgtagagcccgctgatgacttcgatcgcggttggtggccgatcgccaggctttcgctcgccggtgctctcggcaagagtcgcagtgtggatgaatgccaggataatcgcggcaaggactcgcatcgatatcaatgacggaatgcgtacgaagttccccaggttacgatccggtgagtgggttgcgacgcgagagttccgcccttacgtgttgtgtatgaaacagtctgacatcttcagagacaacgccgacaattgtcttcagcttgccgagcgagcggacggacaacctgcccataagcgctactcgcgcatggccgatgcctgggcggcgctcgccaacgagcaggattggctcgatggcgaaatcccgcccgttccggcccacgctcctgctccgaaccgggatatgtagatccgctgtgagaccgctcacagaggacaagcaacagatccgggatcattcaggagtattcgatcgcctcggtttccggttgcagaaggaggtttggcgatggctccacgtctggtgcttctttccctcatgctcgcctttggcgtctcagtcgcgttcgccactgtaacgacggtgcggcaggtgcatctcgaaaacgcatctggcgaggaggtgcatccggtgcgaagttagcggtggcggaacattcctggccgtattgcgtaggcgctccgagacatcaggagaagcgagagcccaccatggcccattccgatcaaggtatcgtcaaggacaagcgcggggaggaacagccgcgcgacaaggagcgtgcacaatctgtgcacaagacggatccgaaaggttcgccctcgcgcgaagcgacgcgcgatcccaagctaagcgacgacagcaagacgccgggctccggcgcaatgccggacggctcgagcgatgcgacaggctagatttcgcacgggaaccaattcccgcgcgaggagtcgaaggattgcttccggttgtcatgcccccggtgcgccggaagcaatctccaaggacggccctggcacccaccgtgccagggccgtttgcctggcagagggcgtccgttgcggtcagtccgctgcgtcttccggatctctgtgggtatgtccgtctggtccgcggcccagcacgccgaagttgcttgacttcacgccggcgctggcatcgacgcccacagccgcaagtccgaggttgagcagttcgcggacggcggccgcccgcgtcggcatgcggtgcctgaaccggaaatcatcaatagcggccaattcttccggcgagagcatgacctgaaggcgctcggcccgtacgtcgttcatggtgatcacgcaatttgagtaagttgagtagattactcaacctgccaacttgggaagagttccatgcgtatcgtcgcacccggcattgaagacggattccgaaacaagcgattgtaggcagtcggaggcgcaacctccgacgggcgcaagctgcccgagccgacaggccgacaaggcggcaaggccaatgctgcccagcagttccggcgctgacattcgtcggctgcggcgtgactagggttgcccggatccgccagcggagccgtacacctgacccgtcgcatagctggcgtccgccgcggcaagctgcacgtagatcgaggccagctcgaccggttggccgggacggcccagcggggtcatgccgccgaatttctcgagcttctccatggtagcgccgccggagacctggagcggcgtccagatcggccccggcgcaacgccattgacgcggatgcccttggaggcgagctgcttcgccagcgacttcacgtagttcatcgtcgccgccttggtctgcgcataatcgtagaggtccggtgagggatcataagcctgctccgacgtcgtgccgatgatgcaggagccaggcttgaggtgcggcagtgccgctttgatgatccagaacggcgcgtagatattcgtcttcatggttgcatcgaaatcctctgacgagacgtcgaggatggaagcgcgcgcttgttgtcgcgcggcgttgcacacgacgatgtcgatcccgccgaggccctgcacggcctggtcgaccaattgcttgcagaaggcttcgtctgtcaggtcgccggggatggcgagcccggtgcgccgttcctttttgatcagtgcgatcacctcctgcgcatccggttcttctgcggacagatagttgatggcgacatcggcaccttcgcgcgcataggcgatcgcggcagcgcggcccatgccggaatcgccgccggtgatcaaggccttgcggccggcgagccggccggagcccttgtaggtggtctcgccatgatccggccgcggctccatcttgccggcgagacccggccagggctgcgtctgcttcttgaacggcggctttggaaagcggcttaccggatcgatcaaggcctgctcggacatgggggtgtttcctttcgctgtcgatgccagcgaagccgccgcgagcgttgcgctcgcggcgtggacgacatgccggcgggacaaggaagttttgctggagttcgacatcatgctctccgcgaggatcgagactcaatgcgcggagacggtcgtcgttgctagagtggggacgccgggtgtaccggcgtccttcagcaatgcgtgacttgggctgacgctacctggactgaggctatttggactgaccgacgctcggcgccttgccgagctccttggccatctcgagatggtgcttgagcgcaggcagggtcttgcccgcccagcccttcagcgcggcattgtcgccaccgttggcgtagcgctcgaacagggagacggcgtcctcatgggcgctgacctggtaggaatcgtagtccgagctgaagtccttgcccgtcgcgttcttgagcttgtcgagcttgctctggtgcgcgctgtcgagcgtggtcggcagggttgcctgtaccttgccatcgctgacgaggcccttgagttcggtgctggtcttggtgtgatcagtcaccatctgcttcgcgaagctcttctcctgcgcgttgcccttctgctcggcgagcttgctcgactcgatctcgaacatgtcgctgatggccacctgcttgacgaaatcgggggtgcttggcgcgacgcccagcgcggagtttacgccggtcttctcacccagcgattgggcaagtgctggccccgcaagaatcatgcaggcaagggcgatgatagtgcgtttcatgatagatcccttcgatgagtcgcgcggcgcctgccggcgacgtttgcgccgaccaacacgcggccggggccgaggttccaaaccggtcagtcggtcggcttcctgccgcttcgggggttgatcggatcagttgcctttcgccggagtcgttcgggaaggaatggctcggtcggtgtgggggtcgcgtcggcgcggacgtcggcatgatgctgcgcccgctcatgtggagtgcgattgtcgttaacctggcgcttgacgtccaagcccccgaccggatcgttcacgccgtgctggatatcgcggaaatcactcatggttcacctcattgctttccgggcaggatcgactcgaggacctgccgcgccgcgcccttgatcatcgcgctttcgttcggatcgcccttcagcacggcgagcgaaaaattcttcgcctgctgcagggtgatgtgcggcggcagcggcggaacctcaggatcggtcttcacttccagcacgacgggcatgtcgctcgccagagcctggtcccaggccgagccgatctgctgcgggtcgtcaacgaagatgccgcgcaggccgaccagctccgcgaagcgggagtaggagacatccgggatgcgctgcgaggcctcgaatttcggatctccgttgatgatgcgctgctcccaggtgacctggttcaagtcttcgttgttgaagacgcaaacgatgaagcgcgggtcccgccacgagcgccagtacttcgcagccgtgatcagctcggccatgttgttcatctgcatggcaccgtcgccgaccagcgcgatcaccggccgttccgggtgggcgtatttggccgcgagtgcgtaaggcactgcggcgcccatcgaagcgagcccaccggagagcgatgccgtcatgccgcgccgcatctttagatcgcgcgcgaaccagttggcgcaggagccggaatcgctggtgatgatggcgcggtcgggtaggcgcggggacagttcccaggtgacgagctgcggattgacgggcgtcgcaggctgatgcgcgcggtcgtcgagggtcgtccaccatttcgcgacgtcgttctcgatccgttggcgccaggccccgtcgctcttgggctcgagccgcggcaacaatgcgcgcagcgtttcggcggcgtccccgaccaggccgacctccatgggaaagcggatcgacatcatgctggcgtcgatgtcgatctgcacgccccgcgcgctgccttcctttggcaggaactcggcgtagggaaaggccgagcccaccaccagcagcgtgtcgcactccatcatcatgtcgtagctgggctcggtacccagcaggccgatcgagccggtgacccatggcagatcgtcgggcagcgcggccttgccgagcagcgccttggcgcagccggccgacagccgatcggccaccgcgatgacttcgtcggtggcgccaagcgcgcctgcacccacgagcatcgcaactttcttgccgccgttgaggatatccgccgcgcggtcgagatcggcctcgcggggcatgacgctaggcgcgctgtagccgataccggaatgcagcgttccgtgtgcacggggcggatcctcgtaaggctcttcctgaaggtcgttgggcagaatgatcacggtcggggcccgccgcgccagcgcaatccgcaccgcacgatcgatcaggtgtcgcacttgtgcaggtgaggatgcctgcatgacataggcgccggcgacgtccttgaacatcgagagaagatcgatctcctgctgatagtgtccgccgagggcgttgcgcgattgctggccgactattgcgagcaccggctggtgatcgagcagcgcgtcatacagcccggtgacgagatgcgaggcgccgggaccggatgtcgcgatgcagacaccgatctcccccgagaatttggcgtaagcggtcgccatgaatgccgccatctcctcgtgacgcgcctgcacaaaattgagcttgccgtccgcccggttcatcgcgccgaacacgccgttgatgccgtttccgggatagccaaagatgtgtcgcacgccccactgatgcaggcgttgaacgatgaagtccgagacggtctgagacattgcggcggctctcggtcggcggcgtgtgagacccagagaaccgctcgcttggcgcgatgttcctgacctgctcagtggacgtgcgccggaacgatcgctcgccgatccggttggttttgcacgtggctgagtggagaattgcgatgttgaaccaagacgagctagatcgcagcgagacaggacgtttgatcggcagcgacaaggtcgaaggaacgtcggtctacggcgccgatcgcaaccggatcggttcgatcgaacgcgtgatgatcgacaagatcaccggcaaggtgtcttatgccgtgctgagcttcggggggttcctgggaatgggcaacgatcactacccattgccctggcaatcgctcaaatacgatacagagcttggcggctatattaccgcgatcaccgccaaggatctggaaagcgccccaaaatatggcgagaaggccgaatggaactggggcgatgacgctgccgtgcgaggtatcaacacctactacggggtgcccttcgcgtagcacgaccccgcagccggacggccaggttcacacagccggaccgatagctgaccaccgggatccgcatccggtcgcaaccgtggcgggctgacggcgctcccgtggcgtggccatgctgcgcctgatggactggagggcgcgcgatccctcaacggcctgcttccctccgcgccggccccgcatgcacatgcacctgcttcgcgtgaagcgcctcgccgcattccgaacacaccatcaccggatcgaacagcttgccgcaggtcttgtgctcgtgcagcagcggacggccacgctcgtcgcccatatgagcgtcgccccaatgcaccatcgccatgatgatcgggtagaggtcgagccctttctgcgtgaggatgtattcgtagcgcttcggcgcgtcggaatagggtacgcggcgcaggatgccgaagcggacaagcttcttgagtcgctccgagagcaggtgccgggtgatctggagcgaggactggaacgcttcgaagcgccgcacgcgcaagaagcactcgcgcaggatcagcagggtccagcggtccccgatcacggcgacggtgcgggcgagtgagcaggtttcctcttccagcgtgtcccatctcacgagcggtctccacttgcagtgagtctaaacttgcagtcagtctaaaaatggaactgcttgaacagccatcgcaattctgtttggaagctaccagcgctcccaccagtttgacagttctattttagaactatagcctccggcacactgcgcgcggcgcgcccgcggcgcgactcatcgggggaggcgaccttgcccaagcgaaacgcgactgccgccgtgatcggggccggcgacttcatcggctccgagatcgccaagaaattcgccgccgagggcttctcgatctatgcggggcgtcgcaacggcgacaagctcgcgccgctggtcaaggcgatcgaagctgccggcggtgaaatccacgcgcgctcgcttgatgcgcgaaaggaggaggagatcaccgcgttccttaacgacgccgatcagcgcgcaccgctggacgtctgcatcttcaacgtcggcgccaacgtcaattttccaatcctcgacaccaccgagcgcgttttccggaaagtctgggagatggcctgctattccggcttcctggcaggacgcgaggcggcacggctgatgctgccgcgcggcggcggcaatatcttcttcaccggcgccaccgcctccttgcgcggcggcagcggctttgccgcctttgcgagcgccaagttcgggcttcgcgcggtggcgcaagcgatggcgcgcgaactcgggccgaaaaacattcacgtcgcccatctcatcatcgattctggggtcgacaccgaatgggtgcgccagcgccggctcgaagcgctcgggcccaatgcgctcgataatcccgacctgctaatgccgccctcgtccgttgcagacgcctattggcagctctaccagcagccgaagagtgcctggaccttcgagatggagattcgtccgttcggagagaaatggtgaccgcggtggataactgcgattagactgatcctaacgccaggtaaaatccagggaggtacttaagtgaagaccgcgatcaccgaactgttcggcatcgagcacccgatcatccagggcggcatgcatttcgtcggctttgccgagttggccgccgccgtctccaatgccggcgggctcggcatcatcaccggtctaacccagaagacgccggaattgctcgcgaaggagatcgcacgctgccgcgacatgaccgacaagccgttcggcgtgaacctcaccttcctgccgaccttctcggcgccgccctatcccgaatacatcgcggccatcgtggaaggtggcatcaaggcggtcgaaaccgcaggccgcagtcctgaacaatacatgccggcgctaaaggcggccggcatcaaggtcatccacaagtgcacctcggtgcggcactcgctgaaggcggagcgcatcggctgcgacgccgtcagcgtcgatggcttcgagtgcggcggccatcccggcgaggacgacattcccaacatgatcctgctgccgcgcgcggcggaagagttgaagatcccgttcgtcgcctccggcggcatggccgacggacgcagcctggtcgcggccctgtcgctgggtgccgccgggatgaacatgggcacacgcttcatcgccaccaaggaagcgccggtgcatcagaacgtgaagaatgcgctcgtcgcggcgaccgagctcgacactcggctgatcatgcggagcttgcgcaataccgagcgcgtcatgaagaacgccaacgtcgaccgcctcatcgagatcgagcgcgagaagggcgacaagctcacgatcgacgacatccacgaccaggttgcgggtgtctatcccaagatcatgctggacgggcagatggacgccggcgcatggagctgcggcatggtcgccggcctgatccacgatatcccatcctgcaaggaactcatcgatcgaatcatgagcgaggcggaaaccatcatccgcagccgcctgatggggtttctggacgggacgggagcggcgcgaaaggtcgcctgacaccgccaacttcttaaccacggccgcatctggccgctggaattgcgcgcgacgcctcctaaataagggtaaattaccctattaacaacagtttcaggaggcgtccgtggtcctgaaaagcgttcttgctgcaattgcttttgccctcgtgatcacagggggcggcatcgcgcgcgctgacggctacaagcctgaggaatatctcggcctcgatctctccaaggccgtgctttcgccgaaacggctcgggccggagacccgcttcgcgccggtcgcgctagaagcgcgcgacggcaacgaagcacaggctcgcgctgagcccgtcggcgtgccgaagaaggttgcggccgagcgcgtccgtgtggccgagccgaaggccacccaagccaggggcggacaggcacgcggcgcggcccgggcgaagcttgcacggcgccacggcaatccgctcgacgcgcaggcaatggatacccggatccagacctggccctgccgctccggcggcatctgcaactggaagcgctaggcggcgacggccaagccgtcatccccgcgtcgtaaaaacgtaggcgcggagtcaagaaaccgtaagctggaagtcaagcagcgcaggcaccttccgtcggaattcgacgaaggtcttctgaatggcatcacctcgcgcctcgcgcgcctggacccggcggcagttcctggtccgctccgccttcagcctccctatcgcctcgcttgcgacgccttcgatcagccgcgctgctgatcgcccgcagatcctgggcggcatccagtccggcgatgtctctgacggctccgctgtgatctgggggcgtgccggccggccggcgcggatgcaggtggaatggtcgaccgtcgagagcttcaagtcgatcatcgcgtcagcctccggtgatgcgctgcccgacgctgatttcacctcaaagctgctgctgacggatttgccaccgggccaggatatcttctaccgcctgcgcttcgacgacattgccacgggtctcggcggtgaaagccgcatcggacacttccgcaccgcgccggcagctagccagtcgatctcgttcctgtggtccggcgataccgcggggcagggctggggcatagatgcctcgcgcggcggctatcgcagctatcgcaccatgctcgacaatcgcccggatttcttcgtccactccggcgaccacatctacgcggactgcgcaattcttcccgaacaaaagctgccgaacggcgagatctggcgcaacatcgtcaccgaggagaaatcggaagtcgcgcaaacgctggcgcagtttcgtggcaactacaaatacaaccatctcgacgagcatttccgcgccttccatgcggaggtaccgatgttcgcacaatgggatgatcacgaggtcaccaacgactggtcgccgactggcagctacgacggcaccggctatgacgacgacggcaccccccggctggtcgcgcgagctcgccgcgccttcttcgacttcatgccgatccgcgacatcggctcgcggcagggccgggtctaccgcaagatcgcctacggcccgctgctggatgtgttcatcatcgacatgcgcagctatcgcgatgacacctggaacaagggagatgaccatcgcggctggatcctcggcgccgagcagctggcgtggctgaagcgggagctctcagcttcgggcgcgacctggagagtgatcgcagccgatctgccgatcgggctgatcagcttggacgcggtcgcgctcggcgacgggccgcccgaccggcgtgagcacgagatcgccgatctgctatcctccatcaaacgtgccggaatccgcaacatcgtctggcttaccgccgacatgcactacactgccgcgcactattacgatccgaacaaggcgcaatttcaggatttcgagccgttctgggagttcgtctccggtccgcttcatgccggcagttggagtcctggcgagctcgacgacacgtttggcccggtcccgatgtaccagcatggctgcagcgctgagcagggcgagaacctcgcgccgtgtttcggcctgcagtttttcggacgggtcgacatcgatggaacgaccggggtgatgacggtcacccttaaagacgtcgacaaccgcgacctctggtcggtcgaccttctgccgcaactgcagatgcgccccgctgtggtggcgaaacattcctgagtatcggcggctcgaagcaatacggtctcgctgcgattccgagagccctgcgccgcgggtgccaaatgcctcaaccgactttgcgcgaggctggggctggcctcggacaggcaagaaacggccccgtgaggggccatttccattgcgcatcagtggtggtgatggtggcgccggtggctgcgcttgatcacgaccactcggtcaccgcgatggtggcggtgccaactgcgatcatgttgatgcatgcggtattcggcgcgagcgccgtaggggccgtgatggtgatgatgcccgcgcttgatcaccacggtctctgcgcttgccagcgttggccccgcaacgacgagcatacccagagctgcagccacataaccaagctttttcatgaagtcctcctccaaacgaatgcacatctaaccgcacctgcatgcgaacgttccggaggaacgggaggagaattctgaacggatgttcagctgagcgtgatggtttccgacaggaatgcaaggtaaggatcaatcgcagcgttgctgcaccggtgtcggcgcgccgctcgcaacgtatttgccgtccttgattgtgtattcgccgcgctcgttgcgattgtatatcgcgcgcaggctgccgtctttcagcaagaggagtccgaactcgcgcgtctgacgcagcgagggaaagaacaccatcaccttgagcagaccctcgccgttgaccgtggctgacaccacctcgttctcgtccttggcgtcgccgaaattgcgccggtacatcacccggccatccttcctgatctcgtaggtcagcagcgcgcccttttcgcgatccggccggacgccgcaatcgacggcccacgagccgagcaggccccattgcttgagggtcgcggccagcgtctcggcgccggccatggaggtgaatgcagcccacagcaccgcagccgcaatcccgcggcccaaattgcgcatcatgtcccgaaaaaccctgcctcgaagaattccaaattgtagcatcgcgcccgcggccgttccacggcagccgccgatcgctcacgaatttgatccgcgtcaatgagacagggcgttcgaagagtaggatggcctttccgaaggcgaacgtggaaagagcaatgctgaatcaagtcatggatttcgcgggcgaagtgctgccggggagctgcgccgtaccgccttattccgaggccgcgtttctgaccgagttgggcgatcgcttacggtcctcccgcatgcgctgcgacctgtcccgccgcgagttggcccgccgctccgggatttcggagcgctatatcgcccagatcgaggccggcaagggcaatgtctcgatcgtgctgttgttgcggctcgcttccgccatccacggcagtcaaccacaggcctgacgcttcaaggtgaccgccatggggcagctcgtactcgcggcaaaggtcacccacgttccatcactgatgctgtcggagacccccggcagcccgctccgagcggcccgtgagccggcagtctcctccttgcgcgaactcggccggcgggcaaaagagcgcggcgtgagctgcttcgtggtgttcgacacccattggctctccaatttcggctatcacatcaacgccaatgcgcggcatcgtggctcgttcacgagccacgaggcgccgcagatgatccaggatctgcgctacgatctgccgggtgatacgaatctggctgaagctatcgcgaacagggccggggatgcgggtctcaacgtgatcgcccaccaggtgcccagcctcggcctcgaatacggcaccatcgtgccgatgcactacatgaaccccgacggcttcgcgaaggtggtctcggtcgcctcgccgctgtttacctcgttcgaggaaagccggatactcggtgaagccacccgccgcgccatcgacgcatcggatgaacgggtcgccgttctcgccagcgggtcgctctcgcatcggctctggccgaacaagaaactgggccccgaagcgtggacgtcggtcaccagcgagttcaatcgccaagtggacctgcgcgtgctcgagctctggcagagcagccgctatcgcgaattcctcgatatgcttccggactatgccaccaagtgcaacggcgagggcggcatggccgacaccatcatgctgttcgcggcgctcggctggcatgactaccacggcaccgccgagcagctctgcgactattttccctcgtccggctccggtcaggtcaacgttgagtttcacgtcgaggcgtgaggcagcagcctcaggcccgcttctccacattggcactacgggccggcaccccgaattccttgcggcagacctcggccaggacagcgatcccctcgcggatctgctgatgcgtgggacttgcaaagcacagccgcagccgcgagctggactggcccttgttggtcgaccattccggcccaggattgatcgagacgccagcggcgagcgcggcctgatacagtttcagcgtgtcgacctggtctggcagcttgacccacaggaagataccgcccttgggctcctcgaactccgcggccgtcccgaactgctcgttcaacgcttccatcaacgtgtcgagcttggtgcgcagcgccttggtcagggcgggcacatggctcgcgaaatgcggcttgcaataggcggcgagcaccatctgctccagcgcaccggagcccgcgtccgtcttcagagccagcatccgtgacatcacctcccagggcgccacgacgaagccgacgcgcagcgccggcgcgatcgacttggagaacgagccgatatggatcacgccgccattcgggctcatcgcgtagatcgccggcggccgctgtcctgaccacacgaggtcggcatagcaatcgtcctcgaaaatcggcacgccatattcggttgcgagccgtaccagctcggcgcgacgactctcgggcatgatgctgccggtcgggttctgaaccgtcggaatggtgtagatgtatttcggacggatgccgcggctcttcagatcggccagcgtcatcgccagcacgtccatgcgcatgccgtccttgtcgagggggatgccgacgacattgacgccgagccgcgccaggcgggtcagggagccttgatagctctcctgctcgaaaatcactgtgtcgccccgagtcaacagcgtggcattgacgagatcaagcgcctggagcgagccggacacgatcaggaggtcatcgaccgtacagctgatgccggcatcgcgcttgagtttcgtcaccaggaattcgcgcaaggggaggtagccctgcgggccatgcgccagcccgtaagtggcgagcgaccgcccctcgcgtcgtagcaccgcatttgtcgcctcgatcaggtcatcaagcggcacctgttcggagtcgttgtttcccccgacaaagctgtatttcgccaggcccgtccaccgcgcagaaggggccggcagccccgccggaaacagggacgcgaaatcgaagctggacgtcatgggggcgttcctcgttttgttcttgttgagcggcggctttgcaccgccccttacttcttgccggccgtccgggtcggacggccctggctgatgaaagcgtaatgcgcattggcgatgccgccaaccatcaatgcttcgaccaccggctcggcgatctcgcctgtggcggcccagtcgacgaggaaattggctccggtcccgccgcgcacgtcgtcggtcggaatgaagatcgaaaccgtggccagcggcctcaaggccaccggcgccttcagataattctcgacctgcttgcctgcggtgtcgaaataggcgatgcgtttgacgaccagtggctgggtctcggaggcgttgtgcacgcttagcgtcaccgagaagtcgacacgcaacttgccctggctcatcgcgacgctggaataggcgggcacgtagaacccgccggagacggcgaggtcctccttcggcagcgcggtgagcgaatcggcaaagttttgttcgatattgaccttggattgcgcggcggcgggcacggcaaaggcgaggggacccagcagcatggctgcaacgagccctttccgcatgtgacgaattgctcgcttgccgcaccgcaacccgtctctagggtgcggcaaaacggaccaatttggcatgcacgagctcattcgagacatcactctctctattctgtttgcctggatgctgggactgcttgcccatttctcccggcaaccgctgatcctggcctaccttatcgccggcttctgcataggtccattcggcgcgggctgggtccactctcaggaatcgatcagcgtcatctcggaactcggcctgatcttcatgctgttcatgatcgggctcgagatcgacctgaagaagatcgtgcgggcagggcgggtgatcctgttcgcggcgggcagccagctgctcggaggctgtctgctcgggctgcttttcttcgtcggcatcggcctgtccctcggcagcgggcatttcgatgcggtctatctctgtgtcgcctgcgcgctgtcgagcaccgtgatcatcgtcaaggtgctctacgagaagcgcgagctcgacacgctgccgggccgcatcaccctcggcgtcctggtgctccaagacatcttcgccatcctgtttctggcggtgcagccgagcctcgccaacctccaggtcagcgtcatcctgctctcgataggccgcgtcgcggtgttggtcgctgccacactcctggtcagccgctatgtgctgccgcgcgtgttccaccagatcgcccgccggcccgaactgattctgctcggcgcgctggcctggtgctttctggtcgccgagaccgcgtaccggctgtcgctgtcgcgcgagatgggcgccttgattgcaggcgtctcgctctcgaccttcccctacgcgctcgacgtcaccgcgaaggtcaccacgctccgcgacttcttcatcacattgttcttcgtcgccctgggcatgaccattcccgtgcccggcctctcggtgatcagccttgccttgatgatcgcggcgttcacggtcgtgagccgcctcgtcaccaccttcactccgctctatctgatgaaacagggcttgcgcgccagtctgttgccggcgctgaacctcgcgcagatctccgagttctcgctggtggtcatccagaccggcgtcgccgaccaccacatcgcggccgagacggcgaacgccgcctcgtttgccttcgtcgtgctggcggtactctcgaccttcgtgatgacccgcagcgacgagatcacccgctgggcgattggccccttgaagcggatcggcctgcgcgatctcgatcacggtaacgggcatgccgaggaagggcacgagggcggtcacggggaggcccgccgcatcgtcatcctcggctttttccgtgcggcgagcgcgctgctggcggagatcgaacggcagacaccggtgctgctcgagcagatcaccgtcgtcgacttcaaccccaatgtgtatcagaccctgctctcgcgtggcctgcacgtgatctatggcgacatcagcaatgtcgatacgctgctccacgccggtattggcaagtccgagatgatcatcctcagcgtgccggattcgctgctgaagggtgccaccaacgaaaagctggtccggcacgtccgcgcgctcaatccgaccgccctgatcgttgcgaccgcggacctgttggccgacgttgccccgctctacgaggccggcgccagctatgtcaccgtgacccggctcagcgatgcccacgagctgtttaccgtgatcgaagccgcccaggcgggcctgcttgccgacaagcgcgccgagctcgatcaacgcctcggcgagcgccgggaggtgcttccctgacgcgccggccgccttccttgctgttagtctgcgcctatatcgctggtatgcccggtgcaagcctgaaacccattggcaggcctgccgtccggcatatgtggttgcgcttgggagactagcgcccagccccaagtccggctaagcctcccggccataaccgatagagattgggaaatgcccgatagcgttcaggaagtcttgcaggcctttgccagggttgagctcgtggtcgtcaccgacgacgaggaccgcgagggcgagggcgatctgatcgtcgccgcctcgctctgcaccgccgagaagatggcgttcatcatccgccatacctccggcatcgtctgcgcgcccgtgacgaccgaggacgcgcgccgcctgcggctcgacccgatggtggcccacaacgattccgcgcacaccaccgccttcacggtctcgatcgactacaagcccgacggcggcaccggcatctccgccgaggagcgcgcctcgtgctgccgcgcgctcgccaatcccaatgtcggcgccaatgacttcgcccgccccgggcacatcttcccgctgatcgccaaggacggcggcgtgctcctgcgctccggccatacggaggcggccgtcgacctctgcaagctttccgggctgccgccggtcggtgtgatcagcgagctcatgaacgacgacggcagcgtgatgaagggcgagcaggttgcccgcttcgccgccgagcacaagctcaagcacgtcaccatcgcggacatgattgcctatcggcaggcgcgcgaaaagctgatcgagcgggtctcgaccttcgtcacggagagtccgatcggtcccttgcagggctatgcctaccgttcaccgttcgattccatcgctcacgtcgccttcgtctataacggcgtcggcgacggcaagaatgtgctgacgcgcttccacaagccgaacatcgtcaaggatacctttaccggacacaagcgcatggcggccgtgctcgagcatttcaagaaatcgggccgtggcgtgctggtttacttgcgcgacggtgcagccggtgtccccgtggcgccgctgccggacgagtcgtcgacggaggccgaccgcaaccgccagtggcgcgaagtcggcgtcggcgcgcagatcctgcgcgacctcggcgtgacctcgatccggcatctcacctcctcggtgcacgactacaagggtttgtcgggcttcggcatcgagatcgtcgccaacgagcagctcgagagctgactcgccgtgtaattccgggctggcgctgcaggcgcccgatccgggatctcgatgttgtagaaacgagattttgggtcggcgcttcggatcgccccggaacgaccgaagccaggatgcaattgaacttgttgccgcggcgctctagtttgtccggcaattatcgacggaaccagactcgaaaggacgtttcatgagcgtgcgccctcaggccaaggacaagccggctgcggcttctttccagtgggacgatccgttcctgctcgatgagcagctgaccgaagacgagcgcatggtgcgcgacaccgctcgcgcttacgcccaggacaaactgctgccgcgcgtctccaaggcttatcttgaagagaagaccgaccgcgagatcttcaacgagatgggcgagctcgggctgatcggcatcacgctgccggaagagtatggctgcgccaatgcgagctacgtcgcctatggcctcgtggcgcgtgagatcgagcgtgtcgattccggctatcgatcgatgaattcggtgcagtcctcgctggtgatgtatcccatctacgcctatggcgacgagaaccagcgcaagaagtacttgcccaagctcgccagcggcgagtgggttggctgcttcggcctgaccgagcccgacgccggctccgatccggccgggatgaagacccgcgccgagaaggtgtcggacggctatcgcctcaccggcagcaagatgtggatctcgaacgcgccgatcgcggacgtgttcgtggtctgggccaagtcggccgcgcacgataaccagatccgcggcttcgtgctcgagaagggcatgaagggcctctccgcgccgaagatcgggggcaagctgtccctgcgtgcgtccattaccggcgaggtggtgatggacggcgtcgtggttccggaagacgccctgctgcccaacgtctccggcctgaagggcccgttcggctgcctcaaccgcgcccgttacggcatctcatggggtgcgttgggggccgccgaggactgcatgcatcgcgcccgccagtacacgctcgaccgcaagcagttcggcaagccgctcgccgccacgcagctcgtgcagaagaagctggccgacatggagaccgagatcgcgctgggcctgcaggcctcgttgcgcgtcggccgtctgatggacgagggcaagttcgcgcccgagatgatctctatcgtcaagcgcaacaattgcggcaaggctctcgatatcgcccggacagcgcgcgacatgcacggcggcaacggcatctcgatcgagtatcacgtcatgcgccacgtccataacctagaaactgtcaacacctacgagggcacccatgacgtccacgccctgatcctgggacgcgcgatcactggcattcaggcgtttttctgaggtcgcgtcctcgacatggagtgcaacggaaactctccaattgcgtcatggccgggcaagagcgcgaagtgcatcttcgcgccagaagtcccggccatccacgtcttaggcgcgatgaacgtggatgcccggcactcggccgtgtgacgaagtcagcaaggtgtgagcaagccatgtccgacaatgacgacgtcccgttcaaccgcgattttccgctgaagcctggcgttgtcgaggaggtccgccccggtgtgcggcgcgtgctctgcaacaatccgagcccgttcaccttcaccggcacggtcagctacatcgtcggcaagggcaatgttgcgatcatcgatcccggtccggacgatgaggggcatgcggctgcgctgctcgatgccgtgcgcggcgagacggtgagccacatcttcgtcacccacacccatcgcgatcattcgccaaacgcggtgcgcatcaagcaggcgacaggtgcgccggtctatgccgaaggcccgcatcgtgcatcgcgcccgcgtttcgagagcgagaagcacaatccggaatccggcgccgaccgggattttgccccggatgtcagcctcgcgcacggggacgtcgtcgagggtgacggctggcagctcgaggccgtggcgacgccggggcacaccgccaatcatctggcgttcgcctgggccgagcgaaagttcaacttcgtcggcgatcatgtgatgggctggtcgacctccatcgtggcgccgcccgacggctcgatgatcgactacatggactcgctcgaccggctcgcggcacgcgatgaggatctctatttctcgggtcacgggcccgagatctccgaaggtccacgcttcgcgcgcttcctgatccgacaccgcaaggcccgtgaggcctcgattcttcaccgcctcgccaaaggcgagaccgacattccgacgatggtccgcgcgatctatatcggcattgatcccaggctgacgacggccgccggctactccgtgctggcgcacctggaagacctggtcgcgcgcggcgtggtcgcgaccgagggcgatcccgtgattggcgggacatatcggatggcctaggagcgaaccagcgagtggcaaatggcattgtccattcgctgttcgccacccccattcgctatttcttcacagtctttgccggcgtcttgggcggcgcgatcggcgtcttcttcacgggcttgagcgcgtcggcgtcggcagcggcgttgagatcgtcgatgaactgcttgacgcgcgcggcgttgctgccgaggtcgctgtcgaaattgcgcgaggcggagcggatatcgacgcgagaatcgtcgccgtctgccacgaccctgatcgagacgtcctcgcggaagcccatgatcggcgtacgcgccaccgcctcgatgcggccgatgcggcgcggcggctgcggcgcgcgctcgtcgatcacgatccatttgcgcttatggacgagctggagcgcgatcgcataggcgcggtcgaccgaaatctcgagctcaacgggctcgacttcgggatagaagcggcgctgctgttctgccgagtagaggccggcatagactgcagtattggtgccgtcgcccgtgcgcagccgcgccagcgcgtcgaagcgcggcgggtcgatcgggtccgtggtgatatcgtagatcggcggcagcttgcgatattgcaggcctagataggcagggtaggcgaggatcgccccgtcgatcaggaaggcgagcaggatgcgcgccatgccacgcgagccgttctgccagatcgcggcaaagccggccagtccgaacaggatcgagacgccggcgatcgcgagcccgccgaggaaagtcgcaagcgccggcttcggctccaggaagtcgaagcggacgatgatgatcgagaccaccaccgccacgaccgcgaacacggccagattgcgggcccagatcgcaaggctcgacacgggctccgactgatagggagcggaaaacctgcgggccatcggggtgagctctgccggatgttgagggcggtgccggccggtctggcgcggcgatgcgccgttgagaccacggcccgggagcaaattcaagggagaccggactgttactggcccggcagcccggggcgatgccagcggcatcgaaccccggtcggcccattccgggacggcgctgtttcagccgcctggaatgacgctgatgcctacgccgccgcgttcgggaagcggtaatccttgaactggtcgcgcagcgccgtcttcaggatcttgccggtggccgtgtgcggaataccctcgacgaaggcgacgtcgtcgggcatccaccatttggcgatcttgccttccatgaacttcaggatgtcctcgcgcgtggcctgctggccctgcttgagctgcacgatcagaagcggccgctcgtcccatttcgggtggaacacgccgatcactgcggcttccgccacggccggatgtcccaccgctaggttctcgaggtcgatcgaggaaatccactcgccgccggacttgatcacgtccttggaacggtcggtgatccgcatgtagccgtcctcgtcgatggtcgagacgtcgccggtgtcgaagaagccttcctcgtcgaggatgttggtgtcgacgcggtaataggccttggcgacggcggggccggagaccttcaggcggccgaaggtcttgccgtcccagggcagctccttgccggcatcgtcggtgatcttcatctgcaccgcgaagggcgcataaccctgcatctggagcacgtcgagccgcgcctcgccggtggcattctggaacggcggcttcagcgccgcgacgctgccgatcgggctcatctcggtcatgccccaggcgtggcggacgttggagcccatgtcgaggaacgccttgatcatcgagcgcggcatcgccgagccgccgcagatcaccatcttcagatcgggaagcttgagattgttggcggccatgtgttggagcagcatcagccacaccgtcggcacgcccgcggtgtgcgtcaccttttcggtcgagagcagctcatagacggaggcgccgtcgagcttggcgccgggcatcaccagcttggtaccttgcgagggtgcggaaaatgcgatgccccagctattggcatggaacagcggaaccaccggcagcattgtctcggacgcactcgtgccgagcgcgtcgacattgttggccatcagcgcgtgcagcacgttggatcgatgcgaatacagcacacccttgggatctccggtcgtgccggaggtgtaacacatcgcggcagccgtgttctcgtcaaactccttccatttgaattttccgtcggcttcggcaatccagtcctcgtaggcgaccacgttcttcagcgtggtctcaggcatatgcgccttgtcggtgagcacgatgtagcgctccacgctcggcagcttgtcggcgatcttctccaggatcggaacgaaggtgatgtcggtcatcacgatgcgatcctgcgcatgattgatgatccaggcgatctgctcggggaaaaggcggggattgacggtatggcagatcgcaccgattcccatgatgccgtaccagacttcgagatggcgccaggtgttccaggcgatcgtcgcgacacggtcgcccagcttgatgccgccgcgttccagcatctgcgagaccttcagtgcgcgcttgtggatctcggcgtagttggtgcgatggatcggtccctcgaccgagcgtgtgaccacctcctgcttgccatgaatcctggcggcgtgttcgatgatcctgtggcagagcaggggccaatcttgcatcaaaccaagcattccgacgttcctccgagaagtcgctgggcgcgtgttcgctctcagcgttgggccaaagaattgtcatgacttttagcgtgccggactttcgccgcaaatggtcttatcgcggctttatgtccgctggcgcagcaatggttaccgctgcgctgggcctgttgctcgtgtccgcagagagagccgaggcccggaaatatcctgcgcccctggatctcttcggccttggtacagcacgcccgcgcgcggccgtccatgctgccaggattccgctgcccagaccgcggccggccgaggctcccaaggcaccggaacaggcatcggaaaagccgccggtcgtgcctccgcccgcggcagaggaaaagccgtctccggaccagccgggcgccgacaagcccgccgaggtggcatcgccaccccagaaacaggcctcgccctgccgcctcgcgctgaccgaggacatcgcgattgcgccttcaatccccgacatccgcggccccggcgcctgtggtggcgaggatctggttcggctggaggccgtcgtgcttccggacaagcgcaaggtgacggtcaagccggcggcgatccttcgctgcaccatggcgtccgcgatcgccgattggctgcgcaaggacgtggtgccgctggccagcagcctcggctcgcctgtcaacgagctcgacaatttcgattccttcgagtgccggggccgcaaccgggtcgcaggcgcgacgctgtcggagcacggcaaggcgaatgcgatcgacattcgtggcatcaagctcgccaatggccagtcgatcggcctcaccgctcgcaccctgtcgcgcgaggtgcgtgagcgcgtgctgcactcggtctgcgcgcgcttttccaccgtgctcggtccgggctcggactggtaccacgaggaccacatccatctggatctggcgcagcggcgcaacgactaccggatctgtcaatggaatgtgtgggatccgctgccgcaagtcgccccactgctgccggcggagcgtcccgaggaagcgccgccgcgagaggttgcggccagaccagaggcaaatgaagggaccgatgacgaggcggagaaatcccatgcgcctaaaaacaagtcggagcccgagaaggcccgagcgtccaagccggcaacgaaaaagcgccggtgaaaccggcgctttggatgtcggccgttgtggcgatcagtagcttgctgcctggccggtttggctgctgcccagcgccagtcgcgagttgtgcggggagtcgccgtgcttcggctcgagcaccacgacgagggtaccgaccttgacgcgatcatagagatcgatcgcgtcctcgttggtcaggcggatgcagccggacgagatcgaggcgccgatgtattccggctggttggtgccgtggatgcggaacagcgtgtccttgccccccgaatagaggtacagcgcacgggagcccatcggattgtccgggccgggggcgacataggtcggcacgcccaggcgcgaaatttcgctgggggtggggtgccaggcaggccactcggtcttgctgcccaccttggcgatgcccgaccaagccatggcctcttcgccgacggtgatgccgtagcggatcgccttgccgccctccagcacgtaatagagatagtggttgtcggaatcgaccacgatcgagccaggcgcttccttgcgatggaactcgacgatagcgcggcggaacggctccgcgaccggggtattctcgtatttgaccttggcgaggagttccttgtccttcggcttgaatgccttggtgtcggtcgcctcatagcgcgtggcctgcatacagcccgacaacagcaggccagcggccaaaatcccaaatgtaaatttcagcgacgacatggtttggttccaatcaaaacaataccgtgcggaaggcttggcttggcgcccaagctcctcgactccgttaatccattatcgttgaaatctgccacaattccagcactgaaggccgtttgccgggccgtgcgggggcagctgtgacttttatgccgcaaatttggcggccccatacgggttttctggagccagaggcgtcagactgtcgatttcgcgcaacagtcggcatctgggccgccatagatgcgaacaccccgttaatgttgttgtcatcgtgaacctgtcagaatcgcggtaagggctgtcattctgtcggcaggatctctggagcttttcatgttttcggtgtttgttccctccgagtccgccctcaagaaggccgtgatcgaggaccttgcggcagtgccggagagcgccgtctggatcgacctcgtcaatccaagcgcggccgaggacaaagcggtggagcggctcgcgggcatcgccatcccgacccgggaagacatgcaggagatcgagatctctagccgcctttatatggagaacggcgcacgctacatgactgcgacgctgatgtgtcactccgataccgacatgcctcggaccacgccggtgaccttcatcctcggcgaccaccggctggtgacggtgcgctacgacctgccgaagccattcgccctggtcgaagccaagctcgcccgctcctgcacgccggcggttactggcgagatggtgctcatggagctgctggacgccgtgatcgaccgctgcgctgacattctggagcgttgcggcgccgacatcgatcaggtctcccatgacatctttgagcctgagagcgagcgtcacgggcaggcaaagagatattcccagatcctgatctcgatcggccgcaagggcgatctgacctcgaaggttcgcgagagcctggtgtcgatcggccgcgtcgtgacgttcctgtccgcggtggtcgagggcgtgaaatggtcgaaagacatgcgcgagcagctcaagaccatgcagcgcgacgtggcgtcactgaccgaccatgcctcctatctttccaacaagatcaccttcgtgctcgatgccatgcttggcgtcgtcaatctcgagcagaacaacatcatcaagctgttctcggtgatggccgtcgtcctgatgccgccgacgctgatcgcctcggtctacggcatgaacttcagggtgatgccggaactcgaatgggtgcacggctatccgatggcgctggtgatgatgctgatcgcggcgatcgtcccgtactggatcttcaagtggaagaagtggctgtaggcgtcatgctcgagcaaagatgcctaccgggaccttacgccgctcgcatagacgcggtcgatcgtgtcgcagaatagatcgggattgaggcggcgctgtgatgcgtgcgtcgtgccgcaattcctccggtaaaatttgagcggtgggctgaacgtttgcgcgaaacttgtctgcgataagcagcgcgtagccgcgaggaacagccatggttgagaaacacataacgtcgccccgcaacgtcatcgacctggcgaactaccgccaggtcctgacgagcggcaaggcgccgtcgatgtcggcacgcatgtgccggcactgtggtgctccgctgctcgatggtgagaatgacgacgactgctcgaccgcattcagcacggccgctccgcggccgcgcgaaaggtcacgtcggattcgactcgattgaggaacggaaggtaagggcgatccaggtcttgcggcggcgttgtctggatcgccttgcttctccaagagctagatctcgtcattgcgaggagcgaagcaatggcggatggatagaggacagcctacacgtgctggccgccgttgatgtggatttcggcgccgttgacgtacgaactggtttccgtacacagcacgtagatgatcttggccacctcgtcgggcgtgccgaggcgatgcatcgggatctgctgctcgacgatcttctcggtgcccggcgacaggatcgaggtgtcgatctcgccaggtgcaatcgcgttgacgcgcacgccgacgcggccgaagtcggacgccatctcgcgcgtcagcgaggcaagggcggccttcgaggtcgcgtaggcggcgcctgcgaaggggtgcacgcgcgagcccgcgatcgaggtgacgttcaccaccgagcccttggccgccttcaattcctcgatcagtccgcgggccatcatgatcggcgcgaagaagttgacgtggaagacgtgcgtccaggtgtcgaggtcggtgtcgaccgagccgagccgcgtgccgcccggtcccttcggcgagatcgcggcattattgaccagcgcgtgcagcgtgccgccctcgagccggtcgcgaatttcggagatcgcacgcgttgtgtccgccgggttgccgaggtcgacctggatgtggtcttcagggccggcgtcccacgggcagtcctccgggaatggatgccgcgagcaggtgatcacccgccagcctgcagaagagaaacggatcaccgtggcgtggccgataccgcggctggctccggtcaggagcagagtgcgacgcggcgcattggacgaatgcggcatggacatctttcaggtcggcgcaagtctcgagataaggttcaagatgagtctcaaggatacatccgcgtcttggaccatttctggccggccgcgtcacggcgaaattcgatgcggtcgtgcagccggaacgggcggtcgtgccagaactcgatccgcaacggcgtgatgcgccagccgctccagcctggcggccgcggcacgtccccgatgacgtatttggccgcaaccttggcgatggcttgttcgaaggcgaagcggctctccagttcttgcgactgcttgctcgcccaggcgccgatctgggcctgcttggggcgggtggcgaaataggcgtcggcttcagtgtcggtcaccggcgtcacgttgccgcggatgcggacctgacggcgcagcgacttccagtgaaaaagtaacgctgctttagggtttgcggcgagttcgcggcccttctggctggcgatgtggctgtagaagacgaaaccctcggtatcgaatcccttcatcagcaccatgcgcacgtcaggcagcccgtcagagtccaccgtcgcgagcgccatggcgttgggatcgttcggctcgctcttgatcgcctcgttcagccaggcctcgaacagcgcaaatggctcgtcggcggcggtgaaatcaccggatgttaagggtgtctggtgtttcatcgaggtcgtgtcggtcatgtctggagtccgagttgcgtcccgcggcccaaaacgcgttgttgtccgctaacgccctatatagggcatgggaacgcgttggcctatcggcgatccggccctccggctttgtcatgaccgtcgttctcgtcggtctcggtgccggcggctgcagcttttcccgcaatgaacagagcgcctacgccaaggtcgacgacagcgacctcaccggctcgatcgcgcggccggcgaaggacgcgtccccgaccgagaccgatctcgccttcacccgcaacgccgcctccgatgtcctcagcaagggggacaaggattccagccagcactgggagaatccggaaacgggcgcgcgcggttcggtgacgccgatcgcgcagtcctatgcggccgaggacggacgcaagtgccgcgactttctggcaagctacgtcaacggcagtaccgaaagttggctgcagggcgccggctgccaaagcggccgtggccgttgggagattcatacgctaaagccgtggcgcagctaggttcaggacgcgctcctagttgcaaaaatgccactctcttcccacatgatcggcaggtggggcggggagccctttggacaattcgatttcttgaaggagatgtgacgaatgcgcgacccctatgaggtcttgggggtgccgcggagcgccagcgctgccgcgatcaagagcgcctatcgcaagctggccaagaagcaccatccggacagcaacaagggcgatcccaaggcggccgagcgcttcgccgagatcaactcggccaacgagatcctcggcgacgaggataagcgcaaacagtttgaccgcggcgagatcgatgccgacggcaagccgcgcttccaaggctttccgggcggcggaggcccgcgcggccgtgcgggtccgggcgggttcgaaagctatacgttccggagcggcggcgcgggcggcccgggcggtggtgcgttcgaggatatcctcaacagcatgttcggcggcggcatgcgcggtgcccggccgggggccggcggcggcgcccagttcgacttcgataccggcggcattgggctcgatctcgacgtgaatgttgccatgtccgtctcgctggaggagtcggtcaagggtggcgagaagcgcgtccggctgccgacgggcaaggagctcaacgtcaagattccggctggtgtctccgagggccagcagattcggctccgagggcagggtgagagcgcacagggccatccgcccggcgatctcctgatcaccatcaacatcgcgccgcacccgttcttcaaggtcgaaggcgccgacctccggatcgacctgccggtcacgctctacgaggcggtgctcggcggcaaggtccgcgtgccgaccctcggcaacgccgtggagctctcggtcccgaaaaacacctctagcggccggaccttccggctgaagggcaagggcctgccaaaagctggcgggaccggggatctcttcgtcactgtcaggattatgctaccggacgggaacgacgccgagcttgaagcattgatggaaaagtggcgggaccaagacccctacaatccgcggagtgggctcggttagggcgctatccgagccgcctcgacgcgtggagcattctcttcccggaaggataatgctcaacctgcgcgtgaaagcgcgcatcgcgcttcgacgtgaacgcatatgacgtgtcggctgtccggcggggcagtcgataaaaaggtgcggcctcgagagggggaccagcgcggtaccaaagccccaatcgaggccgcccgcgtcgatcggcggatcgaacgccgctcattttcgcgtgatcatccggtgcgataatgagacgcgtcgatgtcttcattccaaattttcaatgacggaatcgaggcgcgacgtttccggcctcttcttggcgatccaatgcattgcttcggcggtggcccggccgtccgatttagctgccgttcttttcggcctggtcgtagaccgcctgcgcgaccttggtcagccggtcgcgatcattgccgccgctgacgacatagccgacgccgcgctcggcccagaacagcgccccgtccttgtccgccttggcgtagcgcatctgcgtcgcgccgttgtcggtcttggccgtgtagatcgtgtaccgctcgcccgaggtgccctcatacatcaggaacgacgccggaccgttcggtcccggcagaagccggcccccgacgagcttcagcccgctggcttccaggttcggcgcgagtacggtccagccgcagcgtcgggtcagccaggcctgcagatggtcacgctcgttgccgccgacttcgacggggtggcggacctcgacgacatagaggcggtgggcgtcgagcgcatccgccgtaagactctggaacgtggagggtgcgttggcggcaccatgcgcgacccaaccagccgtgccgccggccacgaaagcaaccaacgccgccgcggccgcgccgtaaagccattgccgcgggcggcgctccagccgctccagctccagccgtgctggtaccggctcgtgggcgatgccgtcgtagcgagcgtgcagcatctcggccatggtgcgccaggactgcacgcgctcggcctcgtcgggatgggcagcaagccaagcctcgacgtcggggcggcgctcgaccggcaactcgccgtcgacataggcgtgcagttcgtcctcggtcactgcgatcctgcggtcgttcatattgctcgtctctggctctgcggcccaaaaaatcgttcgtagttcaacttcgctcgcgccctcggcaggctgcgatcgcaccttgcgcaatgcatcaccctgtcctcatttcactcgcctgagcaccgggcgctcgccctccagcgaggctttgacgtgggcccttgcgcgggccagccgcgacatcacggtgccgatcggcaccccctggatatcggcgacctcgcgatagctcatgccttccagcatcaccaggagcagcacagagcgttgctcctcgaccagcgtcgccagtgccttctcgatgtcgcgtccttctgcctccgtcccgctggcgtccgggttgttctccgtcagcggcatgaattgaggccgcctcgccagtgagcgccgccggttcttgttgaggttggtcaggatcgtatagagccagctcctgacgtcgcctccgagaaacagccgctccgaacgcaacgcgcggaccaatgtatcctggaccagatcgtcggccgtatccgcgtcgcgcgtcagcgcgcgggcatagcggcgcagcgccgggatcatggcttccacattctggcgaaacgcattcattgcggtcttaacgtcccggtatcaggcgcgagcgcctcagtgatcataacacccgaatggaacagctattccggcgctcgaaacagcgttaacgccgcgtattaggactgtaccgcaggggagggctggtgtacctccagacctcaacgagagctcgacgggacgttcaaaaatggcgcagaattcaggtctgatgcaaggcaagcgcggggtcatcctcggcgtcgccaacaaccgctcgatcgcctggggcattgccaaggcctgccacgccgccggcgccgaactcgctttcacctatcagggcgatgcgctgaagaagcgcgtcgagccgcttgccgccgagatcggcgggctcgtgctcggccattgcgacgtgacggatgccgcgaccatcgatgccgcctttgccgtgctgaaggagaagtggggcaagatcgacttcctggtgcacgcgatcgcctatggcgagcaactcgacggccgctacgtcgacaccacgcaggagaatttctcgaagtcgatgctgatctcctgctattcgttcacggcggtggcgcagcgcgccgagaagctgatgacggacgggggctcgctcatcacgctgagctattacggcgctgaaaagtggatgccgcattacaacgtgatgggtgtggcgaaagcggcgctggaagccagcgtgcgctatctcgccgccgatctcggcgagaagaacatccgcgtcaacgccatctcggcagggccgatcaagacgctcgccgcgtccggcatcggcgatttccgctatatcctgaagtggaacgaatacaacgcgccgatgcggcgcaacgtctcgaccgaagacgtcggcggcagcgcgctgtatctcctctccgacctctcacgcggcgttaccggcgaggtgcatcacgtcgattccggctatcacgtgctgggcatgaagcgcccggacgcgccggacatctcgctgggcgggaaggactagcctcgaatctggaatggccgtgcccacgatctacttcctgcgccatggcgagaccgagtggaacgcgctcgggcgattgcagggcaccaaggacgttccgctcaacgcgcgcggccgcagtcaggccgtgcacgctgccggtgttctggccgatttgttcaagcgcgatggcaaggacagtgccgcgctgccctatgtgtcgagcccgctcggacgtgcgcgtcagaccatggagctcgcgcgcggcaagcttgagctgccgcctgccgactattccctggacgatcgcctccgcgagatcggctacggcatttgggaaggtttgacgctggccgagagcgaggcctccgatccggacgtctatgcgaagcgtctcgccgacaaatggacggtcgcgcccgcgggtggcgagacctacgcggcggtgcagctgcgcatgctggactggtacgagtcgcttctggtcgataccgtcgcggtggctcatggcgggacctgccgggccctgatggtggccttggggctcgagccccccgccggtgccgccgagctcttcatcgagcagggcgccgtctacgtgttccgcgacgggcggctggagaagttcagctaggcctgagtttttcgccattccgggcgatgcggagcatcgaacccggaatctcgagattccgggttcgccctccgggcgccccggaatgacgggaacggggttgaacgccatgcccctcagggctacgaacgttgacaaacaacgtttatgtaaaacgtcaacgctaggcggcagttcggcatgtccttcaacaccttcggccacatgttccgcgtcaccaccttcggcgaaagccatggggtggcgattggctgcgtggtcgacggctgtccgcccatgatcccgctgaccgaggccgacatccagaaggacctcgaccggcgccggcccggacagtcgcgcttcaccactcagcgccaggagccggaccaggtgaaaatcctgtccggcgtgatggcgcatccggagaccggcgagcaggtgacgacaggcacgccgatcgggcttctgatcgagaacaccgatcagcgctccaaggactattccgaaatcaaggacaagtttcgtcccggtcatgccgacttcacctatgaggcgaagaacggcctgcgcgactatcgcggcggtggccgctcatccgcgcgcgagaccgcaacgcgcgtcgccgctggtgcgatcgcgcgaaaagtgctgcccgacgtcagggtgcgcggcgctctggtgcagatgggcccgtacaagatcgaccgcgccaagtgggactgggacgagatcgccaacaatccgttcttctgtcccgacaaggacaaggccgcgttcttcgagacctatctcgacggcatccgcaagaacggctcctcgatcggcgcggtgatcgaggtcgtcgcggaaggtgtaccggcaggtcttggcgcgccgatctacgccaagctcgattcggatctcgcagccgcgatgatgagcatcaacgcggtgaagggcgtcgagatcggcgccggcttcggcgcggccgagctcaccggggaggagaacgccgacgagatgcgcaccggcaatgacggcacgcgcttcctgtccaaccatgccggcggcgtgctgggcggcatctccaccggccagccggtcgtggtgcgcttcgcggtgaagccgacctcgtcgatcctgcagccgcgtctcaccgtcgatcggcagggcgctgataccgagatcttcaccaaggggcgccacgacccctgcgtcggcattcgtgccgttcccgtcggcgaggccatgatggcctgcgtgcttgccgatcacttcctgcgcgatcgcgggcaggtcggacgttgatgaccttcccttcccgtcgggaagaggcgagcgcatttgcggccaaaccgtctgtcacggcactaggcgacggcgcagcttgacggccccgcaactttcgtccccaaatgcggccatgaacagctccgagcttcgccgcgtctgcgattggctgatcgacggcgcgtggtcggcggcggagccggccgagatgatcgccgacttctgcgaacgtctggtcgcggccggtctgccgctgtggcggttcggcatattcattcgcacgctgcatcccgaaatcttcggccgcaacttcatctggcggcgaggtcaggaagtcgagatcggcgctgttgatttcgagatcctggacacgcccgaattcgcccgcagcccgcttcgcgttgtgttcgagcagggcatcgaggtgaggggacgcccgagcgatcccgacagcaagcgctttccgttcctcgaggacatgcgggctgaaggcgcgaccgactatgtcgcggtgccgatgccctttctcgacggctccgtccacgcaacgagctggatcacgcagcagcccggcggcttcagcgatggcgacatcgcggcgatccgctcgatcatagcgccgctcgcgcgcgtcagcgagatcatcagcctgcgccgcactgccgagatgctgctcgacacctatgtcggcaaccgtgccggcgcgcgcattctcggcggccaaatccgccgcggtcacaacgacaccatgcaggcggcgatctggctatcggacctgcgcggcttcacagcgctatcggaccggctgccaccagagacagtggtcacgatcctcaaccactatttcgactgccaggtcgccgcaatccgcggccatggcggcgaggtgctcaaattcatgggcgacggcctgctcgcggtgtttccgatcgacgaatatgtcggcgatgccgctgatgtctgcgcgggcgtgcttgaggcggcgcgcgagtcccgcgccagcgtcgaagcgctcgccatcccggtcggcgatgccgtcgagcgcttccgcttcggcgtcgcgctccacgtcggcaacatcctctacggcaatatcggcggcggcaaccgcctcgacttcacctgcatcggccctgccgtcaatcttgcagcaaggctcgagaagatcacggggcgcctggggcggacggtcgtcgcctcggaaggctttgccaatgtttgtcggcacgattggctcgaactcggcgaatttccgatcgcgggattttccaaggcgcagcgcgtgtacgggctggcggatgaaacgtacgcgcaggcggctgagcctattcctccggctcggtcgtgaacagcagcggatagcccttggcgcggccggcgtcggtggctcgcgtcgccttggtctcggccacgtccttggtgaataccgcgacgacgcaggcgccaagcttgtgggcggtgatcatcaccttgtaggcctgatcctcggtcatgcggaattcggccttcagcaccatggtgacgaattcgcgaggcgtgtagtcatcgttgatcaggatgaccttgtgcagccgcggccgctcgaccttggtctttgtcttggttttcggcttgctgacggtgtcgttcatcgtatcctgaaaccccggccctgatgagctccagccgtttcatcataatgcaggcactcgtgcggctccaagctggtcggcacgccgccatcatgccgctgcgaatgggcagggatgcggcgaccgcgcctgcccgcaccaggtcagcattatcctttcggagaaccgctgcacgctgctacatcctactctagggaagcgcgcggacaagctgcatggcggcgatcagggcgcctacggacagcgccaccgatgcaatcatgtaggcagccgaggccaaggtctgaccacgctcgatcagataccaggtatccagcgagaacgtcgagaatgtcgtgtagccgccgcaaatccccactgtcaaaaatatccggacggtctgcggcaggttccatctcgtcgcgaacagcgcggcgaagatgccgatcaggaacgatccagtcacgttgatgatcagcgtgccccagggaaagtcagtgccgaaagcacggcctgaaccgattgcagcgagatagcgcatgacggctccgagcgctccgccggcggccaccgccaaaatgaattggatgttcaatgtcccgttcctcggttttcagtctgcatcatctgtttcttgccgccagaccgttgccgaccgcaagcagtcccacaagcgaaaccagcgcaaagccgagtcctgccaggaacgtgccttgaggaccaaaggcatcccaaagagcgcccgcgatcacgctggcggccagcaaggcaagcccggtgaagaggttgaaatagccgaatgcggtgccgcgcaggcttggtggcgccgcgtcggcgacgagggccgaaagcagtccttgcgtcagccccatgtgcagtccccacagcacgacgccgagcgcgagacccgcaaggctcgggagcagggccagcgcaagatcagcgccggcgaggaggactagaccgagcgcgagcaggccggtccggttgatccggtccgagaggatcccggccggataggctgacagcgcataggcgacgttcatcagcaccagcaccgccggcacccacatcacgtcgaggccgatgctctgtgcgcgcaggatcaggaaggcctcactgaagcgcgcgagcgtgaagacaatcccgaccgcgacgacgcgccagtacaccgcaccgagctgccgcatggcggcgagattgagcggattcttcacaggcacccggctcggatccgggtcaggctcattcacgccgaaggtgatcagtccaaacgacagaaaggccggcagcaccgccacccagaacacgatcgtgaaattgtccgccgtccaccacatcagcgcgatagcaaccagcggtccgaggaaggccccgatggtgtcgagcgattgccgcagcccgaagctcgcgccgcgcaagccgatcggcgcaatatcggcgatcagcgcatcgcgcggcgcaccgcgaatgcccttgccgacgcggtcgatgaagcgtgccgccaccagccatccgacgctgggcgcgagcggaaacagcggcttggtgaaggcggcaagtccatagccgaatgcggccagcagcttgcggcgaccgagccaatccgacagcgcgccggagaagatttttgtgatcgaggcggtcgcctccgcaatgccctcgatgaagccgacggtaagcgtggaggtgccgagcacggtgacgagatagagcggcagcagcgcgtggatcatctcggaggagatgtccatcagcatcgagacgaagccgagcacccagattcccctgggcagggaggtgcgcgcagcattcggtgtcgtcatcgtcgcgccttcgccgtgtcctcgccttcgcctgctggccttcgtcaccaggcaacaaaaaacccgccatcggcgggtgtgtccatgctcccgcccaaggcagaggccgcagattgcctctcctcaagcaggagtcatcagcccacgaggtcatcgaccgccgggcggttgtcgggggactccatccccatctgtgtgagcaaccctagcatggaaatcgtgccggacaagtgggccgggcgctctgtcccgcgactcgtcgtgtccggtcgctcgcattcgagcccaagggcgcgaggtggcctgcggggttcctgcggcgcgaccgcggcaagacgacggcagctttgcgccgagctcgcaagttttcatcttgagacttctcgacccgcgaactcttaactcgaatgtgaagcacaaccgatcttcggcctttgcggcaaggcgtttgcatgtcaccatcgcgtcgtacgacgggagactgcgatgcgtttgctgttctcgatcggggctgtgctggtggccggcatgtttgccggaggggacgtcgcgggcatcgcggcaccgggacccaagtttggagcgcccaggaatcatccgcagcgactcgcagccgacaaggacgtgcaggtcgacgtcgaactgatcctcgcggttgacgtgtcctactccatggacatggacgaactcgcgatgcagcgcgagggctatgcgcaggcaattcagtcgaaggagttcctgcaggcgctgaagttggggccgaacggccggatcgcggtgacctatttcgagtgggccgcctccagcgaccagaagatcatcattccctggcggctggtcgacggaccggagacggcggatgcagtggccgccgagatcatgaagacgccgatccggcgcgcttcgcgcacatcgatatcgggcgcgatcaacttcgcgatgccgctgtttgatgaggacccctatcggggcttgcgccgcgtcatcgacatttccggtgacggccccaacaacaatggcggtccggtcacggttgcgcgcgatgccgcgctggagaagggcatcgtcatcaacggtctgccgatcatggtcaaggagccgtcctattcgaccatggatatcgacaatctcgatttctactacgaggactgcgtcatcggagggcctggctccttcgtcatcacgatcaaggagcgcgacaaattcaaggaagcgatccgcaccaagctgctgatggaggtcgccggccgcacgccggagcggcccgtaatgcgggttgccgacaaggagccgcgcgtcaactgcctgatcggggagaagatctggtccgatcggtgggggcggtaagaccacactgacaccttttgccttaccggcatgcagtcggatttaactgctcgttaaccgatgcatgaccctaatcggatgatccccgtaaccagcctacctccgagcggaccagtgtccatcgtcacgtcgagcaccaaccagatctcgcccgccaacgagcggatgtatcgccagagtgctctggtcggcgactggaagggcaattgggtgggcaacaaccagcccgtcagcttcaaggtcgtgaacatccgtggagcccgggcgcaggtcgagtacacccacaacggccgcaccgagcgcggcttcggcgaggtcaagggtacgcttatcaccttcggcggcgtcaccgtcggcaccaaggacggtaagaacatggtgctgctgttctcggtgggcggcgttggcaagcagaccgcgaatctcgagaagcaggcgccgccggcgtccgacagccgtctcatgggaagctggggcggctattccagcgacaacggcaagagcgcgagcttcaaggtgctcgccgtcaacggcaaggaggcgcaggtcagcgtcaccacggacggcgtcacccgccagggcactggctacgtctacaagaacgtcatcatgttcgggcagacacagatcgcgaccgacgacggacagaacggcaaggtcatctatcaggtcggcaccaaatccttcatggtaccagtgaccaaatacccgccggcagattcgtcctcttcagtcgacaagacggcatagccgttcacggcggtgtcctgcggggctgcgtcagcgccttcaattcttgatcgacctgccgcaggatggtgcaggcctgcatgaaatcgccgtcccgacgagttgccagatttgattggaacgctcgatcaaacgtgggatcgcgagcggacggacgtgcggtaccgcgcacgctagcaccggagtgcgatggcctgaacgcgcgggacttcggcgagagcggaagtcagccggcggagcaagggatcgggggatatcggtgcaggtgtccgtaaggcgcgatcggcgaggtcgctccgctggcgttggcgatcttccaagggtataatcgccaggagttccgacggtagcttgaatgttcaacttcgccaatcaatgtggccttgccgctctgctggcattgctttgcctgaacgggtcatcggctgatgcacaggttgcgccgctgagatattggatcccaggcgggcctttcggcctcggcggaggcgccagccagagttccgatacctacgggaatttttcgagcttcaataccggcgaggcgggttggcgtaccaactatgccgacggtttcttcgtcggcagcgagcgcggcaatcttggcttgagcggcttcaatcaggccggttctgcgggaagcttcagtgcgctgtcctatgacagcacgcagttcggctacaacacgaagacggctggcggcatgcccgtcacattcttcgctggattcaacacactgaaattcggcaacggcattggcagctcactggcgccactcacctccagcgccgcgcccggctacggtggatttgcgggcgtcgagttcaacccgacctccaatctcagcctctcgttcggcgtcggctatacccagcagcaatcgggacgcatggacagcgacatcaactcctcgatgttgcccggcgagtctccggcgctgggcgggttgcggcgctaggattgcatcacgcgctccggcggacgccgcagcgatttcggcagatccgggccggttccgaagcgcatcacgatataggggcgccgttcgccgagtccgagtgaaaccgcaaattgcgaccgcaacgacgcgacctcgaccggctggttgatgaaggcatacttgagtcccagcgcggtcgcctgcagaccgaagcgctgacaggcacggccgaccgcgatccaatgcgatctgtcgcttccgtctgcagcgagcacgacgacgcccgcagagctctcgagctgttcgcggtacttcttgttttcgccgctctcggtgaagaagagattcagcagcggccgcgccagccatgaaggcagggaggggttgcctgaggcgggcgcatacagcccgtccatcgtcgcgagcgcctccgcctcgttgaagcggatccagtgcacgagctcgcgcatgaaggccttgtcgcgcatctgcgccgaattgccttggagcacgtaatcggtgaccccggctatcgcggcgcggtcggtcatcaggatcgccgtgacgttcgattcgcgacaagcgccctcgagccggcgcaatgtctccggtgcggccggcttgccgtcgaatgcagcgcgcgtgcattgtctgatcggaatcgcggcggccagcgtcgatgctgccggcgaggcctcctcgagcgtgatcacgatgcggtcgccgtcgagggcgagatcggcgtgccagccaagcgttgatgcagcgaggatgaggttttcggcggcacagccgaggctgacgaagaggtgatgatcgtccggatcgacggccggacagcggcgcttgaagtcgggggcgatcgcgatgacgttgccgcgaatcgagaaggtccacggctgggtattgtggctgttggccgcgagcgtggcaaagcgcaccagttcgcgatccctcggcgtcgattgcagcggagcacgtgacgttttcgccgcctcgtcataggtgctcgctgcagcggctgcagaggtgccggtgccggccgcggagagcccaagcgcggcggtgatgaatcgtcgtcggtgcaaactgctgacggtcatccgaacattatagcttgcagatcacgtacccgtgcgacgctcgcagtgctctgccggctcttgcttgtgaatgatgcgcctattcgccgcatgagtgtggcggatcagccacaatcggaacgcaggcgcataacccgagcatccccgctgattgcagcggttcccgccgcgccgtaggaagcattgcagcgctcctgatctgagagcgcgtccaattggcggatgctcaacgctcatggcgtcgaccacaggttctgcgatctctcgacttctcttgtcggctatcgctggcacctgcatggcgatcattgcctgcggcccggcaaaggcagcctgtacgcccgctgcgggaaacggcatctcggcgctctgtaccggcgtaacggctggcggttatggcggtttcggtttctccaacctcaacgtgaccgttgacgatggcgcatcgctgtcaggcggggtcgcattcaataccggcagcctgatcaatcgcggcaccgtgaccagtgggggctcagctgcggggctcaacgccggaacggtggtcaacgagggcacgctcgcgggcagcattggcatcgacgccggcacggcgaccgtgaccaaccgcggcagcattgcgggcactggcatcggaatcacgaccgccggcggcaatctgactctggacaatttcgggacagtcaccggcttcttcggaatcttcgccgacggcgccgcgatctcgaatgccggagtgatcaacggggtcggagatacgagcatcgacgtggcagttcgcttatcgctcgtcaatacggcgacaggggcgattaacgggcacacggccgccatcactgctccgctcgcggagatcagcaatgccggatccatcacctccgcgacggcgacagcgatcgacgtcgtgacgctgtccagtctcgtcaattcaggtctcgtcagcggcgttacggccgctatacacggcacgacggcgacgatcggcaattcaggcgccatcgtggcgagcgcaggtccggcgatcgatttggctggaagcctgacgctgaccagttccgggcttatccgcggcagttcggacggcatcaaagcatccaccgcaaccctcgccaattcggggacgatcaccggaagtgcaggccgcgcgatcaggctgaccggtgcaggggacatcaccaacagcggatcgatctctggcggcagctacggcatcgaatcgttcgggactgtcaggctatcgaacagcggcacgatcttcggcggcttcgcggcacttgcgatcagcaatgctgtgatcgagaacagtggttcgatcctgtcgaattcggtcgcaatcgactccggaaacacaaggatcaacaattccggcacgatcacgggagaggtgatcgccatcacgtcgaaccagctcgcgctattcaacggcggcacgatctcggtgaaggcctcgggcgcctcaacgatctacgccagctccgccgacatcaccaatgccggcgtgatcgcggccgccgacaccgcgagtcttgcgttgtcgctcggcgcctcgaccgacacgctgacctcgcggccgggatcccgcattatcggcctgatcgacctcgggggtggcgcggacagggtgaatttccggggcggcaacttccactacaccttcaattcgcttgcaggggcaaccgtgagctcggcggcaccctacgtcgtgagcggttcgcaggtcgtcacgttcgactccacgccgttcggggccacggaccgtaatctgctcgccttcatctcggcggtgtcctccgcgttgccggatgcggatgcttctcccaccagtgactcactcgtccatgccgcgccgtccgggccgaagcgcgatgttcgcgaggctttcgctgcgatcacgccgcaagggccgacggcggtctatgccgacggcacaagcgtttgggcacgcggatttgccggggaacgtgatcaaccggcgagtggggcgctgctgcacagtaccagccgcttccagggcgggctgatcggtggcgattggcaggccaattccaatctgcgtgtgggtgcgttcattggaggcggcgcgatgcagaccagcgaggacttcaacctcgcgaccacgaatgccgacatcgtgttcggcggagcgttcgcgcgcggtaccttcggtgcgacctttctcgacatgatgctgcagctcggccacgtcgaccagcgcggctcccgcctcatctccaacaacctcgttgccggcggcatcgagaccgcgacggcgagcaattccggaacctacgccatcccagaactcgcccttgggcatcgcatcggcctgggccggaccggagggacggtctggacgctgacgcctgtcggccgcgtgcgttatctcgccggccgtcttggcgggttcagcgagagcggagtaacggcgaatgccaccgtcggaggttatactctgtccggactggaggagcgcggcgagttgaagctctccgccaccacgcgcatcgaacgggcagcctggctgaacggcagtctgcgaactggcgtggtcggcctccagcggctgggagatccgaccgtcaacttgaccctgctcgggcagtctctgccgttcgtgcttcccggcgcgaacgacgtctggggtctgttcggcggcgctggcctcgatgtcacgttgggaccggccagcctgttcgtcgccggtgaatatctcaagctgtcggattcgagcgtcgcctattccggccgtggcggattgcggatcgcgttctgacgcagggacgtcagcccgcgcgactaccgttcgaatttcgccaccagctccacatgcggtgtgtgccggaactgatcgaccggcaccacggatttcagccgatagccaccgtcgatcagcagccgcgcatcgcgggagaaggtcgcgacgttgcaggacaccgcgaccacgacgggcaccttgctcgcggcgagcttcagcgcctgcgcttgggcgccctggcgcggcgggtcgaacaccacggcgtcgaagtcgcacagctcctgcggcaccaaggggcggcggaatagatcgcgcggctccgctttgatcggtttcaacccgggtgtgcgcgcggctttcacgagcgctgcgatggcgccagcgtcgctgtcataggcggttacgcgcgccttctccgcgagccgcagagcaaacgggccgacgccgcagaagagatcgagaacctccttggccttgccgatgcgctccgccacgagcgctgcaagcgcctcttcgcccgctaccgtcgcctgcagaaacgagcccggcgggagcgtcacttccgcacggcccatcgtcaccgtcggcggcaggcgttgcagcaccagctcgccgtgccgcgtcagtcgcgccagccggtgttgctcggcgacgcgcgagagggtggtgaccagcggcgtcggcagcgggccggagccgcgcacgtcgacgtcgaggccgttggcggtggcggtgacctgaatgtcgagcggcttcgtcacgggcatcttggacgtcagcggctcagccaacgcccaggccgcgtcgagcgcgccgtcgagggcgggatcgaggatggggcaacgatgaatcgggatgacttcgtgcgagctcgtggcggagaacccgaccttgaggatgtcatgcgtgccgaagcggccgtgcagcgtgatacgcctgcgcccggcaccatgagcatcgatcagtgacgcgacttcgcaatcaatgccggcctgcgccagcgtctccaccacgattttgcgtttccaggcgcgatacggctcagtcgcccaatgctggatggcgcagccgccacagacgccgaaatgcggacagaacggctcgatccgttcagggcttgcgacatccaccgcgagcagcttgcggcggtcgggatgatggcccaagacgtgatcgacctcgactgtctcgccgccgagcgtgtagggcacatagatcgcttctccggcatcgaggcagacgccgtcgccgcgatgcccgacgtgatcgatcctgacgcgctcaaccacggcgggccccgaggaagaattcgatattgccgtcgccgcccgtgatcggcgaggggaacacctcgatgtcggtgcagccgagcgacgcggcaaaggccgcgatgtcgtcgcagatctcccggtgaacggcggtgtcgcggatgatgcccttcttgttgtgtttccggtcggcctcgaattgcggcttgatcagcgccagcaggttcatgggcgcagccgccaatgacaaggccaccggcagcaccgtcttgagcgagatgaagctgacgtcgatgacgacgacatcgggccgcgccggcaggcgtttgccttcgtaggaccggatgtcggtctcctccatcgacacgatcttgggatgatcgcgcagcgagggatgcagttggctggtgccgacgtcgatcgcgaataccaggctggcgccgttcgccagcagcacctcggtgaagccgccggtagaggcgccgacgtcgaggcagacgtggtcctcgatctcgatcggatagcgctccagcgcaccggcgagcttgacgccaccgcgggagacgaaagggtgcgccggctcggcctggatcaccgcatcctcggcgatcgtctccgacggtttcgaaacctgcttgtcgtccgcaatgacgaggccggcctcgatcgccgcgcgcgctcgtgcccggctctcgaacaggccgcgctcgaccagcaatatatccgcgcgcttgcgggcagggggcatcgggtcactcaagaggggctggcgcttatgtagcgatcaatcgcgcggccgccatccggacgcaagcctcgaaggcggcaagatcgtgccagatgtcgacgggccgcttggacggcgtcaccagcgggcagccatgcagttccagcgcatggatcatcatgagattgtccacgaggccgaaatcctcgacggtcaacccctgcgcgtctaccagccgtccatcctcggcggtgacgtccgtgaagcggccggcccggtcggcatacgccgcgtcctcgttggaataggcgaggcagaacttacccgtgcccgccatatagccgagctcgtagacggtgccgggatcggcgcccggcccacgaaacggcgtgagattggcgatgatggcgtctgccgcgtccatcatggcgacgtttccgcgaaagatctgccgcgatgcatcgctcgcggtgaggtcgatcgcattgtcgagcggatagaggccggtgagaccatgcgcagcgcagatcgcggccttctgccggccgatctcgatcgcatccggcaggaacacgtcggggcctgccagatagatgttcatggaagcaatgatcgaggcggcatagcgttgtcaccatgccagcggtgccaaacctctccctacgggagaggtggagctcagtgccagcacgacgatcaggccagcttgaccgtctcggtcttcacgtccttgccgagcgcttcgaacaccttggcgacgatgcccttggcgtcgaggccggcgcgggcgtacatcgcggccggggtatcgtggtcctggaacacgtcgggcagcaccatcgagcggaacttgaccatgccggtgtcgagcacaccctgatcggtcaggtactgcgcgacatgcgagccgaagccgccgatcgagccttcctcgatcgtgatcaggatctcgtggtcccgggcgagcttgagcaccagctcggtgtcgagcggcttcatgaaacgcgcgtccgcaatcgaggtggacaggccgtgggcggcaagctcgtcggccgccttctcgcattcggcgagacgcgtgccgaaggagagcagggcgatcttgctgccctgacggatcatgcggcctttgccgatctcgagcggcacgccgacgtcgggcatctcgacgccgcggccctcgccgcgcggatagcgcagcgagctcgggcgatcgtcgatcgcaacctgggtcgccaccatgtgcacgagctcggcctcgtcggccgccgccatgatcaccatgttcggcaggcagccgagataggcgttgtcgaacgagccggcatgggtcgcgccgtcggcgccgacgaggccggcgcggtcgatggcgaagcggacgggcagactctggatcgcgacgtcgtgcacgatttggtcgtagccgcgctgcaggaaggtcgagtagatggcgcagaacggcttgtagccttcggtagcaagaccggcggcaaacgtcactgcgtgctgctcggcgatgccgacgtcgaaggtgcgatcggggaaggccttgttgaagatgtcgacgccggtgcccgacggcatcgcggccgtgatggcgacgatcttgtcgtccttctgcgcttccttgacgaggctttggccgaacacgttctggtacgccggcgcattcggcttggccttggcttgcgtgccggtggcgacgtcgaacttgacgacagcgtggtacttgtcggcggaggcttcggccggaccgtagcccttgcccttctgcgtcacgacgtggaccaggatcgggccggtctccatgtcgcggacgttcttcagcacgggcagaagatggtcgagattgtgaccgtcgatcgggcccacataatagaagccgagctcctcgaacagcgtgccgccgtccatcatgaagccgcgggaatattcctcgacgcggttggcgcggttggcgatgatcttgggcaggcgcttgttgatctgcttggccgcatcgcgcagcgtgcgataggtcttgccggagtagaggcgcgacagataggcgctcatggcgccgaccggcggcgcgatcgacatgtcgttgtcgttgaggatgacgatcaggcgcgagttcatcgcaccggcgttgttcatggcctcgtaagccatgcccgccgacatcgcgccgtcaccgatcacggcgataacgttgttcttgccgccggagaggtcgcgcgctacggccatgccgaggccggcggagatcgaggtcgaggaatgtgccgcgccgaacggatcgtagtcgctctcgctgcgcttggtgaagccggacaggccaccgccggtgcgcagcgtgcggatgcggtcgcgccggccggtgaggatcttgtgcggataggcctggtggccgacgtcccagatcagccggtcgcgcggcgtgtcgaagacgtaatggatcgcggtggtgagctcgaccacgccgagaccggcgccgaagtgaccgccggtcaccgagacggcgtcgatggtctcctgccgcagctcgtcggcgacctggcgaatctgctcgaccttgagcttgcgcaggtcttccggcgtccggatggtgtcgagaagcggcgtcttgctgtatgcgttcacggcgatttccaatttgtcagccccggaaagtcattccggtgcgcgatgggtttgcacaatatcggcgcagcgcgagtcctcaaaccgtcggagccacctgcatggggcgaggcccctcttcaagcttaggtaagcttaagtgcgctccggttcagtctctgtgatccctgtcacctagatcggcttcgtccgtcccaagccaatttcattagcagtttgaagcgcttgccgtcggcaatcggtgcccacgcaaggcttgcaaaaagccacactccgcgcagctttacaccaaaccttgggccaaagccaacccgccggaccgactaggggtatgcaggtgcaaccggcgggccagagtggttaaccgtggcccccggtgagacgttccgctgctgctcggttccttggcaggccctttctgcccaaaatgcgatcctgccagcctcggcggtcgatcgcgtacgggagggcgtcccttcgccggcatggaaccggcacgccaggaatagcgtggatgtagaaagggctgctggggcccggcctgtggggctcccgcggggcttacgacgccagaggggtgggttggagatccggctgatctattggacgtcgagcggcgccgtgccggtggcctggccgctggcgtccgtggtgatcttgtcgacacgcgcttcggcctgccgcagcaattcctcgcagcgccgcttcagggcctcgccgcgctcgtaaatcgtaacggattcctccagcggcaccttgccgtcctcgagccgcttcacgatcgtctcgagttcctcgatcgcgcgctcgaaggtcagcctggagacgtcaacttgggtgttttcggccatatccgtttccgatgcccgattcgtttcctcggagagaaaacagagttttgcgggcgtaatgtggcggggcgtcaagcgcccatcagggcgccgacatgcgccgtaacagattctttcagtccttgcaggtcatagccgccctcgaggaccgaaacaacgcggccgccggcggtcttgtcggcgagatccatcagtttgcgagtcacccacgcatagtcttccgcgcgcaggttcagcgaagccaggggatcgcggtaatgcgcatcgaagccagcggagatgatcagaagctccgggctgaatttctggagctgcggcaagatcagattctcgaacgctgagcggaattccgggccgccatcctcggaggccagaggcgcattgacgatggtgtcgtgatcgccgcgctcgctcgtcgcgccggtgcccggaaacagcggcatctggtgcgtcgagcaatacatcacggtcgggtcggaccagaagatatcctgcgtgccgttgccgtgatgcacgtcgaaatcgacgatggcggcgcgcttgatgccgtatttgcgctgggcgtggcgcgcggcgatggcgacattgtcgaagaagcagaagcccatcggcttgctgatctcggcgtgatggccgggcgggcgcaccgcaacgaaggcgttgcgatgctcgcccgccatcacggcctcggttgccgccaccgcgccgccgacgccgcgcatcaccgcttcccaggtgccggctgacatcgaggtgtcgccgtcgatatagacctgcccgctggtcggcgcgatatggcgcagctcggtaacgtaatgctcgttgtggcagagcgtgacgagatcgagatcgccctccggcgcctcctcgcgcgccaggaactgaaagcgctcatgcgacagtgcttcctccaccgcgcgcaggcgatccggcctctcagggtgtcccggcggcgtgacatggtcgaggcaggccttgtgggaaaggagaagcgtgctcatcaggtcggcctcatgggatgcgggctatcgacgtcgttgacgcatccggcgccaaaacgcaatgcaaaacccaatctaggcgcttggccaggaatggcaaagggctgcgtgtttgatcgagatcaattcacgcgcaggatgcgggtgggcggcagcggaccgatcggcccgttcgcccggaaaaacgcgaacagcgcgtccgcgtcgtagccgccatatcgcggtgccgtaccctgtttggcgacggtaaacccgtctccgccgactgcgaggtaatcgttgagcgtgacgcggtagtcgcttccaggttcgatcggcctgccgttgagcgtcatcttctccgagatgacgcgctgcccgaatggcttcgatgcatcccaggtatagctgaagccgttcgacacctggaggatccgcggccgcttgggatcgagccattgctgctcaagcaggtccttgagctggctgcccgtcagcgtcatggtgacaaggcgattgcggaacggctggctggcgaagacatcgccgaacgttatcgcgccattttccttcggagcgatgtcggtgcggacgccgccgggattggtgagcgcgatgacagcgccgccatccttcgtatcgcgcgtcgccgccaattgcgcgtcggcaatgataccaccaagcgcgctttcgccggcgtcgttcggcacgcgtgacagcgtctgcgtcactgagccggccggccggttcgcgatcggcgcggagagcctgtcgtaggcgtcgatcaatgcggtctgctcgggatcccgggccagcgaggcattggcgacgatgacattctcggccttcgtcccgacgatgtcgcgcgtggccggatcgagcttcaggtcgatcgcggtgaccagggtaccgtatttgtcgccgctggtgacgagccgcccgtcgatgtcgcagacgtaggcttggtgggtgtggccgctgacgacgacgtcgacggcacgatcgaacctcttcacgatctcgacgatcggcccggtaatcgcaggacattcattgtagtcgcctgcgggctcgccgccctggtggatcagcaccacgatcgcctcgacgccccgcgccttcagctgcggtaccagcgcgttcaccgtctcggcctcgtcgcggaattcgagcccggcaatgccggctggagagacgatgcccgccgtttccttcaaggtcagcccgatgaaggcgatgggtatgccgtcgaattcccggatctcgtagggaggcagcacactcttgccggtagaggtctcgatggtggaggcagcgaggtaccggaacttggcgcctgtgaatggatgcggtccctggcagccgtcgaccggatggcaaccgccgttctgcatgcgcagaagctcggtcttgccctcatcgaattcgtgattgccgaccgagctgatcgcgaggcccatcatcgagagcgactcgatcgagggctcgtcgtggaacatcgccgacaggaacgggctcgcgccgatcagatcgccggcggcaacgaatatggtgttcctgtgcccttcgcgcagctgcttgaccagcgttgccaggtattcggcgccaccagcggccaccatcaccttcctggttctgtcctcgggatcgtcgatgcgaatgccgcccggtggtgggcgcagattgccgtggaagtcgttgatcgcgagcacgcgcagctcgaccggctcggcggtctgggccgacgcgggaagggcgaaagtgagcgtcagtgcgagtgcggaaaggaggaccgagtatcgcatggaatgagactagacgttccgcacgaagatttcacgaaagttctcgccgtctttcgggctggcgccttcgtcacgcccgggaacgacgagcgagcgtgcactcactggtccctcccgttcgcgagttcgtggaacgccgccaccgcggcgttcagccgctcacccccagtagcaccgcatccgccgacgcgaccgactccgcgctctccgtcacggtgcgctcgagcgctcccgcttgcaccgcgatgttctcggcaaagaagcgcgcgagcgcgacatggcgcgcagcgtccgcgttgccgtcggcctttgcggcaagcgcttcggaggccagcaggcagccgccgagcgtcgagccgaactgctgcaaatagggcgtcgcgccggcgagcgcctcgttcggtgcggaggcaacgcgctccagcagccatttgctggtccgtgtgagcgcatcgatcgcctcgcgcagcttggcgcccgtcgtgccgaaaccgggatcgttggaggcctcgacctggctgacggttgccgagagctcgtcgagcagcgcccacacagacgcgccgccattggccgccagcttgcgcgtgacgaggtcgatcgcctggatgccgttggtgccctcgtagatcgcggtgatgcgggcgtcgcgatagtgctgggccgcgccggtctcctcgatgaagcccatgccgccatgcacctgcacgccgagataggcgacctcgttgccgatgtcggtggaataggccttggccatcggcgtgagcagtgccgcgcgtgctgccgcatctgcgcgcaccttcgcgtccttggcgcgggtcgagacgtcgatcgcgaccgcggtcgcatagcagatcgtgcgcgccgcagcggtctgcgcccgcatccgcatcagcatgcgcttgacgtcgggatggacgaagatcgcgtccgagccgtcgcccttcctgccgaccgcgcnnnnnnnnnnccgacgccgaggcgggcctggttcatcatcgtgaacatgcagcgcatgccctgattctcttcgccgatgaggaaaccgatggcgccgccatgatcgcccatggtcatggtgcaggtcggcgaggcatgcatgccgagcttgtgctcgacgccgctcgcatagatgtcgttgcgctgcccgagcgagccgtccgcattcaccatgaacttcggcaccaggaacagcgagatccccttggtgcctgccggcgcatcgggcaggcgcgcgagcacgaaatgcacgatgttgtcggtcatgtcgtgctcgccataggtgatgaagatcttagttcccttgaggcgataggtgccgtcggcctgcttttcggcgcgggtgcgcagcgcgcccacgtcggagccggcctgcggctcggtcagctgcatcgtgccggtccattcgccggagacgagctttccgagatagattcttttcagctcgtagctaccatgcgcgtccagcgcctcgatcgccgaggccgtcagcagcgggcagagaccgaaagcgacgttggcggcgctccagatctcggtacaggcggcgttgatcgccagcggcaggccctggcctccgaaaccttccgggccggacaccgcgttccagccgccctcggtccagcgcttgtaggcgtcaggccagcccggcgcggtcgtgaccttgccgccctcgagcttgataccgtgctcgtcgccgaccttgttgaggggcgccagcacgtcggatgcgaatttgccggcttcttccagcacggcggccgcaaggtcggcgtcgaaatcgccgtaatggccggcctccacggcggccttcaggccggcgccatggttgagcgacagcagcatgtcagaaataggcgcgcggtaggtcatggctcactcccgagggcagatgtttggcgccgtattctcacgaaacgaaggcggtctcaatggtcggggcggggtggccgggaacgacagcttgggacgcgacggaagggcgggcgcaaccaatcccgcgcctgcgctattttacgcctccaggcggttgaaatgccgccccgctccctatagaccggctgcgactggagagaatccgcggtagcgctatcttccgccattcccacagtcgcctgatggggcgtagccaagcggtaaggcagcggattttgattccgccattcggaggttcgatccctcccgccccagccagattgctcgccccgcctgcaatcactcgcgacacccatcctggctggggagcactgctgcaggccgcccacatctttcgcccggatgccgtgtgctcctggcggcaccgaccgccgttcgcttgtcccgaaacttgcaggcgcaatcatccagcagaacgccggagggcggtcaccggaatgacaaggcctgacgacaggcggcgagcatagcgactccattcatggaaatgacgctgccggagcggcatggtcgtgcagagtgcggaagcgagatcgtaagtcgcgtcgtgcgaccatccacgtgctgtgccgattgtcttgctttctgacctctagcgaccggtgtgctagacgtttgatgggaggatcaatagtttagtactgcatttggatcgaaaacattctccggaaaaaaggtctcgattgtgactgcgattgctgttgtcggcattggctgcagactaccgggacatatcggctcgccggccgccttctggagcgcgctcctggcgggcagcgatcttgttactgatatcccgcagcagcgctggaatgccgacgactactacgtgcccgtggcggggctgccgggcagctcggtctcacgctggggcgcgttcctggacgacccatcgggcttcgaccatcgcttcttcggcatcggcgaacctgaggctctcgccatggacccccagcaccggctgttgcttgaggtcacctgggaggccgccgaacattctggtcgcgatccgcggtgcctgtgcgggaccgacgcgggcgtgttcttcggcctttcgcatcaggactacatgcaggtcacgcgcgacgcgggcgcgctgggccaggcctacgctttcacgggcacgcccttcagcatggcgtcggggcgggtggcccatgcgatgggcctcacgggcccggcgatcaccatggacacggcctgctcgtccagcctcgtcgccgtgcatgcggctcggcggagcctgcttgcgcgcgagtgccacattgcgtttgccggcggggcaatgttgatgttctcgcccgcaacatacgcctcggcatcgggactcggcatgctgtcgccgacaggccggtgtcacgcgttcgacgagcgcgccgatggcttcgtgcgcgccgagggctgcggcgtcgtgatgctgaagctgctgatcgacgcgcttcgcgacaacgaccgcgtgcttgccgttatccgcggcagcgccgtcaaccaggacggacgcacgcacaacatactggcaccgtcccgcgcggcgcaggtcgcggtgatcgatcgtgccctttccgaagcgcaggttgacccctcgtccgtcggaatgatcgaggcgcatggcaccggtacgcctgtgggcgacaccgaggagttccacagcctctccacgcagtatggacgacaggcgccctgcgcactggggtcgctcaagagcaacctcggccatgcggaatcggcggcgggcgtcctgggcctgatcaaaacgacgctcgcgctcgcgcacggcgtcgtaccgcgatcacttcactttcatcggctgcccgcgcatctccagacgatcgagacgcggctcttcgtcccgacggataccgcgccctggccctcgaccggtgcggacggactccgccgtgcagccgtatcgtcttacggcatgtccggcacgaatgtgcatgtggtgctcgaacaggctcctcaggcagcggattcaccccttccgctggagagccgtagaacaggcgaacggccgtggctgtttccaatttcttccacctcgccagcggcgcttcgcgcgtcggccggccgtcttgcgtcctggctagacgcgaccgccggcagtcacggcccgagtgacgtcgcgcgaaccctggcgtgcagacgagggcacaggccggtccggcacgcgctcattgcgaaaacgctcgacgatctgactgggcaattgcatgggctcgcaggcgatgcctctatcgatgcggagtgggtcgatgacaacggccgcgggcccgtcttcgtgttctctggacacggctcgcaatgggacacgatgggagcggcgctgctcgatgtcgacgcggtcttcgccgatgtgattgccgccattgagcctctgattcaagccgtcagcggcttctccgtgaccgatactctacggcagcccggacaactctccggaatcgaacgagtccagcccgccattttcgccgtgcaggtcgcgatggccgcgtccctgaaggcccagggtgtggcgccgtccgcagtgatcggccattcgatgggcgaagtgtcggccgcagtcgtggctggcgcactctcgctcgaagatggcgtaaaggtgatctgtcatcgcgcaatgctgtgccagacgctcgctggctccggtgcaatggcagtcgtcgggctggcgcctgcagcggtccgcgaagatctggcgcgccggctggtcaatgacgtggaggtcgcggtactggcggctccggcatccaccgtcgtcgggggctctgtcgaagccgtgcaacgtctcgtcgctgcttggcaggccgaaggcctgttcgcccgtgaggtcgcggtcgatgtggcttctcataccttccacgtcgagccgatccttgcgcaattgtcggagcgcctcgcgggagtgactgcgaacaagccgcagacgccgatgtactccacggtcctgcttgatccgcgcgaatcccccgtctgcgatggcgcttactgggtcgacaaccttcggcattcagtgcgctttcgtcccgccgtgcacgcggtgctcgaagacggacaccgcgtattcgtcgagctatcgccgcatccgatcgtgacccgcgcggtgttggagaatgctgccgcgatggacttcgccgtccgcgcgcttccgtcgatgacgcgcgccgagcccatgcgcaacgggcttctcgatctggttggcgccatctacgtcgcgggcgcggcgatcgatttcggtgccatgtatccggatggcccactgctcgatctcccgctgccggcctggacgcattatcccctgttccttgcgccggctgtgccaaccgcaggtgcgcatcaccttctgtcaacgcatccgcttctgaatgtccaccgcacgctgcacgaggaaccggaacgccacatctggtcgtccgaggttgggctcaatgcccacccctggcttgcggaccaccgggtgaacgaagtgccgcttctcccgggcgctggcttctgcgagatggcgcttgccgccgcacgcatggcctttggtacatcgcttgtcgaagtgcaggcgatgacgtttgaccacgcgctccggttggagccgtcgatgccggtcgtctgtacagcagtgctggatcggcccggtgagttgaacttcaggctcgagagccgggcagacagcggagcgcaggtccatgcaagggctcggctctttgcaggtgcctctgcagactcggctccagcttacgacatcgccgcgctgcgcgccgctcacgccgggcctgttgccgccgatgaagtgtggcgatggttcgactcgcagcgcatccagttcggaccatcatttcgcgcattgggcaccagcctggcgctatctgccgacggcgcctcgctctttgcagatcttcggctcccggcgtcgctccgaacgggcgcgcgcggctacacagtacatcccgtgctgctcgacgcgtgcttccagtccgttggcgctttcgctcaggtcgtttcggggacaaacgggcgtccgctactgccgctctcggtgagaagtctgcggctccaccacccagacgctgacgccgcgcactgcatcactcgctttgtcgcgatggacgcgctgcacgtcgaggtggacattgatctgctcgatgcctccgggcgcgtgctgctcagtgtcgatgggttggcaatgggtagcggtgcggccggacagcacgctgacgccgtggcctgcaactcgcgcctgctcgacgtcgtctgggagccatgggatatcccccgtgccaaggtccagccgggcgatggcgcctggttgctgctcgacgccgatgattccggacaccagttgacgatgaggctggagggaagcctgcgcgagcaagggttcaagactctcatcctcagcagcgccggggccgggaagggaggcatgtggcgcgagcagatcgaagatgttctgcatcagcatcgccctgcggccgtggctgtggtattgccgcgcagccgcgagccagcgtctccggacgcgggtcgagccaacataagcagcctgctgcacgtgaccaaggcgttgatggagtgcgagcggcggcctcgcctcttcgtcatcacctgcatggcccaacgcgtactgccggacgacaccgtccaactcgcgcacgccggtgtgcgtgggtgtctgcgggccgtcggcgccgagtttcccgcactccatcccacccagatcgacgtggaccttcgagcggacctgtcactgattcagcgtcaattgctgagcggctcgaaggaagacgaaacggcgctgcgcggggcgagcgcatatgtcgcacggctgcagcgaagtccgcttggtcatgctgatcgccgcatggtggaccgggacgcggcgcgcgatggtcttcgcctggagatccgcgtgccgggtgacctccagacccttgagatggccgcgttcgagcggcgcgcgccggacgcgggcgaggtggaggtggccgtccatgccaccagtgtcaatttcgccgacgtgctcgttgcccttggtcgctatcccacggtcggtggtcgcgcgcaggatctcggcctggactttgccggcatcgtcaccgccgtcgggccgggcctttcgccgtttcgcgtcggcgaccgagtggccgggctctgctgcgggggagcttgggccacgtatgtcacttgcgatgcgcggctgctcgctgcgataccccgcacgctcaccgatgccgaagccgccgccattctcgccacaaccgcgacagcgtggtacggcctcaaggatctggcgcggatcggtcccggcgacaaggtgctcattcactcggcgaccggtggagtcgggcaggcggctgtggccattgcgcgcgcggccggtgcagagatattcgcgaccgcgggctccgaggcgcggcgagaactgctgcgcgccaacggcatcggccacgtgtacgactcccgaaccgtggcattcgccgagcagatccggcaagacacggcgggttacggcgtggacatcgtcctcaactcgctcactggcgcgtcgcagcgcgccggcctggagcttctcgccccgggcgggcgcttcatcgagatcggcaagaaggacatctatgggggcacgtgggtcgagctgtctccgtttaagcgcaacctgtcgttcttcgcggtcgacctggcgcagatgtgtatgactgctccggctcgcgtgcaggcattgctgtcgcgcgtcatgcgtcttgccggagaggagcggcggatcctgccagacatcgctgcctatcctctcgccgacgcggctcgcgccattcgcgttgtcagcggcgccggtcacatcggcaagctcgtgctctcggttccaaggaccggccattaccgcgtggcagaggtgccgaagcgcttcacgccgttcaagagcgatggcgcttacatcgtcaccggcggcctgggcgggctcggcctgctgatcgccgacgcgatgtccgctgccggggctggccgcgtgatcctcaatgcgcgttccaggccgacggacgcggctgcgagcgtgttggccgggatgagagcgcggggcaccgaggtcgaggtgataagtgcggatatcgcggctccatcgaccgcgcggcgccttgtcgaagctgccactgcgacaggcctctcgctgcgcggtgtcctgcacggcgcagccgtcgtcgcagacggtatccttccctccgtcaccgaggagaggctgtatcggaattgggcgccgaaggtggatggcgcctggcatttgcatcaggcaaccttgaagcgacagctcgactggttttgctgtttctcgtcgctcgcagcgctctttggttcgccggggcagtccgcctacgctgccgccaacagttggcttgacaccttcacgcagtggcggcgcgcgcagggcctgccgtcgtcggcaattgcctgggccgcgtgggcggacgtcggcgcgggtgcgcatctctcggcccgcggcgatgtgcgaatgattgacccacgcgatggcgcttatgcattcgagacgctgctgcggcacgaccgcggctatgccgcatatgtcgatcttggcggcgcgccgtggctgacgtcgctatcggcgcgaagcccgttcgctgtggccttgtcgcaagctccggcggtcgcggacgatccggcgcgccgcctgcgcgcggagctgagacgcgcaccgctcgatgagaggccggccctgttgcggcgtctgatcatcgagcatctcggtgtcatcttgcgccgcacggtgaatcccgaccgctcattctttgactacggcctcgattcgctggggacgctccaattgctggtggcactcgaatccgacaccggcgtccggctgcgcgccgtggaggtgacgaccgtgcgtgctctggccgacacgttgagcaaggcgatgcgagaattgcagccagccggagcagatgccggtgactgatctgagtccgctgcatgactggtcagggcctcctgcgacgctgactctctggtgtccctctgcggcctcgatagaaagcgccaaacgcgcgccggtgtcgcccgccttgccgagctacgaacaggaacagcatctgcgtgctttccgtgcgtgcgagcagcggcaagaggcgatggcgcgcctgctcgtggttgtgtgggatgaacccgggcgatgtgacctcagggcgatgacccatgtggtgaccgcgcatctgcgcaggcacgacacttatcacagctggttcgaggagcgcggcaaagcgatcgtaagacacgtactgaccgatcctgcggccattcagatggagtgttcgacgctcggcgaggtgagcgctaaggattggcagaagcacatcatcgcaaccccgacaccgttcgcatgggattgctttcgcttcggcattctccaacgcaccaatggcttcacttgcttcgcaagcattgaccatttgcacggcgacgcgaccgtcatcgcgttcctgatgacagagatccgcttggcgtatcgcgctgtgctcgacggggagacgccgcttcaactcggacggccgggcagctatctggattactgcaccagtcagcgccagcgggccgccgtgacaacgttgtcggatcccgaggtggagcagtggatcgcgttcctgcaccggaacagcgggcggatgccctctttcgcgttgccgctcggtgtgatggaggatcgctatcaggccgagtacgtgcacatcgacatcttcgatgatgatgccatggccgcgttcgagtccgcgtgccatgcttccggcgcgcgggcaatcggcggcctcttggcctgcgcggccctaaccgaacgggaaatgacagggcggtcgcgctacagcgtcgtcactccaacgacgacgcgaatatcgccacaggcgttcaggacgaccggctggtgcgttggcgtggtgcccatcgacttcgaggtgcaagagctgacgttttccgaacttgccctcattgcccaacgcaactttgacgaacggctttgccttgccaacgtgccgatcgagctcgtgctcgaactggccgccgggctgccggcggtacggtccgtcgccacgggtggcgtcatgctgtcgtatatggatgcgaacgttcctccgctcagtgcgcacattgcgcgcgaatggcatgaggcgaatgggcgcgtttatattaaccaaggcatggccgcgcaggttgcgctctggttgtttcgtacgcaacgcgggctctcgcttacggtggcttatccggccaacgcgaccgcccgagcctcgatgcaccgctatgtcaaagcctttgcgggtgcatgccgccgggcggccgacgcagtgatggcgacgcaagctcatgtcggcctttcgctatgacgcatgcgatcgctgacccggagaacccgcaccctatgtcgccgccgttcctgtcctttacggatcaggcaatttacctcgcgcatgtctcactcgggcaacatgcggtcattcaggtactgtggcgctatctgcggcctgtggacctggacgcgctgacacggttccgtgacaatctcgcgcacggacatctggcgcggctgatccggccggcgctgcttccgttcgcgcggcaccaatgggtcagcgcgccaccaccttcgtccgctctggctgtcgtcgaggcgccgcttgcccctgagcagctgcaggcgtgggccgacgcgcaggtggcgcttccactagatccggtgcgcggaccagcatggagattgacgatccaaacctttacagacaactccacggtggtctcgcttgtggtgtcgcactgcatcgcggacggactgaccatcgcagcagccgtgaacgaagccgtgcggggagagcgaaggcctgcggcctatcccgcaggggcagtcttgtcagcgctccgcgctgcgacaacactgggtgccgaactgcaacgtatcgtgcgggacgcgccggcaacgctccaggcgctcgccgagctggcccgtacagcatacacctcgcgcgccacgtcccgcaccgccgcgttgaatcaggctagcgcagatggccggccagtcgtatttccgtcagccttcatgcgcgtacccacgtccgtctgggacgccagggcgaagagcctcggtgcaaaccgtatcaccctcctggccgcgataaccgcggcttttgcccagacactcggtcgtgtccgcgacgaagaggtgaccttgttgattcccgtcaatcagcgagagggttcgtcgcacaccggcggaaacggcgttgcgcttgccacattgaagctgcgtgtcgacgaattgcgcggaggtctgcattcgttgcagcggcgtctgctagctacgctgctgcggacgagacgggaacccaatcgacttgccacgctgctgcccctggtgccgtttgtgccaagacgcgcagcttcggctgccaaccatgcggcacttggcgcgctcgccgacctgccggtcacctgttcgaatttgggcgacctgccgaaggacgtgctccagatcgacggcggcgcggccgatcgagtctgctttcgcggcatcgaccgccccatcccgcgctgcgcgatcgaggcgcgtcaaggtgttgcgactgtcttcgccggcgccgtacccggttttctgaacctgagcttcgtagcctatcagcctggcgtggtgacggaggctcagcatcttcgcgcgctcgtcgaacggctcttcgctgactgcgaactcgttggcgagtccttcgatgcttgagacgagcacgcccggcgcccccgcctacacgcggcaccgcctcgcctggctggaccaactggcttacgaattgttcagggccacgggtcgaagccaattgatgcaatgcctgtggctctacgaccgtgacgtgaacctcgccgcgctactgcgaacacgggagcggttcgcggcgctgtcgttcaatcgcctcatcgagccgtcgcccctgccgtggggaaggcctcgttgggtgaagccggccgtgacagccattccgcttgagcagagtgcggacccgctgccacgatcgcggctgctgcactgggctaaccagcacgcgcgcgcgcccatcgaccctgtgatcggtccggccgtgcgaatggccatccagccgttcgacgacggcagcacggccgtgagcctggtcgggtcgcatctgctgctcgacgggctgggggccgtgcgcgccatcgcggcggccgtaaacggcatcggcctcccgagcccatacgcaattgcaggtgcccgggggcggctgtccgggtgcgtgtcggacgcgtggcaggtcctcgccgacgctccgcgcacggtcgccgcgctcgcccggatcgcccacgcgaactggtacaagtccgcagtccctgtgtcgaggtcggccgctgcagtcgccgaggcaggccacgagccatcgacgatcgtggagcttccggcggttgtggtcactgttgaatcggatgcctggctcgtctgccagcagcggcttggcggtagctcgaatacgctactgccaggcttcgtcgcgtccctcgcatcgcgcctgggccgccgccgtctctccgacggcgccatcagcctgcttgtcccaataaaccggaggcgtgggctcgatgacgaacgggcgctggcgattgatttccacacgatgaatgtcgcgcctgcaggcttggacacgagcctgcgccccgtcaatgcctcgctggaggcactggttcgcggcgcgaggaaaagtcagaccggtccactggcttcgttcctgcctgcgatcgcttggatgccgcgctccgccgcgaagacgctcgtggaccgtttgttcaattatgccggtgagctgccggcgagttgttccgacgttggtatgctgccggacgggctcgcgcgcatcgacggcgcgccgtgccgccaggtgttgacacgagctgtggatgtcaacgttacgcgccaagacctggagcgctcccagggccatctcgtggttgttgcctcccgctacggccagacgatttccctctgcatcgaggcctgccagctgggacccacacaaaccacgcctgacgaacttcgcctgctggtctcgcggacactcgcggacttcggactggacgcaatcatcgatgcgtgatctcaagggaacgcgccgcgctcagcgtcgtgccacattcgtctgcaagtgccgaaggacaaggggcgacggtcgcttcgcgcagcaaagatcgtggaggcttgagcgtgagccattcgtctgccaacaagctctaccgacgctgctccggggcgaccgaccccggcgcagacgacgtgttgtgctatatggaccagggttcattcgtcggattgcgcgcgctcgggcgcgggcctgcgctgcacctgacctggttgtatccgcacgctctcgatgaagcggccgtgagggagttcaacgagcgcctcacgagaggattgctgggacgtctcctgcagcgttcgccattaccatgggggcggcaccgttgggtggccaatcctgtgtcggggccggtgacgtggtttcgtgacccgctcccggatgagcgtctgccccatttgcgacgtgagctgctcgatctgcctctcgatcccgagcacggaccaggctggcgactggcagtccagccgctggagggcggcggctgcgcgctgatgatgctggtctcgcacacgatcgctgacacccaagccacaagtcaggccattgctgacgcagtggcgggtcgatgtcttgaccatggattcccagccccatcctggcgatggtctccagtgatgctggcgtgcgacagcgtcgagagcttgcggactctgcccgacgtctcgcgtgctctggtagctctcctgcgaggggcgcacaaaaggagggcgggcgtgtcccgttcgagcgctcgaagcagtcgcaaccggcttgagccggcagtggatgtgccgcttgtgtgggtggtcatggacgcagcagcgtcgaaacggcgaacgtcggatctgggtgtggcgagcaacacgctgatcatggccttcacggcacggctcgctctccggatgggccgcgtggatgcttcggggcgcgtgaagctggtgttgccggtcagcgaccgccgttcgagcgaccgccgcggcaacgcgctgcggtcgatcaccgtgatggtggatcccgatgcctgccgcaacgatccgcgcgctttacagcgagatatgaaggctgccctggcctcgctgatccgccacggtgatgacttgtcgccggtgctgccgctgattccgtatgtgccgctgtggctggcgcgtcatctggagcgggcggcactcggggcggacctgcctgttggatgcagcctcgccggcgaattgccgctcgacgtgcaccgcccttgcggcgaggcgtcacttctgcagattgcccctctggagcgctatacagccgcagaactcgaacggctgggcggcctgctattcatcctgtgccaccgtgtcggcgaacggctgttcgccactgtgtccggctacgccaaagatcgcgtgacgacccgcgccgaattggcaccgatcgtgcgcgacgcactcgcggatatgggcctgtgcggggcgctcagttgacgagaaccgaccgacacagcgcacggccaagacggttgtcgaacgttcaagcgacgcgcagcgcatcgacgatgttcatgcgggcggctcgtaccgccggcagaaaacccccgaggaggcccatcaccagcgcgaagacgagcgaccgcagcacgatgccgggcgtcagcacgaactggaatgcgagctcggagagcgaggtccagttcagcgtcgtgatcttcacctgcgtcatgagcgatgcgaacaaaagcccaacgacccagccgacgagcgcgagcagcagcgcctctacgaggaaagcaccgaggatccgcgagcgccgaaatccgagtgcgcgcagaacccccacctccatcatgcggctagccaccgcagcgtacatcgttatcgtcgcgccaatcaccgcgccgagcgagaacatcgccgagagcgtgatcccgagaagctgaatgaatccggagagcaggcgcgactgctcctcgtagaagacgcgctcgcgcttggcctcgatggtgaggcgagggtccgcttcgagccgcgccttgagcgcgtcgaagcctgagctatcagccagccgtaccgtgacggaagagaagaagtctcgccgaaacgactgcatgagctgttcgctgtccgcccagatctccgaatcgaacccgctgccgcccgcgtcgaaccggcctacgatcttccactcccggtgcgcaaatttcaggctggatccgatctcgatgtcttcgaaacgccccgcgagcgcccggccaatgatgatctcgtccgatcccagacgaaacatgcgtccctcgaccagccgcaaccgcgggcggacggccagagcggctggaccaacgccccggatcaagaggttgcttgcctgcttggtcttgcgccggggctgggcgatcagcacagccgcttccttggagacaacaggtgcgccctcggctcccatgacgacctcgggctggctttcgatgatcctggcctgccgacggtcgatcaggctctggatctcgacttccgcagagcggcgtacgaagatgacgttcgtttcctcgccggttgccacgagtgtctgcttgagtccggagtcgagcatgagcacggcggcgtagacgaacaccacgagggccatgcccgccgcggtgagcaaattggtgagtttgcggacgtagaggttacgcaggctgtaggcgagcagcaacggcatgatcagcccaacgcccgaagaccgttgacgatgctgacacgggcggcctggcgcatcggcaagaccgccgcgaggaccccgaccgccaatgccgaaagtgcctgaagcaacacagtgttgacgctcacgatcagcgacgggaagagcgtcgcggagagttcggcaagtcgcgaggcaaccgggggcgtcagcccgatggcgatggcaccgccgaccaatgcgatcgcgacggattctcccaggatcaggcgtgcgacgtagccggggctgaagccaatggccttcagcgtggcatactcgcggagtcgctcgcgcgccgtcatcgccatggtgttggccatgaccgccaggatgatgaagatgaccacgaacgagaccacgcgaatggagatgaggatcgcctcggtctgcttcacgaagccgatctggaacgcgcgctcagtctcggtgagtgtctcggcgcgcgagtttcggaacacttcgtcgatcgcctgactgacttccgcgacccgattgatgctgccaacgtccacggcgaagaagccgacctggtcggcttgtgccttggagcgcacccgtagcgtctcgttcaaatagtcccaacggaagaaaagctgcgaggtgtcggttttggcgtctcggccgtcgaagacgccgcagatcacgaattcccagttgccggggaaaagcgtcccgcgcagttgaacaacatcgcccggcctgaagccgaagcgcttggcgagtctgcgtccaacaattgcgccgcggcggtcgcggaggaaggcgcgccgcacctcgtccgaaacgaggatctcggggaagatatcgaagtagctcgcggcatcgatcgcaaactggggaaagaaattcttcggatccttgtagacgccgccgaaccaggtcatgtaggtgacgtgccgcacgccttcgacagcgccgatgcgcttgtaatatgcctgcggtagcggcagcgtgaaagagacggcgttgcgggtgagcagccgcgaaggcacagcgccatccacgccagcgtaccacgttttgaccaccgtctggagcacaccaaaggccaggattgaaacaacgaggccgaccagcgtcagagacgtgcggagccgttggcgcaagacgttgcgcgccacgagcgtcagccattggctcatgaccggcgctcactcaaggcgctgctccaccagatacgaaagatcgcccttctccagatgcatgatgcgcttcgcacgcgccgccgcgcggcgatcatgggtcaccatcacgatcgtcttgcccatgtcgcggttcaaccgctgcatgatctcgagcacctcctccgcggactgccggtcgaggtcgcccgtcggctcatcggccaccagcatcgtcgggtcggtgacgatcgcccgcgcgatcgccacgcgctgctgctgcccgcccgagagctccgaaggcagatgtttgacgcgatcgctcaagcctacgagactgagcgcgagttgcgcgcggtctcggcgttcgcggcgcttgaggcccgtgagcgtgagaggcaattccacgttctccagcgccgtgagcacaggcatcaggttatagaactggaagatgaagcccacattcgccgcgcgccagtcagcgaggtcggcttccgggaggagcgtgatgtcctcgccagccaccgtgatcgagccatgatccggactgtcgatgccggcaatcaggttgagcagggtggacttgcccgacccggacgggcccatcagcgcgaggaactccttgcgacggatgtcgaatgtgagtttggaaaggaccggaacgatctgcgcgccgcgccgatagctcttgctcacgtcgctcagcgcgatgagcacgtcttcgccggtcggcacgtcggagacgcgaagcacggtcacttcgtggcctgcttgactgcgtgcccgtcaacaagatcttccagaggtcggaccaccacgcgcgtgccggctttgagatcgcgtacctcgatctggtcgcccaccttcgcgccgagatccacgcgccgcaggcgagccttgccattctcgatgacataaaggtgctgttgtccgcccacctcgaagacggccgccatcggcactgcaagaaccggcttgcgctctgattcggctacttcacgctcgaggaaggccaccttggcgctcatgtccggaagcatccgcgcgtcgcggtgcacgaaccggattttcacgagggtagacgccttggcgcgatccaccgtcggtaccatccggttaaccacaccctcgaaacgctcgccggggatcgcgtccagctggatctccaccgcttgccccacgtggatgctcaggtacgacgactccgcgacgtcggcttccacttcaagcgagtccatgtcggcgatggtgaccaccgcgcccttggtgtcgaccgcctgcgagaacggtgtgatcgtatcaccgacgttggcgtgccgcgtgagcacgacgccgtcgaaaggcgcccggatcagggtctggccgacggcaacttcggacgcgcggagattggcctgtgcagcggcgatggcggcctcgtacccggcaaacgctgctcgcgccttggcgaggcgtgcctcagcgctttcgcgcatcgaatcgcttatgatgttcttctcgccgagggccgcggagcgcttgaacgcgatctccgcttgcgtgagctccgcctgcccctgggcgaggttggcataggcaacctgcacgttggcggcggcctggtcgcgcatcgcctgggtatcgctgctctcgagccgggcgatcacttcgccctcgtgcaccttgctgccttcgagtacacccaaccattccaggcggcctgtcgccttcgaggcgacggacgccttgcgttgcgcaacgacgtagccagtcgcgttcaacagtgtcagcgcctgtgagggatagacggagtagacggccgccgtctcgaccgcgatctgcgtgtgccggcgccacatccacgttgcgactccgatgccgacaagcatggcgaccacaaggacccggaccaggatgcggcgcagttgtctgcgacggcgagagtcggcgctacggtcgatcgcaagcgccgatagatcggacgcggcggggaggccatcgcttgggggggtgtgcagattcatagtctcgtcatgaatttccgggcaatgcagcgcaaacttgaagaaaatatctcgtttcggaagcggtaagccaggcactcgacgactgtcaattagcatcaaaagcgagtgttgacacctatcatttcgaattctccaaaccgagcgacgccatagaattcatcgtcgcacgacggggaggcgagacgacatcaaacctgcggctgcgcgtgggttgcagcggcgtgctaccaggggatacggccctgcgtcgccatcgacatcagggatacgcattgagggcttgccctgcagcatccttggacacgtcgctttgagcgggcttctcaggatcagggcaaagtgcggggcagcagctgcagcggcagattggcccttgtcatgatgaggcgcataagtgccgtcccgagatctggccgcgtcatcgaccgctgcgggcggatattcggtgacgccggtgaggtcgtcgttcgctcctcgatcgagtgctggtgcgccagcatttgcgaagcaccagccagatctacccgcaatgacgggaaagccggtcgagttcgctcggtcatttgctgacgagcaggaggtgcaagagtgatccccagcccctttggcgcacgtgttacgtctgcctcagcgatcgcccaagccatcaccacacggcgcgcccatcggcccgaaacggctactcgatggatcatcgcaagattgatcacgcgcaaacgaaggctgctgctcagttgctatcgtccggcattcacgatcggaaggaagtcaatcatgcgaactttacgaaaattgagcgcgctggcgaccgttgccgtcattgccacggcagctttgatgccgaccagcgcagaggcccggaacggtcgcatcgcagccggagtggtcggcgggttcgccgctggcgtcctggccggtgccgcgatgggcgggccttattgggggccctatccgtactatccggctccggtctactatccaccgggaccctattatgcaccgtacggacccgtctattacggcccgtgtgttcgccgcaccgtctgggatggttggcgttggcgccgcgtgcgcgtctgttactaagaagatgcagatcgcagctcgggggcgcgccaaagccggccgcctcccggctgtcgtccacggccaatcgtggagagccgaggctgcagatcgaaccgtcgagccgacgatcgaccggatcgttgccaacctcgcgccggtcggcatcccaaagcaggaagtcggtcagaagatgagccggcttttggcagggggcccgaagccgccgaacgcacgggcgaggcgacgttccagtcgcctcgtccaaccgcctggatggacctcagccgatgaacgagcgatacggctcggtcagtagacgaaggccggggtctcgatcaggtgatcattcaccagcacgacgcctgggatggcctctgccgcgacccggatggccttgcgttccgcggccgatggcgcgctgccccagatgtcgatgatgccgttctggacggtcgcgttcaggttgaatgtgtgtgcccaaggttgcttcttgatctcctccaggaatctctttctgatggtggcgtcgggaagcgaaatttccagcttcggcttggcgctcgcgacggcctgcagcaggttggtccggctgacgatcccgacgagctggccttgcttgttgacgatcggcacgcgtttgatctgacgtctttcgagcagcatggcgatgtcgctcagcggcgtttcgggagccgcagtcacgacatcgcgtgtcatgatgtccgtgaccttggccgaatgcgatttgacgtagtcagccgccatctcggcgtcgccggtcaaaatctgaagccaccagccataggagcgctcggtgccggattcggttcggtgcagcagatcgccttcggagacgattccgaggatgttgttgtcggaatcgacgaccggcaccgcgctgatgcggcgctcgagcaggatcctggcgacttggcgaaccgttgcatttgcgcccacagtcaccaccggcgcgatcatcacgtcctgtgcttgcatggcagacctccgtgctggtttccggcatcttgccgtccatcgggccaaccggattgatcgggatcaagcccaggcgtgatcgcttgacctgcgtcaacgggacgacgtcgaaacgctcgataagggtaccattcgaacaatggagcaacgacatgtctctagccagcgtcatggtctacgtcgatcccgagcagcaggatgaaggccagatcgccgtcgccgaggccgtcgcaaacggcttcggggccgccttgcttggcgtctcggccatcgccacggatcccccgttcgtcgccgaaggcgtgatcatcgaacagacgacggccgacgatctcgagcgcatgcgcgcaacgctgtcggccaaggaggcgtggttcaggcgtatcgttcggctgccgagcgacaaggtggaatggcgctggacgatcgggtttccgaccgagttcctggtcgagcagtccagggcggcggacctcgtcgtggtacggcgcagccggccgaagaccaaatcctctcattatctcgatgcgcccggagccatgttgcggctgggccgtcccatcctttcggtgccggacggcgtcacccgattgtcaggcgaccggatcgtggtcggctggaaggattcccgggaggcgcgcttggccgtgcgggacgcactgccgttgctgacccgggcttcagaggtcacgatcaccgaagtctgcacctccagcgaacaagatgcggcgcgagaccggttgcgggacgtggccggatatctcgggcgtcacggcgtgagctgccggcacgaggtgcgcgtacatacggcggagccggacgcgggctacctcgttcggctcgctgccgacgtcggcgccgacctcatcgtgaccgggggatatggacacagccggttgggagagtgggttttcggcggcatgacgcaaagcctcctgcaggacgctccggtctgcctgttgatgtcgcactgacgtcccgcttcgggtgactgttcggcatgatctcggcagcaaacgcgttccgggcttgctgcgagggtttgttgggacggaagactgctgcgcagtcttccggatcatgcttcagcccgcagcccgccgccgtccgccgctgtcgctctccgcggcgccgacggtctcgatggtccgcaacacgctcgacggattcacgctgatcgagtcgatcccgagctcagccagatacttggcgatctccgggtagttcgcgggggcctcgccacagatgccgacgtggcggcggttgcgcttggcgccaagcacggccatcgacagcatttgcagcatgccgggatcgcgctcgtcgaaatcgaaggcgacgatctcggaatccctgtcgacgccgagcgtcagctgggtgagatcgttggagccgatggagaatccgtcgaacaattgcgcgaactggtcgatcaggatgacgttgttcgggatctcgcacatcatgtagatttcaaggccgccgtcgcctcgtttcaggccgtgatccgccatggccgcaatgaccttgcgcgcttcttcgacacgccggcagaacggaatcatgatcttgagattggtcaggcccatcgcctcgcgcacccgcttcatggcggcgcattccagcgcgaagccttgcgcataggcggggtgggcgtagcgggcggcgcccctgaagccgagcatcggggtctcctcgcgaggctcgaaatcggccccgccgagcaggttcgcatattcattggtcttgaaatcggataggcgcacgatcaccggccggggatagaacgccgcggcgatggtgccgacgccttccgacagccgctcgacgaagaactcggacggcttcttgtggcgcgcggtcaacagcttgatcttccgtcggtcccgcgctgaggtcaccttgccggggcaggcgagcgccatcggatggatcccgatatgctggttgatgatgaattccatgcgggcaaggccaacgccatcgctcggcagggatgcgctcttgaacgcgatctcgggattgccgaggttcaccatgatttcggtgcgcggcttccgcacactttcggtcgcggtccgttcgacctcgtagggcagtgtaccttcgaagacgtggccgatatcgccttccgcgcaggacaccgtcaccgccgtgcccgtcttcgctttcttgctgaaattgccggttccgaccacggcgggcacgccgagctcgcgcgcgatgatcgcggcatggcaggtccggccgccatgatcggtcacgatcgcggcggcaagcttcatgacgggctcccagtccgggctcgtcgccgtcgcgaccagcacctcgccgggccggaatttacggagatcccgctcgttgctgatcagccggatgcgtcctgccgcgatcttctctccgacagcgcggccttccgccagtgctgtcccgcgcgctttcaggacatagctctcgagcgcctccggcgttcggcgggaggcgaccgtctcgggcctggcctggatgatgtacagtgaaccgtccttgccgtccttggcccattcgacgtccattggggtcggcttgccggccttttgcgagtagtgcttctcgaccagcagcgcgcactcggccagcgtcaggacctcgttgtcattgatgcagaattgctggcgctcgcgcgccgccgttgccacgttccgggttgcgttgcgcccgcgaccgtagaccatccgcttggccttggatcccaggcggcgcgacagaaccgagcggaagccggcattgaaggtcggcttgtgaacgtagaattcgtcggggtcgacagcgccctgcacgatgttctcgcccagtccgtagacgccggtcacgaacaccacgtcgcgaaacccggtctcggtgtcgagtgtgaaggtgacgccgcttgccgcaaggtccgaacgaaccatcttcatgaccgcgacagacagcgcgaccttgaagtgatcgaaacccttgtcgatccgataggagatcgcgcgatccgtaaacagcgaagcgaagcagcggcggcaggcctccatcagcccgtccgcgccgcggatgttgaggaagctgtcgtgctgtccggcaaagctcgcggtcggcaggtcttcggccgtggccgagctacggaccgccaccgcaacgttgcgaccatattcctgctccagctgccggtacgcctgtgcgacctgctggcggagatcatcccggtcggtagcggcatagacgatcgcgcgcgcggccgcggcgcgtcgggcaagatcggcgatccgccgcttgtcgatgccggcgagcagagggcccagcttgtcccacgcaccggcttcggtcagggcgtctcggaatgccgcggccgtcagcgcaaagccgttcgggaccttgacgccctgcggcgtcagtaccgaatataattcgcccagggatgcggtcttgcctccgaccagcggcacgtcggcaagacggatgtccctgaaccagcgaatgtagctcggtgcgtccatcgcgcattctcccgcgctgcaaaatggatctgaatgtcgatatctttcccgcatctgcgcgcgactgatttgcgaaagatcaagtgcgcaacgcgcgcccgctttagctgtgaacaataatgacgatggaacccgaccagagcgcctcttcactggagaggtcacgattttggcagagcgcctccggcttctggcgtggagtaccggcatggcgcgtctgggcgctgtgcgcgctcctggtgagcgtcgtcgtcctccagctctatgtgcaatttcgtttcaactactggaatcgcgacttcttcgatgcgctggagagccgcgatcccgcacggctgagaggccaggcgctcctgctcgtcccattgtgcctcggcagcgtcgcgctcgccgtcacctcggtctggggccgtatgaccgtgcaaagaaagtggcgggaatggctgaccggcaaggtgatcgactattgggtcgaggatgaccgttatgcccgcctcgcggccgtgcagagcgagcagcagattcccgaataccggattgccgaggacgtcaggatcgcaacggatgcgccgatcgacttggcgctcgggctggtctccgcgctgctcagcgccgtcatcttcattcagattctctggaccgtgggtggcgacatcgcgctgcctgtgggaagtcattccgtccggattccgggctacctcgtcatcggtgtggcgctctattccggcatcgtgacgaccgcgatgacgctggtcggggcgcccctgacccggctggtccagatcaagaaccaggccgaggcggagttgatcacggcggcccacgagctgcgcgacatcggggagggggccgcgccgcgagaccgacggtcggaagtctgccgcgacgttcgcagtgcgctcagggccaccatcgatcagtggcgccgtctgtgctggcaactgatgcggacgacgatcgtgtcacatggaaacacgcttttggcgccgatcatcggcctggtgctttgcgcgccgaaatttctttccggagccatgacgctgggggagctcacgcaagccgccgcggctttcacgctggtgcaggcctcgttcaactgggttgtcgacaattacgcgcgtatcgccgattggaggtcgtcgctggaacgggtcggcggtcttctgctttcgctcgaccgcctcaaccgggaaacgccgccgcagcaggcagagtccccgatgcttccgactggatcggtcaaattgccgtagaaagaatgacttgttcggcgagacgcttgacgtcgtcgggccggcagagttcggtgcctggattgagcagggccgcggcgccggcggcgacggcctgccgaaagcagcgctcgaggccggctccagatgccagcccatagaccagcgcgcccagaaaactgtcacctgcaccaacagcgccgacgggcgtgatcgcaagaggttttgcgcgcagcacctgccggctcgtcaccagggcggcgccgagatgtcccattgtcagggcgacgatcgccgctttgccgctgcgcaccaacgtcttcgcagcagcttcccattcggcggcgtcggatggctcgtgaccgaccagttcgcgcatctctcgcaggttcggcttgaccagctcgatgccctcggccaccgcggcaacaagggccggaccggaggtatccaggatcatcttggcctcgcgccgtttcacgatccttgcgacacgcgcgtagaaatcgtcgggcacccccgccggcaggcttccgctggcaaccacgaagctgggaaacggttgaagcgccgacagcatggcgaggcaggtctgccattcattctcggcaagaggcggtccaggcaggatgaagcgatagggctgggacgtgctgatctcgcgaacgaagaagtcttgtcgggtttcgcccgcgatcggaaaggtcaggctttcgatgccctccttgtcgagcaattgtcgcagcaggtctcctgtgaggccacccaccggatagagcgcggtggcattgccgccgaggcgcttgaccacgcgcgcaacgttgatgccgccgccgccggggtcgcggcgctgcccgatgccgcgcagcttggcgacggggatgatcctgtccaccgacgtcgacacgtcgacggccggattgggcgtgatcgtgaggatctcggtcatcggctcaatcggagaccgcggtggcggccgccgccccggctcgttcggtcatggtgtcacgctccgcacggtctgcagcaatccgcgatgttcgcgccgtccggatgagatcggcataccagtgcgccgacgccttcagtgtccgcttctgcgtggcaaaatcgacatgaaccagaccgaaccgctgcgaataacccgatgtccactcgaagttgtcgagcagggaccagacgaaatagcctttgacgtcggctccggcccggatcgcctcctgcatcgcccttgtataggcatcaagataggcaattcgtgcagggtcctgaacgcggccggcctcgtcaagcttgtcgtccgcggccgtgccgttctccagcacatagatcggcaaacggaagcggtggtggatgtccagcagcgtgtcgcggaacgcgtcgggtacgatgggccagccgatagcggttcgccgcacctcgacgggcggtgcgccgaagccggcgccgatcaaattggcatcggccctgatgtagtgcggcgaatagtggttgagcccgaaccagtcgaccggccttgcgatctgagccatgtcgcccggcttgatatagggctcgatcgcctcggcaagctccagggggtaatgggcaaggtgctgcggatacggaaatgcgtcgttccagtacggcgcgaagcgccacgtcgccgcaacatcctcctcccgcgtggtggcgggataacagggctggcggttgtgaatggcgccgagcgatgcgttcgccaccgactggcggagcacgtcgatggcacggccgtggctcaggttgacgtggtgaatggcttggtgcaaagcgcccctgtcggcgatgccgggtgcgttccagccgagaccatatccgaacaacgtgaatacgcatggttcattgaaggtggcgaaccgcttgacccggtcgccaaggcgtcgggccaacaacgcagcataatcggcgaaccatcccgcgatgtcccggttctgccagccgccgagatcctgcaacgcctgcggcagatcccagtgatagagacaggcccagggttctatgccggccgccagaagagcatcgaccaggccgtcgtagaaatcgagacccgcctggttcgcagccccgcggccgcggggcagaacgcgcggccatgagatcgagaagcggtaagcgccgacgccgatatcgcgcatcagcgcgatgtcttcagggtagcggtgataatgatcgcatgcgacgtcgccggtgtcgccgttcttgatgcgaccctgttgccggcaatagctgtcccaaatgctgtcgccgcgtccatccaggtgagaggcgccctcgatctggaagctcgaggtcgagacgccccacagaaacgaatccgctgccggcatccgcgtttgaggtgagggagcggttccgtctgtcgttgtcatgtgcctgccttgcgatggcgcagttcggatgggatcggtccacaatgctgctctttaccgatctgcgtttgacggagatcaaccgcccggcaggcaggccgtcagcgccatgacgcctcctagcgcggcggcaggccggctctcaaggcttccaggtacgcgacgatctcgtcgatttggtaatctgcgaggcgggggtttggcatggcctgttcaggtccgagcctgcggtgaccggaaatgaggaacagcctcatgccttcggcggagaacgaggggcgattgacgatcgccagcaagctcgcggccggcgggcggaacgccggcgattccttcgcggcatcctccacgacatggcatgttccgcaggacgcatgggccagcgcccggccttcggcgacctgatcgacgaacaattggttggtgacaggcggacgaaccgggacttggattgtgatcgaggcgtagccgctggcccgatggcagctgttgcattcgttcgtcaggtccgaataggctttggtgaatgcaggcacgtccttttgctggatcgccaagcttacggcttgcagatgatccttggcgggaccgaggcgtgatggatcgggcaagagcttgccggaggctgcgagattgccttcgatatgttggatttcgtagctcgccaggctccagttgctgaacttgcctgcaaaccagagcttggcatgttgcagttgaaggcgggtcatgagatcggagagcgcagcagagacgtcggctgcccttgcagccggcgctcctgcgcccagcgccgcgaccgccgcaaagatcgccatcatgaacattgctcgcaggcgcatgtccaatgccccagatttgacggcagcatggcactctatcccagccgggcgttgatctcgatcaagagcctgtcaggagcgggcgactacctctaacttctctctggagttgaagtcatgcgcgcgcatcagatcatgtcccgccgggtgatagccattcggcccgaggcctcgatcgccgacgccatcaaggtcatgctcactcaccacatcagtggattgccggtcacggattcggcaggcaatctcgtcggcatcatttgcgagagcgacttcctcagacgggccgagctcgaaacggagcacactcgcaaccggctgctgacggttctgctcggagcagaccgggttgcgcgcgagttcgtcaaggagcatgggcgcaaagtcgagcaagtgatgacgcgtgatccggcgacggcaaaggaggacactccgctcgaggagattgccgatctgatggagcgccggaacctgaatcatgtcccggtcatgcgtgatgagcgcattgtcggcatcatcacccggtccgacttcctgtccgcaatcgccggcccgctgaccggcgcacccggctattcggaggacgacagccagattcggcgctcggtccttgcggccatggccgggatgccttggcagcccgtcggcctgaacgtgagcgtgagggatggcaaggtgacgctgcgcggcgtcgtcaagggcgacaacccccgccgggccgcaatcgtcgcatgtgagaacgtttcaggcgtccgcggcgtcgatgatcgcctgtgccttcagtcggacagcccggccccggaggacgattacggcggtggggacttcgtctcgctgcaggcagaaccgtccacggtcgatgacgaaccattgtgacgatcgcccctgccggagcactgcagggcgaccgcgcggaaggatctaggccgcgtattcataaatcagcggcatagtgcgatggagacaatatctgctgagcgcctaccgcggcaaccgatgctcagtgtgcctaccgtggtctgagggtgcccccttcctggcgaggcgggaactgctccattgattggtagtgctcagctagaatgtcgcggatcatgttgccaaggtacgcctttcgcatcgccaacaagttcgagcgatgcccgtcgcgctgctcgaacgggtccatgcgcaggttgaagaccagcgcgctttcgacgaagggatcgaagaagccgttgcgcgtcttgaaatgggttttccagggcccgaagcgcagagcggtcatctccttttcgttgtacatgatgtggacctgacggttcgaaggcgcctcaccgcgccaatgggcaagattgtcgatgccgtcgatctttaccttatgactttcgaggaggtccttgcgaacgtctacgacgccagctgcacgtgaaagcgtggtaaaaagatccatgtgattctgaataccgttcgagaccgaagccggtttgatggcggctggccagcggatcagcatcggcacgcgcacgccgccttcccaagtggtcgctttctcggagcggaatggcgtcgtgccgccgtccggccaccaggccgccattgcgccattgtcgctggtgaacatcacgatggtattttcgcgaaggccgagatcgtccagcttcttaaggatcgcacccacctgctggtcgagctcgatcatgccggagccgtagatgtcgtcacctgacgagaagggctgcgcaagcagccgactttcaggccgcaaatttgtgtagatgtgcatgcgcgagggtgcatgccagacgaaaaatggctcgcgcgcttttactgcttcatccatgaatgccagggtccgcgaaaggaactcgtcgtcgaccgtctccatgcgtttgcgggtcagcggccccgtatcggtgcagcgttgccggccccatgagccgaagcgcgggtcggctggcgccggattgtcttgcggcatcgcaacgcagtcgaggacaccgcgcggccggtacttgtcgttgaatgccttgtcctttggccaatccaggtcctcgggctcgtcctccgtgttgaggtgatagagattgccaaagaactggtcgaagccgcggacggtcggcaggtgctcgttgcgatcgccgagatggttctttccgaactggcctgtgcgatagcccagcggtttgagcacttcggcgagcgtcggatcgcgctcgtcgatcccgatcattgagccgggcgaactgaccgtcgtcaggccggtgcggatcggcatctggcccgtgatgaacgcggcacggccaggcgtgcaacttggctcggcatagtgatccgtgaagagcacgccctccttagcgatccggtcgatgttgggtgtcggaaccatcatgccatgcgaataggcgccgacattcgtgatgccgacgtcgtcggccatgatcatgatgatgttgggccgcgctaggatcggcggttgcgcgggacgagcttgctgcgcaggagcttgagccgccggttgttgggcggcagcaagcgaggtcgttgccagtaccaacgccgtggagatcgcaagcaatcgaatcatgtgtggtctcccccttttcgcagaactgttctgaagcctatgtgcgaacttccggagtcgagggcggctggctgacgcgcgctcgggcggtaccggaaacagtagttgtcggcgcacaagtgcgagccgcctttgacgaccttcatgccacgctggaagccccgcgcgtcgcgatagtcgtcagcggttagctcccacacatttccagccatgtcgaagaggccgtaaccattgacctcgaaacagccgaccggagctgttccctcgaatccgtccagcagttgattggataccggaaaacgtccttgccaaacattcgcctgccagacacctgaaggggtcttctcgtcaccccagacatattcggcgccatccagcccgccgcgcgcggcaaattcccactccgcctccgtcggcaggtcgcgccccgcccagcgcgcatatgctgctgcgtcttcgtgggtgacctgaaccaccgggtgattcatgcggtcgtcgatcgacgagccaggcccttgagggtgctgccagttcgcgccaggcgtgtagcgccaccactgccggaaatcctcggcgctgcctagcgcggctggcgcatggaagaccatgccgccgggcaacaggagatgtgggggcgcgctcggataaagcgcgggatcgaccgggcgctcggcgaccgtaatgtagccggtcgccgcaacaaatgccgcgaattgtgcgttggtcacttcgtggcggtcgatccagaagccgtcaacgctgacgacccgctgcggtctctcttcagggaagtgtttgtccgaccccattcgatagctgccgccagcccacgaagatcatgccgcgggtgaccgttgtgttcttcggcagcccaaaataggcgctgcacaactgttgggcgcccgcggatgaatcgatggaagcgccgcgactgagcgctaagccaccagaaaccccgatgaaaagaagcaccgcggccccgaccgccgcgctccatcgccggccaccggccacgctctgtttttccgttctctgcgtcatgatcagtacttcaacgagacaatgaaaccggcggaaagccaggtctcggagttgatgccgggaagagacgtgatgccgcgaccgggaacgcccaccgagccccacattgtcgtggcgatctgtggcgtgcaaacatgtgtccactcggcatagatctcgtcggcgagatcgtggtgcgccacgccggtggtaagcaggaggtttccgttgaccacgttgagccgcgcgccttgcccgaactgaagcggcgaattcaattcattggcgcgagtgtggatgaactgaaatttcaggaagtcctgctgggtcgcaacgaggttcagcgtaacgcgatggtagttgacgttcgagttcagaaacgtgtaggcgctcgatgcgccaaaccaccaattctcgagaccgttcccatagaacagcgggtcgaaccgctcatacgtccgcgtcgacgggttatcgccggagaacgaggcataaccataggacaaggccggtgtcatcggcaggcttgcaaaacgattgccgatttcgccgtaccaggcgttggcgcgcatatcgatccggtcgttgcgctgtaaggcaagttcaccgcggatccaggccgccggcaggccgatggccgtcccctcaatccggccatagccgtaccacgtctcggtgccgtctcgcccgttggggatgatcaatggaaatgtcgggatggggtaaggggccgtcgagttctgcactttgacataggcgccgccgacgcgggagccagcgccccaggcatattcgagcacgccgccgaccagacgtgtctccgtgtcggccgacttcagttcgttaggatcgagatggaaggcctctgccttccagccgcccaaggtaacgcgcgcgatcgctgtattttcccacgaaaggcgcggcagcaggctcacggcgccgcgctcgaagccgtttcccgcgccttgccagacgatcattcccgtgccgattccgtagggctgctgaccggcagaaatctcgaagttcagctgatcggcgggattgcgcgttcggacgccgccataggctttctcgaccagcacagcgccttggttcttctgatcgaacggatcgacgccgagtgtacctgagaagccgacgctaaagccgccaaacagctcccatccctgagaagggcgcagcgcgatctcgaagccaggagcgaaccaaccttcaaaccaaccctttctccgctggtacgtcgatccaggtgtaagcgaatctagcccgtaccacgtccccgatgagccaaacgcgcccataagcacggcaagcttgccctctagccgcacattttcgttgtccaccaggagcaagggatttgcagggggcggcacaccttccgcgccggcagtggtacctccagaaacaaatccggagaggccaagaagcagcgcgcggaatgcaagtgagcgatcgaccatagctaagcggcagcgcctcgctctcgacgcgatcgataaactctctaccgtcgcccactttggcgatggctggtatcgtagcaacaatcccatcacgatcgaccgcagggaatttgctttcaatcgtcgtgactctacttatcagtcagaagtcgtgcaatccgtcggtcattgagtgcatgcggcaaagctactcactacggcatggactgctcctaccgtaatacccgttgattctgcactagcgttcgaatttgcaactcgaggattacgaatggacggcaatcaagccgatgctgccgaacaaaccgcgtggcgttccccgggtaaacgaccgacgtgtcctcagtgaaattttggggtcttgcgccaacattccgaaaagtaatcgcagcggtccgatctgcttcagccccatctcctaccgcgcttgcaacgagcggttctttaatgggcagtatcgtcgtgtgacgacacgctacgacaggctggccgccaattaccctgctttcgctcaacgcgcatccatcagattgtggctgcgccttaatgagtccgcgtcctagtcttctgacccggtgaaatcgggattcgcagcacggccggctgtcgcacgggcggcttgcttggaaggcttgatcgtcgccgaaaagtacagtgcgagttcgaggatgccgtacattgcgaagaccatcagcgccttgattgcttcgttggtcatctgaatgtcctccaacaattgatctcgactaacgttgggccatttcggtcggtgtctgcacgaggtgagcctgatgaacatgtcttgcgctcagcgggctcaattcggattcggcaaagcggaccgacagcgtggccgcgacgatggcgattccggccagcaatccggcagcgaccactttcagatgcgttgccttctccgcagtgtagatcgagtggttcatcgcaggcctcttgccggtgcgtgctggcaagattcttactaacgcatgaagcgtccggctgaaatttgggggcttcacctaaggtaatatccgtagccgcgggaggagcgaaaacttgcactcccggagtaccggctcaccacctgcctgagctgtgccggccgaccgtcatcagcggcttcgcgcgtcggctcgacagagcgggtgagcccgcaggcggcactccagaggcccgcggccgtgccgcgtcggctgctagcgcggtgcctgtcggtcccgcccggtaaaggcggcaatcagcccgaccagggcagtcacgagcaacatggtcacgatggtctggatcaagccgaagttgagcgcgtcgcgtgccgcgaacagcgccgtaatcggcgctgctatggcgaagagaatacgaacgaaccatccgagcatggcggccacgatcggcaggagttcagccagcggccttcatgtcttcgggcgattccacatacaacccggtgtaggtatcgacgaagcagagatggtcgtgaacctccttgacgccggcggtattctcggcggcgacgatggcggcctgacgtgcctcgtcggtggtgacgaggccgtgcagatgcacgacgccgttgcggacattcacctcaaagccgatcggacgccagtccgtggccttgactgcgcgcgtgatgcgctcgcgaacgtgctcatcatcggcggtcggatcgggaatttcgtgcaggaggctcgccacggcttgcagcaaattcgtcctggtgacgatcccgacgggcgccttgccccgcaggaccgggacgcgcttgatgtctgtctcttccatcaggtcgaccagctcggcgagatcggtgtcttcctgcaccgagacgacctgcttcgtcatgacgtccgcgaccttgcggccgcgctcgtgaacgaactcggcagcctagcgtcccggtcccatgaagaacttcagccaggcggcgtgcctgcggccggtgccgatctcgctgcggcggaggaagtcgctctccgagaccacgccgacgaggtttccggcgtcgtcgacgacgggcaggccgctgatgtgcattcggagcatgatcttggccgcctcttcgatcgtcgtatgcggcgttacggcaaccaggtccttggtcatgatgtgatgcgcgcgcatgttgtgtcctcgaattcgctggcgggtttccggagtgaggcgaggctgcgactgtcgcagcctcgcgtcgcgggccttcaggcggccttcacgttgatggtcttggccggcttctgagcttcttcggtcttgggaaggacgaccttgagcacgccgttcttgaacgtcgcctcgatcttgtcggaattgacgccgtccggaagcgcgaaatagcgctcgaaggagccgtaacggcgctcggagacgtaatagtccttcttcttctcttcggtctcttccttcttctcgcccttgatggtgagaccgccattggcgagcttgacttcgatgttcttctcgtcgaggcccggaagctcagccgtgatctcgtaggccttctcgctctccgcgacgtcgacggccggcgcattgaaattcttggacagatcgcgttccagtcgggcgagcgagcggaacggccgcttccagaagccgttgccgaaatcgtcgaaaatctggtcgatttcatttctcagcgcctggaacggctgccatgcctctccggttgctgccggcgcggtggacgtcttggtgacaggtaacttggtctcggttgccatgatcattgtctccttcgaggttgaccattccggtcgtcgaggagaatagccgtggcgatcgtgcgttggttgatttcgctcaatctcgggactggtgcgtgcgagcttggatgcggtgatcggacaactggatagccgtgcccaaggctgagatccgtgaattcgcgtcagtctcccagacatgtctcggtcgcggagcgatcgagagcacgtggcctaccagcctggtctccttggtacccattcatcgccgagcttcacgtaggagcgcttcaccgcggcccaagccgtgcggtgcgcaatctcctcttgccggagatccccggcatgcgaggcaaaggcgtggttgaatgcttcgcgatagatatcgagagcatgaggcggcaagtggtgccgcacacccgcggggagatcgttgttggagcgatagggcatcgtctcgtcccctgccagatcatcgccggcctcggcatcgacggctggtaccggtcgatcgcggcagtttcgccgccgttacatcgccatgtcgggctcgggcaaccgatcgcgtttcggttccgggatctccgtcattgtggcttccgtcagaagaagcacgcttgcgacggacacggcgttttcgagcgcggtccgtaccaccttcaccgggtcgacgatgccggcttccacgagatcgacatagaccttccgggcggcgtcgaagccgaaacttccctcgctgccgagcatccgtgcaaccacgacgccaccatcggtcgcggaattttcggcgatttggcgcgcgggcgcctcaagtgcccgtttcaggatctgcacgccggttcgttcgtcaccttcgcaggcggcctcttccttggctaccgctgcgaccgtgcggagcagggcgagaccgccgcccggcacgatgccctcggccaccgcagccttcgtcgagctgatcgcatcgtcgagcgcttccttcttggccttcatctcggcttcggtcggtgctcccacccggatcacggcaacgccgcccgacagcttggcgaggcgctcttcgagcttctcgcggtcgtaatcgctcgtcgtcttctcgatctcgacacggatttgcgcgagccgcgcctcgatgcgggcgcgatcgccgccgctcccgatcagggtggtattctccttgtcggcgacgacgcgcgcggcgcgaccgagttgctgcaaggtggcgctttccagtttgaggccgatctccgccgagatcacctgcgccccggtgaggatggcgatgtcctccagcatggccttgcgcctgtcgccgaagccaggcgccttgaccgcgcaagccttgagcacgccgcgaagctgattgacgatgagagtcgccagcgcttcgccctcgatgtcctcggcgatgatcagaagcgagcggccgctcttggcgacttgctcgagcaggggaacgagatcgcgcagggcaccgatcttgtgatcgcaaagcagcacgtagggatcctgcaacacggcttccatgcggtcggcatccgtgacgaaatagggcgacaggaagccgcggtcgaatttcatgccttcgaccacgtccagcagggtctcggtggtcttggattcctccaccgagatcacgccgtcgccgccgactttctcgatcgcatccgccaccagctcaccgattgcgatgtcgttgtgtgccgagatcgtggcgacctgaaccttctccgccctggtctgcaccggcttcgccatcgcgtgcaaggcggcgatggcagcctgtgtgccacgatcgaggccgcgtttgaggtcgatcgcgcttgcgcctgcgacgacgttgcggacgccgtccgaaaggatcgcctgggccaggatggtcgacgtgctggtgccgtcgccgacgacgtcgccggtcttctctgcggcctgccgcagcacctgcgcgcccaggttttcttcggcgtccttgagatcgaattccttggcgatggtgacgccgtcgttgcagacgatcggtgcgccccacgacttctggatcaggacggatttcgacttcggcccgagcgtgacgcgcacggcgtcggccagaagtgacgcgccgcgcaagactttctcacgagctgccgagtgaaacaggacctgtttgtgcgccatttccaatccctctgtctagctgcggccgcagatgcgatttgcgccagtctggatgagtgagctggagccgaattgatcttggtcaatctgcagagcacgcttccttggagacctgctgccggaactggatagaccgatgcaaagtccggaatttgcggcagcgcgaattttccagccggtgcgttgacttggcgcaatccggagctcgggtggtgcggtagcttctgcaagaattgaaccttccccagcgaacctggcggagttcgcaaccgcgcacggtcatggtcgagcagacactatctcttccgaagcaggagcataaggacaggccctgggtcgcatccgtgtggtcaggaatcctcgcgcgcaaatggcttgtgctcgcggttctcgttctgctcgctctcggcgcctggcagggcgtccgcgtcctgttcgggccttccgtcgtggtcgaccaggtcgtgcgcggtcgtttggtcgaaaccgtggtggcgagcgggcatgtcgagacgccgtaccgggtcgagatcggcagccagattaccggcactgtcgcggaggtgctggtgcaggagggcgagaaggtcaccaaggggcagtcgctgatctcgctggaagcacgcgaactgaaagcggccgtgatccaggcgcagggggcggtagcccaggccgaagcccggatcaggcagctcgaagagctgacgctgccgtccgcaaaggaggcgctgacgcaggcgcaagcgacgctcctcaacgcccagcagacctatgaccgcacggcgcagctcgaacgcaatggctacgcgaccaaggctgcgctggatgatgcgcagaagactctcgatgtcgctcgcgccgtgaagcgcgcggcggaattccaggtctataccgccagtcccggcggcagcgactatgtcatggcgcagacccagctcaaccaggcgcgtgccaacctggacacggcggaatcccgcctgggctatgcgaccatcgcggctcctcgggacggcgttctcatcacccgcagcgtcgagcgaggcaccgtggcgcagccgggcaaggcgctcttggttcttgcgccttcgggtgacctgcaactggtgctgcagatcgacgagcgcaatctcggaaagctcgcactcgggcagagcgcgctggcatccgcggatgcttatccggaccggcggttcgccgccaagctctcctacatccatccgggcatcgacatttcccgcgcgacggtccaggtgaagctgacggtggcggatccgccggaagaactgcgtcaggacatgaccgtctcggtcgatatcgaggttgccgcgaaggacgatgcgaaggtgcttcccgtccgctcggttcatgacatcctctccggacagccctgggttctgaccatcgagggtggccgggcggtcaagcgcccggtgaagcttggcttgcgcggcaacagcaacatcgagatcgctgcgggacttgaagccggtgacgttgccattccgcaaagctccggcatggtgcccggacagcgggtgcgggccgtcctgccatgaatcgctggctgccattcgaatggatcgccgcggtgcgcttcctgcgcgaagggagactgcagaccatcttcatcattggcggtatttcgatcggcgtcggtgtcatcgtcttcatgtcggcgatgctcgcgggcatggaggcaaatttcatcaggcgcgtgctgacgtcacagccgcagatccagctcctcacgccggatcaggtcgcgcgtcccctgcgcaacgccgccggcgtgatcgaggatgcggtagtgcagcggccgagccagcgggtgatctcgatcgaccagtggccgaaaatccgagcccagatgctcgccatgccggaaatcaccgcggtctcacccaccatcacgggatccgcgctggccatccgcggcgacgccagccgggcggtcacgttgaccggaatcgagccggacacgtatttcaacatcgtcaaggtgccggactacatagtcgccggcagcgcgcggctgaccagcgaggacatcatcatcggcaccgagctcgccaagaacctcggcgccaccgtgggcgacaagctgaatcttcaggcggcaagctctgccaaccgggtgctgacgatctccgggctggtcgatttcggcaacaagagcgcaaatcagcgggtcgccttcatcgcattgcggaccggacaatctctgctcggcatgatcgggggcgtcaccaccatcgacctgacgatcaaggacatctatgcggccgaaaccatcgctaggcggatccaggccgcgacggcagtagaggccgacagctggattgccaccaacgcgcagttcttcaccgccgtccaggcgcagatctacaccaacaccttgatccgtgtgtttgtcggcctgtccgtagccttcggcatcgcagccgtgctcatcgtgtcggtgatccagcgctccaaggagatcggcatcctcagggcgatgggaacctcgcgcggccagatcctgcgggtgttcctgctccagggcgggctgctcggctttgtcggctccctgttcggcgcggcgatgggcgctcttgcgctgatctattggcacgccgttgcccgccaggctgatggaagcgagttctttccgctcatcctggagcgacgtctcttcatctatacggcggtgctcgccacggtcaccgggctgttggctgcgacggcgccggcgctgcgcgccgcgaagctcgatccggtggtggcgatccgtggctgacgcgatcctgaagctcgagggcgtccggaaggcctataatgtgggcctgccaaccgagaccgaggtgttgcacggcatcgacctcgagctcgatcatggcgagttcctggctctgatcggcccgtccggctctggcaagagcacgctgctgaacatcgtcggcctgctcgatcggccgacgtccggccggctcctcatcaaagggcgggatacggcgttgctgggtgacgacgaactcacgcacctgcggggacataccatcggcttcgtgtttcagcatcatttgctgatctcggccttcaccgcccgagagaacatcatgatgccgatgcttgccgatcgcggatttcccagcgcggagatcgcagcccgggccgatcatctccttgccgaggtcgggctggagaaattcggagacaatctcgccaacaacatgtccggtggccagcagcagcgggtggccgtggcgagggccctagccatgaatccggatctcgtgctcgcggacgagccgaccggcaacctcgatacgaagtcggccgatgccgtcttcgagctgatgcggcgggtgaatcgggagagcggcacgagcttcctgctcgtcacccacaatctcgacctggcgcgccggtgcgaccgcatcatccaggtggtcgacggccggattgcgcagcattgagggccggcgcaaccgtcgagatgcgcctcagctcctcgcgcaattgcggatgcttgcacgatagcgtgatggtcgtggtgttgacctgaatcaagcagaaggcgccgttgcccattaccattcgtaccgcagccgagtgccatgggagagcagagtggagtccgatcaaggttcacgaaagcaagccatgttcatggccgctattctggcaggcggcatgctgctcgccatgctgcagttcggcctgtcgacgtacagctcggttgaaaccattccctacagccagttcgagcagctgctcgcccaggacaggatcgccgaagtcacggtcggctcggatacaattcaggggaagctgaaggagccgcttccgagcggaaagtccgcattcgtgaccgcgcgggtcgacatggctttggccgacaagctcgcaatcaaaggcgtgagcgtgaccggcattcccggcgccggcgcgctgcagaccttgctgtcctggatctttcccgtcatcgccttctttctgatctggttctggatcggccgccgcatgggcggcggccagggcctgggcgggctgatggcgatcggcaagtcccgcgcaaaggtttatgtcgagaaggacgtcaaggtcaccttcgcggacgtcgccggagtggatgaggcgaagttcgagctccaggaggttgtttcgttcctcaaggaccccacgagctacggtcgattgggagcgcatgtgcccaagggaatattgctggtcggaccgccgggcacgggaaagaccctgctggcccgcgccgtggccggagaggcgggcgttccgttcttctcgatctcgggctcggagttcgtcgagatgttcgtcggcgtcggcgcagcgcgcgtgcgcgatctgttcgagcaggcccgcaaggcggcaccgtgcatcatcttcgtcgacgagctcgacgcgctcggccgcagtcgggggccgctgtcattcggaggttacgacgagaaggagcagacgctcaatcagctgctgtccgagcttgacggcttcgaccccagcgccggcgtcatcctgctggcggccaccaaccgcccggagatcctggatcccgcactgctgagggcgggcaggttcgaccggcaggttctggttgaccggccggacaagaacggtcgcgttgccattctcaaggttcacgtccgcaagattcagatgggcaaggacgtcgacctcgacaaggtggcgggactcacgaccggattcaccggcgccgacctcgcaaacctcatcaacgaagccgcgattgcggcgaccagacggagcggagaggaggtcacgttcgacgatttcgtcactgccatcgagcggatcgtggccggcatcgagaagaagagcagggtgctcagcaaggacgaacggcgcagggtcgcctatcacgagatgggccatgccctcgtcgcggctagtctgcccggcgtcgaccccgtgcagaaggtctcgatcattccccgcgggatcggtgcattgggttacaccatccagcgtccaaccgaggacaggttcctgctgacgatcgaagagctcaagaaccgcatcgcggtgctgatgggcggacgcgcatcggagcgcctgattttcgacggtgcaatctccaccggcgccgccgacgatcttcagcgcgcgaccgaggtcgcgatcgaaatggtgaccaaatacggcatggacgagacggtggggcagcgcacctatgcgcccaagccgcaggcgtttctcggcgcggcgcaggacaagatcgttggcgccgccgaggcgaccggccgcgagatcgatctcgccgtccgcaacctgatcgaggagggcgaccgccgcgcccgcgacatccttcagcggcggcgcgctgacctcgacgccggtgtggagctgttgatcacgaacgagacggtgacgtccgagcagttcgcgccgctgctcggcaagcgtagcgaggaaagcaagccggttgccgcgtgactgcagcgcgcgtcgacggccgcggcttgccttgcaagagttcacatcgagcctgcgaggcgatcaaagtccgcgcgaattgatcttcctgcgcaggcgatgacacgtatcttccaggagcgtctgaagattctcgaggttcagaagcagctcctctgcttgtcgccgttctggcgttccgaaagcgaaaccattgcgcagggtcgcgacgtgctccacgcgcttgcgtccggctgcggcccgatgttcgaagaactcgagctgctccagatcctgtcccagcccgtcctcttcggcgatgagcagcttggtgattgcgcttcggcggtcaggcacgaggtcggtgtcgttcaacagcgcgatgtagtggtcgatattcgctcgaacgatgtaccgatgcatggcgcacttcccccggcatttgccggcaaatattaccattatatgggcggtttgcgaagatggtccttatcgaggtagggatgcacctatcaaaataccgtgggcgaggctaggtcatgcgcaattgatctccggcgaacgaggcgtccagctcctgtcgcggcagatctggcttgatccggatcaagcctcccggctcccggcccctctaaggtgcggttcgcgtgacccaaacggggttgcgccgtaaagtcgccgccgaggtccatcccccatctcggcggcccttttttctcagaatgatcgatttcaacagagccgcgcgagatcgcgggaaagagccgatgctgacctactatttcgatatgaaggacggcgtgcccgtccgggacaggtcggggctggagcttgtgagtgatggcgccgccattgcccatagcaagagccttgccgaaaaggtgcggagagaaaagccgacgggtcatcccgagctccagatcgtcgtcatcgacgagagcggccgggaagttcaccgcgaacaaatttatccaagtgcggtctgagcaccggtaagggatggcagaccgtatcgtttcagaaccgcctttcagcgtgggccgaacagctccttgagcaggccgccaaactgaagtctggccgcgagcgggacgaactgtttgctaagattcgtcgggccgacgtcgcagctctcctcgacaaatgggtcaactctcgggggcttcagccaccgaagtaggttgctttgcctccagctgagtgcggctccggtcggtgcgctgtcgccttcacgcgcggtatcagccgagatcgaccatctcaggcgtcaggctccgagattgccagccgtttggcgacgttcgccgagatcagataggcagctgcgatggcaactatcgccgcaactattcctcctgaaagcgctgtaaagccgaacagccccctccacggaccgaacgcaagcgcgagcccggcgaaaagggcgccgaccgaggtcgcaatcaggatattgtgcggtcggtttgcgcgccacggcaggcgccgagaccggatgacgaaaatgaccaggatctgtgtgaatatcgattccacgaaccacccggttcgaaacagtgtcgcatccgcctcgaacaccccaagcaggaccacgaaggtgatcgcgtcgaacagcgaggaggcgatacccatgacgatggagaaacggaggatgctcctcatgtcccaggtctccggccgggcgacatcttcggggtcgacctcgtcgaagggaatgccgatttcggagaggtcgtagatcagattgttcagcaggatttgcaggggcagcagcggcaggaatggaagcacgatcgacgccagggccatagagagcatgttgccgaaattcgagctcgttcccattcggacgtatttcaggatgtttgcaaaggtcctgcggccttcgcgcacgcctgcggcaaggacggagagatcgggagccaacaggatcaagtcggcggctgcacgggcgacctcggtcgcccccgtgacggagatgccgacatgcgcagcgtgtatcgcgggggcatcattgacgccgtctcccatgaaaccgacgacatgattgcggtgccggagcgcggcgatgatccgtcgcttctgatcggggtcgatccgggcgaacagatcgacatcatcgacccgcgcggcgagcgcggcatcggtgagctcggagatctcggctccggtcatcacgcgtccggacggaaggccgaccgttcgcgcgacatgcgagaccacggcgtcatgatcgcccgagaggatcttgatcgtcacgccgagcgaggtgagtgcctcgatcgccgaggccgcatcctgcttcggcggatcggcgaagacacagaagccgatcatggtcaaaccggtctcgtctccgaccgcaatcgtctgctgcccggcgggaatcgacctgacggcgacggcaaggagccgaaaaccatcccgggcataccgagcctggatatcggccattttctgttgccatgcggcgtcgagcggatgggtgaggccgtcgatctccacggcaacgcagcgggccaagatggattccggagctccctttgcgatcagcatgtgttcgtcgtgccgcgtgacgagaacggacaggcatctccgctcgaagtcgaacgggacttccgaaagccggacccagccgtccgggccgtcgcggctcgccgacaagatcgcgtcgtcgagagagcttctgacgccggtctggaatgtgctgttgaggcgggcgaagtccaggacgcgatcgctggaccggtcttggggatcgatatgcgcctccagcgtgattctcgcttctgtcagcgtgccggtcttgtcgacgcaaagcgtgtccattgcgcccagatcgtgaattgcggacagccgcttgacgatgactttccgctccgccatgcgcagcgcgccgcgagcaagggtcaccgtcatcaccatcggcagcagctcgggtgtcaggccgacggcgagcgcgaccgcgaagaggaaggactccattgcgggacgttgcgcgacgagatgagccatcagcacgaacagcgtgaggaagagtgtcagtcgaaggatcagcagtccgagcctttgaacgccctcctcgagcgcggtcggtggcgcgctggcggccattgccgaggcgatcgcgccaaagcgtgtccggcctccggtcctcacgaccagcatcttgccgcttccgccgacggtactggtgcccgcgaacaacgcgttggtggcgtccgccggcaatgccgccgagcagggcgcggccgtcttgaaggcgggaaacggctcgcctgtcatcaatgcttcgttgacctgcaattcctgggcatcgaggacgacgccatcggccggtatcagatcgccgatgcggagtttcacgacgtcgccggggacgagagccgtcaccgacatcgtcacttccctgccgtccctgatgacgtcggcctgaatcgcgacggattcccgcaacgcttccgccgtccgctcggcgcgatgctcctggacgatatcaagcgtgatggagagggacagtacggctgcgatgatggcaaagctgccgatatcgccgctcagcccggacacgattgccgccgccagcagcatcgcgatcaggggattccagaggcggtggccgagcttgcgcagggctgaccggctttgcgaggcatccgcgcggtttgctccgaagacggcgagccgccggctcgcttcggtctgtgtcagtccgtccggacccgagcccagcgtgcggcagagctcgtccttcggcgtttgccagaattcggcggccaaagccttggccggaatggattgctcggtcatggggagggcgccgatctgacagctggaccaggcgaaggtaagacggcgctcaatccttgggttgatgcggctcaactccgcctcgggcggatgcgcgcacgaaccggattcacctctcttgaagggagaatggtgcgcatcgaagatgcgatccgggtgaggcacgcccgccgcgcgcgcagctatgcggcgctcggcgcatcatttcttccggctggccgccggcggcgagaatatctggttggcaggcggttgcccgcccgcgggaacggtgatggcaatgaagccgcggcccatcgaggtgtggcaggcgttgcagccgtcggtcagcacgcgcatggaagctgcgaacttgcgctcgtctcccgtcgcgatcgcgtcggcgaccgcgagcagcggctccttcatcgtggtcacgttgctgacgggcaccgccggatagaatatggctgcttccgccaggctgttggtcagctgccgcaactcatatgcggccaagtcccagttcttcgccttgcccgcataccagagcttgagatgctcaatctgcgccatgcccataacctcgacgagacgcggcgcttcttgtttggcgctcggggaggctggaaagtcggactgggcgatcgcggaggtgaccgcaccagccgacatcgcgagaaccacgtaccattttgtcagcgtcatccgagcattccctgtcaatctcgacctttactagcagggctgcgttctccgcccttgcgctgaatcaagcttcgccttcccgctacgcgcggtgcacccacgagtgctcaattcagctttccaagaagtcttcggatgatcttcctcaaattgtcggcgtactcttcgacgacctggcgcctttcggctgacggcgaaagctgacgatcatcgtcttcgtcagccggcggagtgtccgtccgggatttcccgcggatgatggaggcgatcggctttgtcactttcacgggaatctggcctcgggatagactgcgcgcactgttcaaaagcccgatctgcacggctcattcatggacgcccggcgccgcgctagattgctgcaacggaccactcgctgcgactaggggcgcgaggccttcggatcgcacttgggacagcggccgtcggcggcagctccgagctgacggctgagctcgcccctgagagcctccttgtcccatttcgtgccgtcgctcttgacgattcgcttggcgcgttcgaaggcgtggctctcggccgcgtcgtccccgatgcggacgatgacgtcgtcgtggaaggggcaaacagtcgtggcgcgggtcgtttccagtgcgtagcgcacggcggcggcgagatcgtcggtgtgaatgtcggcaagcatggcggctctcctgatcgcttactccttcgcccaggccatccctacaggtcgacgaaaatcggccccggggctccctgggagcgccgaggccgattggtcgcctggttctttcgcccaggggctgagctcattccagcaaacccgcgttgccgttgctcgttccatcgaaccctccggcggagccgctctccggcctgctccatgctcgcggtttctgcatccagctagggaagcggtgcccggcctgtcttacgaatccgagcttcgctcctgtcggtaacgggacctcagaaagcgttcccgatgccgatacaacgctataatcagggtcagaaacatggcttgatccagctcaaagaacgcaatcagatattcatgtccctgaggtgctgacgattgcgcagcacgatctgcctcgcaccggaaaagccgagaatgccttcgctatgcagctgcgacaacgcgcgagaaatcgtctccagcgtcagcccgagatagtcgccgatatcccggcggcacatcgggagcgccagcatgccggcgccggccagccgccgatccatttcgagaaggaacgccgcaaccttctccatggcgttcttgcggcccagcagcagcatgtggttctcggcgtgattgagctccgcggcggtcatgctccacaatttgcgcgcaacctggacgtcggtggtcgcggccttttccagcgcagttcgcttgacgagacgcaccgtcgtatcgacgatcgcttccgccgcgaggcggtgggtggctccggattccaggccgaatacgtcgccgggcagatggaacgacccgatctgacgccggccgtccgacagcagcttgtatgttctgactgaacccgacacgacctggtagacgtattcggccggctcgtcctccccgaaaatctcttcatccttctggtaggagaactcgctcgcgatcaatcctgccagggctgcgaatgaatcggccacgcgggacgcctgcgcggtcttgggacgaagcggctggttgacgtcgagggcggtggtcagcatcggattctccttctgatggagctcaattaagccagccggtcaggtctggatatttcgggaggattcgtagggcgatgtccttacgtagatgtccggagcggccgcggttcgattgcgccgaacatgaggccgcaccggcgcatgccctgcggcgggactcatttcagcgaccggatgtattcagcgagatccgcgacctccgccctgttcagggacatgttcggcatgttcggatgcgggacgagaagcagaaacgcgagcctgttctgatcgaaatcgggtgtcttcgcgagataggtaaacggcggtgcctgatcggaggcgcttgcttggccgctctcgatgaggtggcaagttgcgcaccaccgctttgcgatgtctttgccgctgaggggatccgcgccgaggctcggggcggtggatccgatgatgcagcacaccgccgacagcaatccgatgatcttcgacatgcgatgttccctgagctccgccgcgatggctagggcgccacctggtggaatgaacgccggccgagatcgttcctgcgggcgctcggtgtccgcgcgggtccgttcaggacatttgcgtaggtgttggcccgcaatttcaatgctgcaacgacgggcgcatatggggagcatggagcgcaacatcatattcaagtgcccccgcaccggcatgaacgtgcagcactggctacccggcacgatggcggacgccgcggcgacccacgtctcggtccgatgtcccgcctgcgcttcgttgcattttgtcaacatcgccaccggcgagatgttgagcgaaggcgtcggtcagcggcgtcatcgacgttcatccgacgatccccagtcgcgcgtgccgcgacaagcgctcgtttccaccgacggctgagcacgtccgcgccgtgccttgcgctggcgggttcatccggcacaacgccagagatgcccatcgctgccgagcagggtcctctccgcatggcccccgcgttgacctgggtcaaggcgaactcggtgaggttcgacacgttgttacgtcacaaccagccggaggaagcaccatgcgatgccgaaccattgctgcagcgttcctgttcgccgccttgggccatacggctctggctcaatcgcccgcggaacatgagtcccatcatccagggcaggaccaggcgcccgcgtcaccgcaggcaagttctccggcaaaccagtccacggagcgacgcacgacgccgggtggagatatgatgggaatggtggggcacgggatgatggggcagggaatgaagggacgcggcaagatgggcggtgacaggatggagccgccggtcgtgttccgcatcgtcttcgcattgatggacgccgacggtgacggcagcgtctcctcgccggagtttcaggccgctcatgaacgaatattcaaggcgatggatagcagcaaggatgggaagctcaccctcgaagagatgatggtgttcatgcacagcaagagcaacgttcctcaacaatagcggaaatcgaaggacggccgcgccgagttgcctgaaatggcttttgcgccggccccgttccggccgccgcgcagccgttgctccggcctcagttcgcagcgattgagatgaagcggctcgatcggcgaggctgcttgcggaggagtgccatgcgtatccagcagcggagaccaggccgtgtcgtttgatcgggttctgcgatggtctctggtcgcgattgcaatcgcgggattgaccgcaggtaccctcgcgcgcgccgcgggccggcctgatctggccgacttcgcctgggcgctcggcacggtgccggtgatcgcaggactggcgatctccattgtcacggatcttctgcgcggccgcgtcggcgtggacgcgatcgcgctgctgtcgatgagcgcggcgctggcgctggggcagccgcttgccggcgccgtggtcgcgctgatgtattccggcggcaacgtgctggaggagatcgcggtcgcccgggcggagcgggacctccggtcgctggtcgatcgcgcaccgcggctggcacatcgcaagtccagcgaacggatcgaggatgttccgatcgaggacgtcgcggtcggcgaagagcttctggtgcgggccggcgagatcgttccggtcgacggaatcgtcggctcggcgttcgccaccatcgacgaatccgcggtgacgggcgaaccgatcccggttgagaagacacgcggcagtgccgttctttccggctcgctgaacgcgggagagaccttccaattgaccgtgaccgcggtggccggcgagagtacctacgccggcatcgtgcgcatggtgacggcggcgcagacggcgaaagcccccttcgtgcggctggccgaccgctatgcgctgatcttcctgccggtgacactcgtcatcgcctatgtggcatggcacatctccggagacttgacccgcagccttgccgtgctggtggcggcgacgccttgccccttgattctggccgcccccgtggccttcatcgccggtgtggcccaagccgcgcggcgtggcatcctggtcaagggcggaggcgccctggaggcactggcgcgcgcacacacggtgctgttcgacaagaccggcaccctgacgatcggcggagcgcggttgctgtccgtggaagtcgcgccaggagaggatccggatgaggttctcaggctcggggcctcgctcgagcaggcctcgcatcacgtggttgcgaaggcggtcgtcgctgcggccgtccagcatggcctcgagctggcgccgccggaacatgtcagggagaccatggggtctggcctgagcggtgtgatcgacggacgccaggtcacggcgggctcacgcgagatgtttcgctcgcatatcgagccgtcgtcgtgggagctgcgagcgattcggcgtgcctcatggcgctcggccctgatcgtcttcgtcgcggtcgacggtcgtatgaccggtgcgctgctgctggcggacgaactgcgggcggatacgccacgcgcgatccggctgctgcgagatgccgggatcgcacggatggtgatggtcacgggcgatcgcgccgcgacggcgcaggccatcggagcagcgctcgatctcgatgccgtgctggccgaccgtgttccttccgacaaggtggaggcggtgcgtagcgagcagcggctgcatccgaccatcatggtcggcgacggcatcaatgacgccccggcgctggcggtggccgacgtcggcgtcgcacttggcgcgcgcggtgcaagcgcctcgtccgaggcggcagatgtggtgattctcaccgaccggctcgatcgggtcggcgaagcgatcatgatctcgcagcgggcgcgacgcattgccatgcagagcatatttgccggcatgggattgtcgttggtcgcgatgatcgccgcaaccgtcggctggcttgaccccgtgcctgctgcgatcgtgcaggaggtgatcgacgttgccgtcatcctgaacgcgctgcgcgccctggccccgtccctcgccaggagcggccctcgcatcaccgcggagcaggggcggacattgcatcacgatcatcaggccctcttcaaggaccttgaccgcttgcggcagatcgtcgacgcgctggacgatgtgatgcctgaatccgccgctgcgatgatcggcgaagcccaccggctggttcagagcagcgtcgtggctcacgaacgcgaggatgaagacagcgtctatccgaagctcacgaaggtgctgcgcgatcgccacgggctctctgccatgagccgtgcacatcgcgaaatcctgcatctcgcgcggttactcgcgcggatcgcggaggatctgccgtcggagaagatcgaccgctatcttgtacgagacgctcagcgcgtgatcgaggcgatcgagacgctggtacgcatgcacactgctcaggaggaggacatctacgaagccgtggtgtctccggcttagcaaccacaaaagccgggaccgggctgctcctgctgctgatttcgatgaagggttgagtcagctcaatgcaacgcagctggatcggtccattgtgcccggcagttcgtcgcgtcgctatcggcatgagagaggccacatgcagaatctcaagcgagccttctggggcagtctggcggttctggtcctgctgtggctggttgcggaaccccagccgttggggcccggccccttcttcccgcttcgccagagaatggtgcagttgagcggcatcctggccatgggatgcatgagcatggcgatggttctcgcgctgcgaccgcgctggccggaggcctggctgggcggtctggacaagatgtaccgcctgcacaaatggttcggcatcgccgctctggcgaccgccatcgtccattggctctgggccagcggcccgaaatgggcagtcggcttggggttgctggcgcggccggagcgtgggccaaggccggcgatcgggaattcggtcgaggccttccttgccggcctgcgtggtccggcggaggggttgggcgagtgggccttctacggcactgtggtgctgatcgctctggcgctcatccaggcgttcccataccggctcttctacaagacccatcggctcctcgcgatcgcgtatcttgtgctggtctttcacgcggtggcgttgatgaagttcagttactggatgtcgccgcttggaggcatcgtgggggcactgctggtcggcggcacgtgggctgcggctgttgcgctcatgcggcgcattggcgccgggcgccaggtcaagggcaggatcacctcgctcaagtattatcccggcgtcagagcaatcgagaccgagatcgaagtgcctcatggctggccgggccatcgaccgggccagttcgctttcgccacgtcggacatttcggagggcgcccacccttacacgattgcctcctgctggagcgccgagtatcccaggatcaccttcatcaccaaggagctcggggaccacaccagccggctgcgcgagatgctccgtgtcggacaggaggtgaaggtagaaggcccctatggttgcttcactttcgacgatgactgctcgcgtcagatctggattggcgcgggcatcggcgtcacgcccttcgtcgcacgcatgaagcagatgacccttcggaaggatgcgccgaactgctctgtgacgcagcccgtcgatctgtttcacgccacggccgatgtcgacgaggaggctctcggcaagctcgcggcggatgcgcggtcagccaatgtccggctgcatgttctcgtcgacgcgcgcgacgggcgattgaccggcgaacgcattcgcgaggccgtgccggagtggcgtaaagccagcgtctggttctgtggtccaacggcgttcggtgaagcgctcaggcgagacttcagcgcgcacggctttcctgtcgagcagcggtttcatcaggagctgttcgcgatgcgatgaccgaggtcgcgcgcgcattccgcttcccgaagccggcatggtgcgtctgcacgctcgcggcaccgggaccggtcggcgcatgcccggtccatccggctgaccttccccgccacccggcagggcggtccgcaggggtgcgacaaaaatttccgccgggccctcttgaacagaaatcgacctgttcctaggtcgtttgccgcccgggggccggttccggacccggattttggacatcgctgaacctacgcaaggaggatgtgcatgcatttccgcccgttgcacgaccgtgtgctcgtgcgccgcatcgatgccgaggagaagaccacagggggcatcatcattcccgacaccgccaaggaaaagccgcagcagggcgaggtcatcgccgtggggccgggcgggcgtaacgagcagggccagctcgtgccgctcgacatcaaggtcggcgaccgggtgctgttcggaaagtggtcgggcaccgaggtcaagatcgacggcgaggagctcttgatcatgaaggaaagcgatcttctcggcgtggccgaacaggccggcacgctgaagaaggcggcgtaactgacagtcatcgaaaggaaaggagtttagcaacatggctgccaaggacgtgaagttcgcgaccgaggcccgcgagcgtatgctgcggggcgtcgacacactggcgaatgcggtgaaggtcacgctcggtccaaagggacgcaacgtcgtcatcgagaaatcgttcggcgcgccgcgcatcaccaaggatggcgtcacggtcgccaaggaaatcgagctcgaggacaagttcgagaacatgggcgcccagatggtgcgcgaggtcgcctccaagaccaacgacctcgccggcgacggcaccaccaccgcgaccgtgctggcccaggccatcgtgaaggagggcgccaaggctgtcgccgccggcatgaacccgatggatctcaagcgcggtatcgatcttgccgtgcaggcgatcgtgaccgatctgaaatcgcacgccaagaagatcacctccaacgacgagatcgcgcaggtcggcaccatctccgccaatggcgacaccgagatcggccgcttcctggcggatgccatgcagaaggtcggcaacgagggcgtaatcacggtcgaggaagccaagagcctgcacaccgagctcgaagtggtcgagggcatgcagttcgaccgcggctacgtctcgccatacttcgtcaccaacgcggagaagatgagggtcgagctcgaagatccctatgtgctgatccacgagaagaagctctccggcctgcagacgatgctgccgctgcttgagcaggtcgtgcagtcgggcaagccgctcctgatcattgcggaagaagtcgagggcgaagcgctcgcaacgctggtggtcaaccgtctgcgcggcggcctgaaggttgccgcggtcaaggcgccgggcttcggcgaccgccgcaaggccatgctggaggatatcgcgatcctcaccggcggcaccgtgatctccgaagatctcggcatcaagctcgagaacgtcacggtgaagatgctgggccgcgccaagaaggtcgtggtcgacaaggagaacaccacgatcgtcgacggcgccggggccaagaaggacatcgaggcgcgcagccagcagatcaggacgcagatcgaggaaaccacctcggattacgaccgcgagaagctgcaggagcgcctcgccaagctcgccggcggcnnnnnnnnnntgcggtgatccgcgtgggcggcgcgaccgaagtcgaggtcaaggaacgcaaggaccgcgtcgatgatgctctgcatgcgacgcgggctgcggtcgaggagggcatcctgcccggcggcggcgtggcactgctgcgcgcactcaaggcgctcgacggtgtcaagaccgccaatgccgaccagaaggccggcgtcgacatcgtgcgccgcgccatccaggtgccggcgcggcagatcgtgcagaatgcgggcgaggacggctcggtcgtcgtcggcaagctgctcgaacacgagacctacacctggggcttcaatgcagcgacgggcgaataccaggacatggtccaggccggcgtgatcgatcccgccaaggtggtgcgcaccgcgttgcaggacgcagcctcggttgcttcgctgctcatcacgaccgaagcgctggtcgccgacaagccgaagaagaccgaagcggcaagcgcgcctgcgatggacttctagagaggcgcgggcccggcctgacggccgggcccgctttcgatgagctatgcttgatcgatttggatctgtttcgaaacgaaaggaggatgagatgatcaaggatcgtgctttctccgctcgcggggaaaccacccagaagacgttgcggcgcttcgccgccttggccgtcggggccggcctctctctcgtgccctttgcggcccttggggccgaaagccccggctctgccgccaggaccgcggatgctttcgaacggctcgccttgccgccgatcccgtacctggagacgatgccgtggtcgagctgggaacggggcggcccgaccatgaaggtggacacattgctctcgccgatcctcgggccatccggaatccggctcgatctcacgccgccggatcggagcggtccggagcccgcgatgagctgagacggcggagcggccagcggccgctcccgacatcgctccggcgaaaggagggatgaacagatgaaaggcattgtcgttgccgctctcttgttggggatggtcaatacgctccaggccaaggaggcggactacccccgcggcgaggtgcgaagcttggctaagcccgcccggcagcttgcgaccagttccgacgcaacgtcggcaggcaatgctgagaacagccgtccgaatcggcgccgaggcggggagctctcgcccggtcgtatcgttcccgacatctgcaccggatgctgaccggccttaggccgatcagcatctgttcggcgctcgtctcttgtggtggctcgacacaggcgcagcttcggctgcacgcatgtttggttcgtggatggacgattatcgtgatctcgtcagcgcggctcttgcgctgttttgtgccggcgtgatgttggtggccggccatctcttgctcgaatggcacgccggacatgccgctccgggcaccggcgtcgatgcgcccaggagcgaaggcgcgcccgcgccgctcatctcgaacggctcgtcaccagacaggaaggtgatcgaactccccgcagagatcaggcgcaagcgtgctgcctgaggcagccttgcgctatggcgcgttttgaaacgccggcgcgaagcctagatggcccgcagtccttcctggggcatctcccggatcagcgcatcgatatcgccctgctcgagcgtctccttctccagcagcttcttcgcggcgcggtccaggatcggccgccgcgtgctcaggataccctgagtgcgctggaagacctggtcgacgatggccttgacctcctggtcgaccgcggctgccgtctcttccgcatagtcgcgctcgcgcgtcggatagggccggtcggcgctggcgaggaagttgccgggatcgcgctcatacgcgacgctgcccagccgctcggacatgccgtaacgcgtcaccatgctgcgagcgatgtcggtgacgcggcgcagatcgtcggccgcaccggtggacagatgcccgaacacgatcagctccgcggcgcggccgccgagcagcaccgccatcttgttctccagctcctccttggtcatcaggaagcgatcttcgatcggccgctgaatggtgtagccgagcgcgccgacgccgcgcgggatgatcgagaccttgtgcacgggatcggtcccgggcagcgagagcgcgaccagggcgtggcccatctcgtgataggccacgatctcgcgctccttggcattgagcaggcggttgcgcttctcgaggcccgcgatcatgcgctcgaccgcattgttgaagtcgctcatgctcaccgcatcggcggcgcggcgcgtcgccagcagcgccgcttcattgacgagattggcgagatccgcgccggtgaaccctggcgtgagcgcagcaacggcgtctgcgtccacaccctcggccacgcgcaccttcttcatgtgcaccttgaggatctcgatgcggcctttcttgtcgggcctgtcgaccagcacctgccggtcgaagcgtccggcgcggagcagggcaggatcgaggatttcgggccggttggtggcggcaaggatgacgagccccgagcgcgaatcgaagccgtcgagctcgacgagcagctggttgagcgtctgctccttctcatcgtggccgccggcgaaggggccgatgccgcgggcgcggccgagcgcgtcgagctcgtcaatgaagatgatcgccggcgccttctggtgggcctgctggaacaggtcccgcacccgcgccgcaccgacgcccacgaacatctccacgaactccgaacccgagatcgagaagaacggcactctggcctcgccggcgaccgctttcgccagcaaggtcttgccggtgcctggcggtcccaccagcagcacgcctttcggcatgcggccgccgagccggccgtaatcggtcgggttcttcaggaaatcgacgacctcgcgaagctcgtccttggcctcatccacaccggcgacatcggcgaaggtgaccccggtgttggactcaacatagaccttggccttgctcttgccgatcgccatcagcccgccaccgatcccgccttgcgccatgcgctggccgatgtaccaccacaggccgaagaacagcagcacgggcatcacccacgataacaggtcgcgcagaaacgtgctctcgatctgcccggtgaaacggacgttgtacttctccagctcctgcgcaacgtcctggtcgacgcgcgtggtgacgaactgtttctggccgccaggcagcggctccttcaatgtgccctgcaaggtgcggtcggagatgccgacggcgtcgactttcccctggcgtagcaattgctggtattcgctataggggatcaccgcgatctggttcgccgccgagatcagatactgaatcaggaagaccgcgaagatcgcggcgagcgcgtatccgagattgaaacgaacattcttgttcatgcgagatccagatccgatggtgttgcgcgggcgggtcgccgaggcacgtcttggcgcgctcgttcgggcccggtacgggtccggacctgcatcatatcctcagaacttctccttctgccttctgttccctggcgcggcacgcgcccgcagcgggaagcgtccgtgggagtagtcaggcaaacggaggcttaggcagcgatcaggcccggctgcaggccgggccttggctcaagcctaccagggataccagtaggggtacgccgccggataatagcggacggtccggtagtatccggggccataataatagcgcggcggaccatagaccggcgcataatagacgggaggtgcagccgcggcggccagcgctccggtgaacaggccgagcgcgacggccggaccgatgcccgggcctccccagtgatgatgatggtggccccgccaatgggccgaagccggcgcaaccgttccgatgaggagcgttgctgccgcggcgattgcaagagcaagctttctcatttgacttccctcgattccgcgcccgcgcagcgcgcgggcttctcgatcctctgcatgagtttcgtttcgccggacgcctggcccggcagcattcgaacttaggatcggggcgaacgacttcaagtctcctgcatgccttcacgggcccgacgtttggtcgcagtgcgcggggccatcatcttccttgccggcctttgctgggtgcgagcccccgcgccacggttgcggctacgctcatcatgacagtggtcattgcgacgacgcgcgagccagctatcccaacgctgccgacagcttgtgcatcacccgatcgagcaccttcgcttcctcggtggtcagcaccgccagcagctccgcctcccgggccagtgcgaacggcacgatcttgcgatagagcgcgcggccggccggcgtcagcgagacgatcagctcgcgccgatcgtccgcgtggtgcttgcggctgacgatgccgcgcgcctccagtccctggacggcgcggctgacctgcatcttgtcgagcgtcgtcagcggaccgatctccttggtcggaatatccggacgtgcgccgagaatggcaagcacgcgccattcctgccgtgtcagcgcaaagcgctcggaatagacctcggccaccgccaacgatacctgctcggccaggcgagccagccggtacggaaaatattgctgcaggtcgagcgcgcgaccgtcctgcgccgtcctgcgcccggtcgcttccctgcctcgcgcttcacccgaatgtcccgtcatgctgtccgccccgccggtccagccggcagattcttccgcgccggttgatccagatcaaattcaagagatcgtaacatctgatacgaatttcgcaaccgcaagtccggggagcgaaacgtcatgaaaatcgagaagatccatcacgtcgcctatcgctgtgtcgacgccaaggccacggtcgagttctacaagaaggtcatgaacatggatcttctcggcgccatcgccgaggaccgtgtgccctcgaccaaggcgccggatccctacatgcacatcttcctcgatgccgggaacggcaacatcctcgccttcttcgagctgccgaactcgccgccgatgggccgcgatcccaacacgccggactggacccagcacatcgccttccaggtcaaggacctcgccgagctcgaagaggccaaggcgcgcgcggaggctgccggcctcgacgtcgtcggcgtcaccgatcacaccatcttcaagtcgatctatttccgcgatcccagcggccatcgcctggagatcgcggcctggaccgccacgcccgagcagatcgaccgcatgaagtcggtcgcgcacgagatggtcgaggaatggtcgcgcaccaagcgtccaccgcgccacaccgcctggatgcacgagaaggagttcgcggacgcgcattgatccttggccgtgcatcaggaagcgaacatgagctacatctatccgaagttcggctatcggcgctcccaggagcaggccgattgtgtcgtgaagcggcacccgatcgtggtgatcggcgcaggtcccatcggcctgaccgctgcgctcgattgcgcggcgcgcggccagcccgtcgtggtgctcgatgacaacgacaccgtctcgatcggctcgcgcgcggtctgctatgccaagcgtccgctcgagatatgggaccgcctcggttgcgcggcgcccatggtcgagcgcggtgtgagctggaacgtcggcaaggtgttcttccgggaccagctgtcctaccagttcgatctgttgcccgaggccgaccaccaatggccggccatgatcaacctgcagcaatatcatctggaagagatgttggtcgccagatgcagggccaatccgctgatcgagctgcgctggaagcaccgtctcatcagcctcaggcaggccgccgaccatgcgacgctggcggtggaaacgcccgacggcatcttctccatggaggcgcaatgggtgattgcctgtgacggagccaattccgacgtgcgcaagatggtgggcgccgagttcacgggccagttcttccaggatcgcttcctgatcgccgacgtcgccatgaaagccgattttccgaccgagcgctggttctggttcgatccgccgttccatcccggccagtccgtgctgctgcaccggcaggcggacaacatctggcgcatcgattttcaactcggctgggaggccaatcccgaggaggaaaagcggcccgagcgcgtgattccgcgcatccgcgccatgctcggggcggataccgagttcacgctcgaatggatctcggtctatcaattcgcctgccggcgcatcgacaatttccgccagggccgggtgctgttcgccggcgacgccgcgcatcaggtctcgcccttcggcgcgcgcggcgccaataccggcgtccaggacatcgacaatctggcctggaagctcgcgatggtgctgcgcggcgaagcctcggaagcgctgctcgacagctatcacgaggagcgtgcgtacgccgccgacgacaacatcctgaactcgacgcgggccaccgacttcatcacgccgaagacgaagccgagccgctatttccgtgacgcggtgctggagcttgcccggcatcacggctttgcgcggccgctggtcaacagcggccgtctctcgacgccgaccccttacgtgacgtcgagtctcaacacggaggaccacgacgctgtgacgggcggcatgcggcccggcacgaatgccgccgatgcgcccatcttgatggatggcaagccggcctggttcctgcactgtctcggtgatggcttcacggtcgtggcgttcggcgaggtgagcgacaggatcgagatcgcggcagggccgttcgcggcgaagctcgtcgtcgtcggccgcgacatcgaggatcccacaggtctgctcgcccagcgctacggcgcttcgccggggaccacctacctgttccgccccgatcaatatgtcgcggcgcgctggagcagcttcgacgaggcgaagatcgcccgggcgatgctgcgcgcctcgggccatgacaccgccgaccggacggagcttgcggcatgatgctgaacctctcaccgaacatcgccgatcccgacgacttctacgcggagctgatcaacagccaacgcgacctcgacgaggagcaggcgttgcgcatgaacgcccggctgatcctgttgctcgccaatcacatcggggaccgccaggtgctcacggaggcgatcggctgcgcccgcaccggcggcgtctgatccgcgggacgccgcctcgccgataggagatcccgagagccaccggcagcgccggcggcaatggcccatgctggccgcgaccttgtcgtggcagccagtccctgtaatctggccgaaacaacagggaaggaaaccatgggaggagttctggagggcgtgcgcgtgctcgatttcgggcgctatatcgccgggccctattgcgcgaccttgctggccgagttcggggccgaggtcattcgggtcgagaaacgcgacggcagcgaggatcgcttcgtggcgccggtcggcgagaacggcgaaggcgcgctgtttctccagatcaatcgcaacaagaagtgcatcacgctcgatccgatgaagccggaagggcaggacgtgatgcgccggctcattgcgaccgcggacgtcgtggtggccaatctgccgccgcagacgttgcgcgcgatgaagctcgattacgactcgctgaaggcgatcaagcccgacatcatcctgaccacggccaccgcgttcggcgggccgggaccctggtccgaccgtgtcggcttcgatggcatcggtcaggtgatgtcgggtgcggtctacatgaccggcgcgggcgatccgccgtatcgggccgcggtgaactgggtcgatttcggcaccgcgctgcattgcgccttcggcacgctcgcggcgctgatcgagcgcggcaaatccggacgcggacagatcgtcgagggcgcgctgctcgcaaccgccttgtccttcaccaatgccacgctgatcgagcaggccgtcatcaacgtcaaccgcgtgccgacaggcaatctcggccagacctcggcgcccgccgacatctaccgcaccagggacggctgggtgctgtgccaggtcacgggccatccgctgttcaagcgctggacgagactgatgggcgaggaggagctgtggctgaacgatccgcgcttcgccgacgacatcagccgcggcaacaatggccgcatcatcagcgagcggatggcgcgctggtgcgccgagcgcacgacgcaagaggccgtcgacgcgctgggcgaggcgatgatcccgaccggtcccgtgctctcgccgcagcaggcgctggatcatccgcatgtccgcgctgccggcttcatgcaggaggtcgactatccgggcctgccgaaacaggcaccggtcgcccgcgccgcggttcggctgtcggaaacgccgggcgagatcgcgagccgcccgccgaccctaggcgagcacaccgatctcgttctcgccgcgctcggctacgacaaggcggaagtcgcagcgctccggcaaggcggcatcatctagcgtcacagcaactgcttcaacgcctttgcatcggccggcgcggcgctcttctggtcgttgtcgaaatagacgtagacgtcgcagccctgccgcttccaggatttgatgcgcttggcccattgcgccagcgtggccttggtgtagtgcccgtgatagcgtccgcccggcccgtgtccgcgcacatagacgaaatccgccgtgcgcttccacggcgccggcgcatcgtgatggtcggacaggcacagcgagatgttctcgtcggccagcatccgcaggatgcgcggctggtaccagctcggatgccggaattcgaagctgtagcggcgcttccgcgacagcagcttgaagaacgacgcgagccggtccgcgttcgcttcgaactgcggcggcagctggaacaggatcgggccggccttgccgccgaggtgcgagatgcggtcctccagcagctcgaggctgttgacggagcggtcggacaggcgtttccagtgcgtgatgaacctggatgccttccaggcgaacacgaaatcccgaccggtctgctcccgccatcccttcacggcctccggcgtcggcgtgcggtagaacaccccgttcagctccgtcgtgtcgaactgcccggcgtaatagcgcagctgctccttcagcgtcacgccctccggaaagaacgggcctcgccaggaggcgtaatgccagccggaggttccgatcagaacgcgcgccatgattcacgtgccatccattgtcgtttttccggaagggaacgcccctggggccgatacgttgctcgtgagcttgatcaacgcaggaccggaaccgatgtacgcgctgttcgaaggcgacaagcagatcggcgatccctttcccaccgagaaggaagtgtgggaagccgccctcatcgaggggatcgtgaccgatgttcccgttgcggacgaggagggcggccgattgttgcccgacggctaccatgtcgagcgcctcgaggagacgttcgagccgcggccggattggaagctgccgcgcgagatctcctgaatattctagttcgacgccagcgccgccttggcgacctcggccatccagccggaggcgaccgggaggatcgcatcgttgaaatcgtagcgcgggccgtgcagctccgcgccgtcgcgcaacggcccgttgccgatccagacgaacgcgcccggccgctgctgcaggtaatgggcaaaatcctcgccggccatgctgggcgcgaggtcgcgccgcacgggcgcctgcaccttctccgcggcaatgcgcgcgagctccgcttccgctggcgtgttgatcaccacgcccacgccccagacgatctcgggcgtgaccttgacgccgaagctggtcgcaatgccggcgcagctgcgctcgatgccgtcgaggatggcgtccttgacctcttcgcgatggtagcgcagcgtgccgcggatggtgacgcgtccggcgatctggttcggtgcggtgccgccctcgatcgtgcacagcgacagcacggcggtgtcgagcggatcgacgccgcgcgagacgatcgattgcagcgccacgatcagatgccccgccgccaccacgggatcgcgcgtcagatgcggcatgccggcgtgcccggcatggccctcgatggtgatggtgatgcgcccgccggaggccatgacgacgccgtcgtgcacggcgacggtgccggcggcaaggcccggccagttgtgaaagccgaatatccgctccatcggaaagcggtcgaacagcccggctgcgaccatcgcgcgcgagccgccaaagccttcctctgccggctggaagatgaaatcaaccgcgccgctccagctcgtgtcggcggcgagcagcgccgcggcgccgagcagcgaggcggtgtggccgtcatggccgcaggcatgcatcacgcctgatgtctcggaggcatagggcaggccggtgtcctcggtgatcggcagcgcatccatgtcggcgcgcagaccgacccgcctctgcgcatgcccgcgcgtcaatgtcgcgacgatcccgtgcccgccgatgccagcctcgaagggaatgccgagttccgtaagcttgtcctgcacgaaggcggcggtgtttctttcctggagcgatagctcagggtgggcatgaagatgccggcgccactgggtcagtttctggtgcagctcgggggtcaaggcaggggaactttcgcaaagctctcggttgccgccaccatagcggattgtcgggccgacgcatccggcgaaggggaatggctcgcgtgcagcaatgtcgtttggtgccagctccggagaaggtgcgctccctcccccgcttgcgggggagggttgggcagagggtgtcttcgcgttgggattccccgagtggaaagaaccctcacccggcgcgagggacggtgcttcgcatcgcccggacgcgccgacctctttcgcaagcacgcgggagaggtgagggaccactaccccgccagcttcgccaggccagcccagtcgaagttgatgccgtgcccgtgccggtcaggcgccagcgcaagcccgtcctgcagcaccagcggatgctcgatgtacctgtcgagcccgaagccgtgcgcctccagataggagcggttcgggcaggccgcgagcaggtgcacggtgatgtcgtgcgcgccgtggctggtgacgggcaggttgaatgcttccgccagccgcgcgatcttcatgaaggcgctgacgccgccgcaattggtcacgtccggctcgggataggacactgcgccattggcgatatagttcttgaactcccatagcgatcgcagattctctcccgccgcgatcggcacgccgccggcctgcaggacgcgcgcgtggccggcgacgtcgtcgggaatgatcggctcctcgagccaggtgaggtcgtaaggcacgagcgcacgcgcggcgcggatcgcttcctcgaccgtccatttcatgttggcgtccgccatcagcggaaagccgtcgccgagatgctgtcgcatcgcggcgaccttcgcgacatccgttttcaggtcgggccggccgaccttcatcttgatggcgcgaaatccgttggcgagattgccgtcggtctgcttcaagagcgcatcgacggagagatcgaggtcgatgccgccggcatagcacggcacgcgcgcgtcgaagccgccgagcaattggtacagcggcagcttggcgcgccgcgccttcaaatcccacagcgcgatgtcgagcgcggacagcgccagcaccgccggtccgccacgtccgccataatgcagcgcccaccagacgtgatgccagatcgcttccgtgtcctccgcttcgcgcccctcgaccagcggcgggatctcgcgcctgaggatgtccgcggtcgcgccgccattgcggccgacggtgtaggtgtagccgacgccttcggcgccgtcggcatcgcgaatgcggcaggtgatcagttcgaacgcggtgatctcgccatgggtggagtcggagagcgtgacgggaagggggatccggtagaatccggtctcgatgtctgcgatgcgcggcatggtgcctccctgcttttcttttggttcgtagggtgggttagctagcggttgcgcgaagcgcaaacgcttgcgtaacccacctcttctgttgccgtggatggatatggtggtgggttacgccccggactgcgcgctgcgcagcccaaggctaacccaccctacaaacccaactcaccgcatggtcgcgagttgcagtgccagcgcgcaggcgcggtcatattcgtcgagattgatccattcgtcgacggtgtgcgcctcgttctggccggcaccgaaggtcacggtcggaatgccgtggcggaccatccagttggcgtcgaggccgccattggccgtgcgcacattcggcgtgccgccgaccgcggacacggcctccaccgcgcgcttgatcacgggctggctgtccttcatgcggaacggataatagtcggtctcggccttgaacttgaccttgccggacttgccttgcgcgttcgtcaccttcttggccgccttctcgaacgcggccttgtaggccttggtgatctccttgaagaacttgccgtcgtgactgcggctttcgccgcgcacatgcacgtagtcggtgacgacgttggtggcatcgcccgccgggcggccttcgccgccggtgacggggccgacattgctggtgcccatcttcgcgctcgcgcccttgcctttcaccaccttgccgaaccagccgccggccttcacgtcggccagcgccagcgccatgatcatggtcgcggagatgccgcgctccggcgcgacgccggcatgcgaggcgcggccgaatatctcgacgctccagcgatcggcgccgaccgcgccgatgacgacgttggaggccgagccgccgtcatagttgaacgccatcaccggcgagccgagctcgtccagcttgacgtggcgcgcgccgtagagcccgctctcctcgcgcacgcagaacagcagcgtgatcgggggatgatcgagcttctgcttggcgagctccgctgccagcgtcaccagcacgccgcagccgcagcgattgtcaccgccgagcgcggtcctggcttcgttgacgatcttgcggccggatttcttcggcttggcgccggcgcagagcggcacggtgtccatgtgcgtcatgaacatgatgcgcggctggttgtgcagcgcgccgcggccgggcaggtcgacgatgaggttgccggtctcggtcggcaccgggatgcgcgtgttggcatcgtcgagccggatcgccttcgccggcacccccgcttccttgagcgccgccgtgagctcgcgcccgatcgccgcctcctgtccggtgacgccttccacggacaggaagcgcatgaggcggtcggtggcggctttggtgtcgacaggcatcggtgattcctttggcgagctgggccgcgtcatcctatggggttggcgcggtgtaagccaagaagatcaccacgccgagcgccagcatggcagccatgaacagcagcaccgccggcagcccggcgagcgcggccaccgcgccggtgaccgattgcatcaaggccgcgccgaggaagaaggcaaggttgaccgccgcgagcgccttgcccgcggtttgcgcgtcgaccagctgcctggacatgccgaacagcagcggctgggcggaggtcgcaaggccgatcagcacgaacagcacgaggtcgtattgcggcggcatcacgggcacgccgaacagcacggagaccgcgtagtgcggcgcgcccagcgccatcagagccagcagcaaggcgcctgccagatgcgaaccggccaccagagcgcggcggcggccgagcctgcgatcgatcatgccgatgaaaagcgggccgacgatcattgccagcgtgaacgcgccgagctggttgccagcctcgacccgcgacaatcccttgacgtccatcagccacggaccgccccacaagccgcgcagcaccagcgaggtcgcgagcgacaccagcgccagcgcgatcaggccgcgcaagggacgtgagagtccgagcctgagcacctccatcatctgcgcgagcggcgaggactcgtccttgtgctcggccggctggtgtgggaccagcgcgaacaccgcggcggccactgcgacgccgccgatcgccgcgatccagaatccggcgcgccagccgtaggcgtccacaacgaaggcgagcgggctcgacgacagcagcatgccgatattgccgatcgagaggatcgcgcccgaccacaacccgaagcgggccgccgacaattgcttggccgccagcgtcatcgggcacatcagcatgccggaggtcgcaatgcccagcagcagctgcccgacggcaaagctcgaaggcccggtcgcaaaccccgacgccatcgcgccgaacacggttcccgcaagcaggctgagcgacaccggtcgcacgccgaagcggtccatcgcagctccgaccggaatctgcgccgcggcgaaggcgaaaggatagatcgacgtgaggctggcaagggcctgcggctcaatgtcgaaatccgccgccatcagatccaggctcaccgcgggaatggtgcgcagcaaggtggagagcatatgcccgcaggcgagggcgacgagcgcgaagatcagcgcgcgagtggcgtgccccgcgtcgtgggcggctttggtcatgagcgtcccgtcccgagaaggtttcgagtggggttacaggattgagggccaagtgccaacctcgaggagctgattccatcctgcaagttgccggattgaaaccattgctgatgctctcggagagcccaggagtatccattgatggaccgcatgggctcacatggatcgttggtggcttgttgagggggccgttttggcccagggcgcggctcacaacgtccagccaagggcggatagatgcgagttggacgaagccacggtagttcctgcaagcctgtagtagcacgtcgccaccgatggcactgcctgaagcaccgttcgaagaggttgcgagcgcgacagagataggtggctaaagcagatcggatcgctgcgagtgcttttcggccggacgacgttcattcaatcgtggcatgccgcgcggcttattcggcagcatcggcacaatggcaaaccattcattgtctgtgagttcgtagcgcatgtttcggccccttccgactggtggccatgaatcatggcccggatggcaggctcaactggtcgcagtgcatccgaaagcggacctgttgtgctcacctcgagttttgccgttcgtgacccaaatgtatggaccggctgcgtttcgcaatag

SEQ ID NO: 313 - DNA, 190426 bp, Bradyrhizobium colbertium
  misc_feature (2650)..(2659): n is a, c, g, or t
  misc_feature (5521)..(5530): n is a, c, g, or t
  misc_feature (34440)..(34449): n is a, c, g, or t
  misc_feature (71497)..(71506): n is a, c, g, or t
  misc_feature (132214)..(132223): n is a, c, g, or t
  misc_feature (174936)..(174945): n is a, c, g, or t
  misc_feature (175817)..(175826): n is a, c, g, or t
  misc_feature (181394)..(181403): n is a, c, g, or t
gttgcgcagacgtcccgtgcgaacctggtcaaccagtacaacaacattctgcagcagatcgactcgactgcgcaggactcctcgttcaacggcgtcaatctcttgaacggcgaccagctcaagctggtgttcgacgagactgcaaagtcgagcctcagcatcaccggcgtgacctacaactccaagggtctgggcctcgctgcgctgaccagcggtgtcgacttcatcgacaacgctgccaccaacaaggtcagcaccaacctgaacaccgcgtcgagcacgctgcgttcggaagcttcggctctgggttcgaacctcacgatcgtgcaggtgcgtcaggacttcaacaagaacctgatcaacgtgctccagaccggttcgtccaacctgaccctggccgacacaaacgtcgaggcggccaatagccaggcgctgtcgacccgccagtcgatcgcggtctccgcgctgtcgctggccaaccagtcgcagcagagcgtgctgcagctgctccgctaacaagcggacaacatcgctagccaagacatcgcggcggggcttcggccccgccgcttttcttttaaggcgaggacgccgacgacgcttcagaaaagtaaccagcggttatggttaatggagcgtaagcgcgcagaaatgccaatgatttcagtccgattggcggtctcgtttggactgtcgaacggtttatggtgaaccagcgcttagacgagcgcgcatcacttcaccctttgttagccatgtcacggcacgctggtcctgtcactcgatccgaagcgatcgaacgaagacgcgtaaaccagaagggtaagagttatgtccggtattgttctctctgcgtcggttcgccagaacctgctctctctccagtccaccgccgacctcctcgccaccacgcagaaccgtctgtcgaccggcaagagcgtcaactcggccctggacaatcccaccaacttcttcaccgcacagtcgctcgacaaccgtgccagcgacatcaacaacctgctcgatggcatcgccaacggcgtgcaggtgctgcaggccgccaacaccggcctgacctcgctgcagaagctgatcgacagcgcgaagtcgatcgccaaccaggcgctgcagaccacggtcggctattccaccaagtcgaacgtctccaccaccatctcgggtgcgacggcggccgacctgcgcggcacgacctcctatgccagcgcgaccgcgagcagcaacgtgctctacaacggcaccgccggcggtacgacggccgcgagcggcaccacgacgctcggcgccagcatcggcaccctgaccggtgcggcggcgacggccggcgatggcaccaccgcgctgaccggtgcgatcaccctgatcgcgaacggtgcggcgacggcgaccggcctggtcggcaacgcccagcccgctgacggcgacacgctgaccgtcaacggcaagaccatcaccttccgcgcgggttctgccccggcgagcaccgcggttccgaccggctcgggcgtcagcggcaacctcgtcaccgacggcagcggcaacaccaccgtctatctcggcaccacggctgcgccgactgcgaccgtcagcgacctgctgaccgcggtcgaccttgccagcggcgtcaagacggctgccatcagcgccggtgctgcgacgatcgcgaccagcgccagccagactgcctcgagcgtcgctgcgggcgccgtcacgctgaggagctcgacgggtgcggatctgtccgtgaccggacgcgccgacctgctcaaggcgctcggtctgacctcggcaatcggcggcggcaatgccaccgtcaacgtcaaccgcaccaccagcgcagcctcgctcggtgcgacgatcaccgacggttcgacgctgaacgtcaacggcaaggtcatcaccttcaagaacgcgccgaccccgggctcggccggtgctccggccgttcccaccggctacggcgcgagcggtgcggtcgtcaccgacggcgacggcaattcgactgtctatctgcaggccggcacggttgccgacgtgctgaacgcgatcgaccttgccaccggcgtgcagaccgcgaccatcgcagccaacggcaccgcgacgtttgcggccgcctcggggcagtcgaagtcgacgattaactcgtcaggccagctcaagatctcgaccggcgtcaacgccgacctgtcgatcaccggcaccggcaatgccctgaacgtgttcggtctcgccggcaataccggcaacgcgaccgccttcactgcggcacgcacctccggcatcggcggcatcgccggcaagacgctgaccttcacctccttcaacggtggcacggcggttgacgtgaccttcggcgacggcaccaacggcacggtcaagacgctcgatcagctcaacaccaagctgcaggccaacaacctggctgcgacgatcgacgccaacggcctgctcacgatcacggcgtccaatgattacgcatcctcgactctcggctcgacggcggccggcggagcgatcggcggcacgctgacctcggccctggccttctcgacggcgtccacgcccgtccaggatggcgtcgcccagacggcacgtgctaatctggtctctcagttcaacaacatcctgaacnnnnnnnnnnccaagtcgagcctgaacattacgggcgtgacctacaactccaagggtctcggcctcgcctcgctgacggttggcgtcgacttcatcgacaacgccgccgccaaccgggtgctgaccaacctcaacgccgcctcgagcacgctgcgctcgcaggcctcgagcctcggctcgaacctctcggtggtgcaggtccgtcaggacttcaacaagagcctgatcaacgtgctccagaccggttcgtccaacctgactttggccgacaccaacgtcgaggcggccaacagccaggcactgtcgacccgccagtcgatcgcggtctccgccctgtcgctggccaacacgtcgcagcagagcgtgctccagctgcttcgctaataagtagcggaaatcactgattaaaattgagtggcggggcctattgccccgccgctttttctttgcgtccgcgggcaggaaggggcgttcatcggcggttaaccctatcccttaaaccgtcgttaaccatactttaaaggacacctcctaaaactggacaaaaggcccgctttccagtccgcggccgattcgtatccggttgaagaggaagactcgccaatgtccaacatcgttctctcggcgtccgttcgccagaacctgttgtcgctgcagtcgacggccgacttgctggccacgacgcaggagcggctggcgaccggcaagaaggtcaatacggcgctcgacaatcccaccaacttcttcacggcgcaggggctggacaaccgggcgagcgacatcagcaacctgctcgacggcatcaacaacggtgtgcaggtgctccaggccgccaacaccggcattacctcgctgcagaagctgatcgacagcgcgaaatcgatcgccaaccaggcgctgcagaccacagtcggctattccacgaaatcgaacgtctcgaccaccattcccggcgcgaccccggcggatctgcgcggcacgacatcctatgcgagcgcgaccgccaacagcaacgtgctctacaccggtgcacccggcggtgtgacgccggtgacggcggccgccgcactcggtgcatcactgggctcgactgcgggcacgttgaccggctctgccgtcaacgcggccgacggcaccactgctctgaccggcaccgccaccctgatcggctccacgccagccagcacgctcggctcgtcgccagccgacggagattcgatcacggtcaacggcaagaccatcaccttccggaccggcgcggcgcctgcgacgcagccgaccgggtggggcctggatgccaccggccacatcgccaccgacggcaacggcaattcgatcatctacatggggacgggggctgcgcccaccggcaccgtcaacgacctgctgagcgcgatcgacctggcgagcggcgtcaagagcgcgacgatcagcgccggcgctgcgaccatcgccgtcagcggtgcggctggtcccgtcggcacgcttcaggtggcatcgtccatcacgggcggccaggtgacgctgaagagctcgaccggcgccgatctgagcgtgaccggaaaggccgacttcctcaaggcgctcggtctgacggctgcaacgggcgctggcaatgccaacgtcaccgcggcccggtcgaccaccgcaggttcgctcggtacccttgtcaaggacggctcgacgctgaacatcgacggccacaccatcaccttcaagaacgcgcaaacgccgcaatcggcgacgagcgtgacgtccggcggcgtcagcggcaacatcgtgaccgacggcaacggcaactcgacggtctacattcagagcgcgacgctgaccgatctgctcaacgccatcgacctcgcgaccggcgtcaagaccgcaagcatcttcaacggcgcggcgacgctgtcgaccacttcgggccagatcccgtcgtcggtcaacagcagcggtcagctcgcgctgtccaccggcgtcaatgccgatctctcgatcaccggcaccggcaatgcgcttagtgcattcggcctcagcggcaacaccggaacggcgacggcatttaccgcggcccgcacctcaggcgtcggcggcatcagcggcaagacgctgaccttcacctcgttcaacggcggcacaccggtgaacgtcaccttcggcgacggcaccaacggcacggtcaagacgctggaccagctcaacgcgcagctgcaggccaaccatctgacggcgacgatcgatgccaacggcgtgctcacggtgaccactgtcaacgaatatgcctcctcgacgctcggctcgacgctcgccggcggcgcagtcggcggcacgatcaccggcgttctggccttcacgaccgcgcagccgccggtccaggatcccgtggcgcagaccgcgcgctccaacctggtcaaccagttcaacaacattctcgcccagatcgacacgacatcgcaggactcctccttcaacggggtcaacctgctcaacggcgacactctgaagctcgtcttcaacgagaccggcagctccacgctgagcatcaacggcgtggtgttcaacgctgcgggcctcggcctgagcaatctcgtcaacggcgtcgacttcatcgacaacggcgccaccaaccgggtgctggccagcctgaatgcggcctcgagcacgctacgttcggaaggctcgacgctcggttcgaatctgtcgatcgtgcaggtgcgtcaggacttctcgaagaacctgatcaatgtgctgcagaccggctcggccaacctgactctggccgacaccaatgaggaagcggcgaacagccaggcgctctcgacccgccagtcgatcgccgtctccgctctgtcgctggccaaccagtcgcagcagagcnnnnnnnnnngttcgcgagcgcaagttcgtcatcggagaattcgcggcggagctaacgctccgcctttcttttgaaggagaacgctaagacaggattagctgagatcgccacgcatcgcgccaagcgaatttacatcgtgcgtgcgtgcagctagcgttgcgctgacgaagaactccgcgccccgtaattgtccggagtacttccaaagcacacacgtaagcaaatcttaagcggtgctgcctagggttgggaaagaaatccttaagcgcgtacaacgcgctaggtaacgtccagggtgtgattgatgtcgaattccgctgcctcggcctatgcgcgtgttgcaacgaccaccgcatctcctcgggacatcgaggcgcagaccctgcttaaggccgccaacaagcttcaggatgcgatcaacagtgccgatccgttcagcgagcagaccacgcaggccctgatgttcaaccgcaagctctggactatcttcctgagcgaagcgatgcgtgacaccaatccgcagccgatcgacgtccggcagaagatcgccaacatcagcgtgttcgtgctgagccagaccgctgcgctccagatgagcccgcagttcgatcacttccgcccgctgatcgaaatcaaccgcaatatcgctgcaggtctgtcgggacggccgtgacggagagatggcgtggtcgagcatttgccgactgcgcacgaaggctcacgctgacgtatgccggcgagggtaccgatcaatgacatcgtcaccggtctttgccgccaacttgcagatgttgatcaggcgctgacgtccgtgctgagcgggcgcgcgggctcggactgcctatccaaggcatggaaataggcccgccggcgcagcattgcttcgtcgggaaactgattgacgaccgcgtcggtcttctcgttgacaacctgaaagacgaatgatgcagctgcctggtcgaacacgacctggcgtgagacgttctcatggggcagatcattgcgcacgggcgcgctcgtatcggccgcggcgacggtcttgctgaccggcagatcagtttgcacggcctcgttcgccgccgcgttggacgtcgttacgatctgcgcgggggccgggatccccaccggccggatgctgaaatctgtactcatggcagcctcctggttgcctaacgtgagtcaaatcccaacccctctaatgacgcaagcatggaacaccaggactgaacggccggtaaggaaacgtagctaaccgcgggacgccatggccgcgcggtttttcataaaattgttgcttgttcttgtgcgctcagagggagcggctgactgcaagcggggtgatgtgacgcgggcccggagtggcgctgcgcccggcggccgtataggtgttcggcacgttgcgcttctggatctcggcattgacgccgcgcacgacgctctcggagaccgcgtgcgccgttgcgagcacggtgagattgacctggagcatcgctcggaacgcatcgtgatggcggtgcagcgtcgacagcagctcgggcgcggatttcgcgagctgggcctggttggctttcaactggccgaccgctccgacgtagtttcgcgacagctcctgcttcttgctctcgagcgtcatcgcctcgcgaaccttgccggcgcgaacgagctcggtctcgcgctcgatcagtccgagcagggcgctcatcgcatccatcaggttttcggcgaccttgcgtgcttccgtgctgccggccgcggcagtcgggcgttgcgcttgcatcggctggcgtgaggcgttgaaatggttcatctcgtttgaccttatgccgtgcggatcgttttcgcctgctgcaggatgagggtccggtagacgtcggtcgcgacgccgacgccgccggcctgggcgaagttcttggaatattgctcggtcagcatcgagcgccatacgccggtgccgggtgtgtcgccgaacgggccttcgcccttaaggcccgaggtcatctgcgagaacatgctgttgaggaacatcgcctcgaagtcggtggcgatcttctgcgcctttgcctgttgctgcggcgagaccttctggagggcggcggcgagttcgaaatcaggccgcccgttgcggctctccaccgagaaggccgaagcgttggggaggcgcggggtattgatggcggaggcttgcatcacatcacctcgatgtcggcttcgatggcgccggcggccttgatcgcctgcaggatgctgatcatgtcgcggggaccgataccgaggccgttgaggccgtcgacgagctgctgcagcgagacgccgtccttgaccagcgccagcttcttgccgtcctcggtgacggtgacactgctgcgcggtgcgaccacggtgcggccgcgcgagagcgggttgggttggctgacctgcgggctctcggagatggtgacggtgaggttgccctgggccaccgcaacggtggcgacgcgaacgtcgcggcccatcacgatgatgccgctgcgctcgtcgatgatgatcttggcggcgagatcgggttcgacctggagctgctcgatttcggtgagaaaggcgacgacgttgcccttgaactcgggcgggaccgacagctgcaccgtcgacgggtcgatcggctcggcggccttgacgccgagataatcattgaccgcagccgcaatgcgcttggcggtggtgaagtcggcattgcgcagcgcaaggcgcacgttcggcagccgattgagcgcgaactcgatctcgcgctcgatgatggcgccgttggcgatccgcccaaccgtcggcacgccgcgcacgatcttggccgcctcgccctcggcctggaagccggagatcgcgagcgagccctgcgccactgcatagacgttgccgtcggcgccgaggagaggggtgacgagcagggtgccgccctggagattcttggcatcgccgagcgcggagacggtgacgtccatgcgcgtgccctgcgtggcaaaggccggcaggttgcctgtgaccatcacagcggcgacgttgccggttcggatcgtggcgccgcggatgttgacgcccatgcgctcgagcatcgcttgcagcgattgcttggtgaaggggatgttgttgagcgtgtcgccggtgccgttgagaccgacgacgaggccatagccgatgagctggttttgccgcacaccctctatgttggcgagatccttgatacgcgaggtcgcagccgctggcgtgacggagagcgtcagcgctgacagcgcggcgcaggccaccccaacaatcctcacccaacgaacgcctggcatactctgctccccaaggcccctaagagcgggctcctcaaatcggaaggacctgcacgacactcccatgacgagctggtccgacgctttccttgcgagcaccgtgccaaccgtggcggcagggataggtggctgaataggttgaataaatctgtttcgaccggtgtcagcggtcgttcgccctgaggagcgaaactgccgcctctcggcaaattctgccgggctgtttacgcgtcgttaaccataagagggcgaaggtgaggcatcgatcacccggattccttccgatgcgcatctacggaccgaacggcaccacgcttggaacgccggccagccagaccaggcggatcggctccggcaccttcgcgctgcccgacacctcgtcggcacaggagacgcgaagcgctgccgcgccgaaggccaccgccaacatcgacgcattgctggcattgcagggcgtcgatgaggatccgatcgagcgccgcaagcgctcggtggcccgcggcaggaccgcgctcgacgtgctcgacgatctcaagattgggctgctgtccggcaatctcgatggatcgaccgtgatgcgcctgcgggatgctgcggctaacctgaaatcgtcctcgggcgatcctggtctcgatgcggttctcgccgagatcgagctgcgcgtcgaggtcgaactggcgaaggctgggcaggcttaacagccatccgtcacttcgcgcagtcttacgcagcttcctccttctgctgcgcgtcgtagcggcgctgggcggcgagcacatctttcaggttctgctcggcccaatcgcgcagcggatcgaccgcagctgccagcgtcaatccaagctgcgtgatcgaatattccaccgtgaccggcaccgtcgcgatggcatggcgcttgatcaggccgtcgcgctcgagcgacttgagaacctggctgagcatcttttgcgagatgccttcgatcgtgcggcgcaactgattgaagcgcattggttcctcgcgcagcagcaagaggatcagcaccgcccatttgtctccgacgcgatcgaggatctggcgggtggggcaattcgctgcgtagacgtccggtttcatcatcgatcctcggaatgcatacggtcgcttgcgggaccaccgggagcgttccgcgtccaggttaccctcgcgtaatcaggtaagcacaaagtgctctcttaacaccagcatcctttgcgatatctagttactggtggttaccactgttgcaatggagcacttcatgaatatcgcaatcgcgggcgcctcggggcgagccgggtcggagatcaccaaggagctgtcccgccgcggccacgccgtcacagccatcgcccgcaaccccgagaagatcgcggccctgcccaacgtcacgccgatcaagggagatgtgcttgaccaggacggccttgccaagctgtgggccgggcatgacgtcgctgtgagttccatccacttcctcgccagcgacgccctgaagctgatcggtgccgcgaaggactccaaggtcggtcgctacctcgtggtcggcggcgccggcagtctcgaggttgccccgggcgtgaagctggttgcgacccccaattttcccgctcagtacaaggccgaagcggaggcgggctcgaccttcctcgacctgctgcgccaggaaaaggacctgaactggaccttcatttcgccgtcggcgctgttcgtcgagggggaacgcacgggcaagttccggctcgggaccgaccagcttctcgcagatgcgaacggcaagagctggatcaccttcgccgactacgccatcgccctcgccgacgagatcgaacggccagcccatccgaagcagcgcttcacggtcggttattgaagccctcggccgcctccaagcctctcagggataaaccttcctgtgcaagggcttggaggcgcgaggcgcgccatcagggaaatattgtctgtcacgggaggccactatataaggcccggctcaacggaccccgttccgttcgcgagtcgttgcttaaaaagataggcctcccttggaaaagttgaaaaactaccgaccgaccgacaaagagcctttcatgaacgaccggcagaaggagtacttccgcctgaagctccttgcctggaaggatgagatcctcaaagagtccaagctcaccctgcaggctttgcaggaggagaacgtgaaccaccccgatctcgccgatcgggcatcgtccgaaaccgatcgcgccatcgagctccgcgcccgcgaccgccagcgcaagttgatcgccaagatcgacgccgcgctccagcgcatcgaggacaacacctacggctattgcgaggaaaccggggagccgatctcgttgaagcggctcgaggcccgcccgatcgcgacgctctcggtggaagcgcaggagcgccacgagaaacgcgagaaagtttatcgcgacgaatagagcccgagccgcagcgatgcggctctttgttttttggacgaggcgccgtttggcgccgcgatgggcgttttgcctggcgctcggaagctgcgtacgtcaaacggggcgcagcgattgcaaaaagtgaatcgcaatcaaggatctagtctcgactcctccgagctcacgtgagttcggatgagaaacagccttcacttcaggtgcgggaaattttccgagtcgcatcaatgagatcgagtcgggtcttgagatgctgatccagctgcatcaagcatcgctgcaatcacgcctcatgcgcgtctcgcgagagcccgcgaggcacgcgactccataaagcctccaccggctcaatttttccttaagggcgggccagcggtcgtcgtcccgcgccgaggcgcgcttgtcagggtggagcagggatgctgaagtgctgccttgagctgcgtagcgtgggagacggcgccgatggacaggattctcgaagccgcaaaggccatcgcgctggcgcgccgcaatcatgcaccgctcgcggcgctggagcaccctcctgccgacgaggccgagggttatcaggtccagcgcgcgctgcacgatctcctgctgccgcatgtcggcccgctcgttggctacaagatcggctgcaccagccaggtcatgcaggagtatatcggcatcccgcacccctgcggcggcggcgtgttccagaagggcgtgcatgacagcggcgccaagctcgcggcgtccagctatgtccgggtcggcgtcgaatgcgagattgcagtgcggctcaagcgcgaccttgccgccggcgaggcgccgttcacagccgaatgggtcggcgaagcggtcgaggcctatcagcccgcgatcgagatcgtcgacgatcgctacgtaaaatgggagacgatgggcgcgccgaccttgatcgccgacgatttcttcgccgccggttgcgtgctcggcccatcggtgccgcgctcgtccgtgccggatctgaaggcggtcaagggacgcgccatcgtcaacggcgaagaggtgagccacggcaccggggccgacgtgctcggccatccccacaatgcactcgcctggcttgccaaccatctcgccgccgaaggcaagggcctgcacgcgggtcaactcgtgctgaccggcagcctggtcaagacgctgtggctgaaagcgggcgacaaggtgcggatggaacttgaggggctcggaaccgtcgaggccgagtttacgtgagtgggcgcacggttcttcgacgcacgccggcgctgtgaggagctcttgaggcgaagcattccaggcttccgcgaagggatcccggatttgctacgctcgcactgagcaggtttggggcatggcgcggccaatgcgcccgcccgactcgctctaagcagccccctcacatcgccttggtaaaatacatgcggccctcgccaggggagctagcgagggccgcgtagtacaccgtcgttcgcgcctaggttcgcgaacacgatgtgggagctcttgaaggaacttagaagggcagcagcacgtccatgacctgctgaccgtagcgcggctgctgcacgtccatgatctggccgcggccgccataggcgatgcgcgcctgggcgatcttgctggaatcgatggtgttgtcgctctggatgtcctcggggcggacgatgccggcgacgacgagctcgcggatctcgaagttgacgcggatctcctgcttgccttcgaccaccaggttgccgttcggcagcacctgggtcacgacggcggcgacgttggtctgcagcgcttcctggcggttgactgagcccttgccgtcagccgaggacgtcgagtcggttgtaaggagacgtccggggagaaccttgagcggttgcgtgaccgtctggctgccgatgaagtccgtgaccccggagtcctccttgctggtgcggctgcgctgggtctcgttggacagattggccttgtcggtgatgttcacggtcacggtcaggaggtcgccgacctggcgggcgcgctggtccttgaagaaggcgcggctgccgttgcgccagagcgagttcggattgtaggaggcgacttccggcttcggcatcggcatctgcaccggcttgtagccgggctgcgtcgtcgggttgtcgatcgccgacagcttcggctgttcgccgatctgcgacaggcggtcgatcgaggagcagccgctcgccagggcgcaagttgcaagcagcaaggcagagatcgcgccgcgacgaagacgggaagccgaactgaacgttgacatgacttactctgactttgctggagcttgcgagaggcgagcttgcggaatctgggcttgggcgacctgggccggatttgccggcgcctgcacaacgctctgcgcgagggctgcggcggcgggcatctcgtcgcgcttcagcgaggagctctgctcgaccgcaggggccatcggcgcggactggctggcaccctggaccgtgacctggccacgggcggtgacgacgccggtcagcgtgcgcttggactgcagattgagcacgctgacggtgtcgccctcggcgccgctctctgtcgccttgccacgcgtggtgagatagaggccgggcatctggtagatgatggtgacggcttggtcgcgcaccacgaagttgggcctgacgacgtctgcggcgcggatcggcgtgccagcccgcatcgctcggcgcaattccatgccgacgctgcggtcgcgggacgcgggttcgccggtgacctcggccttcggccggcgctccagcgaaaggtcggaggatttcagaagctcggcgcggtcgacgtcgcgggtcagcacggctacctccaccgtctcgatcgcggtgccggtgaaacgcagcttggtcggagcgggattgctgtcattggcaatctcgaaggcgatgtcgaaacggccgctgcgtgcatcgtagcgggttgcggccggcaggagtgccccggtgttggaggcgtcgagccgcatctcggcgacgctgcgatcgaacgtgacggtgatgttggcggcgtctccgaggccgaagcggcgctcgagcgctgcggcgaccgcgttctcgacgtccttgctggcgagcgtgcgggcgaggcgggtgacttggacctccttgacgtcgccggtcatgacgccgatcacctgcttggcgcgcagcacggacagcacttgggtggccgtcagggtgccggtggtgccgagatcgggcgagcggtagaccgggatcgacgcggccgatccggcgttctcgatgagatcgccgatgcgcaccacgtccgaggtgacggtgacgcttgcgcgcaaggtcggcgcggcgatgaagtcgtctgccgctgccgccggcgatgtcagcgcgagaagggcggagatcgtggcgagggtggcgcggatcatcgtcattgcctcagcggaacagcgccgtggtcgattgcatcatctggtcggcggcgctgatcaccttggcgttcatttcataggcgcgctgcgcggcgatcaggtcgctcatttccgagaccacgtcgatattggcctgctccaggctgccctgcgtgatcttgccgtaaccctccgagttggcggtgccgtcctgcggcgggccggaggagggggtctcgatgaactggttattgccgacgggctgaaggcccgccttgttgatgaagcgcgtgacgccgatctggccgatgatcgacgatgtcgatgaaccgggcagcgtcaccgagacctggccctgctcgctcacggagatgcccgaggcgttgttcggaatggtgatggtcggctgcaccgggttgccctgcgcagtcacgacacggccctggttgtccatctggaacgtgccgtcgcgggtgtactggtaggtcccgtccggcatcaggatcttgaagaagccatcgcccgagatcgcgagatcgaggtcgttgccggtctgcgacagcgttccctgcgtcatgctgcgcggcgtgccgacggtcttgacgccgccgccgatgtcgacgcccaccggaaggatggtgccctggtcggacgactgggcgccgacgcggcggacgtgctcgtagatcaggtcctggaacgccgcggtctgcttcttgaagccggtggtgcgcaggttcgcgatgttgttggagatcacctgaacgttgagttcctgtgccgccattccggtcgctgcggtgtgaagcgcctgcatgtcaattctccttcaatcaggccggaacgtcggcgagcttgtcgatcgccgatttgtggaggtcgctctgctgctgaagcaggttggcgatggcggcgtagctgcgcatgacttcgaccatgcggcccatctcgccgaccgcgttcacgttcgacttctcgacgtagccctggcggacgttggacttggcatcggcctgcggaacggcggagcccacatcgtagagattggcgccaagcttggtcagcttggccggatcgtcgaacgaggccatgcggatcttgccgcggatcgagtcggttcgtgccgtgccctcgagcaccgtgacggtgccgtcgggcgcaacgttgatgtcgtgatcggtcggctggaacgtgatcgggccggcggtgccgagcacgagattgccgtcggaggtgacgagctggccggtgctgttgagcgagaatttgccgtcgcgggtgaagcgctcggcgccgttggcctgcacgacgaaataggcgttgccgtcgattgccaggtcgagcggattgttgctcggctccagcggcccctggctgatatcgcggaaggtgccgcggtcctggacataggagaccagccggtcgcggccgatgaaacggtcctcacgcgcgttcgagttgaggtgctcctcgaacagcgaatggtcggccttgaagccgctggtgttggaattggcgacgttgttggcgatgacggccatctgccgctccaacgtcatctgccgtgacaagccgatcagaagcgcgttctgcatcggaaatctcccctgagtgggatctgccatttcgctctcccaagcgccttggcggaccccgtgaacgaggccttcaggttctcccaaaccgtcgggtctcggtcctttctcagcgaaagtcgtgccaaacagaaaaattaaacaatttcaaagtcttgccaacttttgatgggcgcgggaaggcggcagaaaggttctgttagccatgtttgcccggcagatttttcctagcgcgggcccaatcgaaagattccgttaaccattattaccgtagcgtttgcacatcagaggagcgcatcgcgctgggggcattcgtaccgcgtcacggtctgccaggaggcttcgctctttcgacccctttgagagatgaacgagcgcggcacccatggcagagaatgaagaaggcggcgcagccgccgagggcgcggaagccgctccgccgaagaacaagctcaagctgatcatcatggccgtcggcctgctcgccgtgctcggcggcggcgcggcgacctggttcttcttcttccgtcacggcgaggccgagcaccatgccgaggccgcgccgcctccgaagccgccggccttcgtcgacgtccccgacttgatggtcaacctcgccggctcgccaggcgagcgcgtgcaatatctgcggctgaagatcgtgctggagctcaaggaagaaaagcagatcgaggcgatcaagccgacgatgccgcgcgtcaccgacatcttccagacctatgtgcgcgaactgcgtccctccgacctcaacggttccgccggcatcttccgcctcaaggaggaactgaccaagcgcgtcaacgcggcggtcgccccgatccaggtcagcgcggtgctgttcaaggaagtcgtggtccagtgagcatgacggactagggatcatggcgggcaacgaccaagtcgaccaggatgcaattgccgcccagtgggaggcctcgctcgattccgaggatcccgcagaggccgcaaaggctgccgccgagaacgagctatcggaaaccatggccctgcaatgggcggccatggtcgaggacggcagccgcgatctcggcaccggcaagaactccggcgagcgggtgctgtcgcaggaggagatcgacaatctcctcggcttcacggtcggcgacgtcacgctcgacgaccattcgggcattcgcgcgatcatcgattcggcgatggtctcctacgagcgtctgccgatgctcgaaatcgtcttcgaccgcctggtgcggctgatgacgacatcgttgcgcaacttcacctcggacaacgtcgaagtctcgctcgaccgcatcacctcggtgcgtttcggcgattacatgaactcgatcccgctgcccgccgtcctcaccgtgttcaaggccgaggagtgggaaaacttcggcatggcgacggtcgattccaacctgatctattcgatgatcgacgtgctgctgggcggccgccgcggcaccagccagctccggatcgagggccggccctacaccacgatcgagaccgagctggtcaagcggctggtcgaggtggtgctgtccgacgccgagcaggcgttccggccgctgtctccggtgacgttcacgatcgaccgcctcgagaccaacccgcgtttcgccgcgatcagccgtcccgccaacgccgcgatcctggtccgcctgcgcatcgacatggaagaccgcggcggcaatatcgagctgctgctgccttacgcgaccatcgagccgatccggggcgtcctgctccagatgttcatgggcgaaaagttcggccgcgacccggtctgggagggccatttcgccaccgagatcgtgcaggccgagatcgccgtcgatgccgtgctctatgaagccgacattcccctcaagcagctgatgcggctcaaggtcggcgacacgctgccgctggacatgcgcgccgacgccaacgtcaccgtgcgttgcggcgacgtcacgctgacggaggggcggatgggacgggtcggcgaccgagtcgcgatccgcgtgacgaaacccttgcgcaagccaagcacgacacttgcgatgttcgagaaggtggacgagcagaacaagatgatggaggccccatgaaccactccctgggaatggcgatcgagacgctggtggctatcctgctcatgctgacgatcgtctactgcgtcatgctcaacaagcggctgacgcggctgaaggcggacgagcattcgctgaaggcggtgatcggcgaactgatcaccgcgaccgagatcgccgaacgcgcgatcggcgggctgaagctcgccgtgcgcgacgtcaacgagaacctgggcagccagctcgccgccgccacgcagatgtcggaccagctctacaagcagctcggcgaagccgacaacgtggtgcgccgcttgtcgaagatcgcgagcgccgcgcgtccggtgaccaaccccgaaacggttgctgcgcctgcggccaagccctcgtcggcaaaagcggtcgcggcggcggccgaagccttttccgagcgcagacgatccaacggccttgccgcataaagtctgggcatgaagtcctttcgtaacatccgagtcataccggtcgtcctggtcgccatcgcaggactcgccacgctgaaggtggcgggtctcgcgatcaacggcggctacgtcttcgagtacaagccgagccagggcaagaaatcctgggcggaggagaacctgaattttccgaccgggcgcgaggacccggatatcaccggctcgacccatggcgcgccgaaggaagcacccaagccggccgcgcccgagacaaagatggagggtggcaccgtcgtcaagatcgacgagggccagccgcaggtctcggcctcggaacgtgcggtcctggaacggttgcaggcgcggcggcaggaaatcgaggcgcgccagcgcgagatcgacattcgcgagagcctgctcaagtcggccgagaagcgcatcgagaacaaggtcgaggagatgaaggcggtagagacccgcatctccgcgacccaggccgagcagaaggccgccgaagcccagcgcatgaagggcctcgtgaccatgtatgagggcatgaagcccaaggacgccgcccgggtgttcgaccggctcgagatgggcgtgctgatcgagatcgcctcggcgatcgcgccacgcaagatgtcggacatcctgggcctgatgtcatcggaagccgccgagcggctgaccgtcgagatggcccgccgtgccaatggtggtggcgaacagtcggcctcggccggcgagctgcccaagatcgatggcaggccgacgcaaaagccgaattgagggctcatacttaagaagtccttaattggcaaaaccttagagtcgacggcacgggccggcgccagtgccggcatgaccgccgaaccggaagaaatgccgccaatggcgcgagaggctgccgctggatttgtatcgcgagcccgcgctgtcgcgcggggcttgtcgcgtcatttccgccgggcgacggtgctgacgacctgtgtcctgatcggtcttgcgcagccggcccgggcggccgatccgatcaggggcgaggcgacgttttcggccagcggcggctttgcccgtctggtcatcaagctcggggaggatgttccttccgaggtgacgacggccggctccattctcgtcattcgtttcgaccgacccgtcgatgttcccgtcgatcgtgttccggaaggcgctcccgattacgtcaactccgctcgccgcgatccggacgggggcgccatccgcctgtcgctggcgcggcgcgtcaccgtcaataccatgaatgccggcgagcgcaccttcgtcgacctgctgcctgagggctggaagggcccgccgccgagcctgcccttggacgtggtcaaggagctcgccgagcgcgcacgcgttgccgagcgcgcgctgggcccgcagcgcgccgccgccgaggccaagaagcgtccgcagatccgtgtgcgcgcctccgtgcagccgactttcgtgcgattcgtgttcgaaatgcccgacggcgtcggcgtctcctccgtgctcaacgagcagaagctcacgctggtcttcaatgccaacctgaattttgacctggcggacgcggtcgtcgcggcgccgccgaacgtcgcctcgatcaagcagaaggccgacatcgaccagaccaatgtcgagatcgcgctgatcggtgattcagacgtgcattccttccgtgacgagaagaattacgtcgtcgatgtctccttccagcccgacaagggcaagatggcggcgactcccgaggcggcgatcgcgcagatgaagccgggcggtcgcacggccgttcctgcggccccgcccgagaagaaggagacagagcgtgagattgcgccgccgacatccgagacgatcgcgcgcgaggccaagatcgatgtgaagcctggcgtgaagccggaattgcctgccgcgatgccgccggctgaagcgccgaagccggctcccgcgacgcaggctgcgcaagctgtagagggcccgaaggaagcaccaaagcctgcgcagcccgttccggaggccgcaccggccaggcccgtcatgaccgaagcgcccagagaggcagtgaaggacgccgccagggagccagtcagggagactgctaaagcagccgccgaaatcgctcccgcaccgcagcccgcgattgccgccgtcgatgcgcgccgcgacagcgacggcctgcgcgtgacgttcccgattcaggtggcgacgcccgcggcggcgttccgccgcggcgacaccgtctggctcgtgttcgactcgccaaagccgatcgacgtcgaagcgatccgcaccaagggcggcgcgatgatcggcgaggccggccgcatcccgctcgaaaaggggcaggcggtccgcatccgcctcacccgcccgctggtctattcgctgacgagcgaggaggtcggcaaggagaccaactggctgttgacgctcgccgacaagatccaggcgacgccgctgccgctgatgatgtcgcgcaacatcaccgacccggcgctcgccaatatcgcgattcccttcgccaatcctggcatgctgcacaagctcacggatcccgatgcaggcgatatgctctacgtcgtcaccgcgcagcggccggtgcgcggcttcatcaagcggcaggatctcgtcgacctctcgctgctggaatccgcgcacggtatcgcaatccggccgaactccgacgagatcggcgtcgaggtcggcgccgacaaggtgatcctcggcaagaagggcgggctgacgctgtcgccggtcgacatctccgccgagcgggccccgacggcggtgcggccggtcttcagccccgaaggctggcgcaagggccagtcggagaatttctgggaccgtcagaacgaattgatgatggcgatctcggccgtcgaaccggcactgcgttccctgccgcggctcgatcttgcgcaattctacatgtcgcgcgcgatgtatcacgaggcgaaggccgttaccgaattgatgctggccgatcccctcaacaaggaggagagcggtgcgctgatcatgcatgcgattgccagcatcctgatcggccggccggcgcagggcctgaaggatctcgccaatcccgtgatcggcaacagccacgattcgcagctctggaaggcgctcgcctatgcgcgccagggcaaatgggcggatgcgcgcgagaagttcaagaacgtcgaattcgccatcgcctcgctgccgctcgacatccagcgcatcgtgacgatggacgcgatgcgcgcatcgctcgaggtgaaagattatgccggcgcttccaagcgccgcagcgagctcgaggtggtgggtgtcccgcccgaggcagggcccggcttcgcggtgctgcgcgggcggctcgccgaggcgctcggacacgacaaggatgcgcttgacgattaccaactcgcggtcgcctcgagcgaccgtcctgctgcggccgaggccaagcagctcgagatcgcgctgcgtcagaagcgcgacgagatcggcaaggacgaggcgctgcgcgagctcgagacgctgtcgatgacgtggcgcggcgacgcgatcgaggtcaggacgctgcagatgctgtcgcagatgtatgccgagagcgggcgttatcgggatgcgctcaccgccgcgcgcaccgcgacgaggctccagcccaacgcggaagcctcgcgccaggcgcaggacctcgcatcgaatctgttcacgcagctattcctagggccgaagggcgacgaattgccgcccgtcgaggcgctcgggatgttctacgaattccgggagctgacgccgatcggccgccgcggcgacgagctgatccgtcgtctcgccgaccgtctcgcctcgatcgatctgctcgatcaggcggccgagctgctgcaataccaggtcgatcaccgcctggagggggcggcgcgcgcccaagtcgccgcgcggctcgccatgatctatctcgccaaccgcaagcccgacatggcgatcaccgcgctgcgcgcgagccgcatcagcgatctctccggcgagctcaggcagcagcgcctgctcctggaggcgcgcgcgcagagcgacgtcggccgtcacgatctcgcgctcgacatcgtctccaacgtctccgggcgcgaagtgctgcgcctccgctccgacatcttctgggcggcgcggcgctggcgtgaggccgccgagcagatcgagctctattacggcgagcgcttccgcgacttcaagccgctcaacgcggtcgagaagagcgacatcatccgcgccgccgtcggttacgcgctcgccgacgactcgatcggcctgtcccgcttccgagagaaatacgcgccgctgatgagcgagagcgccgaccgtctcgccttcgacatcgccagcaagccggccgcggcttccagcgccgaattcgccgagatcgcgaagctggccgccagcgtggatacgcttgacggattcctgcgcgagatgaagcagcgcttccccgacgccacggcgcgagcgcctggctcgccgcaggtcaaggacgagtccgaccacaccggctcgctgcccacaattccggtcgtgcgtcagatcaagatgacgcgttagggctggggtgccgcgcaaggtgcggcaagcgatggctctgcaatctcgtcattgcgagcggagcgaagccaggatcgttccacgggcagcccggattcgcttcgtcgcaagagctcctcgcaatgacggggagaggtcgagagctatcgttgagagcggagaggatgcttcgctgacgtcgcccgagctcatcctcccccgtaactctgcaccaggcttccggccaccagcgaccagccgtcgaccaggacgaagaagatcagcttgaacggcagcgagatcgtggccgggggcagcatcatcatgcccatcgacatcagcaccgatgcgacgacgaggtcgatgatcaggaagggcagaaagagcaggaaaccgatctcgaaggcgcgcttcagctcggagatcatgaaggcggggacgaggatgcgcagcgcgaggtcgtcgggggtggctggcgcaggttcacccgaaaggtccaggaacagcttgaggtctttctcgcgcacgttcttttgcatgaagccgcgcaagggcacggaagcgcgctggagcgcgtcctcgacgccgatctggttggcgacgagcggacggatgccctcgtcataggacttctgcagcaccggacccatcacgaagaaggtgaggaacatcgcgagcgcaatgatcaccgagttcggcggagcggttgcggtgcccatcgcggtgcgcagcagcgatagcacgaccacgatgcgcgtgaacgacgtcatcatgatcaggattgacggcgcgatcgataggaccgtgagcagcgcgatgagctggatcgcgcgctcggtgacgccgccgccagcaccgccgccgagattgatgctgatgtcctgcgcgtgcgcaaagcctgcgagcgatgccgcaccgaacaggacagaaagaaaaagaactctacgcgggagggtcggcagcctcacgaagacggcttcggacggccgagcagcgaggccatctcgtcttcgagattttcaaagctggtcttttccgcggccggcttcggaggcggggcgggtggtgccgccggctcgctgcgtgccgtccgcggaggagcagccggaggctccggcgcaaccggaggcgcgaccgtttcgccggccgggcggcgcagggcagcctccagccgctgggccatttcggccaggttctgctcggcgctggatggagtgccaggcggcggcacgggcggcgcttggggcacgggcggtggcggcgcagccgcgcgctcggcgcgcacgggcggcatcttcatcggctcactcccgcgcggcggacgcggcatcaccggcggttcgctgcggctgacgcgcggcggcagcggctccggtcgcggttcgcgctcgggacgcggcgcaatcggctcgggcgcaaagcttcccagcgacggctcgctgcggcgttcagccagcgtaggcgcaggccggcggacctcgtcggcaaaggatgggcgcgccggtcgcggcggcggctcgggcatttgcggctcgggatgatcgagcagctcggggcgcggcgcctcgtcggcccaaccaccggcatcgggcatgggagcaaggcgcggcggctcggcggcgtttggacgttgcggaagctggtcgcggctgggcgcggcacgaacgatgttgggctcgaccacgatgtccgtcgggccgccgatcatgagcaaatgctcgacattgtcgcgccggaccagcaccagtcggcgccggccgtcgaccgcggcagcgtcgatcacggcgaggcggggcatccggccacgctgggtattggcgccgatccggctgccggcgaatcggcgaaccagccaagcagcgacgccgatcaacgccagaacgacgatgaacgcgacgatgaaggtgatagggctgccttgcatacttgtccccgacaaatggcgcttttttcgtgcccatggtcagatacccaaccaccggccaacgatgccccaaactgcgatctcttaacgtcccacggcaagttttgccgtccccaactcttaataacccatgaatcgctcgatccaaaacgacttcttggcctgtgcacgcaccgccaaacggatgggttaataccggtttgggagcgaaaaatcacgggcgggcgcatgcgtgtgccgttcggggacacgggcccgggatatcttaaccagctgttaaccatacacgcggcaaattctgcctagcttcggacccagggtccgtggcggcggaaggagccgcgaccatgtccatcaacgatattccggaactgtcggcgcttcgcaccaagatgcagtggcaccaggaacgccagcgcgtcctgtccgagaacgtctccaattccgacacgcccaaattccggccgcgcgacctggtcgagccgaagttcgacaagagcggcacagtcgcaggctcgatgggaccactggcgctcacgcgcaccagcagctcccacatggcgccatcgggggccgcctccgcattcgaccagaacaggaacgcgggctttgagacccgtccagcgggcaatgccgtcaatctcgaggaagagatgatgaaagccgccagcaaccagatggattacgcggcggcgacctcgctctattcgaagagcctgcgcctgctgaagacggcgatcggcaaaggctagagcatgatccggaaacaaggcagctaagggcgcatcatggccaatgacagcagcgactttgcccgctcgatggcaatcgcgacctccggtctgcgggcgcaagccggccgcatgcgggtgatttcggaaaacatcgcgaacgcggattcgaccgctcagaccgccggcggcgatccctaccggcgcaaggttccgaccttttcctccgcgctcgaccgcacgctcgatgcgcaagtggtcacactgggccggatcaagcccgaccagtccagctttcgcgtcaaatacgagccgaacaatccggctgcggatgcgagcggcaacgtcaagtatcccaacgtgaactcggtggtcgagatgaccgacatgcgcgatgcgcaaaggtcctacgaggccaacctcaacatcatcactgcgacgcgccggatgatccagcgcacgctcgacatcctcaagagctgaacaggacatttgagccatggcatcaccgacagtcgccgccaatgcgtacgccagtctcgcccgtgtgctggaaaacagcggcgcaggcaagggcagcgaaccgagcgggcaatcctttgcctcgctgctgaaggacgccgtcggcagcgtcatggagtccggccgcaagtccgatgcgcagacggtggcgatggccgccggcaaggccaacgtcatggacgtggtgacggccgtcgcggacaccgacgtcgcagtgtccacgctggtctcggtgcgggaccgcgtcatcgcggcctacgaagacatcatgaagatgccgatctgatttcggcccccgagtcattgcgagcggaacgaagcaatccagaatccttcctcggccgcagcctggactgcttcgctccgctcgcaacgaacgggggagaggccttcgcatcgctcgaaatagtggtggggaggcaagagatgaacaaaggaatctgccaaatgaccggacccgaaaccctcgacgtcgcgcgcgatgcgatctggaccatcgtgatcgtctcttcgccgctgatggtggtcggtctggtggttggcgtcatcgtgtcgctgttccaggcgctgacgcagatccaggagcagacgctgatctacgtgccgaagattctggccatctttgccacgatgctgctggcgctgccgttcatggcggattcgatgcacgcccacatgatgcggatctcgtcgcgaatcatcggcggctgaggcacaatgcgtgaattatgcgcatcgacgtctcgctgctgccggcgctcgccgcttccttcatgctcgccttcgcccgggtcggcgcgatggtgatgctgctgccgggcctcggcgagaccaacattccgactcggataaagctgtcgattgcgctcttgctcacgctgatcatcctgccgctgcatcgcaacgcctatcaggtcgacatgggctcgctcgcgccgctgctcgtgctgatgctgcacgagatcgcgatcggcatcgtgctgggtgcgaccgcgcgcgtgacgctgtcggcacttcaggtcgccgggtccgtgatcgcgcagcagatggggctcggcttcgtcacctcggtcgatccgacccagggacagcagggcgtgctggtcggcaacttcctgaccatgctcggtataacgctgctgttcgccaccgacagccatcatctcgtgatcgcagcgctgaacgatagctatacgatcttctcgccgggcgagacggtgtcgagcggcgatgtcgcttcgctggcaacgcgtgccttcgcagccgcgttccgtctgggcctgcaactctccggaccgttcctggtgttcggcctcgtgttcaacatcgggctcggggtgctggcgcggctgatgccgcagatgcaggtctatttcgtcggggtgccgctctcgatcttcgccggcttcctggtgctcgccgtcgtgctctcggcgatgatgggcacttatctcgattacttcatcggcgtgatgcaccagatgatgcctctgaggccacggtaggtcgatgtcagacgacaaggacccggagagtcaaacagaagacccgacgcaaaagcgcctcgatgatgcgctggagcgcggcgacgtcgccaagagccaggagatcaacacctggttcatgatggcgggcggtacgctcgtggtctcgaccttctcgggctcggtgggcagcgggctgctgacgccgatgcgcaaccttctcgccaatgcctggatgatcaagaccgacggcaaggcgctgctcgtcctgatgcagcagatcgagtacgccgtgctcgctgcgatcggcgtgcccctcttgatgctggtgctggcagccatagccggcaacatgctgcagcaccgcctggtgtggtcgagcgaatccctgacgccgaaactcagcaagatatcgcccggcgccggcttcaagcgcatcttcggcaagcaagcggccgcgaacttcctgaaaggaatcggcaagctgatcgccctcagcgtggtcatgaccatgatcctgtggccggaacggcatcgcttggaggccatggtgaggctcgacccggccgccatgctcggcgcctccaccagcatgacgatccatttgctcggttcggtggtcgcggcgctcgcgatcatcgccatcgccgattatttcttccagtaccgcacctggttccagcgccagaagatgtcgctccaggagatcaaggaagagttcaagcagtccgaaggcgacccgcacatcaaaggcaagatcaggcaactccggcagcagcgcgccaagaagcgcatgatggcggcggttccaaaagcctccgtcatcatcaccaacccgacccactactcggtggcgctgtcgtatgagcgcggcatgtcggcaccgatctgcgtcgccaagggcgtcgacaatctcgccttcaagatccgggagatcgcgcgcgagcacgacatcccgatcgtggagaacgtgccgctggcccgcgcgctctacgccaccgtcgagattgaccaggaaatcccgaccgagcactaccatgccgtcgccgaagtcatcggttacgtcatgcggctaaagcgcggattcagcgccgggcggggataaaacacccggaaagcaccggaaatggccgtaatctgggaatcagcgtacgtttcgcccctgctgcccttgcacctcagggtccgattcaggcagggaggaccccacgcgccccgtagcgcgttgattctctgccgacaggctgcgccagctcgagaatgaccgccgagaccgaccacgacctcacacgagagcccgttgcggcggccgagccgtcgccgcgctcgggcagcattgctctggtgctgctggtggcggccggcctcgtcgcggtcgccgtcgggctgatgacgctcgggcgcgcgcaggcgcagccctacatcctcggcatcctcgccgtgctggcgatggtgggtctgttcaacctgttcgccttcgctgccggcatcatccgctttgccgaccgcaatctcgatgatcccgtcattcgccgcatctccgatcacgccttcgacggcctcgcggtcaccgatgcgcgcggacacgtggtctattccaacgctgcctatctgacgctgacgggcgccactggtccgcaggacgtgcgtcccgtggagcgggtcttcatcggcaaccctgacgtctccgaagccgtgtttcgcctgctcaaggccgcccgcgaaggcaagcggcagcaggaggaggtgcgcatctccggcctcgatggcagccagggccgctggctgcgcatgcgggtgcgtccgctcggctccgcaaagcgcgaggcgaaatacgcggtttggtcgatcgccgacatcacccgcgaccgcgagcgccaggaggacgtgttccaggagctccagcacgcgatcgaatatctcgaccacgcgccgtgtggcttcttctcggtcaatcccgccggcgagctggcctatgtcaacgcgacgctggcgaactggctcgactacgacctcgccgagatcggctcgggcgggctcaagctgacggacatcgtctccggcgacggcgcctcgctgctgacctcgatcgtagcggtgcctggcgaggtgaagacggaagtcttcgacatcgacctgcgcatgcgcagcggcaagacgatgccggtgcggctctatcacaagctcgccttcggcgccgacggtgcgccggggccctcgcgcacgctcgtcatcagccgtgcccgcgacgagcgcagcgatccggatcgcgctgccgaagtgcgattcatgcgcttcttcgatcatacgccgatggcgatagcgacggtcgaccgggccggcaatgtcgtgcgcgccaatgcgcgctacgccaagctcggccaggcgctggggctcgataacgcctccaaatcgatcttccgcgccgtcaatgcgcgcgaccggcatctcttgattgcggccatcaaccaggccgccgagggccaagccgacatcgcgccggtcgaggtcgctctggaagggaccaaggagcgctggggccaattcttcgtcacgccggtcgattcggccgagaacgaggccgaagccgccatcgtgcacatgctcgagaccaccgagcggcgcgcgctggagaaccagatcaaccagtcgcagaagatggagaccgtcggccaactcgccggcggcatcgcccacgacttcaacaacgtgctgtccgccatcatgatggcgaacgacttcctgctgaacgcgcacaagccgaccgacccgtcgttccaggacatcatgcagatcaagcagaacgcgacgcgggctgcgaccctggtgcggcagctgctggcattctcgcggcggcagacgctgcgaccgcaggtgctcgatctcggcgatgcgctctccgacctcaccatgctgctgcgccggctgatcggcgagaaggtcaagctcgacctcgtccacggccgcgacctctggccggtgaaggtcgacgtctcccagttcgagcaggtgatcgtcaacctcgcggtcaacgcgcgcgacgccatgcccgacggcggcaagctgatcatccgcaccgccaacgtcaccaccgaggatgctgccaagctcgcctacaagggcatgcccgcggcggactacgtgcggatcgaggtcgccgataccggcaccggcattcccgccgacatccgcgacaagatcttcgagccgttcttctcgaccaaggaagtgggcaaaggcacgggtctcggcctctcgaccgtctacggcatcgtcaaacagaccggcggcttcatctacgtcgattccgagccggggcagggcacctcgttccacatcttcctgccgcgtcatcatgccgaggctgacctgcacgccgagcagccggcggctacggtcagcgcgagcatcggcgcggggaaggaagccgcgcccgctgcagtggaggccaagccgcgcaccgatctcacgggccagggcaccatcctgctcgtcgaggacgaggagggcctgcgcgcgctgaacgcacgcggcttgcgctcgcgcggctacaccgtggtcgaggccgagaacggagtcgaggccatggagatgctggaggagcagggcggggcgatcgatctcgtcgtgtccgacgtcgtcatgcccgagatggacggcccgacgcttctgaaggccatgcgggagaagaacccggatatcaagttcatcttcgtgtcgggctacgccgaggatgcgttcgagaagagcctgcccgagggtcagcaattcgacttcctgccgaaaccgttcacgctcagccagcttgtggcggcggtgaaggagacgatgacgaagcaggggtgaggttcgccgcagaaccagcggccctggttcccttccatgccccgccaagcctccgcgaaatatgggcttttgccacatccccgcgactgagggccgcagccgggggttccgaaaccggcttcacttttcggcaagtctgcccatcttaagcgcacgtccccatgccggggatttgggaaacgcacatgactttctcgcttcgctcccgcaatctcttcaacgcgatcgccgtcgtgctggcgcttgcgctgccgaccgcactgacgatctcgtcagccgacgccagggccggtggtggcatgtcgtcgggttcgcgcggttcgcgctcctattcggccccgccctcaaccacaaccgcgccgggctcggcctcgcagttcaaccgcacctacacccagccgggcgcaggcatgaagtcggctgcaaacgcgcccgcgcgcggcggcctgttcggccgtgcaggcggcttcatgggcggccttgcggccggcttcctcggcgccggcctgctcggcatgctgttcggcggcggcctgttcggcggcctcggcggcctgtcctcgatcctcggcctgatgatccagatcgcgctcgtggtgctcgttgtgcggctggcgatgtcctggtggcagcgccgtcatgctccacgtgaggcttacgccaatgcggatgcaggcgccggtcccggaccgcagacgaaccagcgcagcggcctcggtggcgggctggccggtggtctagggggcggtcttggcggtggactcggtggctttggtttcggcgccaacaacgcgccgctggagatcaagccggacgactatgaggcgttcgagcgcctgctcggcgagatccagacggcctggtcgaacgaggacgtggccaagctgcatacgctcgcgacaccggagatggtctcctatttcgagcaggacctcgcccagaaccgcgcgcgcaacgtcgtcaacaaggtgaccgacgtcaagctgttgcagggtgacctcgcggaagcctggcgcgaaggcgagaccgactacgccaccgtggcgctgcgcttcgccctcaccgacaagacggtggatcgcaacaccggcgcagtcgttgccggcagcgaacagcccggcgaggcgaccgaagtctggaccttcgcccggcggccgggcagcggctgggaattgtcggcgatccagcagaccaactgatcgtcggcagcaacacacgggggcgtcgtgcttcggcacggcgcccttttgttgggcggattgctcgatcagcacccgtcatgggggcagccgtcctcgcgatgctgacggaacttggcggcgaatgatacattgggtccgtcgccacgttcacgacccctcttatgaaatacgagctctactactggcccgagatccagggccgcggcgaatatgtgcggctggcgctggaggaggcgggggtcgcttacgtcgatgtcgcgcgcggcccgcgcggcccgtccgcgatgatgaagatgatggatgcgcacaagggaacaccgccctttgcgccgccgttcctcaaagcaggcaagctcgtgatcggccagaccgccaacatcctgctctatctcggtgcccgccatgggctggcgccgaagacggaagccggccggctctgggtccatcagcttcagctcaccatcaccgacctcgtcgtcgagattcacgacacccatcatccgctcgggccctcgctctattatgaggaccagaaagcgccggcgaagaagcgtaccgccgagttctggagcgagcgcgtgccgaaatatctcggctatttcgagcagcttctcgccgacagcggcggtgcctatgtgaccggccgcagaccgacctatgtcgacctctcgctattccagatcgtcgcgggactgcgctatgccttccccaagcgcatgacggcgttcgagagggacatcccaggcctcgtcggcctgcatgaccgcatcgccgcgcggccgaacatcaaggcctatctccaaagcgatcgccgcattgccttcaacgagcagggcatcttccgccgctatcgggagctggacggttagaccgattgtgcgcgagttgggacaccctcgagtccatcagatacagccggacgtacgaaggcccgaccgatcggcgcggacgctccggctttggcaatcctgatcaggcgagctgatcgatccgcgtgccctggcccggcggcagcggcgcaggcggctgcggcttgtagaccgggtcggtgtccttggccttggcctggtcgtcctgctgcttggtcgtgtcgtagttcgggaccacgatcgcgattggcgggggcgcaactgtcgaaaccttcattcgcaagtcctcacagaatgaaacaattgagcctgccccaccaggagcgaaatttccttcaaggcaattgttaaaatgcgagggattgccgcggtcgacgatgctcctttggtacggcatcccggtgttcgcgagatgatgaggcctctcgtcgtcgttgcgaggagctcttgcgacgaagcaatccnnnnnnnnnnggtcgccgcggagcggattccggattgcttcgccacactcgcaatggcggagcttgtggctgccggcatgggatgcaggcgccgccgtctacgttgcaagagggaaaaagggagcgcctactcgtccttgccgcgcgtgatcgcgatggaggcgtccgacttggtgcgtgtgcattccatgttcagtcgccggtagcgcatggtgaccttgtcgccgcgcaacaggcccatccgcttcaggcagcgcgtcgcgcccgtcgtcgtgtcgtccttcgtcaccgtgaagacgatcgcggccatcgatcccaccagcgcgtagaactccggcttgggcttgcgatcgcccttggcatagagctcgatcgagtacttgtcgccgcggcagcccacggacagctccttggccgccgggtgggtcatgtagacgacattggcggcgcggaaattcaccttgaggcgatcgacctggttcgccagctccttggcgctgtcgtcacagcggtcggcgcgggcaggcgaagcgagagccacaaggccggtgatggcggcggcgaccaggatcgcgccgcggacgttcagtttcaatgtcatgatgaaaagccccttagggcgcgcattcaagcgtcgccggacgcgaagcgcaagggtcggaggggccatttccacgagctgtgccaatggccttcccgctcgcctgggctgcctctcccgtggctctcgctccctttcttttccgtccaaaatgggcttagaacgcttctacgccgaggcccgccaaggccgcaaacctgagatccgctccatgaacgctcccacagcttttcccgaccagtcaaagcccgttccgccgtacaagcacaccccgctcttcccgctgggcaaggacgagacgccctacaagaagatctcgtccgaaggagtccgggtcgagaaggttctgggcaaggacatgctggtggtgtcgcgggaggcgctgcgggcgctgtcggaggcggctttcggcgacatcaaccactatctgcggcccggccatctgaagcagctccgcgcgatcctggaggacggcgaggcaagcccgaacgacaagttcgttgcgctcgacttcctgaagaacgccaacatcgcggccggaggcgtgctgcctatgtgccaggacaccggcaccgcgatcatcatgggcaagaagggctgcaacgtcatcaccgacggcgacgatgaggcggcgctgtcggaaggcgcgcgcgatgcttacctgcgccgaaatctgcgctactcgcaggtcgcgccgctctcgatgtacgaggagaagaacactgccaacaacatgccggcgcagtgcgagatctacgccgagggtgatgatgcctacaagttcatgttcatggcgaagggcggcggctcggccaacaagagcttcttgttccaggcgacaccttctgtcctgaccaaggaccggctgcttgcgttcctgaaagagaagatcctgacgctgggcaccgcggcgtgcccaccctatcacctcgcgatcgtgatcggcggcacctcggccgaactgtgcatgaagacggtgaagctcgcttccgcacgctatctcgacgcgctgccgacccacggctcgcccgacggcaacgccttccgtgacgtcgagatggagaaggaaatccacaagatgacgcagtcgctcggcgtcggcgcgcagttcggcggcaaatatttctgccacgacgtgcgcgtgattcgcatgccgcgtcacggcgcctctctgccgatcgggctcggcgtgtcctgctcggccgaccgccaggtgctcggcaagatcaccaaggacggcgtctatctggaagagctcgagcacaacccggcgcagtacctgccgcaggtcgagcagacgctcggcggcgaggtcgtcaagatcgatctcaaccagccgatgaaggacatcctcgcgacgttctcgaaatatccgatcaagacacgagtctcgatgacgggcaccatgatcgtcgcgcgcgattccgcccatgccaagctgcgcgagcggctggagaagggcgagccgctgcccgactatttcaagaaccatccggtttactacgccggtccggccaagacgcccgaaggctacgcctccggcgcgttcggtccgaccaccgccggacgcatggattccttcgtcgaccagttccaggccgctggcggctcgatggtaatggtggccaagggcaaccgggcgccggcggtgcgcgaggcgtgcaagaagtatggaggcttctacctcggctcgatcggcggcgccgcggcgaaccttgccgaacactgcatcaagaaggtcgaggtgctcgaatatcccgagctcggcatggaagcgatctggcgcatcgaagtcgtcgacttccctgccttcatcatcatcgacgacaagggcaacgacttcttcaaggagttgaatttgggctagctcttcgctcgcccatgcttgcgattgattgcatatctcgccttaccaacgattgtcatgcccgggctcgtccctggcatcgacgacgttcttggtgccgcgaagacgtggatggccgggacaagcccggccagggcgatgcggatgcgtcaacgtcctaactgcagttggtgacctggttggagcacagcgcgcgccaccagccgcgcacgccgtcatggctctcgaccagaccccagaagccgctgcaggccatcagccgtttcggcccgccgtcgccgtcgatcggaccgccgagctcgcgctgggccggcgtccatttggcgtcgatgaagggcgcctgaaacaggccgcccgcgcgggtggcgccattggcgtagttcgcgccgaccttgttggaggcgacccagccgcgtccggcatacggctttggcgcgctgcgcggatatcgcttctcgtcctcgtagtcctggcccggcggccttgcgccttcgatgagaaaccagccgttcttgaagccgatgatgctgaattcggtgagccagccgccatcgggcgtgttctcggcgccgccaagcttcaggcggtagggcggcggcaacgtgccgagcacgcgccccgtggttgacggctcggcgcgcacgttgaggccgtttggatccttgtcgatggaccaggcgccgagactgcagggctcggtgccgtcggggagcgatgcacgcttcgccgcaagttcggcgtggagcttggcgaaatcggcctcgtcattgtccggatcgggctcggcgcgcggcttcagatcggccgacactgcgcgtgtcgcatccggtgtcagcgtgacgacgagggcctggcgccctgcgaacacgcttgccggtgtcttcggatcgttcgccgtcgcaggatagaccgcgagatagccagtcgaaccatcggtccgataggcgaggccggcgacatagcccgccggcaccatggcgagcgcgcttgcgcgccacgccggttcgctgtcatccgcgcgtgccgcttgtgtcgcgacgcacagcaacgccgccgcgataagacggagcacgcgcatgatggctgcgcagccttacgcgcgcgcgcccgtgaacgggaagctgcccattgggccgatgcccatttcgccgctgatgctgtcgccggagacggtgccggtgaactcaagcgtcagcggcatcggcttgtcgatagagaccttccaggacacgttgtcgccgctgacggtgccatcgaatatctcggcggtattaccttccgcgccctgcgtgcccgtgagcgtgccgcccgcagccttgaggctcagcgttgcctggcgttcgcccatcggggtcgtcatggtcagattccagttgccgtctacggccattcccgtctcccgaacaaatttccgcggcccgcgaggatccgcgacccgtcctgagcgagcctatagctcaacttgcagctcctgactaaccctccgatagggcatttaggcgcgggcagcggcgcgtcggcggttggtcacgatcagccgcagaacgaaatactgcacggcaaaggccaggatcttggcgccgcctgcgaccaccatgagatagaacgcccacagcttcagatcgccggtggcggcgactgccaacatgccgacaccgatcacgaacatcagcgccgcccaggcatagcccgcgatggtgacatattccgggacggtctcgacgatagcgggcggcatgtagcgcagcatccagccgcgcttgagcatgatcgcgccgatcgcgaaatgtgcgatcgagggttttgccagcatgaagcgcggatcattggtgagcagcgtgataccgcccagcacgaccaccagagcgaggctcgcataggtcatgtaatggagcggctgtcccttgagacgcgcatagatcacctgcgcgaacgcgccggcaatcgccactgccgttgcgaggatcacgttgtctgtgacgagatagaccgccagaaagatgataacggagaggagatcggaggcgaggcgggcgaatacgtccttcatcgtcattcctgttcagcgggcgtgggcaaggcgcaggccaggccatcgtacgtgatctggcgatgcccggcatatcacttttgtgaagacaaccgcgatgctgcaagcggcgaaagccgccgcaagacccaccggaacgccgggccgagacccagcagcgcaggcttcggaaccgccatcaggaagagggcgcgacggtcaggacgccgcaccgagtcgaaccagtctcctacaatgtcagaacgacgtaggcgatctccaggatatgaagtgcagcaacgagatggtcggtcatctcgtcgaccaggtctgcccagggcaggcgcgacattatcgggagtgcggcggcaactagaaggcaggtggccagcaggacgccgccttcgaagaacgtgaggcttcgccggcgcagtcgcatcgtcaggattgcgagcgcggcgccggccagggcaagaacagcgaggatgtccgcggtgatcgagagcatgtgcatggaacctgtttgttgacgcaaacatcctcgggcgggactcgcgacctcgtcgcggcccgtattgacgagagctactgcgcccccacccaattgccgtgaaagccgtcggggacgcggtggccgagttgcaccaatgcggccggacctgcctcgatatcggtggcgttgaacacggcgaggtcgctgcggttctcccgcgcgcgccagacaaccgcgagcagccagccgtcgccctcggccgcatctttcgaccgctcgacgaacaccggttcggagatggtgtcgccggccggcagtagataatggccgagcctcctgccgttgccgtcgacatgcacgatgcccgacaacgcgccgaacatcggcagtttcggattggcgcaggcgtaccaaccgtgacggctcttcagcccggcgcggcggtcgtcgatccgcgggaattcgccggtgagatcgtcgagataagtttgctggaagcggtcggtattccccgagagatcaaacgtccagcggcagtggcgggcgcgcgacttctgcgggtccgtcggccggccgtcgggatgcggaaacagcggcgcctcctcgaattgcatgacatcggcgacgatgcgctggccgtcctcccacgcattcatgacatggaagacgtagcaggcctcggctcggaaccagacaatgtctttcgtcgtgccgctgcgcttcatcacgccgacatacgcgcccttgtccggctcccaggcgtagggcggctgccctttcatcgcgcgagccatgctgccggtgatcgggaggatcgggaacagcacgtggttttcggtgacgatgaagtcgtgcaccatgctggcatagggcgcctcgaaccgttcgaagcgtgtggccttgccggaggcgtcgatcgatccgtaggagagggcaggcgtcagcggcccggcggcgttataaccgaaaaacaccagttcgccggtgatgggatcgatcttcggatgtgcggtgaaactgcccgcaacgcgcgcctgataattgtaatagccgcgcgttgccagcgtccccggctcgatctcggtcggcagatgcgcttcttccagcgccagcagcttgccggcatggaagatgatgttggtgttggcgacgccgccatcggtgagatcagccggggcgtccggcagcttgcggccgaagccgccgaatagcgcgcggccggcgtcgtgctcggcgagccatttcggcgtgcggacccagcgattgcgatagctcgcacgaccgttctcgaggtggaaagcatgcagcatgccgtcgccgacgaaccagtgcgcgcccggcgagtcgaactgcggatttggaccgttgcggcagagggtcccattcaattcgcgcggcaattcgccgatgaccctcaggaatggcgcgtccgcttcgaacgggatcggcgcaacgttgtcgtggcgctcaacgatggcatcgtgctgcacggcctatccctccctatctttacatcgtaaagattagataacgcgggttgccgcgccggtcaagcgaaatctttacactgtcaatattgcgtcatatagcttgcgaatgggcaagaccgacaccaagagcgaaccggcgcgaagctcgcgcacttccagaagcacgacgtctgctgcggcatcgcgaccgagacgccgcacgacgggcgcaaagaccgagaccccgtatcatcacggcgccttgcgcgaagcgctgctccaggccgccgagcgggtgctggagcgcgacgggctcgccggcctcacattgcgtgcggtcgcgcgcgaggccggggtctcgcatgccgcacccactcatcatttcggcgatctgacggggctgctcagcgagctcgcggccgtcggcttccgccagttcaacgcggcgatggccgcgtcgtgcgatgccgccaccacgccgctcgagcgtgcgctggcgcggccgaaagcctacgtcgcctatgcgcaagcccatcctggcatgtacggcatcatgttccgcaccgagcgcctggactattcccggccgtcgctgcatgaggcggctgaagcttctttcgccgggcttgcaaatgcgatcggcatgatgcggcaggagcagatcagcggcgacgcgttgacgctgaaccagggcgccgcgatcgcgcgtgcttggtcgatggtgcacggctttaccatgctgctgctcgacggccgtctcgaggacattctcgcgcggctgcccgaggggacgacggcggaacgcctgcttgaggcgatgctgacggcgcccgtgactccgaagcttcccgtgtagcggatctcgggcaggcgcctagcgcatcgtggcgagctcgacggcgcgcccgctcgtgccgatgaccttcacttcatccttgccgcaggtgaagctgcgggcgaaatcgtcggcagccttgcgcgcaagctcgttcgcggtcgggttggcgaccgcatcgacataggcgacgtggcagaccgggcccggcggcagccgggtcacgaccagcatggccttcgtcttcggccgcccctgcttgtcgggatcggtgttgtccgcgatgtgccagcgctggatgatcgcaaatggcttttcaccggcagtgcgtcattcgatggtgctctcggacgagttgaacggcgcgaaccagacattggctgccggttcctcggccgcctgcttgcgattgcggcccaccgagacgacctcgcgcagatcatcctcggcgatcagcaccacgagcccgcccttgcccggacagacccgcgtggtgctgccgtcgaggtcgcttggctggccgacttggcggcagtcctttggcgccgtcgaggtgtagtagctgctgccgatcgcctgggcgttggcgcagccgaggccggcgcataggagcagcgtgacgagcaatggggtggtgatgcggatcatgatgacacttcggtgcagctggaacctcgcaccatcagacgccttgattgtgggcaaggttcaaacagcactgccagacacctgacaccggcacggaatcgttctagaagaacagcttcgcttgggctcctccagcctcgttcgcgtctccgtactcctgatcatgccagccacaacctcgaacaaaccctatcgcgtcggccgctccaagaccggactcggcctcttcgccaccaagccaatcaagaagggcacccggatcatccgctatttcggaccgatcctggattcgcgaattcctgagcaggacgagatcgagaacaaatatctgttcgagctcaacggccgctggaccatcgacgggtcggtgcgcaagaacctcgcccgctacatcaaccattcttgccggcccaatgcagaatccgacgtccggccgcgcgagcgcaaagtctatattcgcgccatcaagaacatcgagccgggcgaggagatcaattacgactacggcaccgactatttcaaagcctatctgaagccgatcggctgcaggtgtgactcctgcgaaaggaagcgcaagaagctgcgcgccgaggcacgggccgaacgcgccaaggtgaaggcgcgggccgagcgcaaggccaagaaggcaggcccgaagagcgcgaccgcgaagaagaaggtgaacggcaagcacttcgccggcaaggccggtcgcgcaagatcgtaacgcaagctcaccccagctcaggcgtcgcccggtccggctccgccgaggacgagccgggcgacgagggcgccgagtgcggtctcacgccgccgccgcgctggcacttctccgcaatcccacatattgcagctcggcgaacacgccggtcgcgatagcctgcgccacgaccatgagctcgcctgcgaggttcggcgacaccgcgcccgaaaggagcagcgcgatgctgccgaccgtccatgccgcgttgccgatcacgaccagcagcacgagcgccctcgccacggaggcgcgcgacgcgagccagccgaccagcccggtgtaggcgatcaggaacaggccggcttcgagcagcagcatgtccggcagattgaacagtcttgcgaacgcgcttgcaccgaaggtgaagccgagggcggcgacgccgctgaagatggcatcggcaagaagcgcgcggcgcaggaaggtggaagcttcgatcatcgtaggtctcctttgttgggctagggtgaactcagagccgaccgcgccaccaggcgcgcagcaggcgggcgaggcggagcgggcagagactcctgccgacgccgtgctcgaaggcgatgacctgggcaacgacatagtcgccggtcgaatgcaccagcggctcgggcatgttgaggctgcgcgccagcatccgggttccgaacgccaaggcccagggcaggacgtggtctgcaacggtccggtagagcagcagtgcgatcatggtcatctctcctgttcgaccgaaaatgcgcgcgtctgcgccccgattcgattaccttgcgggtaatggaagggccgaaatccgcgtgataggtttcggaccatgaacgcacacgcttccaccgcacgaaccgagcgcagccagccggtccacatcggcgaccatttgcgcgaatggcggcagcgccgccgcatgagccagctcgatcttgcgggcgaagcggagatctcggcacggcacctgagcttcgtcgagaccgggcgcgctgcgccgtcgcgcgagattgtgctcagactcgccgagcgcctcgacgtgcccctgcgcgaacggaacgtcctgctggtcgccgctggctatgcgcccgcgttcccgcagcgtacgctggaggatcctgcattgaagtcagcccgccaggcgatcgacctcgtcctcaaagcacatgagcccaaccccgcgcttgcggtggacaggcactggaacctggtgtccgccaatcggatggtggcgccgctgcttgatggcattccgcagcatctgctcggccagcccctcaatgtgctgcggctcgcctttcatccgcaggccctggcagcgcgcacggtcaatctcgcagaatggtgcgggcatctgctcgagcggctgcaccggcaatgcgaggcaaccgccgatcctgaattgatcaagctctacaatgacctcaggagctatcccattccggcccgatccgcgccgctgtcgagcgacaacgtcgcgattcccttcaagctgcgccatggcggagagatcctcagcttcttctccaccaccatggtgttcggcacgcccgtcgacatcacgctgtcggagctggcgctggagaccttcttcccggcggacgagcgcaccgcggagcgactgaagcagatggcggccatgacctagcgctcttgcctcggggcgggttcggcttatcttgggccaacctggtaccgcccgaaggaggcgcctgacatgagcacgctgaaaccgctccagatcgacgtcgtctccgatgtggtgtgcccctggtgctatatcggcaagcaccgcatcgagagcgcgctggcgctcgtgcccgacgtgccggtcaagctcagcttccggcccttcttcctcaatccctgggtgcctcgcgagggcatcagccgcgaggcctatctcacccagaagttcggctcggtcgaggcctataagggcattgccgggcgcgtcgtcgcggccgcaagcgaggagggcctcgtctacaagcccgagctggtggcgcgccagcccaacacgaccgattgccatcgcctgatcctgtgggcggaagccatcggcaaggcgcccgagatgaagcagcgcctcatggagctgtacttccgcgacggcggcgatctcaccgatgtgaacgtgctcgtgcgggcagccgccgatgtcggtctcgatgccgacgacgtgcgccagcgcctcgccactgacgcggacgtcgcgcgcgtttcggccgacgcgcaggaggccgccgagaaaggcatctccggcgtgccgacttatgtcttcgcgcagaaatatgccgtctccggcgcgcaggatcccaacctgctcgcgcgtgccatccggcaggtttcggcggagatcaacgcggaggcggcggagtagctgttctatttgcggagcaggcgaaccattcggcgcgctgtcgcatagacggcgccgtgcgccgagagcgccccatgaatgagtgccaccatgggatcgtgccgtcgcagcgggatcagcacatcgccgatcgcgaagcgcccccgccagatcgggttgatcatggggtgatcggcgttcgccgtcgagtccgcgctggagatggcgggatcggcgcagaggtggcgggtgaggtcgagcgtgagctgcacgcccggcgaatgtcttgcaaagcgctcgtcgatgccgagcttgaagaaaaaggcgcgatcctgatgacgcaacacgatgccggcggcaaccggcgtcgtgccggcgcgaagcgtgacgacctcgcattgcgcggtctctgccagcgccggaaccgcgcggcggatgaaggtcgcatcgccggcatgctggaccagcgcggtgccgcgcctgcccttccagccgctggcctcgagctgcaagaatgcttcgagcgccggcctgatctcgtcgggcttgcgcgcgacttcgaacatgaccggcccatgctcctccaggcggtggcgctggcggcgcagctccttgagcttcctggagccgagcgcctcccgtagcagcgtctcgccttcctgcgccgcatcgaggctggcgcggacgtaacaggagaggatgcgcggcttgaggccggtgcggcttagaatctgcctgagcgcgttcatcgccgcgccgtcgagagcgacgtcggtcagcacgagcgcatgcgctccggcctcgcgcgcctgttgcaggagagacgcggccgcttcgattggcaggtcgcggtcgatcagcgggctgcagagcgtgccgtagggatgcgcgctcaccagtgccggcagggggatcttccgggcccgccagagcgagatcaccggcatcagcccgatcagccgcgttgaagatgcgtcgaacgcgctcagtgccgaggcctcggcgcggccgcgggcagatgcgctgacggcgaactcccaggcgggcaggtaatatgcgttcggttcgatcgcgcgctgcgccagcgcacgccactggccggggtcgatcgtcgtcagcggaacgggcgcgcgcgcggccccggcattgcttgccgatgccgggtggatcgccgcctgctgcgcgatgtcgaccatgtcccgccgtccccaatcatgcggacgcgtgccgcgtcacgccgccatgcttagcgcaaagattggaaaataccgttgggacgcggcttcaattcgaacggtaatattaacgtcctgttgagcatccggcggcacgccgccggatgcagtgcggcgttattgatcgcccggcacgaaatggtcgcgggcgcttgcacgtccgccaccggcggtctcggcgatcgcgatctcgatgtcgcgcgaggtcttcggcaagtcggcagggccgacgtgcagcgacattcggacctcacgggtctgatcctgtccgacctcgatgaccggcttgccgccgggggcagcctcgatcccggcgacgcgaatggttgcaccgggcagtcccgagacctcgagcgtgaacgatcgctgcgcgcccttgttgagaatgcgcacggtgtaatcgttgcgcaccccgccatccgcgagctggacgaagaggggattgcggtcgtgcagcacgttgacatccatcgtggcgcgggtcgcgagcgtgtagagcatgatgctgccgacgatggcgatcacggccgcgtagatcaccgtgcgcggcctgatgatgcggtaaatcggcggcttgccatcgcggcgacgctgcatgttgatgtcggtgtcgtagccgatcaggccttgagggcggccgatctcgcgcatcacgttgtcgcaggcgtcgatgcacaggccgcactggatgcagccgagctggataccgttgcggatgtccacgccggtcgggcagacattgatgcactgatggcagtcgacgcaatcgccggcgggtgcgccgtgggcgcgggcggcatccgccttcttcaccgacatgcgcggctcgccgcggtcgcggcgataggtgacgttgagcgcccattcatcggtcaacgccgcctgaatccgcggccacgggcacatatagatgcacatctgttcgcgggcatgaccggcgaagacataggtcgtggcggtcaggatgccgatccagaggtaagcgaggaacggggcctggaaggtcgcgagctccttcaccagcgtcggcgcgtcggcgaaatagagcacccaggcgccaccggtccaccaagcgatcatgatccagaggaagtgcttgagcgcgaccttgcggaggtgggtgaaggtccaatagtgcttgtcgccttgcatgcgctcgcgccggtcgccttcgacccaacgctcgaccgcataaaacaggtcggtccagacggtctgcggacacatgtagccgcaccacagccgccccgcgaccgcattcatcaggaagagcgtcatggccgcgaggatcaggaggccggtgaaatagtagacctcctgtggccagagctcgatgaagaagaagtagaagcgccggtgcgggaagtcgatcagcacggcctggtcaggcaggccgggtccacgatcccagcgcacgaacggcaggagataataggtcccgagcgtgatgcagaggattgcccatttgatgcggcggaaagggccatgcaccgattgcggatagaccttccttcgcttctcgtagagaggtccttcgatgaaggtgtcatcggtcatggcaaattcccccgcatcacaggctgcatccagacgcgttcaggagaacgcgcagccgctacccaggcccagcttcttgaagatgatcgcggcggggcagaagccggtgaacgcagcctgcagcatgttgagcccggcaaaggccgtcagcaggtaccagtacgcattcacataggtgcccagtgcgagaccgagcaggacgacgcatcccgcgaaggcgagaacggctttgtcgacattcatggcagactccttttgttggcgagttaagaacgggtgagaccggcttcggtccaggcgacgatgctgcgggcatccatcgcgccggaatggcgggcgatctcgcggccgccgcgcatcagcagcagggtggggatgccgctgatgttgaggcgcgaggacaatgagggggcgttgtcggagttaagcttcaacagccggactttcggctccagctgctgcgcggcccgttcgaacatcggcgccatggcgcggcacgggccgcaccatggtgcccagacatcgaccagcacgggaatgtcgttgttggcgacgtgtcggctgaaggcttcctcgtccacctcgaccggatggccggtgaacatcggctggtgacaggcgccgcaacgcgcaccttgcggcgcgcgttcggcgggcagacggttgatgcgcccgcaactgccgcagacgatctggcgtgtcgtgctcatgtgccggttcggacctccttgagcttggcgatgttcagcttgtcgagaacgaagcgctcgtagaacggctcgctctcgccgcgccgcatcttgcgcaggaagtatttctcgaaagcgaccttggcgaggtgcacccattcgcccttggacgaccagttgacgtttcgcggcgggatctgcggctgcgccaggaacgcgacaccggagtcgccgaagtcggcgaggcagatcgcgttccaggtcggctgggctgtcggcgccttgccgcgaagcagggcaccgatgttcatcgcagtcgccgtcaccatggattcgatcatgaagccggtctttgggacgccgaccggcaccggtgtcgcgccgactggtgcgatcgcgacgcagacaccgaccgcgaagacgttggggtaggtgggattctgctgatgcttgtcgacgatgacgaagccgcgcgggttggtcagtttttcgataccgcgcactgcttcgacgccgcgaaaggcgggcagcatcatcgaataagcgaaaggcagctcgtgggccttgcgagacgtgccgtcgtcggcgaactcttccaccgacatcaagccgggcgcgacgttgtcgacgcgggcgttggtgatccacttgatgtgcttctcgcgcatctcgctttccagaagccctttggtgtctccgacgccgtcgaggccgagatgtccgatatacggctccgaagtgacgaacgtcatcggaacccggtcgcgcaattttcgccggcgcagctcagtttccagaatgaagaggaattcgtaggctggcccgaaacaggaggcgccctgcacggcgccgatcacgaccggtccgggattcgccgcaagcttctcgaaggcttcacgggcatgtgcggcatgatcgacgtggcagatcgactgagtatggccttgcggccccagacccggaatctcgtcgaaagccaattcgggaccggttgcgacgaccagatagtcatagttgatcgacgtgccgtcgccgagctcgacactgttctcggtcgggtggacgcgccttgcgccctgcgtcagcagtcgcacgcccttgcgtttcatgatgtccgcgaggtcgatctcgatctcctcacgcttgcgccagccgactgcgacccaggggttcgatgggacgaaatgatagacggacccttgcgcgatgacgctaaggcgatcttccttcctcaactgtggcagcaattcataggccatcagcgttccgctcagaccggctccgattacgacaacttccgccatgggtttcctccgttggaccaagctgctccgccaattcggttccggctgtcgtgcagcgcttgactatatattcgtattttcatatatacgcaagtatgaagatgaatgctgaaatcatggagcgggctgcggatcaggcgagcgagttgctgaaggcgctcgccaaccggcatcgcctgctcctcatctgccagttgatcgatggcgaacgctcggtcggcgagctcgccgagttcctgaacttgcgggactccacagtctcccaacatcttgcgctccttcgcaaggatggcctggtgtccgcccggcgtgaggcccagacgatcttctattcgatcgcgagcgagccggcgcgcaaggtgctgaagacgctctttcaggcattttgcgcgccgaagtccgcaaggaccagatgaaatctagaagagttcgagtgagggcgccttgagcaggatcaacacgcccccttccgaagcagatgaaatgagctgtgtgtagcagcgtgatggtgcttggatcatgatacggaactatcccatgcgatgtctggcgagatcattgggcttgctggcagccttcgcggccatcgggctgcctgcaacactggcgagtgcggccgaaacgctcgtggtcacgcagcaatcgatcgccgacgaaaaggccgtattcgccacggtcgaaagcgtcagcgtggtgccagcgcgcggacgcatcggcggcacggttgtccagctcaaggtcagggagggcgatcgcgttgccgctggtcaggcgatcgccacgatcggcgacgacaagctcgtgctgcaaatgaaatcgctcgacgcccagatcgaggcgctgcaggcacaggcgaaccaggcgcagctcgacttcagccggaccgaaggtttggtcgagcgtggtattctgccgcggatcaagctcgacgagcagcgaactgcgctgaacgtcgccgagaacggcctccgggccaagaccgctgaacgtgcggtgatcaacgagcagctcaaccagggccaggtgcttgcgccggcggatggtcgcgtgctgaagcggctgatcacggtgggatccgtcgtgctcgcgggtgatcccatcgtcaccgtcgcccagcagaatttcaagctgcggctccgcgtgcccgaacggcatgcgcgcttcctcaaggcgggggatcggatccgcgtcgacggcgcggagttcgtcggagaggtcgccaagtccggagtcattgatctcgtttatcctcagatcgaggaggggcgcgtcattgcggatgcgactgtcgagggcctcggtgaatatttcgtcggtgaccgcttgcgggtctggatctccggcggcacgcgagcagcgttcgtcattccctccagctatgtgacgacgcgattcggcatcgattatgttcggcttcagaaggataaaggaacgatagacgtgccggtgcagcgtggtcgcgaattgccgacgccggcgcttcccgacggactcgagatcctgtccggcatttctgccggcgaccagttggtgctgccatgaatctcggactgtcaggacggttgaccagagcgacgatcgcatccccgctgacgccgctgtttctgctcgcgtcgctcgtcgtggggctgatcgcggtggtgatcattccccgtgaggaggagccgcagatcagcgttcccatggtggacatccgtgtcaatgccgacggcctgcgcggaccggacgccgtggagcttgtgagcaagccattggaatcgatcgtcaagggcattgacggcgtcgagcacgtgtatagccagaccgaggacgaccgcgtcatggtgaccgcgcgcttcctggtcggcaccaagttcgaagatgccatcctgcgggtgcacgagaagatccgcgccaatatggatcgcattcccgtcggcatcccggagccgctgatcgtaggacgaggtatcaatgacgtcgcggtgacggtgttgacgctgtcgccgaagccggaggcggccagccgctggaccgacaaggatctctacgagctcgccgacaaactgcgctcggagttgatgaaggtcgacgacatcggcctgacctacatatcgggcggggcggcgcagcagatccgggtcgagcccgatccggagaagctgtcgctgttcggcatcacgcttcagcaactcgtcgccaaggtcaaggatgccaaccgctcgttcctggcgggacaggtccacgatgccggcaccgtgcggagcgtcgcggcgggccagacgctctccggcattcccgacatcggactattgctcatcacgagccgcgacggccggccggtctacgtcaaggacgtcgcctccgtcgtcgttggcccgagcacgattgagcatcgcgtctggacggaatcgcgcgataccgccggacagtgggcgcggacgcccgccgtcagcctggcgctggccaagcgggccggcgccaatgccgtcgtcgtatccgagaatatcgcccaccggctgcaggaattgaaggcccgcctcattcccgaggatgtccaggtgaccgtgacgcgcgactatggcgagacggccaacgagaaggcaaacgagctgttgttccaccttgcccttgcgacgatctcgatcgtcgtcctgatcgcgatcgcgatcggctggcgcgaggcgctggtgaccttcgtcgtgattcccacgacgatcctgctcacgatgttcgccgccaatttgatgggctacaccatcaaccgcgtaagcctgttcgcgctgatcttctcgatcggcattctcgtcgacgacgccatcgtcgtcgtcgagaacatcgcgcgccactgggccatgcgtgacggccgaccgcgcttgcaggcgaccatcgaggcggtggccgaggtcggcaaccccaccatcgttgcgacgttgaccgtagtcgcggcgctgttgcccatgctgttcgtgtcggggctgatggggccctatatggctccgatcccggccaacgcgtcggccgccatgctgttctcgttcttcgtcgcgatggtggtcgcgccctggctgatgctcaagctcgcgccgaaaggcgatacggctccggcgcatgcggagcacgatgagggccggctcggccggctgtaccggcgcttcgccgcaccgatcgtgcggagcaagcggtcggcctggctgttcctgctcggtgtcggcatcgcgacgctgttgtcgatgacgctttttgcgaccaagtcggtgacggtcaagctgctgccgttcgacaacaagtccgagattgcggtggtcgtcgacctgccggaaagggcaagtctggaggcgaccgagcgtacgctgttcggcgctgcagagatcgcgcggcaactgcctgaggtgacctcggtgcaatcctatgccggcaccccggctcccttcaatttcaacggcctggtgcggcactattacttgcgggagaggcccgagctcggcgaggtgcaggtcaatttggcgccgcgcggcgagcgcaagcgtgcgagccacgaaatcgcgctcgagctgcgcgagaagctgaaggcgctcggtccgcccccgggcaccagcatcaaggtggtcgaagtgccccccgggccgccggttctttcgacgctgctcgccgaggtctacggtccggatgcgaccacgcgccgggcagtcacggccgagctcaagaagattttcgccgaagtgccgttcatcgtcgatatcgatgattccatcggcgagaagcggccgcgactgcggctctcgatcgaccaggacaggctcgagttcttcggcgtcgagcagcgcgatgtctacgacacgatccagacgctcttcggcggcacctcgatcggctactcgcatcgaggcgaggaccgcaacccgatcgagatcgccgtgcgcctcgggaagcgcgatctggtctgggacgaggctctcgcctcaacgccggtgccagccaatacgttgcccggcagcaagacggtggtcgaactcggtcaggtcgtgaaggcgaccgtggaggagggctcgcccacgatcttccgccgcgacggccgcttcgccgacatggtgatggccgagctcgccggacgcttcgaggctccgctttacggcatgctcgcggttgccgatcgcgtcgaggcgcatgattggggcaagctgccgaagcccgcgatcagcctgcacggccagccgtctgacgagtcgcgtccgacgctgctatgggacggcgaatgggaaatcacctgggtgactttccgcgacatgggcgcggccttcggtgcagcgatcctcggcatctatgtgctggtcgtggcccagttcaggagcttccgcctgccgctcgtgatcctgacgccgattccgctgacgctgatcggcatcctgatcgggcactggctcctgggggcgccgttcaccgccacctcgatgatcggcttcatagcgctggccggcatcatcgtccgcaattcgattctgctggtggacttcatccggcatagcggcgccgggggcaaatcgctccgcgatgtcgtgctggaggcgggagcagtccgcttcaagccgatcctgctgactgcgcttgcggccatgatcggggcggcaaccatcctgctcgatccgatttttcagggattggcgatctcgctcctgttcgggcttgcgtcgtcaacgctgctcaccgtgctggtgattcccgcgatctacatcgccttgcgtgcgccgcgcgaggctccgaccacagccaaatccagctaacgaggatccgatggacaagaactacgtcgacatcacccggaacatctcggccaatctgaagaagctgcggagcgacattcccgacaccatgaaaggatttgccgcgctggcccaggccgccacgcgtgacggcgcgctcgacaagaagaccaaggagctcatcgccttggcgctcggtgtcgccgcacactgcgacggctgcatcggctttcacaccgaggcgctcgtcaagctgggcgcaacgcgcgaagagatcgaggagacgctcggcatgaccgtctacatgggtggcgggccgtctttgatgtacgctgcggatgccattgcggcctacgagcagttccagcagcaatcagccgctctataacggcggtcataggaacgggaccggccgagtcgtctcgtccggtcccgcctatcaatccgtcattgatttaccagcggtcgccgacgcccacaccgacgctgacgccaggggcgcgaatgcccacgccggcgcgcggcccgtcatgccggtggcgatgatacgtccgccgctcataatagcggtcgcgcggcatgtagttataggagtcgcgcacgatcacgcgcgaaccgctgcgcttgcgatagcagcgaccgtcgtcatcacagaccatccgcacttgctggacaagatccggattggtgtactcgctggttgtatagatatcggaagccttcgcactcgacgcggctgccaaagcaccgacgccagccaacagcgcaatcgtaaacgtcctcatcgtgtcctcctccgagactgccctccgcggtaacaagaagaggaagcagtgatcgctcccggccgcgctgcttgtttttcccggaaccgcaacgcgctgcagaacgggttcctagatcggctcgtaagtctccgtgccgcagatgtcgtcggcttccgcccgccggcggtccacgacctttccgccattgatggacaccaggtaggtctgggcgccgagcggcgcgcccgtcgcggaggtgagctgtgcgcggacgcatgccgtccagccgagtcctcgcagctcacgatggggtggggcgacgtgcacctcgcgcggataggacgttgggagaaagacgacgtcgatctgctcgcgcaccacgcgcttgacgtcgggtggcgtttcgggcggcggctgctcgggctccttcatgcgcatgaactcaggcaccggtgcgcggctgtcggcaaagccgcaggccccgagcgcgagcgctccggcgaacagcgccgcatgagcaataatccgtaacatccgtgaggatcccctgcgggccaacagataggcacgaacgcgatccggcgaagtcccggccgatcaagatttgctgaggccaggaacgcgcggcgtttgctattccgcgatcgcgggctagtttgtaccccacacgagggggattgcatcgatgaggattttggtcatagcggcagcggcgctggcgctggcggctggatcggcggaggcgcaaggccggcgccagcccaatgacggagccaagcccgccgaccatgcacccaaggtcgacgaaaaggcttacaaggccgcgctcgaacgcatccccgagcccaaggataaatacgatccgtggggcggcgcccggccaagcgaccccgccaagaaatcgagatagagcgaggcggccgttgcgagcgcgtcagcttttcgcggctccattcgctgcgttcgtattgtttgcagcctcgccatgcttcgcctggcagagctggggcggcgacgtcggcggctcgcgcttctcgtcgttgcgacagatcacgccggacaatgtcggtcagctcgtccgcgctttcgaatatcgcaccggcgatctcaccgcgcgcccgcccgaggtggtgcggcgaaccaaattccaggcgacgccgctgttcgtcgaggacagcctcatcttctgctcgcccttcaacgaggtgatcgcgctcgatcccggaacaggggtacagaaatggcgcttcgatccgaagatcgcggtcaaccagcgtccggccaatcgccatgtctgccgcggcgtcacttattgggtcgatgacacggcgcccccggaggccgcctgccgctcgcgcatcttcatgggcaccaacgacgttcgcctgatcgcgctcgacgcgaagactggaattccctgtgccgatttcggcaacggcggtgaggtcaaactcgagatcggcatgccgctggattggcctggtgaattccaggtcacttcgccgccagcggttggccgcggtgtggtcgtggtcggctccgcgatcggcgacaatcgccgcgtcgatgcgccgagcggcatggtgcgtgcgttcgacgcgcgcaatggccagccacgctggaccttcgacccgctcaagcgcgacggcatcgaagccggtcacgccaacgtctgggcgccgatgtcagtcgatgacgcgcgcggactcgtcttcctgccgacctcgtcgccatcgccggacttctggggcggcaagcggcctggcagcaacgagcacgccaattcggtggtcgcattgcgcatcgcgaccggcgaactcgtatgggccttccagacggtgcatcacgatgtttgggactatgatctggccgcgcagccgacgctcacgcgcatcgataccggcgaagggcagcgcgatgtcgtgatccaaccgaccaagcagggctttgtcttcgtgctcgatcgtgacaccggaaagccggtgtggccggtcgaggaacgcccggtgccgcagggcggcgctgaaggagaggcgctgtccccgacgcagccattcccgacacatgtgccggcactgacatcgcagacgatctcgcccgatgatgcgctatctctgatgcccggcatcggccgttcgtcttgcgaacgtcagttcgcggaagcacgcaatgagggcctgttcacgccgccctcgaggcaaggcactctggtgtttccgttcaccggtggcggggtgaactggggcagcgcggccttcgacccggtcaaccagatcctttatgccaacaccagtcgcgccgttcacctcatcaagctgatcccgcgcgccgaggcggccggattcaatccgccgcccggtcacgatttcggccagcagcgtggcgcgccgttcgcgatgtcgcgtgcgttggtgacgtcgccgcttgggctgctctgcaacaagccgccatggggtgagatggtcgcggtcgatgttcgggcaggaaaaatcctctggcgggcgacggtcggcaccaccgaggatctggccccgctcggcgtgccgttgccctggggcgcgccgctcgtcaacgggcttgctgtcaccgccggcggtctcgtcttcaccggagcgatggacgcttatttacgtgccttcgacgggcgcagcggcaaggagctgtggcagggtcggctgccggtgcccggtgttgccaatcccatgacctatttctggaagggcgagcaatatgttgcgatcggcgccggcggccactccgaggcaggtacctcgatcggcgacagcttggtggcgttccgcctggcgcggccaggcgaggggccgacattatggtcgcgtaccatcgatcgtcctggtggacgcttccttgcggcatcctcggtgatcgggatcgggatcgtcgtgctcgcgatcgcaagcctgcgctggcgtcgccgcggcaagcaatcgtgatcgtggtgtgcatgtgatgcgaacgctcgtttacatcacgcgactattgcacaaaggcgaggccgatgcgcctgtcgttgcgccaaaccgtgcggcaatgccgtacgaaaccgtcgcgcacgatcgcaagcgtgaacgatggcggcagcatgacggaggcgtcgaggtcgatcgccgcgccgtccgccgacatgtttcgcaccgtgcaagagatgccgctgttttcgaaggtgatcgttccacccttgaaaacacggtgacgttgtgctgaacgcttctcgatcatcccgcgtcgatccatgttgatgagtgtgaagtagtgcatggaaattgcgttcaactaaattcaatactggcgctacttgcacaagccttcagactttgtttacgacgttgaagcggagggtcgctttgcgaacctgcctgcgagcccttttttatggcgtcacacgccgatggagatactgatgaaaattttgctttcgatcttgttcgctgcagcgttctcgctgtcatcgatgcccgcccacgcggtcaagtgggacctcgcgaccatgagctgcaagcagttcctcgaaagcggtgaagacaacatccaggtcgtgctgacctggatggacggctggtacaagggcgacgaggacaacgcgatcatcgacaccgacgagttcatcgacaacgccaagaagttcggcgcctattgcgcaaagaatccgaacgccagcatcgtcaccgcggccgacgagatcctcggcaagtaagatcgccgccgcgacgatgccaagcgcgtccgcgatcgcgtttcccatcccgacatgagtgccgagagccgcgctgcgcttgccggcggctcttttcttttcaggtcgcgtttcaccccggcagcatcgcgaacgcgctcgacaccatcgcgaccggcttgctgtcggcagccgagagcagcgtcacgcggccgaagctcatgatgcgcccgagccgcaccacgcgcgcatccgcaagcacatcggacgaggagaccgcgcgcatgaaatgcgtggtctggtcgaccgtggtcatcgggcggtagccgcgattggcagcgaggatcgcgatcaccatggcggtgtcggcaagcgccatcagggcctgaccgcagaccacgccgccgtgccggcacagccgctccgagaacggcatgcgcagcagcgcgcccggctgccagtccgggaggtccgccggctgcgcatgctcgatgcgctcgacggcgaggttgaggtcctggacccagggcgcaaaaacctcgccgaggatgcgtcgggcgtctgcgatgccgaactcggcctgtggctgcatttgcattgctgttgcgctctcccgtgttgccggatgtttcgcctcattgtgcgctcatcgccgcggcaaagtcacccggcttgcgccggtcccctcggcttgaaaatgcccgagttggcccggtatgatgccttgcttgggtacgggtggaagatgttgcgtcggtgtgtcctcgtcttttgcatggccgcgctcggtttcgcgctgggcgggtgcaccaaatgcgggccggtgtgggacgattggctgcatgcgcccaaatcgtgcagatcggatcggctctagcggcacacgttgccttgagcggccccttggacgcagccgggccgaagcaaggatgacacgggcggggcggtccgcgcctcatggatgatcaaggagtggatgatgaagcttttccgtttggccgcggtgctggccgtgttggcgggaccggcctacgcgcaaatgcccaatctcaatttgctgcaggatgccccgagcaagaccccggaggaaaaggccgccgaagccgagcgtgacagggcctacaaggaaacgctgaagaagatcccggattccaagggatcgaacgatccctggggcggcatgcgctccgatccgccgaagcagccggcgccgaaggcctcggccgcaaccagcgcgccgaagaagacaaagagcggcacggctgccaactgaccgcgaaacccgttcggagggcgcaacgccccttcggacaggactcctcttcgttcggcccgcgcctacatttggttgagcgtattgcgtcgaggagtagcggaagatggccgatcggccgcgggatctcgccgagcggatggcgcgccggcgcaagctggtgggcaagccgggccagatggccggcgacggctatctgcgcgagaccttcacgctgccgcgcgcagcggcgcgggaaagggcgcaggccttcttcgcccgctaccccaaggccggctatatgagcgccgtcgagacttggcgcgagctgcccggcggcgacatcgagttcaccatgcggcggctgcccagcgcggattgaccgaggcttgatccgaacgcgagcctccgctcgaactccgtggttctccgaccatgaacaaagttcctgaacatcgcacgggctgcttgcggacaccgttgaactctgaggcggttccggccaaggttccagatcgctccagacggcatgtgccttgcttctctgatggcggcacgcaaccatggacgtcccatgctcggcattccccgccgttattcacatttcgtctttggcatcatccagtccggattgacctcgctgatcgcggcggggatcgccagctttcccgcggccagcccgatgagcttcgttcggcactggatggtgtcgtggctgatcgcatgggcgacgatgctgccgatcgtgctgctggcggcacccgcgattcgcgccttctcactgcgcctgacgcagggggagcgggatccgcgggtcggccgggaggcatgaaaaaagtctcgcctgggagcgccaagcgtggccgagagtcattggaggctggggtgctgggctgcaacacctgagcggagctactccggctggctcggctgacgacagcctgacgcgtctacccgcgcgacggctggcgtaatccgccgaggtcgcgattgaagggccgcagactggccccgcacccgtcccaatttcgacatccgctcgcgccactgcggacatacccgtcggcaagatctgatccgtcggcagtgccatgggggaaacgtggcgcgccgagaacggggtggcgtcatggataacgtagagcggtcattcgccgccgcgacggcggttggcttcgtggtgctggtgatcggcctggtgctgctggcggtgctgtagcgggtgcgcggccgggccggagttcgtgccttccgatggcaggcgcagtcacatcctgtctgtcaaaactgcaaaacaaccccatgcacagtaggctgcccggcaatttgcttggtccgccaatggcttgaacatggtgttcagatacctcaagccttcgttgcgcccctcaagcccggcgatggccagttccgaagccgggtccttgcttctcagtgaatcctgacctcgttcaggggaaggtggagctcggcggcacgctcctggcgatccttcctgcggaactcgttctcctgtcgctcgaacttcgccatctcctcgtgcgccgcctcgagcagctgatggcgccacatggcagcgccgtgcgtggtttccgtcatggtcatggtccccagagttgcggtccatgaccagagaaggccggagaccgcgaaaaggttcggtgccgtcggatcggaattctgacggcatctcgtccgcgcgccgttgaggcgcatcaaacgtggagcgaggccgaccgcccaaatccgcaaaagaacatattgcgaacatagaacagatagggtacattgcctttatcgccgagctgcctcgcaatcgtttgtccctcacgcgaatcctcgccataaggagcacgacccaatgtccgcaactgccctgcgtatcgtcgaaggatcttccatggacaagagtaaagctctggccgccgcgctctctcagatcgagcggcagttcggcaagggctcggtgatgaagctgggcaagaacgaccggtccatggacatcgaggcggtgtcctccggctccctcgggcttgatatcgcgctcggcatcggcggcctgcccaaggggcgtgtcgtcgagatctacgggccggaatcgtcgggcaagacgacgctggcgctgcatacggtggcggaggcgcagaagaagggcggcatttgcgccttcatcgacgccgagcacgcgctcgacccggtctatgcccgcaagctgggcgtcaacatcgacgagctgctgatctcgcagcccgacaccggcgagcaggcgctggagatctgcgacaccttggtgcgctccggtgccgtcgacgttctcgtggtcgattcggtcgcggcgctggtgccgaaggccgagctcgagggcgagatgggcgatgcgctgccgggcctgcaggcccgcttgatgagccaggcgctgcgcaagctcacggcctccatcaacaagtccaacacgatggtgatcttcatcaaccagatccgcatgaagatcggcgtgatgtacggctcgcctgaaacgaccaccggcggcaatgcgctgaaattctacgcctcagtccgcctcgacatccgccgcatcggcgcgatcaaggagcgtgacgaggtggtcggcaacaccacgcgcgtcaaggtggtgaagaacaagctggcgccgcccttcaagcagatcgagttcgacatcatgtacggcgagggcgtctccaagatgggggagatcctcgatctcggcgtcaaggccggcatcgtcgagaagtccggcgcctggttctcctatgacagccagcgcctcggtcagggccgcgagaacgccaaggcgttcttgaagggcaatcccgacatcaccgccaagatcgagaccgcgatccgccagaactccggcctgatcgccgagcagatcctggccggcacgcccgagcgtgacgccgatggcgaggagccggcggaagagtaggcctcgaccagcgaagagtttttcgcgaggagcgggcactgaggacgttgagttgccgacgtcttcggtgcccgtttcgtttctgcgttgcgttgatcaggtggtgcgatgaagcggctgatcttgaccggctgcggtggcgggagtgatctcgctcgatcggggttggccgagatcgtcatcccgttccatttgagtggggaccgctcccgccggcggaaaagctctcggcttatttggcgcctacaccgcagaccttggcccggctgatcattggtcggattgggtccgctggccacggggcgccaagggtcgcaaattatcgctggcgagttttgcgagccgtacgacgagatcgaattctggttcggagcgaatccccgcgaccagctgcaattggtctggttgctcgatcacctcggcagttttcctgtgctggcacagaagttcggggtgcgattgctggactccgacctcatattcggtcccgattatgatttcgctgagggcgaacgccatattcccatcgggaacttcggtgcgaaggagttcgagatcgcccggttggcgtggttgtcctaccgggcgccgacgcccgaggcctgtatcgatctgcttcaccgcgatctgggtgccttgctggtgctgcggccagcgttgcttcagcttctggcagagctcccgtctcccttgacagggctaggcgcaaccgagatgcgatttctggagatgctcgactggtttgcaaacacgaatccgttgtttcacctacgctcgctacggggcacttacgtctggggtgaggtcgagccgggatatttgctcgaaggcctcgccctcggccccaagccagctgtggccgggctgggcgaagaattacgcgccatcgaccttggcaatctcggagcccggcacaaggtttacctccgcagccggtcgtcgctgaccgaattcggtaaggctgtcctggcccatcaggaagacttcagccgtcataatccgatcgaccgctggtggggcggcacgcatctgaccaacgatcggctgtggcgctacggtcctgtcctgacgaagcgctgaggaggccgacgtgaccggcttattgtgacgacagattcgtccgccgccggcgcgttacaggtggcgggccttgccgacctcgtgattgcgatcgagcgcctgcttgtctggggatcgctgccatccactgcggagctcaatgcattccttgcgccgcatacgatgcacccatcgggtcttcattggctggacgatacgccctcctggcgcctcgaaagttcgggccttagggggcgcggactgatcgagctgttgtcagaatatgactcggtcgaacggtggatggagccagaagccagatgcgcaattgatcttgctctggctgctcgaccgttgcggcagcgatagagcggcgatgtccaaactcgtgatgcgttcgctggacatcgccgtgagcggcctcagtcccgcaggccttgcgaagctgaacccgccgatggtcaagctcacgcaagatcacgttgaactggccggccgcgcgtggcgagcttatcgtgcgccgacgccgcaggcttggttcggcctactcgaaacggatttgcgcttgcttccgcagctggagcgttgcgtcgtcgcgctgctcgaagagcttccaaacgtgagcagcggccttggggccacagaaacgcggatactggaattgattgctccgggtggggtgcagccctttgacgtgttcccgggacatcagaagcctaacgagcgtcgcgtcttcgattactgggaagttggcgcgctgctcgatggactagcgcgctgcccggtgccggccgtctccgggctggaggaggggcaattcacgctcgacatgcatgaggatgctcttcttctcgtgcgatacaagcaatcccgcttgtcgctcatggatctggggagggcggtgctggcaggcgaggatttccgccatcataatcccatccgccgctggtggggcgggacgcttctcgtcagcgatcggctctggcggtgggatcgcaaaggccggctgttgattgcgcctggctaacgcgtgctcacccgtatggctcatcaattttaaggagcgatcttgtcacatctgatcctagcgaccaacgatcgtgcggaagacgtgcttcgccagtccggcctggcgaacgtcgcgcttgggttctgtccgcgttttgtctggaggaaattgccttcggacgagcagcttctgatggggctggagcgccgatcggaaaagcaccgcaattccggcgatcactggctcgatgacgtttgtagcggtgcgctcgacggtttcagcacgcgcgatatcggtttcttcgagctgtgcgcgaagttcgactcgattgacatatgggttgatccccagcccaatgatcagctggtgctcgtctggctgctggacttgcttcgtccatataaggagatcacgaccaagctgagccttgtgcatgcggacgacaccatttcgaactatgatccggagtctgtcgcaaaatggaggctgccggccttcaaggtgaccgagaaccacttggcgacggcaagccgcgcctggcgagcctatcgggctgacacgccacaaacctgcttcgatctgctgatgacggacctgatgatcttgccgagacttcgatcggcgctcatcgcggtgctggaagagcttccggacagcgtgacgggactcggtgccactgaaatggatctgctggattctgtgaacggcgggcaaaccgatccaaggcttgtcgaagatgcgcgatggcttcgcgatgtattcgacgaaaacgacgcctatgacgctttgctcgaactaggggcgtattcggcgccgccgctcttgttaggcgatccggcgttcgacaatgaggatcgctatttcggcaggagcgaatggaaactcacgctgactgaactcgggcgatcactgctcgcccgagaagacgacatgtggcggcacaaccgaatctatcggtggtggggcgggacggagctcaccaacgaaaagctctggcgatgggatcgcaaaagccggctgttggtggcgccctagggcggatccgtagggtggattagccgcagcgtcatccaccactgttcatctcggcgaaagcagacgtggcgggttacgcctcgtcgactgcgcgttgcgcagccgcgcggctaacccaccctacaatcctactccgcggcttctgcgtaatcgctgaccggagggcaggagcacacgaggttacgatcgccgtagacgttgtcgacgcggcccacggggctccagtacttgtcggtccgtgacgtgcccgctgggaagcagccttcgctgcgggtgtaggcgcgattccaatcatcatccgcgatgtcgtgcacggtgtggggagcgtggcgcagcggcgaggcttcgatcttgaagcggccggcctcgacctcggcgatctccttccggatcgcgatcatggcgtcgcagaagcggtccagctccgccttggattccgactcggtcggctcgatcatcagcgtgcccggcaccgggaagctcatggtcggcgcgtggaagccgtagtcgatcaggcgctttgcgatgtcgtcgacggtaacgcctgatgtcgtcttcagcggacgcggatcgacgatgcactcgtgcgcgacacggcccttggcgttcttgtagagcaccgggaagtgcggatcgaggcgggccgcgatgtaattggcgttgaggatcgcgatctcggtggcgcgcttcaagccttcgccgcccatcatcaggatgtagatgtaggagatggtcaggatcgaggccgagccgaacggcgcggccgagaccggcccgactggcgcttcagcattcgtcaccggatgacccggcaggaacggcgccaggtgcgccttgacgccgatcgggcccatgccggggccgccgccgccatgcggaatgcagaacgtcttgtgcaggttgagatggctgacgtcggcgccgtaatcgccgggcctgctcaggccgacctgtgcgttgaggttggcaccgtccagatagacctggccgccatgggcgtgcacgatgtcgcagatctcgcggatatgctcctcgaacacgccatgggtcgagggataggtgatcatgaccgccgcgagatcgttggaatgcttctccgccttggcgcggagatcattgacatcgacgtcgccgttcttctcgcaagacaccaccaccacgtccatgccgaccatcgcggcggaggccggattcgtgccgtgggcggaggaggggatcaggcagatcctgcggtggccctgtccgcgcgcggcatggtagccacggatcgccaaaagcccggcatattcgccttgcgcgcccgagttcggctgcagcgagatcgcgtcgtagccggtgatgtcgcacagccatttctccagccgggcgaacagcgcgtgatagccggcggcctgttcgcgcggcacgaacgggtgcagcgaggcgaattcgggccaggtcagcggcatcatctcggtggtcgcgttcagcttcatcgtgcaggatcccagcgggatcatggcgcggtcgagcgcgaggtcgcggtcgctgagcttgcgcatgtagcgcagcatctcggtctccgagcgatgcgcgtggaacacgggatgggtgaggaaagcggtggtgcgcttcaaatcgtccggcagcgcctcgcgcgtctcggcgtcgatctcggcataggcgagggtgccgccgaaggcgcgccagaccgcttccaccgtcgccggcgtggtggtctcgtcgagcgcgatccgcagggcgctgtcactgacgccgagattgatcctttcgctcgccgcgcgcgcgacgatctcggcgcgcttggcgccggcgtcgacgctgagcgtgtcgaagaagttgtcggactgcggcgcaaagccgagcttgcgcaggccgctcgcgagcacggcggtgcggcggtgcacggtgcgtgcgatctggatgaggccctccgggccgtgatagaccgcatacatcgaagcgatcacggcgagcagcacctgcgcggtgcagatgttggaggtcgccttctcgcggcggatgtgctgctcgcgggtctgcagcgccagccggtacgccggcgcgccgcgggaatcgacggagaggccgacgatgcggccgggcagcgaccgcttcagtgcatcgcgcacggccatataggccgcgtgcggtccgccatagcccatcggcacgccaaaacgctgcgccgagccgatcgcgatgtcggcaccgagctcgccgggcgaagccagcagcgtcagcgccagcaggtcggcggcaacgatcgccagcgcgcccttggccttcagcgtggcgatcgccggcctgagatcgcgcaatgcgccggaagagcccggatattgcagcagtgcgccgagcacgtcggccttgtcgaggtcagtgaggggatcgccgacgatcaactgccagcccagcggctcggcgcgggtgcgcatcacggccagcgtctgcggatgcacgtccttgtcgacgaagaacgccttcgccttcacgggcgagtgccgctccgccagcgccatggcttcggccgctgcagtggcttcgtcgagcagcgaggcgttggcgacgtcgagcccggtaaggtcgcagatcatggtctggaagttgagcagcgcttccagccggccctggctgatctcgggctggtagggcgtgtaggcggtgtaccaggccgggttctccaggatgttgcgctggatcaccgcgggcaggatggtgccggaatagccctggccgatcagcgaggtgaagacctggttccggcgcgcaagctcggtcatgtgcgcgatcgcctcggtctcgctgagcggcttgccgagatcgagcggggcggcctgccggatcgaggccggcagcgtttccgccatcagcgcatcgacgctcttggcactgactgtctcaagcatggcggtgacatcgcgcgccgatgggccgatgtggcggcgaacgaaactggcggcggtgtcgccgttggtcttgcggtgcgcggtcatcgcttgctccatcgtccttacgccgtgtgcgccttgtaggcggcttcgtccatgaggccgccgagctcgcccttgtcggcgatcctgatcttgaagaaccaggccttgccctgcgcgtccgagttcaccagcgccggctcggcggcgagcgcctcgttggcctccagcacctcacccgttacgggcgcgtagacgtcggacgcggccttgaccgactccacgacggcggcggcttcggccttcttcagcgcgcggccgaccttgggcaattcgacgaacacgacgtcgccgagctgctgctgcgcatagtcggtgatgccgacggtggcgatatcgccgtcgatcgcgagccattcgtggtcggaggtgtacagcgtcgtggtcattgttgatcctcagcgtttgtaggtgtttttcacgaagggcatggccgcgacctgcacgggaaggcgctggccgcgcacctcggcgaacagtttcgtgccaagcgcggcgaggcccacgggaacgtagcccattgcgaccggcgcattcaggctcgggccgaagccgcccgaagtgaccttgccgatcggctcgccgccggcgtcattcgcaaacagcagcgcgccttcgcgcaccggcgcgcggccttcggcacggaggccgacgcggcgtcgggacgcgccctgatcgaaatgggcgaggattctttccgcacccggaaagccgccggcccgcgcgccgccggagcggcggctcttctgcaccgaccattccagcgcggcttcgaccggcgtggtcgcggtgtcgatgtcgtggccgtagaggcagagcccggcctccagccgcaggctgtcgcgagccccgaggccgatgggcagcacgtcgggatcgtcgagcagcgttcgagcgagccgctcggcgtccgcagcggggaccgaaatctcgaacccgtcttcgccggtgtagccggaccgcgagacgaaacacttgatgccggcgacctcgtgcgggcctgcgtccatgaacgtcatggcaggagccgctgcacacaatttcgccagcgctgactccgcctttggcccctgcagcgcgatcagcgcgcggtcggcaagcgaatcgatgacgcagtcaccggagagatgcgcgcgcagatgcgcctcgtccggctccttgcaggcggcgttgacgaccaggaacaggtgatcgccgaaattggcgaccatgagatcgtccagaatgccgccatccgcattggtgaactgggcgtagcgctggcgtccgggcgggatcgccacgatgtcctgcggcaccagccgctccagggcgcgggcggcatcctccaccttgcccgacttcggccggagcgcgatctggcccatgtgggagacgtcgaacaggccggctttgctgcgggtatggaggtgctccttcagcacgcccgcggggtactgcaccggcatgtcatagccggcgaacggcaccatcttgccgcccagggacacgtggagatcgtagaggggggtacgcttcagggagtcttggtcgtgcgctagcatcacaggggccctcggcggttcccccgggaggattccctgaggacaccggtcgaagccccatctgtcgctgtgcctgagagtattatcccgtcggcggacgcagtccgggccttatgcccgtcggcgcctctttccagatgctgtcaaagccacgcggtccttttgcctgagagtttccggggcgnnnnnnnnnnttcggcgccggctgcctaaagccgatctctcccgacgtggccgtacgatacagatgggtagagaccacaagccggccaagcctgtcaacgcgacacgcgcgtctttcaacgggattgcgcgcctgcagcaaccctctgatctctctgcacagtttctggacagcgaagctggccttgtctaaaagcgctttggcccgcagatatcagccgaaacgtcaggtttggacggcaggacagcgggtccaagcacacccgattggatgaacatgagcggcgtcaacgagatcaggtcgacctttctgaacttcttcgccgagaacggccacgagatcgtgccgtcctcgccactcgtgccgcgcaacgaccccaccttgatgttcaccaatgcgggcatggtgcagttcaagaacgtcttcaccggcgtcgagaagcggccctatcagcgcgccaccacctcgcagaagtgcgtgcgcgccggcggcaagcacaacgacctcgacaatgtcggctacaccgcgcgccacctcaccttcttcgagatgctcggcaatttctcgttcggcgattatttcaaggagcgcgcgatcgagctggcctggaagctgatcacgaccgagttcgggctgaagaaggacaagctgctggtcacggtctatcacaccgacgacgaggcggcgggcctgtggaagaagatcgcaggcttctccgaggaccgcatcatccggattccgacctcggacaatttctgggcgatgggcgacaccggcccgtgcggcccgtgctcggagatcttcatcgaccgcggcgagcacatctggggcgggcctccgggctcgccggaagaggacggcgaccgcttcctcgaattctggaacctcgtgttcatgcaatacgagcaggtgacgaaggaggagcgcgtgggcttgccacgtccctcgatcgacaccggcatgggcctggagcgcatggcctgcatcctccagggcgtcgagagcgtgttcgagaccgacctgttccgcaacctgattgatgcgacgtcgtccgcgctcggcaccgggccgaacgagcagaccgtggcctcgttccgcgtcatcgccgaccatctgcgctcctcggccttccttgtctcggatggcgtgctgccatcgaacgaaggccgcggctatgtgctgcgccggatcatgcgccgcgcgatgcgccatgcgcagctgctgggcgccaaggagcccttgatgcaccggctggtctgggcgctggtgcgcgagatgggccaggcctatcccgagctgatgcgcgcggagaagctgatcgaggaaacgctgcggctggaggagacccgcttccgcaggacgctgacgcgcggcctcgccatcctcgacgagaagagcgccggcctgaagaagggcgacatgttcgacggcgacgtcgccttcacgctctacgacacctacggctttccgctggacctgacgcaggacgcgctgaaatcgcgcggcatcggtgtcgatcaggcggcgttcaccgacgcgatggagcggcagaaggccaaggcgcgcgaatcgtggaagggttctggggaagctgcgtccgaggcgatctggttcccgctgcgcgagaagctgggtgcgacagagttcctgggctacgagaccgagagcgccgaaggcgtggtctccgcgctggtcaaggacggcgctgaggtcgcgagcctcaaggccggcgagaccggtgcaatcgtgctgaaccagacacctttctatgcggagtccggcggccaggtcggcgacaccggcgtgctctcgggcgagggcggcatcaagatccgcgtcaccgacacgcagaagaagctgggcgatctcatcgttcacatcggcacggtcgagagcggcgaagtgaagctcggcactgcgctgcagctcgaggtggatcacgcacggcgctcgacgatccgggcgcatcactccgcaacccacatcatccacgaagcgctgcgccaggtgctcggcgaccacatcgcccagcgcggctcgatggtcgcgccggaccggctgcgcttcgacttcgtgcatcccaagccgatcacggccgaggagctgtcccgtgtcgaggacatcgccaacgacgtggtgctggaaaacgacgaggtcaccacgcgcatcatgggcgtggacgaggcccgcgaggccggcgcgcgcgccctgttcggcgagaaatacggcgacgaggttcgcgtcgtctcgatgggcaggaccgcgcgcgagcgcggcgccaatgcgctcggctggtcggtcgagctctgcggcggcactcacgtgaagcgcaccggcgacatcggcctgatcacgctgacgggcgagagcgcggtcgcttccggcgtgcgccgcatcgaggcgctgaccgggaattacgcgcgcaggcacgccaacgacaccatatctctggcgaagaccgcggcgaacgagctgcgcacctcgctcgacgacgttccatcacggatcgccgcgctgatggaggagcgcaagaagctcgagcgcgagctctccgacgcccgcaagaagctggcgatgggcggcggcgcctccgccggcaacggcgcagcatcgggcgtgcgcgaggtcggcgacgtcaagctgatggcgcgcgcggtcgagggcatcgagatgaaggatctcaagagcctcgccgacgacggcaagaagcagatcggctccggcgtcgtcgccatcgtcggcgtcaccgaggacggcaaggccggcgtcgtggtcggcgtcacccaggacctcaccgcgcgcttcaacgccgtgaacctcgtgcgcatcgcctccgaagcgctcggcggcaagggcggcggcggccggcccgacatggcccaggccggcggccccgacggcgccaaggcatccgaggccttgagcgccatcgaaaaagcgatggcgagcgcgtaaggcgccatgcgccccgttccgcgaggacgtgggcttcgcgatcccaacttacgggatcgcctctacgaactgttggagcacgatcccctggcctattcggccggggcgcgcttcatccaaatcatcatcggcatcatcgtgctcaacgtggccgcgatggtcctcgcctcggtgccggagctcgatgaccggttcggcaagctgttcgcaggcatcaccatcctgtccgtggtcgtgttcgcgctggaatatgccgcgcggctatggaccgtcgctggccacacgcagcgcgacggctccgcgctgtccgaccgcgtcggctatgccttgtcggcgctcggcatcatcgatctcatggcgttcctgcccgccgcgatcgtgctcgccaccggcgagcatgcgacgctggcagccctcggcgtgctgccgttcttcaagctgatccgctattcgccggcgatgcgctcgctgctggccgccgtgcacgccgagcggcgcgcgctgatcggctgcatcgtcatcctggtcggcgcggtgctgaccttcgcctcgctgctctatgccatcgagcgcgacgtgcagccggacaagctcggcaccatcccgcaggcgatgtggtgggcgatcgtcacgctcggcaccgtaggctatggcgacgtcgtgccggtgacgccgctcggcaagttcgtctcgaccttcgccatcatcgcgggtcttgccatgatcgcgctgccggtcgcgatcatctcgaccgcgttcgccgaagaagtgaagcggcgcgatttcgtggtgacctggggcatgctggcgcgggtgcccctgttctcgcacttgtcggcggcggagatcgccgacatcatgcggctgttgcgggcgcgcaccatcgagcagggcgaggtcctggtgcggcgcggagacgtcgccttgtcgatgtatttcatcaccgccggcgaggtcgagatcgcgctgccgagccagcaggtgcgccttgccgacggcaccttcttcggcgagatcgcgctgctgcacaagacgaagcgcagcggcacggtgacggcgacgcgcaagacgcggctgctcgtgctcgacgcccaggattttcacgcgttgatcgcgcgcatgccgacgctcgccgatcatgtccacaccaccgccaaggcgaggctcgccgataccggcgatctggcgctcgccgagctcgcacaggcggagaatgaaggtaccggccgctgagcggtaccagaagcaaacgggccgcgcatgggcgcggcccgtcatgatctctggcccggtcgggcgaatgcggacggcttaagccgccagttccttggtcaggttctcggcgaccttgtcgaggaagccggtggtcgagagccagcgctggtcggcgccgaccaggagcgcgaggtccttggtcatgtagccggactcgacggtgtcgacgcagaccttctcgagcgtgttcgcgaatttcgccagctcggcattgttgtcgagcttggcgcggtgggcgaggccgcgcgtccaggcgaagatcgaggcgatcgagttggtcgaggtctccttgcccttctggtgctcgcggtagtggcgggtcaccgtcccatgggcagcttccgcttccacggtcttgccgtcgggggtgaggaggaccgaggtcatcaggccgagcgagccgtagccctgcgcgacggtgtcggactgcacgtcgccgtcgtagttcttgcaggcccagacgtagccgccggaccatttcagcgccgaggccaccatgtcgtcgatcaggcggtgctcgtaggtcagccccttggcgtcgaaatccttcttgaactccttgtcgaagatctcctggaagatgtccttgaagcggccgtcatagaccttgaggatcgtgttcttggtcgacaggtacaccgggtaattgcggagcaggccgtaattgaacgaggcgcgggcgaagtcgatgatggaatcgtcgagattgtacatctccatggcgacgccggcgccgggagccttgaacacttccttctcgatcacggtgccgtcctcgccgacgaacttcagcgagagcgtgcccttgcccgggaacttgatgtcggtggcgcggtactggtcgccgtaggcatggcggccgatgatgatcggcttggtccacccgggaaccaggcgcggcacgttcttgcagatgatcggctcgcggaagatcacgccgccgaggatgttgcggatggtgccgttcggcgacttccacatctgcttgaggttgaactccttcacccgggcctcatccggggtgatggtggcgcacttcacgccgacgccgaccttcttgatcgcctcggcagcgtcgatcgtgacctgatcgttggtgtggtcgcggtattccatgcccaggtcgaaatagagcagctcgacatccaggaacgggttgatcagcttgtccttgatgtactgccagatgatccgggtcatctcgtcgccatcgagctcgacgacgggattggataccttgatttttgccatgatcgggaaagcctcttgggaacggcgctcgtggcgcgccacgggaatatccgccgcctcttagcatcgccgcgcggcgggcgaaagccaagggatcatgcacttttagctcatccagcttccgcaggcggggagcggccagccgcccacagccgggctgggctcgcgttcccggcgagattcaaaagtcgaatccaagtcgttatttcccttgagaatttcgtcaggacaggcaaacgacaggcggggcatggcgaagggccgccctgaatccattccttgcagtgccttgccagggccttgagagacagtgtgaaagcgaaacgagatgtcggggactgacaagagcaaggcgggcctttccctcgacggtcccatcgtcatcctggtcgagccgcagctgggcgagaacatcggcatggccgcgcgcgccatgggcaattttgcgcttggcgccttgcgcatcgtcaatcccagggacggctggcccaacatcgcggcccagcgcgccgcggccggcgccgaccacattctggaaaaggtcgaactgttcgacacggtggagcaggcggtcgccgacctcgacctcctgttcgccaccaccgcgcgcccccacgaccaggccaagcccgtggtggggccggaagccgcagccagcgagatcgcggggcacgtcgccggcggcggcaaggccggcatcctgttcggcagggagcgctgggggctgaccaacgaggaggtcgggctctccaaccggatcatcaccttcccggtcaatccgggctttgcctcgctcaatctcgcccaggccgtgctgctggtcggctatgaatggttcaagcgggccacctcgggcgcgctgccgcacgccatgccggagcgctccgagcgcgcctcgcagcaccagatgcaggccttcttcgacaacctcgtgcgcgaactcgacaaggtcgaattcctgcggcccgccgagaagcgcgacaccatgctggtcaacctgcgcaacatcttcacccgcatggagccgaccaagcaggacatgcacacgttgcacggcgtggtgatggcgatcgcggaagggcgcaaggggccggccaagggcggcgtgctcgacggcgagcaggcgacccgcctgcgcgcgctgctggccgagcacgggcagggcggcggcatgcccgacagcggctcgaccgtgcgcggtctcgcccgcctgcttcgccgcaacccgaccgatgccgaacgcctgctctggcaggcgctgacccgcgaccgccgctttgccggccagttcaagcgccagaccccggtcggccgccacattcctgatttcgtgtccttcccgcaccggatcgcgatcgagcttgtgaacccgggcgagagcgaagccatcgccgcagaccgcgcgtcgcggcgcgcttggctggaagcgcgggattatcgcgtgctcgacattcgcgccgcggatgtggagcgggatctcgaggcggagctcgtgcggctgcaggagatgatggcgggacactctgacattccgtagggcacggcagcgattggcaggcaaagcgacaccggtccaaggccatccagcatcattgatgcatgtcaaagagcatggaaccccgctggttacgctcgaggcagcagggagggttcgacatgtcaatcagccgtcgccaagcacttgccgccttcggcgccgccgtgtcggcgcttgcgatttcccgagcagcacgcgccgagtttgacggcccagtcgtcagggctttggagggcggcgaagatttctggctcgcccaggacgcctatatctacggatacccgctcgtgacgatggaaatgacccgccgggtcatgacaaacgttgcggcggtggaaggtacccgcggaccgatggggcagttcgtcaagctccgcaaataccccgatgcgagcttcaaggacgtcacggcacccaatgccgataccctctacacgaccgcctggatcgacgtgggagacgagccctgggtcctgagcatgccggacatgaaggaccgctacttcctttttccgatgctcgacggctggacgaatgtattccaggtgccgggcaagcgcaccactggcaccagggcgcagacatacgcgatcacgggcccgggctggaaaggagtgcttcccgccggcgtgaaggaatacagatcacctacaagcatggtgtggattctgggccgcatctactgcaccggcacgcaggaggattatgcggccgtgcacgcgctacaggatcagttcaagctcgtaccgctcagcgcatacggcaagtcctatacgcctccggcaggcaaggtcgatgcgtcgatcgacatgaagacggcggtccgagagcaggtcaaccgcctggacgcagttgcctatttcaaccttctcgcgcaattgatgaagcgcaatccgccggctgccgcggatgcggccgaggtcgcccggttcgcgaagatcggccttgtccccggcaaggattttgacgcgggcaagttcgacgctgccttcgccaagcgggtcccgcaggtggcgttcgatcgcatcatgctccagttcaaggtcaacaaggcgatcaggaatatcaacggctgggccttcgacgccgaagccggcgtctacggcaccaactatctcaaccgtgcccttgtcacggccatcgggcttggcgccaatcggattcaggatgcatgctatccgacatcccagaaggacgccgacggcaaagagtatgtcggcagcaacaaatacgtcatgcggttcgcgagggggcagcttcctccggtcggcggcttctggtcgctgacgatgtatgacgagaactacttcttcgtggccaatccgatcaaccgccagtccatcagtgcccgcgagaagctgaaagccaatccagacggctcggtcgatctctacattcagaaggacaatcccggtcctgacaaggagagcaactggcttcccgctccagcgggcaagttcgtgctgatgttgcgcatgtactggcccaacgagaagtcgccatcgatcatcaacgggacctggaagccgccgccggtccgtcgggtgacgagcagctagagcggaatggctttcggttgaatcgaacgccgcaggtggttgaccgctcccgctttcggcgccactcgaggcggacacgttcatccgaatcctcgcgtgcccgctggagcggttgcattttgctggcgccttacgggcctacactgcctcgagctgctcggcgcgcttcttcttcggcttggactggccgagcagagggcctgccgtgagcgcggcggtatcggcgacgcccggatcgcgcgagatcatcgcggcgacgatggcaccgtcgatgatgagaccgagctggtgagccagcaccgcaggctccgtcgatccgaactcgccggcgagcttctcgatatggccgagcacgatcttcttgtgctttagcgcgatgttgcgaaattgtttcgcatccttgtcgtgctcgccgacggcgttgatgaagggacagccgtagaagcgttcttccgcgaaccagcttttcagtgcaggaaagatgcgcgccagtttcgcctgcgcatcgccgccgccttgctccatggcgccgatgaaccattcgcgccactgcttgccttcgctttccagcaccgcgttgacgagattggtcttggagccgaacagcttgtagagcgtggtcttcgcagtgccggcttcctcgatgatcgcgtcgatgccggtggcgttgattccattcttgcagaacagatgcgatgcggcgctgagcaggcgcccgcgcgcggattcgtcgtcgcttgcaacagcgtggggcgaattcgaattcttcttcgatgacgtctttgccatagctgcaacttaatcgcagctgcatcgcatcagcaagccgcatgtggttggcgctgaaattattcgcaagcgaccgttcacttgcaccgcgtttgtgcagcgcgccgccgatcaactgtcaggcgggccgctaaacggctcaaccccctcgcattttgatcctggcgggtcttggcacgctccatgcaaggaaacagaccgttcggtatcctgccgatttccacttctgccagggagaagattgatgactgccgtcgttcagaagacagtgctgacgggttgcctcgcgcccatcgacaagaatggcctcgagcaactgatcgccaatggcaaggcgaatccgaaggtcatcaagaccttgaagtgcaagacggtcgcggagggcaagttccgccacgccaactacatccgcaacctgccgccctacatcgtcgacgagccgccgggactcctgggcgacgataccgcgcccaatccgtcggaagcctcgctcgcggcgctcggctcctgccttgcggtcggcctgcacgccaacgctgtgcaccgcggctggatcgtgaacaagctcgagctcgagctcgaaggcgatctcaacatcaccgcggtctgggggaccggcgacacctcggacaagccggtcggcttcaccgacgtgcgcgtcaaggtcgacatggaatgcgagggcatctcgccggacgagatcaacgcgctggtcgcccatgtgaagaagtggtcgccggtcgccaacaccttcacccgcccggtcaatctcgaggtcggcatctagctgatagcaaccaggacaaggtgcgggagacgatcatgggttcactggctttatcgcgggccgacgttttggatcagcccgcaccgtccattccagacgaggtggcgcggatcgcgcgcgagcagctcgcgccgctcgccgccggcatcgacgacggatcggtctatccggcagaggtgctgcgcaaattcggtgcggttggcgccttcggcaaccacgtgccgcacgaaggttccgccgacctgcgctgcgccatccaggcgatggcggccgtcggcgaggtctgtggcagcacggcattcatgaagtggtgtcaggacacgctggtttggtacgccgccaattcgaccaatgcgaagctggccaagcgtttcggcgatgccttctcgaccggtcgcgtgctcggcggcaccggcctctccaatccgatgaagagcttcttcgggatcgagaagctcaaattgaaggggcgcaaggtcgagggcggctacatcgtccgcggcgtgctcccctgggtctccaatctcggtcccgaccactatttcggcaccattttcgagcgcgaggacgagccgggactggtcatgtttctggccgactgctcggaccccgcgatcacgctgacgccctgcaagccgttcctcgcgatggacgggaccggcacttacggcgtgcagttccgcgacgtgttcgtgccggatgatctgatcctggccgatcccgcaggtcccttcgtcaagaagatccgcgccggcttcatcctgctccaggcgggcatggcactcggcctgatcaaggactgcatcagcatcatggatgaggtcgacattccgctcggtcacatcaaccgctatctgccgcagcagccggtgcacttccgcgatctcgctgccgagctcgaggccgagaccatggcgctggcgcgcgatccctacaacgaggaggacgcttactggcgcaaggtgatcgcgctgcggcttcgcgccggcgacgccagcgtcgcggcggcgcatgcggcgatgctgcattgtggcgcgcgcggctacctgaaaagccaccgcgcgcagcggcgcctgcgcgaggcctatttcgtcgcgatcgtcacgcctgccaccaagcagctgcgcaagatgctcgccgaatcctgagcttcacgagtccacccagaagaccacccaacctcaacggagaggctgccaatgacggacgttctgatctctgccagcgaacttgccgatctcttgaagctagagccgtgcgtcgtgatcgacacccgcaatcccgacgcctatgccgcgggacatctgcccaatgccgtgaacgtgcacgacatcttcacctatcttgcaacctcgacgcccgaaggcatcagcgagctgaagaccaagttcgccgacgctttcggcgccgccggtctgtccggcaaggaaacggcggtggggtatgagcagtcgatgaattccggcttcggccagtcctgccgcgggtactatctgctcaccatgctcggctatcccaaggtgaaggtgctgcatggcggcttcgacgcctgggcggccgcgggcttgccggtgaccaaggacgttccgaccccggtgaaggcctcgttcccgatcgtgccggaagcgggcgagatcctgatcgatgccaagaccatgctcgccgcggtcggcaagcccggggtcgcgatcctcgacgtgcgcgatgtcgacgagtggatcggcgacagctcttctccttacggaaaggatttctgcccgcgcaagggccgcattcccggcgccgtgtggctggaatggtaccgcatgatgaagccgaccgccgaaggcccgcgcttcaaatccaaggacgagatcctggcggaatgcgccaccgtcggcatcacgccgagcacgccggtgtacctgtattgcttcaagggcgcgcgcgcctcgaacacgttcctggcgctcaagaacgccggcgtgaaggacgtgcggatgtacttcggctcctggaacgaatggtcgcgcgacccgtcgctgccgatcgagcagggattgccggtggctgcccaggtaacaggcaaggcggcatagaacctgcatgtttatcgtggtccggctgcgcaaggcttagccgggccacgatggaatcttgagccgaggtggcggacaacggcgttcgccgcgcgatgtgacaaaggggcgcaacagcatgtccacgttcgacgatccgtttgattccgaccgcaatctccaggcgggctgcgtttgcggccagcaccgctcggccctcgagcacgagcaggccgcgtcggccctgcgctgcgagcccatcgaaagcgaggacaagcgctacgagggtgtcgtcgcgtccgcggtgatgcgcgcgatgtttccgcaggacgtggcacgccgcgccttcctgaaatcggccggtgcgtcgaccgcgcttgcggcgctgtcgcaattcttcccgctcaagacggcgacggaggtcttcgccgcgaccggcacgccggagaagaaggacctcaaggtcggcttcattccgatcacatgcgccacgccgatcatcatggcggcgccgctcggcttctatgcgaagcacggcctcaacgtcgaagtggtcaagaccgccggctgggccgtagtccgcgacaagaccatcaacaaggaatacgacgctgcgcacatgctggcgccgatgccgatcgcgatatcgctcggcctcggctcgaacgccattccctttgccgtccccgcgatcgaaaacatcaacgggcagggcgtcacgcttgccatgaagcacaaggacaagcgcgacccgaaagactggaagggaatgaagttcgcgatccccttcgactattccatgcacaattacctgctgcgctattatctcgccgagcacgggatcgatcctgataccgacgtgcagctgcgctcggtgccgccgccggagatggtcgcgaacttgcgcgccgacaacatcgacggcttcctcgcgccggacaacatctgccagcgcgcgatctatgacggcgtcggcttcatgcacatcctgtcgaaggagatctgggacggccatccctgttgcagcttcgccgccagccgcgaattcatcaccaccgcgccgaacagctttgcggcgctgacgcgcgccatcgtcgatgcgaccgcctacgcgtcgaaggcggagaaccgcaagcagatcgcggaagcgatcgcgccggccaactacatcaatgcgccggtgacggtgctggagcaggtcctgaccggcacctatgccgacggcctcggcggagtgaagaccgacgccaagcgggtcgatttcgatccgttcccctggcagtccttcgcggtctggatgctgacgcagatgaagcgctggggccagatcaagggggaggtcgactacaagaccatcgccgagcaggtgtatctcgccaccgataccaagaagctgatgaccgagatggggctgtcgccgcctgcaagcgcctacaaatcctttgcggtgatgggcaagacgttcgatccggccaagccggaggagtatgtggcgagcttcaagatcaggaagggggcgtgatggtcttcgctctctccccagcgtcgtcccggcgaacgccggcagccaccaccacggtgaggcgcttggggaagatttgttgttcggggcgcctatcggccgcgctcgatgaattccgcggtatgggtcccggcgttcgccgggacgacatctggagaggccttgcgcgatgacatcctccctccgtctccgcgcgggtctcgtctccatcgtgctgctcgccgcgttcctcggcatctggcatatcgcaacgcgctcgacgggggcgacgacgacgatgagcccggaatacgccaagctgatggggctgacggccacacaaggcaaatcggcgatgcccgggccgctcgacgtcggggcaaagctctgggagcacctcaagcggccgttctacgataacgggccaaacgacaaggggctcggcatccagctcgcctattccatcgcgcgggtcggcaccggctatctgctggcagtgctcgtcgccatcccgctcggcttcctgatcggcatgtcgccgctgttgagcaaggcgctcgatcccttcatccaggtgctgaagccgatctcgcctttggcctggatgccgctcgcgctctacaccatcaaggattcctcggtctccgcgatcttcgtcatcttcatctgctcgatctggccgatgctgctcaacaccgtgttcggcgttgccagcgtgcgcaaggaatggatcaatgtcgcgcgcacgctcgaggtaggcacgatcaggcgcgccttcaccgtgatcctgcccgccgcggcgccgacgatcctgaccggcatgcgcatctcgatcggcatcgcctggctcgtcatcgtcgccgccgagatgctcgtcggtggcaccggcatcggctacttcgtctggaacgagtggaataatctgtcgatcaccaacgtcatcatcgcgatcctgctgatcggggtcatcggcatgctgctcgaccagatcctggcgcgcttcacgcgcatggtcacgtttccggagtagcagcggtgtccgacaaattcatctccatcgaaggcatcgcgaagcgctatcctggtgcgggcggcgccacgaccaccatcttcgagaacctgtggctgtcgatgacgcgcggcgagtttgcctgcgtgatcggccattccggctgcggcaagaccacggtgctcaacatcctcgctcggcgcatcgaggccggcgagggcgccgtcatcgtcgacggtcaggcgatctcgggcaccagcctcgatcgcgccgtgatcttccaaagccatgcgctgctgccctggcgcaccgtgctcggcaacgtcgcctatgccgtcagctcgaaatggcggaactgggaccgcgccaaagtgagggcgcatgcgcagaccttcatcgatctcgtcggtctctccggctccgagcacaagcgtccgtccgaactgtcgggcggcatgaagcagcgcgtcggcatcgcgcgggcgctgtcgatcacgccgaagatgatgctgatggacgagccgttctcggcgctcgacgcgctgacgcgcggcacgctgcaggacgaggtccgccgcatttgcctggagaccggacagaccgcgtttatgattacgcatgacgttgacgaggcgatctacctcgccgacaagatcttcctgatgaccaacggccccggcgccgtgctggccgaggtggtcgagaacccgctgccgagggaccgcggccgcaccgatctgcaccgccatccgctctactacgccctgcgcaaccacatcatcgatttcctggtgacgcgcagcaagaccttcgtcgccgagacgcccggccacgatccgcgcaacgtaccggtggtgcagatcggcaagcccggactgtcgatcgcggccggcagcgacgaaccgcggcagacctggatgtccgggaccagccccggattgagtgcctaacccaaggagacctgacatgaagcgcgaagacctcaccgagaagctgctcgacatcaaacgcgagaagggctggagctggaagcacatctgcgagaagatcggcggctattcggaggtgctgatcgtcggcgcgatcctcggccagatgaagctgaccaagccgcaggccgcgaacgccggcgagctgttcggcctgtcgaaggcggaagttgcgatgctcaacgaggtgccgatgcgcggcaccgggacgccgatgccgcccaccgatccgttgatctaccgcttctacgagatggtaatggtgaacggcccggcctggaaagcgctgatcgaggaggagttcggcgacggcatcatgtcggcgatcgacttcgacatggcactggagcgcgtcgccaacccgaagggtgatcgcgtcaagatcacgatgagcggcaagttcctgccgtacaagtactacggcgccagcggcaatgtgccggaatacggcttcaaggaggggtgaggagcggttaaccagtggtgaagcggcgtcccgatgtttgccctccagggtttgcctgatcgcaatctctggaagctagcagagaggcgttgcttcaaccacaggtaaacgtcatgaaagctcgttcgctccttgtttcggcagcccttggcatgttggtcatgactgcttccgccatggcacagtcacttggccagcgtgccatggtcgagcagggcggcggtgcattgcggcaggaaggatcggtccgcgtgcaaacgtcgatcaacttctttgtcgctgtccccgctggggccagcgagtaggcccaaaagctgcgcgagcgcgcgcgccgcgcggtctatgagatggcggcgcgcgaatgcgatctgttgcgcgaggtgatcgcccgcgattgccggctggagtcggttaacaccagcatcaaccggcaactcggaccgcagcaagcggagggcttcaatatcaacggctcgatggcttttcagatcacgctcaaatagagggcgggattcatttccccgccttcacctcggccgcggccaccgcaagcagctcgctcatcttggcgcgaatggcctgctcggtgacggcaacgttcttggcggcgaaatcggccgtgatcttgcgcaggacgtcggcatcgccggcctcctcgaaatcggccgcgaccacctccttggcataggccgtggcggcgtcaccggtgatgccgagcttttcggctgcccacaggccgagaagccggtttcggcgcgcctccgccttgaatttctgctcctcgtcgagggcgaacttcttctcgaaaccttcctggcgcttgtcgaactcgctcatgccttgttccaaatccttgctgaatggcgcggggcccttccgttgcggcgccccggctgcatgcctacatagatagcacgaatcggcaaaacaacgggccgttaagccgcaggcaagacggtataagttggcgccggacggccggaacgagtgtgctcggacagccaatcggataggttgcctaaaggcttggttcccgttctgttttctgggttatggatgggttcctcgccgttcacggcagctccgctgtgggtcccatcctagtcaaccggagcacaccaaattcatggatttcaacaaaacacggtacatccccatgagccgtcggcgtcgcatttatgaaggcaaggcaaaggttctctacgagggcccggaacctggtaccctgatccagcacttcaaggacgacgccaccgcgttcaacgcgaagaagcatcaggtgatcgagggcaagggtgtcctcaacaaccggatttcggagtacctgtttcagcacctcaacgacatcggggtgccgacccacttcatccgccgtctcaacatgcgcgagcagctgattcgcgaggtcgagatcgtgccgctcgaggtggtggtgcggaacgtcgccgccgggtcgctctcgcagcgtctcggcatcgaggagggcacccagctgccccgttcgatcatcgaattctactacaagaacgaccagctcaacgaccccatggtgtcggaagagcacatcaccgccttcggctgggccacgccgcaggagatcgacgacatcatggcactcgccatccgcgtcaacgatttcctcaccggcctcttcctcggcatcggcatccgcctcgtcgacttcaagatggagtgcggccgcctgttcgagaacgagatgatgcggatcatcgtcgccgacgagatctcgccggacagctgccggctgtgggacatcaagtcgaacgagaagctcgacaaggaccgtttccgcagggatctcggcggcctgctcgaggcctataccgaggtcgcaaagcgtctcggcatcctgatggagaacgagcgtccgcagggctcaggccccgtgctggtgaagagctgaaggggatttcgacgtgaaggcacgtgtcaccgttaccttgaagacgggcatcctcgatccgcaaggcaaggcgatcgagggtgcgctgaagtcgctgggcgtcgacggcgtcgccagcgtccggcagggcaaggtgttcgacatcgagctcgccggcgccgacaaggccaaggcggaagctgcgctcaagcaagccgccgacaagctgctggcgaacaccgtgatcgagaactatcgggtcgaactgctctaatgaaagccgccatcctcgtcttccccggaatcaatcgcgagcgcgatatggcgcgcgcactgaagctcatctcgggccgcgagccggcgatggtctggcacgccgagacggcgctgcctgcgggcacggatctcgtggtggtgccgggcggcttctcctacggcgattatttgcgctgtggcgccatcgcggcgcgggcgccggtgatggacgcggtgcgcgactacgctgccaagggcggcctcgtgctcggcgtctgcaacggtttccagatcctgtgcgagtccggcctgctgccgggcgtcctcatgcgcaatgcggggctgaagttcatctgccgcgatgtgcatctgcgcgtcgagcgttccgactcgccgttcacccgcggctacaacgccgggcaggtgatccgcgtgccggtcgcccacggcgagggcaattacgaggcggacgaggagacgatcaaccggctcgagggcgagggacgggtgctctatcgctattgctcggccgccggcgaggtcgacgatttcaacaacatcaacggcgccgcgcactccatcgccggaatcgtcaacgacaggggcaacgtgctaggcatgatgccgcatccagaaaaccacgtcgaagacatcatgggctgcaccgacggccgcggcctgttcgccggcctcgtccagcatctggaaaaggctgcgtgatcgcgtgggtgccggggcggccgtcgttgcggtcgcgtcggccggcgacgctcagggcgcttcagcgacgcttccacctttccgccggcaccgtcatcgcggcaacgcctgccatcaccagcagcaatcccagcgccaggttcgacggcacgctctcgccgagcagcagcacggagaggccgacgcctatcgggatgcgcagatagccttgcgcgttcgtcgtcagcgtgccgagccggccgaggcagatgtagaacagcagcagtcccagcgcgcttgagacgatgcccatgacgatggtggcaacaattgccgtcggagtcggctgcagcgtccagggctggtcgatgaggagcgagggcggcagcaggatcatgccgccgaacaatagcgagcctgccgccaccaccatcgggtcgtagtcggacaacctgaggccgaagatggttgcgcaggcaaaggagatcgtggcgagcaggattgcgatctccgcgatgatctcgctgccgagcccgtgcagcgcatcgaggccgacgatgagggtcgtgccggcaaggccgaggaccgcgccggcgagcttgagcagcgtcgccggctcgtgccgcgtgatcagcgaggtgatcaggaaggcgaagatcggcgtcgtcgaggccagcaccaccgtgttcgaggccggcacatattgctgcgaccaggtgatgatcaggaacgggaaggtcgagttgatcaattgctgggtcgcgaacagcttccaggccttcgcgtcgatcggtatcctgaccccgcgcatccacaggatcgcgaacaggaacgcggccgcgatcagcgagcgcgccgagatgaatgtgatgggcgggatcgtgtccagcgccagcttggtcagcggataggtggaactccagcagcaagccagagccagcagcagcgcgtagtcgcgccagctgcgcacgccaggcacggacggcaacggcgttgatgcggaccccgtcgcgcgacccgcctccgatgtgctctgcggcaccttgttctgctccccggcgcaacagcgcttgatcaagtctgggcgaggggacgcgaaaagggaagccgtcgagctatgcgtttggctgcggtgccggtttccgcttcacccgcttgatcgtgccggagaaggtgaacaggggccgtccgccggaggtcagcctgccgcgcaggaagatcagcgagccgccggcgcgggacacttcgccgacgcactcgaccagttcgccctcgcgggccgcgtcgaggaaatcgcaggcgaaattggtcgtcacggccggcccatccagctcgtgggtggcaattgcaaaaagacaataatcggcgaaagccatgaagcagccgccatggacgttgccggagccgttgaggtgctttttctcgacccggaaggcgcagcggacgctgccgtccgcctcgattcggtgccagaaggggccgacatgggattcaaaactgtcgcgaatccaggtccgccaaccctcaaattcgccctcggtggcgacgtggaggtcggggcggcggagcggagatgatttggtcaattcgtgcaaggaaacaggccttcaattgcgggtcttcagcccttaaatccgatccgaccgcgccgtgcaattcctgttcccgcggagcccccggcgcaaaacgtgggacagcgggaaaatgcgccataaagggcttttcgcgagcccccgatgttcctaagaacggccaaccgccgccgaaagccccgaatccatgaagaacgaacccaagatcacccccgaactggttgccgcccacgggctcaagcccgacgaatatgagcgcatcctgaagctgatcgggcgggagccgaccttcaccgagctcggcatcttctcggcgatgtggaacgagcattgctcgtacaagtcgtcgcgcatccatcttcgcggcctgccgaccaaggcgtcctgggtgatccagggccccggcgagaatgccggcgtgatcgacatcggcgatggccaggccgtggtgttcaagatggagagccacaaccacccgagctatatcgagccctatcagggcgcgacgaccggcgtcggcggtatcttgcgcgacgtgttcaccatgggcgcgcgccccatcgcctgcctcaatgcgctcagcttcggcgcgcccgagcacccgaagacgcggcatctcgtctccggcgtcgtggcgggcgtcggcggctacggcaattccttcggcgtgccgaccgtgggcgggcaggtgcgctccacacccgctacgacggcaacatcctcgtcaatgcgatggcggtcggtctcgccgataccgacaagatcttctatgcggctgcctccggcgtgaacatgccgatcgtctatctgggctccaagaccggccgcgacggcatccatggcgcctcgatggcctcggccgagttcgatgacaattcggaggagaagcgccccaccgtgcaggtcggcgatccctttgcggagaagctgctgcttgaggcctgcctcgagatcatggagaagggctgcgtcatcgcgatccaggacatgggcgccgcgggcctgacctgctcggcggtcgagatgggcgccaagggcgacctcggcgtcgatctcgatctcgacgcggtgccgacccgcgagaccggcatgagtgcctatgagatgatgctctcggaaagccaggagcgcatgctcatggtgctcaagcccgagaaggaaaaggaagccgaggcgatcttcaagaagtggggcctcgacttcgccgtcgtcggctacaccacgccgagcaagcgcttcgtggtcaagcatggcggcgacgtcatggccgatcttccgatcaaggagctcggcgacgaggcgccggtctatgaccgcccgcaagtcccctccgcggcgctgccggtggtgcatgcccgcgaggtgccggcgccgatgggcctcgggcctgcgctggagaagctgatcggcacgccggacatgtgcagcaagcgctgggtgtgggagcagtacgatcacgtcattctcggcaacacgatgcagcgcccaggcggcgatgctgccgtggtgcgcgtgcaggacgggccgaagggtctggcgctgaccgtcgacgtaacaccacgctattgcgaggccgatccgttcgaaggcggcaagcaggcggtggcggaagcctggcgcaacatcaccgcggtcggcggcaggccgcttgcgatcaccgacaatctaaatttcggcaaccccgaaagacctgagatcatgggccagtttgtcggctgcctgaagggtatctcggaagcctgccgcacgctggatttcccggtcgtctcgggcaacgtctcgctctacaacgagaccaacggccgtgcgatcctgccgacgccatcgatcggcggggtcggcctgctcgatgatttcaccaaatccgcctcgctcgccttcaaggccgaaggcgaggcgatcctcttgatcggtgaaacccatggctggctcggccagtccgtctacctgcgtgacatctgcggccgcgaggagggcgcgcccccgccggtggatctcgccgccgagaagcgcaacggcgattgcgtgcgcggcatgatccatgcgggcaccgcgaccgcggtgcatgacctctcggacggcggcctcctgatcgcgctcgccgagatggcgatggcgagcggcatcggtgcgaaactgctcgccgcgccgagcgcactggtgccgcaggcctattggttcggagaggaccaggcgcgctatctcgttaccgtgccggaaaccgaagccggccgcgtgctcgccaagatgcgcggctgcgaggtgccttgcgtgcggatcggcaccaccggaggcgatgcgatcgcaatcgcaggagaagcgcctgtgtcgatcgagagcctgcggacatcccacgagcgctggctgccggagtatatgggcgggaaggcagcgtaaggccgccttcacaagctacagcaccttcgttgccccggggatctggcgcaaggcgcgcgtgagcccccaactgaacgcgacggtcagcacgaatccgatcgtcgccttcacgatcgccggcaggtcatagtcgaatagccagtattgcagccaaagcgcgatcgggtagtgtaccagaaacatgccataagcgtccgcctgcatcggatcgagtagcttggccgagcccgattgcctgaacctctggaagaaggccaggatcagaaacatgatggccacgctgaagatagcgaagcagacggcatagagtccctcataccagttcggcagcggccacgggtttcccagtatttcgcgcttgatgaagatcagcacccagagcaggcaatacgggactatcgccaagaccatccagtcccagctcaccttcgccatccggccgtctgccgcgagcagcccgcgatccatattcgcgacgccgatgccggcaccgaagaagaagtagctcgcgtaaagcatcacgcgcccgtgctgcaccgagaacggccccaactcgaaccagttgcttggcccaaaatacatcagcccgggtacgtagaacgctgcggtgacggcgagcatgaccgcaaagaacgcggcgggtcgtcggcggccgtgcagcgaaaggcggttgatcggatctagcaggttgggcgagaggcgatgcaggatgcaggcaaccgcatcgaagccgagcaggacccagaggaaccagatcggcccgctcggccacgggcccttcgtgaccatatcccaccagtactgcgagaagccgatctcgggattgtgccggagcgaaatggcgtagtaggcgagcggaatgatcgtgagcgcgcagatcacaaacggcagcccaagccgcagcaggcgatctgccaaatagctccgcgctcccttacgggcgatgcttgaccacgcaaacaagcccgagaggaaaaagaacatcgccatgaagaagctgtcggtggcgagcacaatcatgtcgaagccgaagaagaacttcggatcggtgtggccgaaataggtgtagggaatgacggcgtgatgcagcagcacaaccagcgtcaggaaggtgcgggcgcggtcgagcgacaagttgcgcgccttgatgctcggcgcggcgtgagcctccgcggtcatcgtcgcagaatgtgacaccgtgatcatggccgccccgatggtgcttcaatccctgccggactttgccgccgggaacccgattcagcaagagttcgagccgtcccaggctctgatgcggtaggaaccggttcctcatagcgcagttagcttccgcgaaaaacctgaggggccgcaagagcggcagcaatttcggagctggccatgacgatcctgaaatgggcgttgatcttcctactcgtctcgatcgtggccggcgtgctcggtttcaccggcatttcagccgcctctgccgacatcgcccgcttcctgttctacgtctttgtcgcgatctttctggtgctgctggtactgggactcacgattttcagggcttagcgggctggcctccaagatctcaaatcacgccccggcttgacccggggcaatccatcgattgccgccaagaacgtggatggccgggacgaggcccggccatgacgacggcgcacggagcgcgctagcccacttcttcgatcttcaccttgtccggatagaaggccagatggccggtaatctcggccatggcggggaagggcgtctcataggtccagatggcgttgtccagcgtcttgtcgccggccgtgacgctgtaatagctcgcgtcccccttgtacgggcagtgggtgatacggtcggtgcgctccagcagggccatgttggtgtcctcccgtggcacatattgcaccgccgggtacttggcctccctcaaggtcagggccttgctggtctccgcgatcacgatgtcgcctgcggtcacgcgcacgcgccggggatttggagtgatggtgatggggtggtcgggccctggaagcttcatgatttcacgccttttcgatcaatctgccgcgcgcggcactttgtcgtgcctttatcctgatgggatcacggatatagtgccggaaggcgtgacctagaaggccgttcacgctaagtttgagcctgccggcgaggggaccccggcagcgattcgaaggctgagaccagaaggagcaagacccgaatgcccatggacgcccacgatatcgaggcgatgatcaaggcagcgatccccgatgccgaggtgaccatccgtgacctcgccggcgacggcgaccactatgccgcgaccgtgatctcggaatccttccgcggcaagtcgcgcgtccaacagcaccagatcgtctaccaatccctgcgtggccagatgggcggggtgttgcatgccctggcactgcaaaccggggtgcctggcgggcctggagtgtcgggcacgtgatccgaagagacgcctgagctgatcgcacaccgggataagacgatggctgcggacaatccacgcggcgcaatgttccgcgttatcgtgccgagccagcacagccgcgtggcctttgtcgagctgttcttcgatctcgtcttcgtctttgccgtcacgcagatctcgcacactctgctgcaccatttcacaccgctcggtgcggcgcatgtggtggtgctgttccttgcggtctggtgggtgtgggtcttcaccgcctgggtcacgaactggctcaatcccgagctgacgccggtccgcctcctgctcttcctgatgatgcttggcggcctcgtgctgtcgacgacgatcccgaccgccttcgaggggcgaggcctgtggtttgcgatcgcttatgcggcaatgcaagtcggccgcaccgctttctggctgttcgcaacaccgcggcatcgaacagccgtacggcacaacgcgatccgcatcctgacctggctctccatctccgcggtcctgtggatcgcaggcggtctgtcggagggagagacgcggctatggctgtggatcgcggcggtgagctgggaatacatcgcgccggctgcccgcttctgggtaccgaagctcgggttttcctcggtcgaggcgtgggctgtcgaaggcggccacatggccgagcgctgcggtctcttcgtcatcatcgcgctcggcgaggccatcgtcgtcaacggcgccactttttccgagctgacgtggaatgcggacaacatcctcgccttcgtctccgcgctcgtcggtgccatcgcgatgtggtggatctatttccacaagggcgccgaggccggttccgagcggatatcgaagtccgccgaatccgggcggctggcgcggctcgcctacacctatctgcacacgccgatcgtcgccggcatcatcctgaccgcggtctcggacgaactggtgctgaagcacccgaccgggcactccgacattcgcacgatcgcgagcacgatcggcgggcctttggtgtttctggtcggcaccatcctgttcaagctggccatccgcggcttcctccagctctcacacggcgtcggcatcatcctgctgctggctctgagctggttcgccgccgacctctcgccgctctggctgtcggtcgcgacgaccatgatcctgatcgcggtcgcagtgtgggaatcgatctcgctggggtcggcgatggaggaagcggaagggagttgaattgcgctcggagcagcccgggcaggcgcctcgtcctcggagacgaccgctgcgcggtctgctcaggacgaggctgatcagcgactgcgcccggtgaacctgctgccggcattccgtcctcataccgaggagcccgcccgggcgcgtctcgaaggacgtgtcggcacgcaaggacgcaaagctttagtccgccgcctccagcgcatgcaccgaaaacatcttggccgcatccgtccagctttcgcgaacgcgccagccggccccttgcgccagcgcggcgaagcggtcgatactgtatttgtagctattctcggtgtgaatgctctcgcccggtcggaacgagaagctggtgccgagcagccgtacggtctggctcttcttgctgatcaggtgcatctcgatgcggtgccgctcgcgattgtagatcgcgcgatgggtgaaggccgacagatcgaaattgccgccgagctcgcgattgatgcgcaccagcacattgaggttgaagcgtgcggtcacgccggcggcatcgttataggcgtcaaagaggatccgttcgtccttttccagatcggcgccgatgatcatctgcgcgcccttgccgaggatcttgcgcgcactcttcaagaagctctgcgcttcatccggctcaaaattgccgatggtcgagccgggaaaaaagccgaccttcggcatggatgcgacctgcgttggcagctcgaagggcgtcgtgaagtcggctgcgaccggatagatgccgagcgccggaaaatcccgcttcagcccgctcgcctgcgccttcaggaagtcacctgaaatgtcgaccgggacataggccgcgaacttgcagtgatccagcagcaggcggaccttcgtcgtggcacctgcgccgaactcgacgagcgccgcgtgctccggaatgatctttgcgatatcgcctccgcgctctctcaggatcgcaagctctgtgcgcgtcggataatattcaggcaggcgcgtgatcgcctcgaacaactccgacccggtcgcatcatagaagaatttcggagagagcctcttcggctgctgcgagaggtccgcgatggcttcgcgggcaaatgcggtggtctgctcgtcgggaagatgggcttcggccaaagcgctggcgtgcacattcatgatactctcctgaacgcgctgtccggcgcgcatttgtcgtcggatgaatctgagccgcgaagacgcagcgattcagatttgttgtttgagcatgatcttttcggaacccgcttctccggcatcatgctctattcgtaatcggcgagccgcagcccggtgaactgccagcgatggtgcggatagaagaagttgcgatagctgacacggctgtggccttgcggagttgcaagcgaggatccgcgcagcacaagctggttgaccatgaacttgccattgtactcgccgagcgcgccttcgacggcgcggtaaccggggtagggtgagtaagagctgcgggtccattgccagacgaggccgaaggcgtcgtcgagttgcttggtgcgggccgcgacttcccactccatctcggtcggcaggtgttttccggaccagcgcgcgaaggcatccgcctcgtaatagctgatgtgacagacaggcgcgtttgggtcgaccggcttgaggccggccagcgtcatcacctgccattggccgtcgacctcgcgccaatagcccggggcttgccagtcttccttgctggccgcggcgaaaccgtccatcagccacagcgttgcggttcggtagccgccgtcctgcatgaagttgagccattcggcgttggacacgagatggcgggcgatcttgacgggaccgacgagggcgcgatgtgcgggcttctcattatcgaaatggaagctgtcgtcgacatggccaacggtgtggatgccttcattgagctgcagccagtcatcgccgccgcggggggcgcccgggaagcaccagtccggctcataggccgggtagaccgggttctgcgcgaaggcgtgcaggatgtcggtaagcatcaactcttgatgctgctgctcgtggttgagcccgacctcgacgagtggggcgatcatgccgagcttgtcctcaccggcctcgcggaagaattcgacgacggccgcatcgacgtatttgcgataggcgccgatctcctcggcgctcggccgggtgatgtcgccgcgacggttgcgggcgtgccgcggaccggcgctgacgtagtaggagttgaacaggaaggcgaaatccggatggaagggccggtaccccgcagcgtgcttcccgagcaggaattgctcccagaaccaggtggtatgcgcgcggtgccatttcgtcgggctggcgtccggcatggactggatctgctggtcctctggcgacagcggcccggcccggcgttcggtctcgttgcggaccgcgagaaaggcctcttccagccgcttcgcgaggtcgtccgggcgcgaggacggtgacgaaagctgggtagcggccgtagctgaggcttgtttcgtcacgtttttctccagacagcacaagagaacgtcgttcgcgcaacccggttccgcgaccggggtccgtcctagataggggctccgttacggtatgaaagtcctctccggcgatgatattgatgtcgtcagcctatggacctcctgggcgccgattggcccggcgggcctgtcgccggcatttgacttcggatgcataacggtttgggctacatatataggcaggtatcgggttaaatcggtcgagccggcccgacgtgatcgatgggggctcggccccggaaggacatggacatgagcatcgcggaattcatcgccaacgaagtgaagtcgaacgacgtggttctgtttatgaaggggacgccgcaatttccgcagtgcggtttctccggccaggtcgtccagatcctggaccatatcggcgtcggctataagggcctcaacgtcctcgaatccgccgagctgcgcaacggcatcaaggaatactcgaactggccgacgatcccgcagctctacgtcaagggcgagttcatcggcggctgcgacatcgtccgtgagatgtttcaggctggcgagttgcagcagctcctcaccgaaaaaggcgtggtcgtcgcggcttgatgcatgacccggctggcgcgccggattgccggcgccgagctcgaggtcatcgtttccgacatcacgacactcagcattgacgcgatcgtcaacgccgccaacacgtcgctccttggcgggggcggcgtcgatggcgcgatccatcgggcagccgggcccgagctcgtcgccgaatgccgcatgctccacggctgcaggacgggcgacgccaagatcacgaggggttatcggctcaaggccgcgcatgtgatccacaccgtcggcccggtgtggaatggcggcacgctcggcgaggatgatctgctcgcctcctgctatcgccgatcgatggagctgtgcgggaagcaccagctgacctcggtggcattccctgcgatctcgaccggcatcttccgcttccctgccgaccgggcggccgaaatcgcggtgcgcacgacggtcgaagcgctggctgctgcgccatccgtcgctcgcgtggtgttctgctgcttcgccgagcccggcgcgaaactccatgccgaggcggttgcgcgacacagccgcccttgatgaggacgcgggggtctcaagccccgcgcacgatctcgcggacatacccgatcgtttcttcgatctggctcgcgttgacatccagatgcgtgcaggcgcggatgcggccgtccatcatcgcgagcgtgacgccgcgctggcgcagtgcggcgaccatcttgtcgccgggaatgccggcgccgtcgggcttgaagaacacgagattggtttcgggctcctgcacctcgatccctgagatctgcgacaggccgcgcgcgagtgcgcgcgcattggcatggtcgtcggccaggcgctcgacgtgatgatcgagcgcgtagatgcaggccgccgcgcagatcccggcctgccgcatcgagccgccgaggcgctgcttccactgccagaccgcatcgatgaaggcgcgcgagcccgccagcacgccgccgatcggcgcaccgaggcccttggagaagtcgatccaggccgaatcccagcccgcggtcatatcgcgcggagagatgccgcttgccacggtggcgttgagcaggcgcgcgccgtccatgtgggtgacgaggccgtgctgctttgcgatcgcgacgatttcatcgagcgccgccttcttccagatcgtgccgccgccgatattggcggtctgctcgacgctgacgacggtctgcggcggctggtaacgcgtgcgcgggtgcagagctttgcgaagagtctccggggtgaattgaccatcagggcccttcagctgcgtgacctggaagccgccgatcgccgcatgcgccccgccttcgcgcgcaatgatgtgcgcggtctcatgcgcgaggatctcgtcgccgggtcggcaatgcaccagcgtcgcggtgacgttgcacatcgtgccggagggcatgtagaccgcagcttccttgccgagcagatccgcaacgcgctcgcatagcgcgttcacggtcggatcatcgccaacctgttcgtccccgacttccgcccgcgccatcgcctcgcgcatcccagccgtcggtttggtttgcgtatccgacagcagattgatccgcaccggcggggcctttgggtcgatggggggaggggtgtagagcatcaacttgctcctgaacgggaatggcgctcgttgtggtcaacgagctctgggtggacgccgagcggcgtggcgaaaccgcataatagcaatttctgcctcggtcacgcgacaatcgatcagatgaggatgagggttgaccgccaagcggcggacgtatgcacgcgtcgtggttcgagctgcgcaggggtgggtctctagcaatgcaatgagagcgatgatgcgatcgtagtgcgcccaagggggcgagcgtgcctcgatgtaggtgagagtttggtcgatttgggccagcgcccgcttcgtatagcgatccttcacagcccgtgattggcccagatcgcgcggacttcgtcggcgctggccagttcgccgcgggcgatctcggcttcggcctcacaaagatctgcttcttccgccgccgtcagttgaattggtggctgatcgatcccggcaagctcaagcagtgttcgtgcgaggtcgtcttgttctgattccggcaggcccgaaatcttgctgaagccctcttccagaaggcgcttcatggtcaactccgtttgctggtgcatagcacggacgagttggcggatggagtggccgccaacaacgaaaaggccccggaaaccggggcctttgaacgtcggtccgccgaatgatcagcgcgaatagaattcgacgaccagatgcggctccatctggaccgggaacggcacgtcggagaggttgggcacgcgcgtgtacttcgcggtcatcttgccgtggtcgacttcgagatagtcgggcacgtcacgctcgggaagctggctggcttcgagcacgtgggcgagctgcttggagctttccttgacctcgaccacgtcaccgaccttgagctggtagctcgagatgttgaccttgcggccgttcaccttgatgtggccgtgattgatgaactggcgcgcagcgaagatggtggagacgaacttggcgcggtacacgaccgcgtcgagacgacgctccagcaggccgatcaggttctcgccggtgtcgcccttgaggcggcttgcctcgacgtagatgccgtggaactggcgctcgctgatgttggcgtagtagcccttcagcttctgcttggcgcggagctgcacgccgaagtcggagagcttgcccttgcggcgctggccgtgctggccggggccgtattcgcggcggttcacggggctcttggggcggccccagatgttctggcccatacggcgatcgatcttgtacttcgcctcactgcgcttagtcatcgcgtcctcttcaggtacagggtttgaggaaacgcgccctcctgtgtgacgggcttggcccggcaccgacaggtccgatccccaaagcttaagggacttgaccacgggtcgcgaaacgcttcgcgggccgaaatcggcccgcgagcaagcggcttttaggggagtttgggcccggctgtcaattctctacgcctgtcagaagcgcgaacccggaatctcgagatcccgggctcggtggcgcgcaccgcctctggataaattcggcgctttcagcctctcaccgcccggacgggcttggggacggccgcgcccaattccgcagcgatttcagtgttcaggacctgttccagccgggtcaggacccttgcaatcggggcggcgtccgtgaccctgtggtcccatcggatcacgacgcggatggtctggtcgggttcgacgagaccataactcacgacgaaggggccgggcgtgatcggatgaagctcaccgccgccataggcggcaaccgagctgaccccgaagctgccgaaccaattgccgcgctggcggccgaaattcagaccaatggcccaggacaagcgccgcaacggcagcggcaggcgggtcgcccgcatgatcttgcggaacattgggacgtccccgaccggagccgtcttgccaagccggatttcggcgtcgattgctgccagcgaaagggcctcaggagcggcgattcgctgaggcagcacgcattcctcgccctcgtccacccgcgcgatcgcgaccgtcgccacgctcttcggcagctcgtacagggccggccaaggccatttgacgtagacggtgcgcaggatcggctcgtccctcgcaaccagggcgaaagccttgacgaacatcgcggcccagcccgcgggcgccgttgcgcatgcgcgagcctccagcagggggcggatattgagcgagcgagagagtgaaacgaagggcacgcccatcgaggcatgcatgaggtcgcagatcaggcgacgccgcagcgatatggatttgggcgtcccgcgcatcggtcttcagttccaaatcaaagatcaaaatatgggcagcgagcggggcccgcccgctcgctctagcatgaaccaacccgcctgggggcggtcggttcgccgcatcacggcgccgccgaggctgccggcttgttaatgagctaaatctataatgatttcaatgtcttgttgcgtgattcttggcgaccgtcgcgcaaagtcgccttgagcatattcctccctgaactgcgaggccgatcacctcgttgcgcgattcagcgcttgatcccgtcgaatgccgccatgatgccgcgctggaacagcgaccagtcgaagccaagcgcgatggcgcggtagccgcggtcgatcagggcgttggcctggtcggcgctgcgcgccacgccgccgatcggcactccgcttctgaggatgccggcctctgcacgcgcgaccagctccagcagctccggatcgtccatccggccgcgtttgttgatggaggtggcgagatcgccggggccgatcacggcgacgtcgatgcccggcgtcgccatgatctcgtcgatgcggttgacggcatcgacatgctcgatggtgatcatgcagatcatctcgtcatcggcgctggccatgtaatcgggcatggattggccccagcggaacggggcgtggaaggggccccagagccggtcgccgccgggcgggtaacgaacgctacgcaccgccttctcggcttccgcgggcgtggtgatcatcgggaagttgatgccgaaggcgccgatgtccatcggggctttcgcgagccacggctcgttcgcggcgatccgcaccagcggcgtacatggcgtcccggtcgtcgcggcgatcatcgcatgggcttcggtcaatccgatcgggccgtgctcgagatcgacgatgatccagtcgagcgaacgcgccatgatctgcaccagctgcacgctcgggatggtcgcgatcgcgccgaaggcggggcggccctcgctccacaactggcggagacgattgagtggctttgcggggacggacatgggaggacctgcgcagagatgatggcggcgaagcctagcagcgcgcgaccggggcgcaaggtcaggccaccgcgcgcccgccgaagaacggcgtcagcgtggccgaaaggccatggacgcggttcgaggtgaagatcatctcggcccccgactgtgctgcgccgccgctgggcgggccgagcagatccgagacgcgtcgggcgatcgccggcgccggatcgatccagtcgactggccagggtgccagccgcttcagccgatcgagcagcagcggataatgggtgcaggcgagcaccaccgtgtcggtgcgcgcgctcgcgtccgcagcgtcgccgacgaagcagggcgcgagctcggcgaggatgtcgccgtcgctgaccggcttgccgccaagcgcggcctcggcgagcgaggcgagctcgggcgagccgaccagcgtcacctcgcaaccttgcgcgaaatcgcggatcagcgccttggtgtattcgcgtttcacggtgcccttggtgccgagcaccgagacgcgacgcgtcctggactgagcgcaggccggcttgatcgccggcacggtgccgacgaaaggcacggaataggccgcgcgcaaatgagagaggaccaaggtggacgccgtgttgcaggcgatgacgacgaggtcgggatcatgggtgccgatcaactcccccatcagcggcacgacgcggccgatgatctcgtcctcgctgtggtggccatagggaaaaaaagcgtcgtcggcgacgtagacgaaacgcgcatcagggcgcgcggttacgacctcacggagcaccgtgagcccgccaaggccggaatcgaacaccaggatggtcggagaattggtcacgtcgttaccctagcccggcatggttaccattcggtttttggggcggttttgcggcgccctgcaaggatccggacggcgggcgccacgtggccgtgcaacctttacgcgatcctgttcgtgctcgccgcccgctccgccgccagctgcttctgcaggcgatcgatgttttgcaggaggcgctggctggtcagcaccaggaagtagtagccgaactgcggatcctggaaatagatctcgagcagccggtcgtaggtgatcgtcagcacctggccgtcctcgatgcattcgaccgttccggtgcgccggttgtccggcgtgaggaagccgagctcgcccatcagcgatcccggcaggatctcgacgttgatctccttgaccaggaacttgccggtgacggtgaggaacatctccttcgccggatcgcgcagcttgaagaggatgtcgccgcggcgatatttgcgctcggtcatgaacggcttgagccactcgatcgacatgtcgccctcggtcgcatggcgcgccttcttgaccagcttcagcatctgccgcaggcgcaaggcgttgatcggaagcaacagcagatacagcaggaacgtggcgacgttggcggagagcgcgccgaacacggtgaagaacgcgcagccgatcatgttggcgacgcgcagcggcaccatggtccgcatcaagagggtggcgacgaagaagccggcgccgaccgcggcgaacagattggccagcgtgatgttctggacaaagatctccagcaggcgattgaagatcgcgtcgtaagtgacgtcgttggggtcgaggcccatctggaccaggatcttggcaatcctgagattgtcggttgccgcatcgaggatgcgatcgaggatcgatgaaacgtctgcgctgccggacggcatgatctggtccccgcgtaaggccttcagtcctggtcggcatccgtatagccgaaatcaaatgacgaccgcttgaatgacgcttccggccatgatgccgcaagaggcaaattctagcctgtccgggcgtttcggcaattgccgtggtttgcgcgtctggccgtgattcggggcagccccaggggcgtctcggacggaccggacgatcgaagcggcgggcgacgggtcccgttcacctacggcttggcggcgggttgcacgacctgctgctcgacaaggccaaggcgtcctggcagcgagccggcgcgcagcagcatggcgatgctgttggcctcgtcgagggtgaagttgccggcgatctggccggagccgccggtgatgggctcgcggatcacgggagcggagatcaccttgtcgtcgagcacgatggcgaagggtttgccgaggttctctgcagtcatgtgggcgaagcgccgcgtgccgcggccgttgaagcggaacgaggcgatcggctccttcgtgtcgctggtgaatcccgggccggcatagctgatgtcctcgccttcgagcgtgctgtccttggcgacgagatagggaagcttgtccttgaagccgagcaggacttccgtgcccgccggcggcgttcccgactgtgcctgctcggcagacatcgagaggtcgatcagacggaagccgaccttgaccttcttggcgaagatcgcggtgacgcgatcgggctccatcacccccggcaagaagatgcggatgcggtccgttccgtcgggctcgacattggccagcttgacgccggcgtccttgaggcgctgctcgatcatggcgacggaatcctcgacgaactcgcgcagccgcgcggcggatgcggcaggggtcggtgcgagcctgaccaggccgtctccgccatcggtgacggtgagcgcataggcgggcagtccctccgccgccgaggcgagcttgcgcgtgagctgttcgcgacctctgggatctgcgatcttcacctcgacgccgccgttgcggatcgcaaggcccgggaaggcgatccggccctcgcggagggtcctgtagacgtcgtcgcgcagatccgtaacgatcgcctcccgcaagccgtcggtgtccaccttgtagatgatgcgggacccgcccagcttctccatcttctcggcgacgaaggccgcgatcttggcacgcatcttgtcgaactgggcgtccgcgccgagagtggcagagggcagtgcgattgcgaataccgccgcgaacgcggcgatcagccgtgtgatgcgattccgcgggggcgtcgtcatgatgacctcaagtcttgcggcaggacgctggcgggcgaattcagtgccagttcttggtccacggatcagccgcggaggttcaagcgccacagtcggttggcaatggacgaacgctcaatcatccatcattctgcctgcgctcggccgaccatcggtcgagcctcgccgaaccaaaatgtcaaaagacaggggcgggggcatgcatctgagggaggacggaatttcatgggtatccacgcgctcgatcggctcatcggcaacgactatccggacctttcgacggacgcggaggtccgggcgttcgagcaggtcccctatgccgaccgcgtcgcggccgagagcacctacgatgcgatcaggctcggtgctgcgcgcaacccggacggcgcggcgatccagttcctgcaaaatgccgatcccgcagacacgccgctggtcgtgacgtatggcgatttcatcgcgcgcgtcacgcaagccgccaacatgttccacgcgctcggcgccgagaaagacgacgtcatcagcttcatgctgccgctggtgccggatgccttcgtcactctgttcggcgcggaggccgccggcattgccaaccccgtgaatccgctgctcgagccgcaccagatcgcggagatcctggaggccgccaataccaagatcctggtcgcgctcgggccgatgcccggcaccgacatctggcagaaggtcgagcagatccgccctcaactgaagcatctcaaggccatcgtgcaggtgttcggcggcggagatccggcgaagggtatctttgcctttggcgacctgatcaagcagcagccggcggaccgcctcgtcagcgggcgccagattcgcggcagcgacatcgccgcttattttcataccggcggcaccaccggcacgccaaagctggtgcggcacacgcatgccaaccaagtctatcaggcctgggcgctcaatctgctgctgaaggcgaggccgggcgcaaacctgctgttcggcatgccgctgttccatgtcgggggctcgctgacgcaggtactgctgacgctgtcgagcggcggctcgctcgtcgtgctgtcgccgagcggctggcgcaatccgaatgcggtgaagaacatctggcagctcgtcgcgcgctacaggcccgaagcgctgtctagcgtgccgacggtgctcgccgcgaccctcgcagtgccgcctggtgacgctgttatctccagcctgaagtatgcggcaggtggtggctcggcgattccggtcgcggtcggttcggcgatccaggagaaactgaagctacccgtgatcgaggtctacggcatgaccgagacatcgagcgtgcacacgctggcctatccgtcgcggccgatccggctcggctcggtcggccttcccatgccttacgcgcgcgtgcgcatcgtgcagctcgatgccgagggacgcctgatccgcgactgcaaaccggacgagatcggcgtcgtgatcatggccggccccggtgtgttcagcggctatctcaacgacgagcacaacaagggcgcgttcgtcgacggcgtgtgggtcaactccggcgatctcggccgcttggatgccgacggctacctctggatcaccggtcgcgccaaggatctggtgatccgcggcgggcacaacatcgatccggcgccgatcgaggagatcatgttccgccatcctgccgtcggcttcgccgcggtggtcggccagcccgatgcctatgccggcgagttgccggtgggctatgtacaattgaagccgggcgccaaggtcgaaccgggcgagctggaatcgtgggtgcgcgagcgcacgccggagcgtgctgcggttccggtgcaggtcattccgatcgatccgatgccggtgaccggtgtcggcaaggtgttcaagccgcagctgcgctgggacgcggcggagcgcgtgttcaccaaggtgctcgcgccgctggtcgagcgcggcatcgactgcaaggtcaaggtcggcgcccacggcagccacggatcaatcgcgacggtgacgctaacgggcctgccgcccgaccagcaggaggcagttgcgggcgaagtacacgcactgctcgcgccgttcgtgatgcggcacgaggtagtgcaggcataggtgagtacgatctccagccatgcacgatgcagcgatgtcgtcgcgtcgtgacctggggaagagatcctgccgccggtgactgcagcgacgacttggacccggttcacgcatcctgcgctggcccggggcaggctctttcttctggttctggcgatcgtggcgacgagatctgggccggagcggatcttgatccaggttaagaacaccgatcaagcggccgattcagacatttaccgcaaccaaagcttgcggccgcaactcgggagcagcggatcgattttaagttcatcttagatgcgtgagtgttcgcatcagaggcggagggagctctgatgcagtcattaggtcgttcggagagaatcggcgggttggcgggcctcgtgttgctgctttctgcggcgatcggcctgcagatcggtacggggggcctggccgcctatgtcgcgctgctgtgcgctggcctggtctggctcgtggcatcggcggaccggcccacgtcgacaacggtcctgaatcgcgccatcgagagcgtgcccgccggcctttgtgtgttcgcgccggacctgcgggtcatcgccagtaaccagcgatacgcgagcatatatggcttgacgcgcgctgacatcaaacctggaacgcgactgcgccagatcatcgaagcaaggaaggccaagcgcggcatttcggagcgcgtcatcgatgctttcgatgggttcgacgggatggcgacgtcggttcacgagctccgcgacggccggttcatctcggtctcacggcatccgatgaccggcggcggcctgatcgaggtgcatcgggatgtcaccagcgagcggcttgccgagatgcgggccaatgaaacgatgcaggaactgatcgagaagcagtatgccatcgatcaggctgtgatcgtcgcgatcacggacgtgaagggcatcatcaactacgttaacgacaatttctgcacgatcagcggctattcgcgcgaggagctgattgggcaaaatcatcggattctcaaatcgggcgtccattccaagcagctctttcgcgacatgtatcgctctctggcgggtggccatgtctggcgcggcgagctttgcaatcgggccaaatccggcaagctgtactgggtggataccgtgatcacgccgcaactcggtcccgacggcaagccagtcgcctatatggccattcgggtcgatatcacggcgcggaaagaagccgaagccaagctctcgtttgcggccgcgcacgattccctgaccggcctgttgaaccggtgtgcgctgttcgatcaggcaggaattggctcggagcctgacgtgcagccggaccgcttgagcgttcatctgatcgatctcgatgggttcaaacgtatcaacgatacgttcgggcacgacgtcggtgaccgtctgctcgaggcggtcgcctcgcgcctgcggtcgcttgccaccgaccgggatctcgtcgcgcgactgggcggtgacgagttcgccatgatccggcgtgtgggcgacggcgcagctggggccgcagtggatctcggtcgccgcatcgttgacgccatggcggcgccgttcgacatcgagggccatcagatcgacatcagtgcaagcgtcgggatcgtgctctgtccggagcatggctcgaacagcgccgatctcctgaagaaggcggatctcgcgctttatgacgtcaaggccgcgggtcgtcgcggccatcgtctctatcagccggcgatgctcgaggcgatcaagggagaaaaagtcctggaggcggagctgcgtcgcgcgatctccgcgcaggagttcgagctgcactaccagcccattctggacgtcgaaagccgcacggtccatacggccgaagcgctggtgcggtggcgccatcccgttgatggcctcgttgcacccgatcggttcattgcgctcgccgaacgcaccggtctcattcagccgctcagcgaatggatcattcaacgggcgtgcctggatgcggcgtcctggccgccccatgttcagctcgcggtcaacgtatccgctacccagttcaagcgcggcaatctgttcgatgtcgtgctgcaggcactgcttcgttcgggattgaacccgcgacggctgcagatcgaggtcacggaaaccgtcctgcttgagcagcagtccgagcaactgcagacgttccgacgcctgaagtccatcggtgcaacgctcgtgctcgatgatttcggcacagggttttcgtcggcgagctatctgacgaattttccgttcgacaagatcaagatagacaagtccttcatacagggcctgcccagacgggactgtgccgcggtgatcgcgtcggccgtcgtgctggcgaaggggctgggcatcagcgttaccgccgagggaatagaaaccgagccgcagctcgatcacgttcgttccatgggaattgatttcgcgcagggatatttgttcggtcggccggtaccctatcgccagctcaagtgcgcgaccgtgttcccggacggtccgggccgtgttctgcaaacggcgacggctggcgcaaattgaggctcaggctcagttcagcgcccccagtcgctgaagctcgcgcagattgaatacttcgagcacgccattcgacaaatctgcgacgcggcgttccctgaaggcggtgagcacgcggctgacatggaccggcgttagtcccacggcatcggcgacatgctgctggcggagcggtatgcgatagcgctcgtcgcggatcacgttgcggctcgcaatccgcttcatcaactgcaggaacagatgagcgatgcgttcctctgcggagaactggcccagcgcggcaatggtatcgtcggccgccttggcctcgtttgcgcaacattcggcagcggcccagaggatgcgcacgttcgtcgcaatgcgtgcatggacctccgtccgcttcattgtgctgacctggatcgctgtcagagccttgaccgaaaagtgcaggcgctcgtgaaggagcgagccggcgaggacatctcccggcagcaggaagccgagtatttgccgccgtccgttcggcatctggagaaaacgaaatccccacccggcgcaaaaaacatagatgtcgggagaggcctggttcgccgtcagcaactgtcttccggccgggaccacgagatggtgctgccaatcggatgcgccgatcgattcagacggtgccgcactttcggaaatcgcagcacagaatccgaaggagccgctcttcgggcaggttgcacaaggcgaaaggtccttcatattctgctgaagtcgccgctgtgctgccgcatctttgcggattctccggaggtcatggtgccactatgatccgtaacatttttgtatagtcaacagctctttttgttgcaaatttcggatggcagaaatctggaagcggcatgaagtgcgtcgcatcggatttgccctgcaacgatcagacgtcggagcgcgatgcggcattcttgttaacgcgcattattaacctgtatcaatttcggttcacctgcgttgctttgcgctcagccgagcttaaccgaatgagataataatagagttcattgtagttgccgcgtgattgttcgctttcagcgtttcgcctccgatgaattgcaaagggcgctatcatgacactcgcgcagaccccaaatgacgagaaccaggatcgtgacggccgcatgcgctttatgcgcgtcggcaccgagacaggcgaactcctgtgcgaattctggtcggtggccgagcccgcgctgccggctatcctcgacgaattctaccggcatgtattgagcgagccgcagcttgccgccttgatcggcgacgacatgcggaggctgaaaacggcgcagagttcgcattgggcgcggctgttcaacggccgcttcgatcacgactacatgcgtggcgtgcgcatgatcgggctgatgcacaacaagatcgggttggagccgcgctggtatatcggcgggtataatttcgtgctctgccggctgctggccctggccgttagaaaatatcgatggatgccgacgcggctggccagcgtgctcaccgccctcaacaccgcggtgatgttggacatagacattgccatctccgcatatcaggaggcgatgttcgcggagaagcagaagcagcaggaggcgattgctgcggccattctggatttcgacggccggatgaaggtcgtactggaaagactgggaagctcggcgaccggtctacagggcgttgccgatgtgctcagcgcaagcgcggagcgctcgacccggcaatcgagcgtggtggctgccggctcggaagaggcgtccaccaatgtgcaggccgtggcggcctcgaccgaggaactcgcgtcgtcgatcaaggagatcggccgccaggtttcggagtcgaccaggatgaccggcgaggctgtcgatcaggcagcgcgctccggtgccgcgatcgagagcctggccagggcagcgcagagaatcggcgacgtcgtcgagctgatcaacacgatcgcggctcagaccaatctgctcgcactgaatgcgacgatcgaggctgcgcgcgcgggtgaggccggccgtggctttgcagtggtcgcgtccgaagtcaaggcgctggccgagcagacggcgagggcaaccggcgagatcggccagcaggtcctctcgattcaggaggcaacgacagagtctgtcggcatcattcgccagatcggcgaaacaatcgccgccgtcgacgaggttgcgacggcgattgcggctgcggtcgagcaacagggcgtagccaccgccgagatcgcgggcaacgtacaggaggccgcgcagggcacacatgacgtatcgagcaacatcgggggggtaagccaagctgccagggagaccggcatcacggcctccgaactcctggcggcttccaaggagctatcgggccagacggatgtgctccgctccgaggtcgaagggttctttgcggcaattcgtgcggcctgactagccggctggcatccgcgtttcgacaagacgcgcccagaacgaggcgccgtggcccaaaatgttgtcgttgaacacgtagcccgggtggtggcactcgttgccgtcgcccatgccgaccagcaccatggcgccggggcgtgcttccagcatgaaggagaagtcctcggcgcccatcatcgggatgaacttgtcgttgacgcgatcggcgccgacgatgtcgcgggcgacatcggcggcaaggccggcctcgcgcgcatggttcatggtcaccggatacatccgcgtgtatttcgtctcggccgagccgccataggcccgcgcgacgctgtcggcgacctcgcctatgcgacgctcgacgagatcgcgtacctcgggatcgagcgtgcgcacggtgccgccgagctcggcgatctccggaatgatgttgaaggccgtgcctgagtggaattgcgtgatcgatatgacggcggacttcagcggatcgacgttgcgggccacgatcgattgcagcgcgttcacgatctgcgagccgatcagcacgctgtcgacggatttgtgcggacccgcgccggcatggccgcccttgccgtggaccgtgatctggatgttgtcggaggaggccagcatcgcgccgggcgtggtggcgaaatggccttccggcaggcccggcatgttgtgcatgccgtagacctcctggatattccagcgcgtcatcagcccgtcctcgaccatggccttgccgccaccgccgccctcctcggccggctggaaaatcatgatcgccgtgccgtcgaaattgcgcgtctcggtcaggtattttgcagcgccgagcagcatggcggtgtggccatcatggccgcaggcatgcatttttccggggaccttggacgcgtaaggcacgcccgaagtctccatgatcggcagcgcgtccatatcggcgcgcaggccgatggtcttgccagaggcggacttgcggccgcggatcacgccgaccacgccggtgcggccgacccccgtcaccacctcatcgcagccgaactcgcgcagcttgtccgcgacgatccccgcggtgcggtggacttcgtagagcaactcggggttctcgtggaagtcatggcgccaggcagccatttcgtccgagagggcggcaacgcgattgacgatgggcatgagggatccgcttctggaggtgatcttgtcattccggggcgatgcgcagcatcggacccgaaatctggagattgtggcgcgagattctcaggtgcgcaattgcgcaccctggttcacgcttcgcgtgccccggaactgcgaaaacatcagctctcgccgaacacgcgcctgaagatcgtatcgacgtgcttgaggtgatagccgaggtcgaactgctcctcgatttcggcatccgagagatatttccttacttcagtgtccttcttcagcagctgaaggaaatcgccttcgccgcgccagaccggcatggcgttgcgctgcacgagcttgtaggcgtcctcgcggctcgcgcccttctgcgtcagggcccgccgaacgcgctgcgaatgcacgaggccgccgagccggtcgagattcttctgcatgttggcgggatagacgagaagcttgtcgatcaggccggccaggcgcaccagcgcgaagtcgagcgtcactgtggcgtcgggacccatcatgcgctcggccgaggagtgcgagatgtcgcgctcgtgccagagcacgacgttctccagcgccggcgtcacataggcgcgcaccatgcgggagaggccggtgaggttctccgacagcaccggattgcgcttgtgcggcatggcggacgagcccttctgcccctccgagaagaattcctcggcctccagcacttcggtgcgctgcatgtggcggatctccaccgcgatacgttcgatcgaggaggcgatcacgccgagggtcgagaaatacatggcgtggcggtcgcgcgggatgacctgggtcgagatcggttcggggacgaggcccatcgctttcgcgacatgctcttcgacgcgcggatcgatctgcgcaaaggtgccgacggcacccgagatggcgcaggttgcaacttccttgcgcgcggcgatcagacgttccttggcgcgcgtgaactcggcataggcataagcgagcttgaggccgaaggtcacgggctcggcatggatgccgtggctgcggccgatggtcggcgtcatcttgtgctcgaatgcgcgcttcttcagcgcggccagcaccttgtcgaggtcggcgagcaacaggtcggcggcgcgggtgagctggacgttgaggcaggtgtcgagcacgtcggaggaggtcatgccctggtgcacgaaccgcgcctcggggccgacgatctcggcgaggtgggtgaggaaggcgatgacatcgtgcttggtttcgcgctcgatctcgtcgatgcgggcgacgtcgaacacggcgtccttggccttggcccagaccgtcctggcggcctccttcgggatggtcccgagctcggccagggcatccgccgcatgcgcctcgatctcgaaccagatcttgaaccgggtctgcggctcccagatcgaggccatttccgggcgggtatagcgggggatcatctgagggctccagcaaggtaggcgggcgacccgaggggggctgtgccggccagaatgtttttacgccgtgacttaacagagcggggagggcgaaacaaacggcgggagcaacgtcgcgggggatgatcagcccgagcaaggggctgagggcctcggccgcggctggctggtgggtcgcccgccagccgggctggctggccgcagcagaatcagcggtcaatcacgaatcattgactaacagatattgaaatctgtcagcgagacatgtatatccgttcccggacgctccgaccggcgtcccgcgacaagccccggggagcccgacatccgaagccaattcggatcggagggcggattgaagaacggggaccgtggacgaatggagacttaagacaatgacgaccgaaatcctcaatctcaccggcgtgattgggcagtggctcaatctgctggtggcgcgccagatcgcggcgcaggctgcaaaactgcctcattagggcataggctttccgaacgaccggcgagggcgcttcggaagcagcccgacggccggagtttctgagccccaaacgggaacatggtgctggcatgaatgaagccgttgttttgacgccggagcggatcctcgaggtcaccgaggatgtgctcaggcggtacggacttgccaaggccacggtggtcgacgttgcccgtgcgctcgatgtgagccacggcagcgtctatcgccatttcccgagcaaggcctcgctgcgcgaggctgttgccaagcgctggctggatcgcatcgatgctccgctgcgcgagatcgccggggagcagggtccggccccggcccggctcgagcgctggctgcgtacgctgttcgccgccaagcgttcgcgcgtcctcgatgaccccgagatgttcgacacctatctgacactggcgcgcgaggcttgcgctgccgtcaaatgccacaaggacaccatgatcgaccagatcgcggcgatcctgatcgacggcgagaagcagggcgaattcgctgtgggcgacgtgaaggagacggcgcgtgcgatcttcgatgcgaccgtgcgtttccaccatccggctcatgccgacgagtggaaggatgccgatctctcggcgcgcgtcgatgcgacgctgacgttgttgctgcgcggtttgaaggctgggtaggcccgcctgcacaacgggtgtcgatcaaccccttgccttgtgaagaacgccgccgttgtgagccggcggcgagatggtcgagcctctacgtgtccggaaagctggctcggcggatggcacgaccggcggactttccggatatgcattgaccgcgatttcgaccgcgtcctttgaccgctttcgcaggcgatggaatgtcagctcctgatcgagcatggggcagcggaagtggacaacggcggtgtccggcaggcggcagagctcgtcgatgagctcgcctactgtaatgaccgggggatggtcgactgctttacggtgacccttactcatgacccttgcctccttcactgccgtattaaccggagccggatcggaaccgttccaacttcattcagcagattgagaagattcaagggccggggtcagcggcagctctaccgccagattctcgtcaacccgcacgccgccgcgagccgcaccagttgcgcgtccgtgcgcgcgccggtcttggtcttgatgaggtagtgatagttctgcaccgtcttgatgctgagattgagatgcgccgcgatctgctcggtggtggcgccgccggcgaactggcgcaggatctcgatctcgcgttcgcccagttgatccagcgctgagccagccgacaagctgtcctcggccaggatatgcgcgatgtcgtcgctcatggcgcgctcgccgcgggcgacgttgcggattgcggtcacgacggcggagggctcgctgctcttggtgacgaagccgctggcgccggcgttgaaggcggcctttaccagcacggcctcgttgtgcatggtaaaaacgaggatccgcgcccgggggctgcgcgcgcgaatgttgcggatcgcctccagcccgctcgcgccgggcatcgaaatatcgagcacgacgacgtcgggatcatgcgccttgaacgcgccgtaggcgtccgcggcgttgtcggcttccgcgacgacatgcagatcgccctggctttccagcacgcgccgatagccttgccggacgatcggatggtcgtcgaccagcagcacggagatgcctgttgcagcaacctcgctcattcccggcctcacgcggcgagcgggatggtggcggcgacgctgaggccgcggcgcgccggcaggatcgacagcgatccgcccgcggccgtgacgcgctcgcggatgccggtcaggccgaaaccggccgactgcgccacacgggtcgcgtcgccgccgccgtcgtcctcgacccggatcagcagcgcatcatgctggccggcgcggcgctcgatgcgcaagctgatctcgcgcgccgcaccgtgacgcagcgcgttggtcagacactcctgtgccacgcgataggccgtggtggcggccggcccactgatgtcggtgaggtcaccgcgaaggtcgagctggatcgtcggccgcgccgcgctgtgcgagcgccagctgtcgacgaggttgacgaggcttgcctcgagcccgagttcctcgggcaggggattgcgcagccgcccgagcgcatcgcgcagcgaggccatcaggtgatgggtggcttgcgagatcatgcgcgcgtcctgcgcaatcgcggtgccgttcttgtctttcgtgcttgcggtttcgatcgtgttggcgaaggcaagaatggcggaaaggttctgcccgaattcgtcgtgcagctcgcgagcgagcgcgcgacgctcgtcgtcgcggatttcgatcaggcgccgcgtcagcgcggcgcgctgttcggtggcctcctccagccggccgccgagctcgccgacggcgctgccgatcatcgcaagctccatggagcggaagcgcggcaatttcgtccggtactgaccccgcgccatacgttggagcgcggtgacgatggcgcgcgctggagccagcgcgcgcgcgatcgcgatcgaagccagcagcgcgatcgccgccgccatcaggagcgcgacgtcgatcacgttgtggatgtactcccaggcgagcgagacggcggccgtggcatccggcgtcgcgaccaccgtgcccgcagccgccgcgcggggactgatgggccgtatcacctcggcgtggctgccaagataggtgggaacaacggcgacgaaccagtgcggtggcgccttcccaagcccctcgctctgaccgcagagcggcttctcgaatgccgcggctggctggaactcgacacagacgccgggcgagatcagtttcatcgtctcgagggtgcgccagtctggaacaggcagaagatgctcgcgcgccctgctgctgcgcaacaagagctctcgccaatacagcgcctgcagcgcctgcgcgacccgctgcgccgaggccgcagtcgcccgatcgacgctgcgataggcgtcgaacgtcgcccacacggtcgcggctccgaggcagagcacgacgataagcagcagacgggcgacaagctgaagcacgaggcgcatgcgatcacccccgacctttggtaaggtcagcctaacaacgccgccgcgccttgccaattgcaggaatgccgggaagtgcagctcgggcaaatttcccaagccggattgggcatgggtctttggaccgggagcgtcggctttgatctaatcggcgaggacacgtcgcaggccagtgcttggaagccaggagcggtgcagcatgagttcgatgacgattggatcgatcgcggggaccacaaccgacccgtccgagcgtagcgcgctcctgttctggatgatcttcaccgggctctcgatcttcgcggtcgtgctgctgtggcggttcgggctgatccacctgatgttgacctcggatcgcacctacatttccgccgtgatcgcggcgctctacgtcatcacgtgtggccactgcttcctgcggacgcgggcgatcgcgcgggagggagcggcggcgcggcgctgccgcgcagtgctggcggcaccggacggcagcaaggcgcttgatgccagcgcggcggtgctgccgcgcggactggtgcgcgaccatatccagagcctggtgacgaaagccgcggcgcaggactaccggccggtcgaccagacgctgctgttgcgaaatctcgccgatcgcttgcgcggctccaacggcttcggcgccttcgtctccgatacgttgatgaagctcggtctgctcggcaccatcatcggattcatcatcatgctggcgccgatcgcggggctggatgccgcagacaaggtcgcgatgcgctcctcgatgggggggatgagcgacggcatggcggtcgccatgtacacgacgctggccggcctcgtcggctcgatcctgatccgcatccagtactacatgctggacgccgcgacgcagcgggtattctcggacgcggtggtgctgaccgagacctatgtgacgccggtgctggagcgcaaaggttccggtgcgccgtcatgatggatgatttcggtctctatccgcgcgaggagccgttcgacccccttggcgtgatgctgttcaaggcgctccaggtgatcgcgttcctgtttttcctcgcgctgctcgcggtctcgccggatgcgaaggaaggcaagatcgactccaaggcggagttcatcatcacgatggactggccggacaatcatcctgacgatctcgacctgttcgtgcaggatcccgcgggcaacatcgcctggtatcgccaccgcgaggccggcttcctcacgctcgatcgcgacgaccgcggcggggccaatgatttcatcatcgtcaacggcaagaagatcgcctcgcccatccgggaggagatcgtcaccgtgcgcggcatcgtcgccggcgaatacaccgtcaacatctcgcatttccaggcaacgaccggcgagcccgttacagcgagcgtgaaggtgcagaaactcaacccgactgcgcaagtgatcttcgacaacaagctcgctctcagccacaccggcgacgagaagacagcggtgcggttccggctcgatgccgagggcaaggtcatcaatgtcgaccagcggccgaaatccctgctggagacgttccgcaacgtgcgcgccaacggcgccgatatcgatcccaaaaccggcgtgaggatgcgccgtgagtaatctgcaaacggtcgttctcagcctctcggtcgcctacgccgtgatcggagcgctgctgcttgtcgtgctggtctatgcgcggttgcactggtcgctgaaggcggtcgcggttgtcgtgaccagtgccttctatgtcgtcagcttcactgaaatgcgtgggctgctcggctgggccagctccgaccggatgcccaccgccttcaagctgctgcaggcccgcatcgtcgagccgcattcgctggaaggtgatcccggttcgatctatttgtgggtcgaggcgctggacgacgacaaccgcccgagcggcatcccccgcgccttccgggtgccgtatgacgacaggctggccgaaaagacccatgccgcgcagaacgagatcgcagccggccatcctcagggcggacgcgccgcggatttcggcggtggcgacggtagcctcatcgacatggtccgcgaatacgtgacgcccaagaccattctggagaccagcggcggggactcctcgaccggcgagttcaatgcgccgccggccggcgcacaaggcgccgtgttcaccccgctgccgccgccccggatgccgcccaaggacgagcggtaggctcctcgccaaatcgcggtgttacgctggcaaagggcgtggcgctggcgcatggtgttgacctccctcaaattggccttctcggccttcaatagaatctggagggtggagggtgcgtgcttctcgctgtcttctcggatatccacgccaatcggcaggcgtttgaggcctgcctgaaggcggcccgtgcgaagggcgcggagcagttggttctgctcggcgatttcgtcgggtatggcgccgatccggaatgggtcgtcgataccacaatcgagctcgttgcggagggcgccgtcgccgtgcgcggcaaccatgaccaggcggtcaattcgacggctgagaccatgaatgccgaggcgcagatcgcaatcgaatggacccgaggccggctcgacacggcgcagcggcggtttctggccgaattgccgatgatggtggaggatgagggcctcctgttcgtgcattcggaagcctctcaccctcagcgctggcactatgtccgctcgacgacggatgccgccaagagcctgatcgcaacgtcggcgcatgtgaccttctgcggccacatccaccgccccgcgctctattccatgtcggtcacggcgaagatgacgagcttcgtgccgaagaccgatgtccccgtgcagctgctgcgcggacggcaatggctcgccgtgctcggctctgtcggccagccccgcgacggcgatccatcggcggccttcgcgttgttcgacacggtctcttgccagatcacctattgccgcgcgccctatgacgtcgcggcggcggcaggcaggatccgcgacaacggattgccctcctggctcgccgaccggctgtcgcagggacgctgacaccgatgccgaaacctctggtcagatccggcgctgaaatcgatggttacactatcggtgaatgcgtgcatgccggcggcatggcgacgttgtggaccgtcacccatcccggcatcgacgtgcccctgctgatgaagatcccacgggtatcggagggcgaggacccggccgcgatcgtctctttcgagatggagatgatgatcctgccgcggctcgcgggcccgcatgtgccggcctgcttcggcaccggggactttgcccgccaggcctatgtcgtgatcgagcgcatcccgggcgccacgctctacaagcggctgcccgacctgccgttgccctatgacgaggcgcggcagctcgtcgccaggatcgcaaccgcgcttgctgatttacaccggcagaacgtgatccatcacgacatcaagccgagcagcatcatgttccgcgagtccggcgaggcggtgctgatcgactacggcctgtcgcatcacaaccacctgccggacctcctgcaggaagaatttcggctgccctacggcactgcgccctatatggcgcccgagcggctgcttggggtgcgcgacgatccgcgcagcgacctgttctcgctcggcgtgctgctctacttcttcaccacgggtgtgcgccccttcggcgagggagagacgctgcgcgcgatgcggcgccggctgtggcgcgacccgcatccgccgcgcaaggtccgcccggactatccgccctggcttcaggaagtggtgttgcggtgcctggagatcgagccggtctggcgttatccgacggcgtcgcagctcgccttcgatctcgcccaccccgaccaggtcaagctcaccgcgcgctccgagcgtgtgaaacgcgacccgctcagcgtcgtctggcggcgtcgcttcaaccagggcgccatggcgccgcgcgcgaaatccgatgtcgccgctcagatcgcatccagcccgatcctggcagttgccctcgacgccatggagggcgcgccggaactcaacgaggcgctgcgcgtgaccactgagcgtatcctcgcgaccttgccgtcagcgcggctggcctgcgtcaacgtgctgaagctgagccggatcgcgatcgaccgcagcctggacgaggaggggtcgaacaagcatatcgaccgtctggttgcgctccggcattgggcaacgccgctgaagctggacgagagtcggctgtcggcgcatgtgcttgaagcggtcgatcccgccgccgcgatcctggagttcgccaaggccaaccaggtcgaccacgtcatcatcggcgcgcggcagcactcattcaggcgcatgctgctcggcagcgtgtcggccaaggtggctgcggaggcgacctgcaccgtcacggtggtgcggccgccgcggctggccggggacgtcggcgggacagatgccaacgaggcgaccggatagggctgcgtttccgaacggcggatcaggccgcgtgggcggactgtgcggcgcgcttgcggcggatgggccaggagaattgcgggacgggttcgccgtgatccgcgctgccgccaaaatactggatgatctcgctcgcaactgaacaagttacgtgacgcggacgccttggtcatttccttcaggcagttcgggcaatgcggtttcatgggcggtaggaaaaaagaagtctcagtgtcggtgttgcgaggcaaacgaatgatcgaggtccgaattgtcgagcccggcatcgtcatccagcgtgccatcggcgcgctcgaagcgaccgaagaaatcatcaaggttcggatgcgggcgacgcggaatacggcacctgcgcttcggctgacgtttcacgagtgcgagccgcatggcatcacttccggcgacgatgaaggtggatgatgcgggcaggggatgcgaccttcaccggtcgcgccacgtggagactgcgagctgcaatcgccgcattgactcctaaccacaacgctacgccagtccaaatcagggtcgtcgtcatgatgtgctcccgtcaaaagcaggcaggagccacttgcggtgatttgcacgaatcagtgaagtccggatgagtacggaccaaggctaaagtttcaagctttgcgcgttgcaacacccgtagaacccgcagttctttccaagtgcggccgacgtattttgccggtgcgcgcatcgtcgaggatatcccggatccgtggtgcgtctcggacaaagcgaaagccatagtgcccggtgtagtcggtatcgggcgaacgggtcgagcgccctgacgcaaagttgaggtggccgacgccgctgccgatgtcgaggatttcgaacactgcatccatggcgtcgaacgaagtaggggtcacggtgcgtctgctccaggccgtgcgcacgatcagcgcgcggcggtcggtgatcacataaagcgtctgcaggtcttgcagcagcatcacgaacggagctgcaaccatcccgactccaatcattgcgagaggctgggtcgcttggtcgatccaaccgttcccgacggcgatgacggtcagcagcaaccagggacatccgatccaccagagaaatcgccacatggccgcgcgggcgatgccgtcgggctgcccctgccagaccacttgctctccatcctgcagggcctcggcgagaagacgacgcagcccggcagaaaacagagtggcgcggagttcatccattgccgttggtcgcagcggccgcagctgcggttcggacagccttggtctcagatcgcctcgccgcgtgccccaagtgccgcgtgacggatcgcggcgatattggctttgtaagcgtcctgcgtcccacccctgaacactgaggtgccggcgacgaaggcgttggcgccggccgccgcgagcgcgccggccacgtcggggccgacgccgccgtcgacctcgatgtcgatcggacggcccgccgtcatcgcgcggatgtcgcggatcttgccgatcgcggaggggatgaaagcctggccgccgaagccgggattgaccgacatcaccagaacgaggtcgacgaggtcgagaacgtattccagcgcgctgatcggcgttgccggattgagcgagacgccggccttcttgccgagcgcgcggatcgcctggagcgagcggtgcaggtgtggaccggcctctgcatgcacggtgatgtggtcgcagccggccttggcaaaggcctcgagatagggatcgcagggcgagatcatcagatgcgcgtcgaagatcttcttcgtgtgcggacgcatcgccttgatgacatcagggccgtaggaaatattgggaacgaagtgcccatccattacgtcgaggtggatccagtcggcgcctgcggcgtccacggcgcggacctcctcgcccaatcttgagaagtccgaggccaggatcgagggcgcaatggccagggggcggggagcgaaggcttgggtcatggcgcggttttcccatggcaggcggacgacgaatggcctcgcctaacatgggcctccgcggccggcaatgcaggggagccgcgcttcctgtgggcggaaatttctgccgcgaccggcaccaattgccgatgttcccgaaactgcaaagcgtggtggattgcggatttcattgagcttttcccgatggcacgtcgcttgctgatctcacccgacagaacattggccgcggcatgccgcatcggttggagttgtgcaatgttgtttgcccttggcgccgtctccattgcgctcaatgcgatccagtcgctgacgaactcgaaatcgtcgtcggcggcggacaaggcgggatcggcgcaaggtgcgaccaatccgttcgcgatcgacggcgccagcagcacgtccggcggtgcgagctcgccggtcaattcgggcagacatccgcagatctcgccggagacgatgaacgcgctgttcgcggcgcagagccaatcggccgacggctcggcttcgtcgaactcgacgtccccgacgtcgaaaggtcgggaggctgcgctgaaggatctgttctcccagatcgatgcggatggcgacggcaagatcaccaagtccgaattcgaggacgcgctcggcgccgggggcaccaatctggcgcaggccgaccacgtgttcgcgaagatggatgcgaactcggacgacagcatcaatctcggtgaaatgaccaaggcgttgacgagcgggcgtcaaggccaccaggcgcaaggcgctgacggctcggctgacgcatcgggcggtgggtcggagtcctcgtcaaaggcgagccgcgggtcgacctcgacgacgacgacgaatgccgacggctcgaccaccaccaccgtcacctatgccgacggcttcaagatgtcgacgacggtgccgggcgcacatcgcggtccgatggcgaacggaggcggcaattcgccctatgactggtttgggcagatgatgcagcgccaggcgcagtccggttccgcgaccgcgtcttcttcgatgtcgataagcgtgtgatcaggactcggtctgatccgcgtagtcatgcgtgatctcgcgataggcaaagcggtcacggatgtgcaggttgaagaaagtgccctttgatcgcgcttcccggaacgcggccgcgacctcgggcggaacgtcctcgtagacatagacccgtccggtgacgaaagtcacctgcagctcgcgtgtgtccggggcatagcggaagaagcggatcacggaagacggcatgacggcgcaccttgggctccgtcgggtaacgccgtgcccgccgcttcgtttctagtcgtatctgtccttccacgccggtagtgcccctggaaatggcagtgcggtcgcgttgtacacgccgcttgcgatcgcgcgtgcgacaacgttggcagcgaccatgccgagctcggtgagctccaccagcggctcgatcggcttctcgcaggtggccgcggcgaacagcacgtcgccgtccagcggagcgtgcaccgggtagatcgcgcgggcaaatccggtctgtgcgatcatcgcgagccgcttggcctgggccttgctcagaatcgcgtcggtgacgacgacgccgatcgtggtgttctcgcgctcgctggcagccggcccgcccttgatgcgcatcgccagcatgtcgggcgtgaacgcagacggcagaccgcgtccgccgaactcgccgttttcctcgaacggcgcggcccagaaccatgggccgttgccgatggtgacgctgccgacggcgttcaccaccatgatcgcggcgaccttgaggccgttcgtggtcacggccgatgccgagccgatgccgcccttgaaggtggcggtggtggcgcccagcccggcaccgacgctgccgagcgcgaagtcggtgccggcggcggcagcggcggcatagccgagatcgcgatatggcgagaagcggccccaggccttgtcgccgccgttgaggaggtcgaacacgatcgcccccgggacgacggggatcacggcctcacggatcctgaagccgcgcccctgttcggcgagccaggcctgcacgcccccgccggcatcgaggccgaaagcggagccgccggagagtgcgatcgcatcgacgcgttcgacggtgttggccagatcgagcagtgcatcctcgcgcgtgccgggaccgccgccccggacgtcgatcgcggcgatcgcgggagaatcgaagatgaccgcggtcgcgccggaagcgactttcgcatcttcggcatgaccgacccggacgccggcgatgtcggtgagcaggtttttcaagacagcctcgtgaactgagagcaatttgcgatctgcgatagcgcagcgatggcgcaggctcaactggcgagcgccgtcctgagcattttggcgagctcggacttgcggtagggcttggccagcagcagcacgccggaatcgagacggccatgatggacgatggcgttctccgtgtagcccgaggtgaacaacgtcttcaggttggggcggcgcctggccgcttcgtcagcaagctggcggccgttcatgttgccaggcatgatgatgtcggtgaagagcaggtcgatggtcgcgtcgccgtcgatgatcttgagggcctcggcgccattggcggcctcgagcgcggtatagccgaggctcctgacctgcgtcacgacatactgccggaccagcgcgtcgtcctcgacgatcaggatcttctcgtcacccccggcgatgggtgcgttctggagcgcctcgaactcggtctcctgcaccccggtcgagcggggcagatagatcttcacgctcgtgccgtggccttcctcgctgtagatcttgnnnnnnnnnncgactgtttgacgaagccgaacaccatgctgaggccaaggccagtgcccttgccgacctccttggtggtgaagaagggatcgaagacccggtcgatcagctctgcgggaatcccgctgccggtgtcgctgacggcgatcatcacgtagttgccggcggccacgtcgggattcatgctggcatagccgtcgtcgaggaagatgttgcgggtctccagcaccagcgtgccgccatcgggcatggcgtcgcgcgcgttcagcgcgagattgaggatcgcggtggacagctggcccggatcgaccagggtcggccaggcatcctccgtgagctgcggcatgatcgtgatctgctcgccgagcgtcggatgcaagagcttggcggcatcgagcaccagcgcattgacgtcgatctcgcgcggccggagcggctgcttgcgggcaaaggcgagcaggtgcttggtcagctgcgcgccgcgctcggccgcgtcgtcgatcagcctggtaatagcggcgagctcgggccggtcagccacggcatcgctgagtatgccgatcgtgcccgtgatgacggtcagcacgttgttgaagtcgtgggcgacgcctccggtcaactgaccgatcgagtccattttctggacgtgccggaactgggcttcggcagcctgcttgtcggtgaggtcccggccgatgaagaagtggcgctttaccggctcggaccaagtgcccatccagttcagcgcgacctcgtggccgtcatagtgatagtagcgcgcctcgaagctgcgcttggccgcgccgcgacgggctgcgcgcatctcgttccgcgtcttatcgagatcgtcgggatgaatgaattcggtcgcgctgtgcccgaccatgtcctcggggctgtagccgagaatgttcttcacgctcgggctgacctgcacgaaattaccatagccgtcggtgaccaggatcagatcctgcgatgtctcgaagatgcgctggcgttcctccgtctcgcggcgcagcttctctctcgcctgcttttcttcggtgatgtcgtgggcgatcttggaggcaccaatgatctctccctcatcggtccgcagcggtgagatgttgaggacgacgtcgagcgggcggccgtctttccggattcgggtcgtctcgtgctgtgcgatcgactcgttgctggcgatacggttgaggatgctcctgacttcgcccttgcgatccggcggcacgatgatgtcaatcgacttgccgatggcctcggcggcggaatagccgaacagatgctcggcggccttgttccagccggtgatgatgccatccagcgatttcgtgatgatggcgtcattggacgactcaatcactgcgccgtacagcgcgaggcgcttgccgtaatagtcgcgctccgatgccgattgctggcgcagcctcccgaggaggctcactgtgtgcgcctggagacgcacgttctcgatcagaagtaccgccagcacgaaggtcgccgcggcgaggccgtagagccggccggcatagaagccgagatcgaaccgggcgacgttgacgatcgccgacagcgcgatgtcgaacagccaggcgcacatgaccaccatcagccagacgtcgatcaccgaatgcggtctgcggaaccagagcgagaccagcgccgcaaagctcagcgaccacacgaacgacacgactccgatcatggtcggcgtatagtggccgtcgcgcagcagcaccggcagcagatcgtgttgggcggtgacgatccaggtgaagacggccatcgtcgcgatgacgccgagcacactggcgtagatcgcggtgcttgccgcgccgcggacgcgagggccaccgtccttttccttcagccaggcataacccatgacacacaggggaaagccggcgtgccagatcatgtagagccagaccgtggtctgcccccctgcgccaaagagccccgtcggcgcaaacagtccggggaaggtgagggcatgaaccagggccgccgcggctgtgaagagatagccggtcgcgagccacagcagcgcgcgtgtccgcaagaccacgaattgtgacagcagcagcacggcggtgacgatgtcgctcacggcgagtgccgattggtagcttgcgacgaaggccgggacgggcaggagaggggtccccgcgaagggcacggccgctacgaacaggagggaggacacgcccacaatcgtcaatgctgcggtgcggtcggccgaagtggcgggcagggtcgagagagatgtgcttcgctcgatcgtcgcgggcacgtccacctctcgtggggcggtcttgagcgagtcgggcttgtgcatctccgctggtctcattcggctggacagtccgttcatgggtgcgggttctgggcgcgggtctggaacagaccggtcacgactcaaccgaaggttatagcttacctaatctccgtgggagctcggaacagggatcaggtaaggtgcgctttactgggcggtgccacaatgcccctccgctgcggcgggttccaggtctgagtcagatgatttgatttcgatatcgggagttccccatgcctcgcgttctcatcatcgatgaccagaaggacgtgcgcgcgatgatcgcgatcgtgctccgggttaatcatttcgaggtggtggaggccgaaagcggtgcggcaggtctgaaagccttcgcggaaagcgcttgtgacgcagcgatcgtcgacatcttcctcggtgacgccagcggagccgacgtcattgccgccctgcgcgaacacgcgccggcgctccccgtcgttgcggtgtccggaatgacgacacttgatttcatcgatcaatcgcccagcctggccaacgtggtctgcctgcaaaagccgtttcggccgagcgatctcctgcaggcattgcggaatgcccaggccgcgaccagcgcgctgcccgccgccgtttgatcctgccgcaagaaaaaacgccccggcttgagccggggcgcggcgttgattgataacggcccaaaggctcgtctagcgcgctcaggtgccgttgccgctgatctcggcgtagccgcccttggcatcccatttgtagacgacgtagtcgatctgcttgatgtcgcccttggcgtcatactcgattgggccgatcacggtgtcccatttgccggccttcatcgccgccatcactttcttggcgtcggtggtgccggccttcttggccgcctgcgaccacacctgcatcgccgcataggtgtagagggtgtagccctcagggtcgatgttcttggccttgaaagcctcgacgatcttcttcgcggtcggcttgttgcgcgggtcggggccgaaggtgaacagcgtgccttcgccggccgggccggtgatggaggcgtactccttgtcggcgagcgcgtcgccggccatcagcacggtcttgaggccctgatcgcgcatctgacgcaggatcaagccgctctcctgatgatagccgccgacatagacgaggtcgatgttgtcgcgcttcaggcgcgagacgatcgcgttgaagtccttgtcgcccttgttataggactcgtacatcttctcggtgacgccggccttgttgagcgccttcttggtctcgtcggcaagacccttgccataggtggtcttgtcgttgagaatcgcgatgttcttgcccttgtagttcttggcgatgtactgcgcggcgatcaggccctgctgatcgtcgcggccgcagacgcgagccacgttccagagcttgcgctcggtgaacagcgggttggtcgaggccggcgtgatctggagcacgttgccgtcggcataggcttccgaagccgggatcgacgacgacgagcaatagtgcccggccacgaagggaatcttggcgccggcgatcttctccgcgatcgagcgggcctgcttcgggtcgcaggcgtcgtcctcgaccgaaagcgcgagcttcttgccattgacgccgccggcggcgttgatatcggccacggccatctcggcgccgttcttcatctggcgtccgaaggcggactcgccgccggtcatcgggcctgcgactgcgacggtgacatcctgcgcgaatgccgcgctcgacagggcgagcgatgcgccgaatgccagaccgatgagcttcagtgatttcatgagatacctcgcgggtggtcgcctgtggaagttgccgggcaggcccggttcaaaccggcgccattcttgaatgaatccggcgagaagtcaccggcaaaatacgggcattgcggagatatcgcgccgcatccggccgcactcgtcggccttcggtctcgtcagccgtggcgaccgccttccagataggcggcgcgaatctcggggcgctgcagcagttcggtgccggtccccgccagtgtgatcaggccattgaccatgacataaccccgatgagcgagcttgagtgcatggttggcgttctgctcgacgatcaggacggtcaacccgtcctgccggttcagggtgcggattgcgtcgaagatctgtcgcgctatcagcggtgcgagcccgagcgagggctcgtcgagcaggagcagccgcgggcggctcatcagcgcgcggccgatggccagcatctgctgctcgccgccggacagggttccaccgcgctgggcgtagcgttccttcagacgcggaaacagcgtgaacacgcgttgcagtgtcgtctcgcgctcagcctcggtgcagtcggtggcgtccgcccccatctggaggttttccgccacgctcatgcgcgggaagatgcggcgcccctccggcgattgcgcgatccgcaggtgggcgatctcgtgagtgggcacgtgggtgatgtcgcggccttcatagaggatctggccggcgcgagcgcgcggcttgccgaagatcgtcatcatcagcgtcgacttgccggcgccgttggcgccgatcagcgccacgatctccccggcattgatctcgaagtcaacgcccttcagcgcctcgatctttccgtaggcggcgcgaagaccgcggatcgcgagcagcggcaccgaggtcacgacgggctctccatcacggctacggcctcgtcctcgtctgcgccgagataggcggcgatcaccttcgggtcgttgcggacgtcgcgcggcgtgccttccgcgatcttgacgccatggtccatcaccacgacgtggtcggagatctccatcaccaccgacatgtcgtgctcgatcagcaggatcgaggtgccgagttcgtcccggatcgaaagcaggagctcgctcaaggccgcgctttcgcgcgcgttgaggccggcggcgggttcgtccaggcacagcagggcgggctcggtgcacattgcgcgcgcgatctcgagccggcgctggtcgccataggcgaaattgccggcggcatcgtcggcgcggtcgagcagattgacccgcttcagccagtcggtggcgaggtcgattgcgcgcttttcggcgtcgcggtatgcggggacgccgaggagaccgaggagcgtgtaacccgaggcgcgcatcaaggcgttgtgctgggccaccatcaggttctccagcgcggtcatgccgggaaacaggcggatgttctggaaggtgcgcgcgaccttggcttgcttggcgatgcgaaaatcgttcagccgctccagcgcgatcactctgccgtcgtcatgggtgaggcgaatggcaccagcgcttggcttgtagaagccggtgatgcagttgaagacggtggtctttccggcgccgttcggcccgatcagcgcggtgatcttcttgcgctctgccgacaatgacaagtcctgcacggcgacgatgccgccgaagcgcatggtcagccgctcgacgctgagaatcttgtcgccgctcatccgtgcccttccttgacgaggtcggaggagatcgcttgcgccttggtcagatacacggtgggtgcgcgatggccgaccaggccgcgcggccgccagatcatgatcagcaccatggccatgccgaacaccagcatgcggtagctctcgaggccgcggaacagctcgaatccgccgatcatggcgagagctgcgagcgccacgccgagctgcgagcccatgccgccgagcacgacgatggcgaggaccagcgccgattcctggaaggtgaaggattccgggctgatgaagccctggcgggtggcaaagaacgcaccggcgaagccgccgaacatggcgccggttgcgaacgccgtgagcttggtggtcgtggtgttgatgccgagcgcgcggcaggcgacctcgtcctcgcgcagggcttcccaggcccgcccgacggggagccggcgcaggcggatcgtcacccagttggtgaccagcgccagcgccaggatcaggtagaacaggaagacgatgcggtgggtcgccgaatactcgatgccaagccttgcggcgagcccttcatcgctgttgtccagcgggatgccgaagaaggagggacggggaatgccggagacgccgttcgggccgcccgtcagatcctgccaattgatgatgacgagccggatgatctcgccgaatgcgagagtcacgatggcgagatagtcgccgcgtaggcggagcacggggaagccgagcagaacgccccagaaggcggcgagaatgccggcgagcggcaggcagatccagaacgaccagccgaaattggtggcgagcagtccgtaggaataggcgccgaccgcatagaaagcgacatagccgaggtcgagaaggccggcgagcccgaccacgacgttcaatccccagcccagcatgacgtaggtgagaacgaggatcgcaaggtccagaatgtagcgctggtcatagaagatcacaggcaccagcagggtgaagatcaaaagcgccggcgcgagatagcggccgatgaaggatatgccgctctgcaccgccggcggcaccagcttctcggcgccggtcgaaccgatccattgccgcaagagctccatcacgatcgagcccccgaacacgacggcgacgagggcggcaacctctccgaatcgcgtccagtaggtgagctggccgtccgggcccgcctcggtgcggatgccgaccatcagcgagaacagcaccagcgcgacgagggcgttgatgaaggctgtcttgaggagggccgggatgcccgttgcaggtttggccgtattggtcgaagggattgtcacgcggccggtccgtcagactttttcgacttcggggcggccgagcaggccggtcggcatgaagatcagcacgacgatcaggatcgagaacgccgcgacgtccttgtattcgaccgagaaataggccgaccagaacgtctcgatcagaccgatcgcaagcccgccgagcatggcgcccggcagcgagccgatgcctccgagcacggcggcggtgaatgccttgatgcccgcgacgaagcccatgaagaaatcgacgaggccgtaatagagcaggtacatcaggccggcgaccgcggcgagcgcggcgccgatcacgaaggtcatcgagatggtgcggtcgacgtcgacgccgagcagcgccgccatggtctggtcctgctcgcaggcccgcatgtcgcgcccgagccgggtgcgcgagaccagccaggtgaagatcgccagcaacacgatggtggtgatgaccaccatgatctggatgttggagagctggatgacaaagccgtcctggctctcatgcagcgtgtagccgccggtgatgaagggcgggatcggcttgacgcgcgcgccttgcgccacctgcgaatagttagtcagcacgaaggacatgccgatcgcggacagcatcggggcaagacggaaggaatgacgcagcggccggtaggcgatgcgctcgatggtccagccataaagcgccgtgattgccatcgagaccaggagcaccaccagcaggatcagggggatcgcggtgaggccgagcgagatcaggatcaggaaggtgatcagcgcaatgaagccgccgatcatgaagacgtcgccatgggcgaagttgatcatgccgacgatgccgtagaccatcgtgtagccgatcgcgatcaggccgtagatggagccgagcacgaggccgttgatgagctgctgggcgaaataatccatgggctgccgtaccacacctgacgcaggctcaaagggagctcttcgagagagagttcttgggccccggcagcccttgagcgttcttcgggttttgtaacaggagggaactggcagctgcaactggcccggtctccacctaaaggcttgtacagagatcattttgggtcccggggttcccgagattgcgaggaacccggttccgcaaggggccaagatgagatgccagccgttgtctcgttccagcaatcgggtcagcagagtcagaacccccggccagcagagcccaggacagcagcagggcggcggtcagaaacctgggcagcaggaagacccgcgtcagggcggtcagctggcagcagggtagcccgcggtcagaatatgaaggtccgggagcccgaagatgagagcaccaggagtgaggagacctggcccgccgaaagctggggcctcttcttaggggagtttccggggcagctcgaatagccgagcgcggactctcgagattccggtcatggtgctgtgcaccatctcaaaatgacgacgtccgcggggcagttaaggtaaacaaagggtttaaattgccgccacaggccgatgcgagttagctccggcgaagccgccgccttttcgtcaaggcatcggcaaaccaagcgggaagcggcatgttcaggaattggcggatcggctcggtcaacggcgcgctgctggcggcctatttcattcccgtatggagcctcgtcgccttcaacatcattgtcgctcccgtgcacggcctttacgagcggccgagcgttgccgttgcgttgtacctcagcgaccaccttcagatggcggggatggacacggtccgcgccgcctggctgctcgcgctggggcgggtgacggtggtggcgttcttcgcgatctacctcgtgctgctctgcattccccgaatccgcaggaacggcggcagcgacgaggcgctcggcatcgcgctggcgatcggcagcctaatctcgtttgccagcatggtgatggcctccaaggtcggcgagatggcagcgctccggctgcatgccaccgagctcctgctcttgctcggagccgcgatcgtggtcgtgatcgagaagccggcggcagcatcgaagaccgcggagattgccgccccgctaggtcttgagcaggccgagctcctgcacaatcgctgaggcttccttcacggcgtggttcgccgccggcacgccgcaatagatcgcctgctgcagcaggatttccttgatgtcgtcgggcgtgaagccgccctcggcgagcgccgcgcgcacatgcaggcggaattcgtcccattgcccgagcgcgaccatggtgccgatcaccagcacccgacgggtgcgctcgtcgaaatgcggccgcgtccagatttcgccccaggcgtagcgcgtgatcaggtcctgaaagtcggtattgaacgcattgcggttcgcgatcgacttgtcgacccatgcattgcccagcaccttgcggcgcacgttcatgccggcatcgcggcgcttctggtcgtccatgtgttttcctccttcgccattgcgaggagaagcggcgaagccatccagacgtctccgctgcgggatctctggattgcttcgctgcgctcgcaatgacggctgtggttagcgctgcgtcaggaaccccaccaccgcatccgtgaacgcgtgcggctgctcgacgttcgagatgtgcgcggcgtcgatgatggtcatgctggcgccgggaatgttggagcggatcagttcggccgccgagatcggtgtcgccgcatcgtggcggccggcgatcaccagcgtggggctcttgatcttcggcagtagcgcgcgctggtcgagtgtcgacagcgcctcgcagcaggcaaggtagccctcgaccggggaagcaagcagcatcgacttcatcttcgcggtgatctcaggctcgcgctcgcggaaatcctgggtcagccagcccgcgatcacggcatcggcgacggcggcgatgccgccctccttaaccgccttgatgcggttgtgccagtttgttggatcgggatagtagcaggacgtgttggcaaggacgagcttgcccatgcgctccggcgcgttcgcgcccagccattgtccgaccatgccgcccatcgacagcccgcaccagtgcaccttctcgatgttgagatcgtcgaggatcgcgagaacgtcgcgaccgaagcgctccatcgtgtaggggccaggcgggacattcgacttgccgtggccgcggcgatcgtaacggatgacgcggaacacctgcgtcagcgccttcatctgcggctcccacatctgcaatgtgcagccgagggagttggacagcatcaaggtcggcccgccgtcacggccttcgaccgagacgttgagcaggcaaccgtcggcatcgatcatgggcatggcatgctcctcgtcatgggcgggcaatagcgctcagcgcgtcttatcccaaatttcccgcgcatccatccaataagtgaatctatccaggatgatggatcgccgggtcaagcccggcaatgacatcaggagagatccaaggaatccagcaggcggtcgatcagcgcctgggaggccccttgataggccatcggctcgaacaatgaagcaattttttccggggaaaggtgcgtggtgatctgcgaatcggccgacagcacctcgcgcagatgcttcttctcggcgactgcgcgcttgctcgcggcctcgatcagatggtgcgcatcgctcttgccgatcgtctcggccagcgcgaaggtgaccgcctcggccatgatcagcccctgcgtcgcatcgagattgctgcacatgcgcgccgcatcgacctcgagaccctccgcgatatcgacgatggcggccagcgcgccggaggtgaccagcatcagttgcggcagggtcggccattccgcgtgccaggggccggcgctgcgttcgtggtcctggacctgcgcggcaaagatggtcgcggcgagctgcggggccatggtggcggcgcccaacgcactcgcggcggcgaccggattgcgcttgtgcggcatcgtcgaggagccgccgcggccttcgccggcgggctcgaacgcctcgccgacgtcggtctgcatcagcagcgagacgtcccgtgcgatcttgccgcagctgccggcgagaatggcgagacaggaagcagcctcggcgatgcggtcgcgatgggcgtgccagggcgcctcgggcagcggcagaccgagctcctgggccagccgttcggccaccgcgagccccttgtcaccgagcgcagcgagcgtgccggccgcgccgccgaattgcagcgccaggccctcgcgggagaaccgccgcaggcggcaacgggcgcgggcgaggcttgcggcatattccgccgccttgagcccgaacggcatcggcaaggcgtgctgcagccaggtccgcgccaccatcggggtattgcggtggctgcgcgtcagcgcggcgaatcccttgatggcgcggctgagatcggcatccagcgcggcgatgccggcgcggagcgtgagcatggtcgcggtgtcgatgacatcctggctggtcgcgccccaatgcacgtagcgcgcagcctccgcgtcgttcctgccgacattggcggtcagcatcttgaccaggggaatcgcgagattgcccgatcgcgtcgcggcgtcggccagcgcggccatgtcgaagcaatcggcattgcacgcagcctcgatcgggccaacggcggacgccgggatcacagccgtggcggcctcggcgcgtgccaacgctgcctcgaaatcgagcatgttctgcagggtagaccggtcgtcgcagaccgcgcgcatcgccgcgctcgacagcatcggcgcgagcaggggggagagggatgtgctcatgttgcgcgcgacctaatcatcatggccccgctgtgccaatccccaaccgcctgcacacatctttttgcagttgcgaatatgcattgcacgtggctgagcgccgccctttcctttgccgcgtccctgcgttacttgatcagcattatagttgcgcgatccgggaggcacctcatggccatgacgatgaacggcgaagtccagcttgcggcgccgcgcgaggccgtgtgggccaagctcaacgatccggaggtgctgaaggcctgcatccccggctgcgaggagctggagaagaccgacgacggcggctttcgcgcaacggcaaagatgaaggtcggcccggtgtcggcgcgcttcaagggcaaggtcacgctgtccgatctcgacccgccaaacggctacaagatctccggcgagggcgagggtggggtggccggcttcgccaagggcggcgcggtggtcaagctcgccgagaaggacggcggcacgctgctctcttacgacgtcgaggcgcagatcggcggcaagttggcgcagctcggccagcgcctcatcaacggcaccgccaagaagctcgccgacgaattttttgcgaactttgccaaggcggtacagggctgaaacctatcgcctttcggcatggcggcttgcgtcgggggcgatgttgccccgggggacaatggcccatatgatgggttggaataattataagaaccgcttcgacgggacccgtcggggcgctgatagagagtgcttatggcaaaaatctccctcatcgtgaacggcaatcctgtgacggccaatgtcgatccccgcacgcttctggtgcagttcctgcgcgagaatctgcggctgacgggcacgcatgtcggctgcgacacctcgcagtgcggcgcctgtgtcgtgcatctcgacggcaaggccgtgaagtcctgcaccacgcttgccgtgatggccgacggccacgaggtcaagacgatcgagggactggccgccgacggcgcgccgctgcatccgatgcaggaggccttccgcgagcatcatggcctgcagtgcggcttctgcacccccggcatgatcatgaccgcgatcgacatcgtccatcgcaaaggacacgaactcgacgatcacacgatccgcgaggagctggaaggcaatctctgccgctgcactggttaccagaacatcgtcgcctcgatctctgccggcgccaaggcgatggcgaaatccgatctcgcgtaacgcgcatcccgcgatcaggacattcagatgtacgaattcaaatatcatcgccctgggaccgttcgccaggcggccaatctcctggtgaagaacgaagacgccaaggtgatcgccggcggccacacgctgattcccgtcatgaagcagcgcctcgcgagcccgccgcatctggtcgacctctcccatatcgagggtctcaacgcgatcgagatgaagggccgctcgctggtgatcggcgccaccgccaggcacgccgaggtcgcgaactccgcgatcgtcggtgaggcgatcccggcgctggcgaacctcgcgagtcagatcggcgatcccgccgtgcgtcacaagggtacgatcggcggatcgctcgccaacaacgatccgaccgccgactatccggccgcggtccttgcgctgggcgcgaccatcgtcaccaacaagcgtcgcctcaaggcggaagagttcttccagggcctgttcacgacggcgctcgaagccgacgagatcatcaccaaggtgatgttcccgctgccgaaaaaggcagcctacatcaagttccgcaaccaggcctcccgttacgcgctggtcggtgttttcgtggcgcgccgtccgtcggacgtgcgcgttgccgtcaccggtgccggctcagagggcgtatttcgcgtcaccgcgttcgaggaggctctcaagaagcgcttcgcctcgaaggcgctggaaggcatcgcggtgccggccgaaggcctcaacagcgacatccacggcagcgcagagtatcgtgcgcatctcatcggggtgctgactcggcgtgccgtcgacgccgccaatgccaaggaatgagctgaactcgttcctcggtccacacctgtccctggcgagggcgtagcaagactggctttttcatgacttcagcggccaattcttccggtgctttgccggcatcggtcgacgcgatgctcgaacttctgacgtcgcgcggttacctcgctgagcggtcgctggcgacggtgacctttctgtcgctgcgcatgggccggccgctgttcctggagggcgaggccggcgtcggcaagaccgagatcgccaaagtgctctcggcggcgctggggcggaggctgatccgcctgcagtgctacgagggtctcgacgtttcctcggcggtctacgagtggaacagcgccgcgcagatgattgcgatccggatggcggaggccgccggcgacaccgatcgcgaccagctctcgagcgacatcttcgccgaccgctacttgatcaagcggccgttgcttcaggcgatggagcccgacgttgccggtccgccggtgctgctgattgacgaactcgaccgcgccgacgaggcgttcgaggcgtacctgctcgaaatcctcagcgatttccaggtgaccattcccgaattcggcaccgtgaaggcgccgcaccccccgatcgtcatcatcacctcgaaccgcacccgcgagatccacgacgcgctgaagcggcgttgtctctatcactgggtcgattatcccgctgccgagcgcgagcttgcgatcgtcaagacgcgcgtgccaggcatctctgcgaagctgtcacagcaggtcgtgcgcttcgtccaggctttgcgcaaccaggacttctacaagtcgccgggcgtcgccgagaccatcgattgggccaccgcgctgtccgagctcgatgcgcgttcgctcaccccccaagtggtcggcgacacgctgggtgcgctgctcaagtatcaggacgacatcacccgaatgcagggcgatgccctgcagaaggtgctgaaggaagcgacgagcgagaattgatctcgcgtgcgtcatagctgctcccgtcattccggcgcgacgcgcaagcgtcgagcccggaatccataacacgatcgggagcatggattcggggctcgcgccaagtggcgcgcccccgaggggatggatacgagaccatggccatcaaccaccttgcccccgagcaaaccgagcagttcgccgacaacatcgtcggcttcgcccgcgcgctgcgtgcagccggcctgccggtcgggcccggcgcggtgatcgatgcgatgagcgcattgcaggcaatcgacatcggcaaccgcagcgatgtcttcaccacgctggaggcgatcttcgtcaagcggcacgagcatgcgctgatcttcaagcaggccttcaacctgttcttccgcgcctctgaagagtggaagcacatgctggattcggtgccgctgccggacgaggccaagaagaagccgcaggccggctcgcgccgcgtgcaggaagcgatgtcgcagccgcgcatgaccgagacgccgcagcaccaggagcaggatctgcgcctgtcggtctccgacaaggagatcctccagaagaaggactttgcgcagatgagcgctgcggagattgccgaggcgctgcgtgccgtcgagcggatgcggctgccgcaggccgagcttctaacgcgccggcaccggcccgatcggcgcgggcttcgcctcgacctgcgccgtacgctgcgcgcatcgctccgcaccggtggcgatatcatcgacatccatcgcctcgggcggatcgagaagccggcgccgatcgtcgcgctgctcgacatctcgggctcgatgagcgagtacacccgcctgttcctgcacttcctccacgccatcacggacgcgcgcaagcgcgtctcggtgttcctgttcggcacccgcctcaccaatgtcagtcgcgcgctgcgccagcgcgatcccgacgaggcgctggcgagctgctcggcctcggtcgaggattgggccggcggcacccgcatctcggcctcgctgcacaacttcaataaattgtgggcgcggagggtgctgagccagggcgccatcgtgctcctgatctccgacgggctggaacgggaggccgattccaagctggccttcgagatggatcggctgcaccggtcctgccgaaggctgatctggctcaatccgctgttgcggttcgggggcttcgaggccaaggcgcagggcatcaaaatgatgctgccccacgttgacgaattccgccccgtgcataatttgagttcgatccaggagctgatcacgacgctctcccagccgctgccgccgcatcaccgcagcctgatccgctccgcagcttgagaggcaccccatgctcgatcgcgacgaggacattctgaaggcggcggaggattggcagaaggccggccgtggcgtcgcgctcgccaccgtcgtggagacctggggttcggcgccgcgcccggcgggctcgagcctcgtcatcaacgacgaaggcacattcctgggctcggtctccggcggctgcgtcgagggcgccgtggtcaccgaggcgatggacgtgatcgagagcggcaagcccaagatgctggagttcggcgttgccgacgagaccgcctggaacgtcggtctgtcctgcggcggcaccatccgcgtcttcgtcgagaaggtcggttagccgtgaagctcgagatcctgcacgaactcaatgccgagcgcgccgcgcgccggccggtgatcctggtgactgacaccgacagcggcgagcaacgcctggtgaaggccagggattttgcgaaagatcctctgcgcgccgagctcgaaaagcagcttcgcatgggcaagagcgccagtgtcgaggccgggggcaagaagctgtttctcaacgtctacgcgccgacggccaagctcgtcatcatcggtgcggtccacatcagccaggcgctggcgccgctcgcgcgctccctcggctatgacgtcactgtggttgatccgcgcacggcctttgccagccccgagcgttttcccgacatcccgctgatcgcggaatggcccgacacggcgctgccgccgctcaatgtcgatgcctacaccgcattcgtcgcggtgacgcacgatcccaagatcgacgatcccgcgctgttgcatgcctttgaacgcaactgcttctacatcggcgcgctcggctcgcgaaagacgcatgccaaacgcgccgaccggctgcgggcgcagggcgccaaggaaagcgacatcgcacgcatccacgcgcccatcgggcttgcgatcggggcagtctctccctccgagatcgcggtgtcgatcatggccgagatcacggcggtgcttcgtctgcctcccaaagaaaaagaagaagcggcatgaagttcggaccggcgagccccagggatgcgatcggaggggtgaccgtccacaccctgcgtcagggaccgctggttctgaagaaaggtacgacgatcggaccggcggaggccgaggcgctggagcgcgccagcatcaaggacattgtcgtggtgcggatggaggagggcgacgtctccgaggacattgcagccgccagcatcgcgctcgccattggcggcgagggcatccatgtcgaacgcgccttcaccggccgcgccaatctgtttgctgcgcgcccgggcgtgctggtgatcgaccgcgccgcggtcgatcgtatcaataacatcgacgaggccatcaccttcgcgacgctcaccccgttcaagccggtggtcgagggcgagatggtcggcaccgtcaagatcatccctttcggcgtcgagggacgtttgcgcgatgctgccgtgcaggccgccggcaaggacgtgctgaaggtcgcgccctacgtgatcaagcgcgtcggtgtggtctcgacgctgctgcccggcctctcctccaaggtgatcgacaagacgttgcgcgtcaccgccgagcgccttgctccagccggcgccggcatcatcgccgagcggcgggtcccgcacgaggagcaggcgctgtcggccgcgatcaaggaattgctcggccttggtgccgagctcgtcatcgtgttcggcgcctccgccattgccgatcgccgcgacgttatcccggcggccgtcaccggcatcggcggcgagatcgagcatttcggcatgccggtcgatcccggcaacctcttgctgatcgcccgtgctggcgaggtgcccgtgctgggcgcgccgggttgcgcgcgctcgccggtcgagaacgggtttgactgggtcttgatgcggctgctcgccggcatcaaggtgacgcggtccgagctgatgggcatgggcgtcggcggcctcctgatggagatcgtgacgcggccgcagccgcgcgccaagccggagaccgaaggcaatagccaggtcgcggccatcgtgcttgccgcggggcgctcgacccggatgggcgggccgaacaagctgctcgccgaactcgacggcaagaagctggtgcgcctcgcgaccgagcaggcgctggcctccaaggcctccgaggtgatcgtcgtcaccggtcatcaggccgagctggtcgagcaggcgctgcaaggcctgaaggtgaagttcgtccgcaatccggagttcgccggtggcatcgccagttcggtcaaggcgggcatggcggccgtgcccgaggcgtgcgacggcgctgtcgtgtgtctcggcgacatgccgttgatcgacgccgggctgatcgaccgtctcatcgacagctttgcccccgactgcggcaatctcatcgtcgtaccggtcagcgagggccgccgcggcaaccccgtgctgtggtcgcgccgcttcttcaaggagttgatgacgctcgacggcgacgtcggcgcgcgtcatctgatcgccaagcacaccgaggcggtcgccgaagtgcccgtcgacggcgaaagtgccttcctcgacatcgacacgccgcaggcgctggaggcggcaagacggggatgaaggtgccgcagcagcgccgggtcgattagccgaaggcgcaatccaccccgcgacacgtccccgtccgccaagctcaaccacccgttcaccgtctggaaacgaccgccgattagactcccatcgccttgcctggggggagggtttttccatggcttcgaatgccgtcgcgcgccgtttcgcgatgttttgcgttgtcttgtctgttgccgttacgggcgcccgctacattactgaagcccacgccgccggcgcatttgcagtcggcaaatgcggcgcctatggccaagcgtatgattacgacgccgagcatgaggcgcgcgccgcggcgcagaagcagtgcaagggcgattgcacgaccgtaacgatgaagcgcgcctgcgccgcaatgtcggtcgatctcaccaatccctgcggcgcctatggctatgccgtcaagccgaagatttcggcctcgctcaatgccgccacgcgcgaatgctacaagtatggtggcaaggaatgcgtgatccgcgcctgggcctgcgacgccaagggttgattcctcttgctgtcattccggggcgatgcgtagcatcgaacccgcaatccattcgtccccttgccttgtggcgcgatggattctcaggtgcgcaattgcgctccgtagcttgcgccaagtggcgcgcccggaatgacaatcgagggaatgcatgcagttcgacaccaagatcgccgtggtgatccgcaccgatcttcaagcctggcagaagctcaacgtcgcgtcctttctcaccagcggcattgccgcagcctttcccgaatgcattggcgaggcctatgaagacgcctcgggtaccaagtatcacgcactgatcggccagccgatcctgatctacggcgccgacggggccgcattgtcgcgcgcgctggaccgcgcgctcacccgcaatgtcaagccggcggtctacaccgaggacatgttcaggaccacgcacgatgccgccaatcgcgaggcggtcagggccgtcgcacgcgccgacctcaatctcgtcggcattgcgatgcgcgccgaacggaaggtgatcgacaagatcgtcgatggcctcaagttccatagctgagggcgttggtcgtcgcttctcgttgtcatcgtggtgtcacgatggcggaagtgcttgcgcaaactttgtgctctttgacgccggtcaagagcaaggcccccggcatggctaatctgccccagccaacgcaaaggagcagaccgatgccgaccatgaaagctgcagtcgtcagacaattcggcaagccgctggtgatcgaggatgtgccggtgccgcagcccggtcccggcgaggtcctggtgaaggtcaaggcctgcggcgtctgtcacaccgatctgcatgccgcctccggggactggccggtgaagccggttccacccttcattcccggccatgaggcggcgggcatcgtcgccgcgatcgggcccggtgtgaagaatctgaaggtcggcgatgccgtcggggtcgcctggctgcacgacgcctgcatgtcgtgcgagtattgcgagaccggctgggagacgctgtgcgagcaccagcacaacaccggctacagcgtgaacggcggtttcgccgaatatgtcatcgcttcggcggccttcgcggccaagctgccggcaaccgtcgattttgccgccatcgcgccgatcctgtgcgccggcgtcaccacctacaagggactgaaggagaccgaggcgaagcccggcgagtgggtggtgatctcgggcgtcggcgggctaggccatgtcgcggttcaatacgccaaggcgatgggtctcaaggttgcggccgtcgatatcgccgaggacaagctcgacctggcccgtgagaccggtgccgatcttgcggtgaacgcgctcgccgccgatgcggtggacaaggtgctggaagcgaccggaggcggggcgcatggtgtgctggtgactgcggtctccaccccggcgttcgcccaggcgctgaagatggtgcgccgcaaggggaccgtcagcctcgtcgggctgccgccgggcgaatttccgactccgattttcgacgtcgtgctcaagcgcatcactgtgcgcggctcgatcgtcggaaccaggcgcgacctcgacgaggccattgctttcgccgccgacggcaaggtcaaggccgaggtcgccaaggtgccgctcgcgcagatcaatgaggtcttcgaccggatgaaggccggcaagatcgacggccgcatggtgctcgacttcgcctagtctctgcgaggagcagggcatggcccggacaacgaagatcgtctttctcggcgccagcagcgcatccttcgggatgagcatgttccgggacctgttttcgacccgcgatctcgccggttcgacactggtcctggtcggacgaaacgtcgaccggcttggccggtcgacgcggcttgccaaactgctcaacgagaaatccggcgccggctatgtcgtcgaggctacgacggactggcgcgcggcgttggacggcgccgagttcgtcgtgcattccaccgccatcgatcgcaatcggttgtggcggctcgatttcgagattccgcgcaggttcggcatccgtcatacgctgggtgagaacggagggcccggcggcttgttcttcacgctgcgcaccttgccggccgtcttcgacttcgtgcgcgagatggagctccgttgcccacgcgcgacgttcatcaatttctccaatccggaaagccgaatcatcctggcgctcggccggtacagcggaatccgcagcgtcggcctgtgccacggaatattccttgcccgcgacaacgtcgcgcgaattctggggatgccggagagtcgcgtggacgtgtggggtgcaggtctcaaccatttccagtgcctgaccgaaattcgtgaccgcgagacgggcgcggacctctatccactgctgcgcgaaaaggagcgggatttcgatcccgccttctcaccgctgacgcgcaaattgttgcacgcgttcggctactggctcggctgcggagacagtcacgtgggcgagtatctttcgttcggctgggaggccggcgagggcggctataatttcgactgggacgagagcgagcgcgcgaaactgacgcggctgatcgacgacgtgctcgcaggtcgggccgagatgccggactggtggtcgatgccctcgggcgagcgagcgatcggcatcatcgccgccattgtccataaccgcaagcaactcgtcgaatccgcggtcgttcacaatcgacaggtgatcccgaacctgccggccgatgccgccgtggaggtgccggtggaagtagatgctgccggcatccatcctgtctcgcttggggcgctgcccgacgccgtggccaagctgatgacgatccaggttcaggttcagcagatggcggtggaggcggccatgcacgcttcgaaggagatggcgctgcaggccttgctgctcgaccccgtcgtccattccgagaaggccgcgcgaggcctgctcgaggagttgtgggagatcaaccggccctacatccggccatgcatctgagccgccggtcactctcgtcgccgttgcttacgctggcggcatgccttcgaatttcaccaggccagggccaaggcgatcccagtcgtgaccgcgcgcggcgaaggtgaccgcctgcggcttgtagcgggcgggttcgtcgaggcttgccgcccggatcgtgaagacatcgggctgtgccgcaaaggtcatgtagacgggcacgccgcattttgcgcagaagccgcgcgtcttcacatttccgctgtctgcgaccatgtcccagtgcgtcgcttcaccggtcaccgtgacgccggcgcgcgcgaaggtcgcgtaggagccatgcccgctgccactttcccgctggcagtcccggcactggcagtgattgctgaacaggggctccccgaggatcgaatagcggatcgcgccgcaggcgcagccgccggtataggacttttccatcgcgccatctcctcactcttccccgctgatctcgtcgagcttgcggaccaccttcttccagccgccgctcatgaccgtgtaggccgactcgttcctgggcaggacgaagcctgcatggaccaggcggatccgcgtgccggcttcgaccggggagagggaccacgtcacgacggtgtcgagcggtgcgccatagccggtgttgcgttcgtcgccgcccttccaagagtagacgaggcggcggttcggcacgacctcgagaacgcggcaatggatcacgccgtcccaattgccgcccggagtggtctggaatgtgaaggagttgccttcgacggcttcaaagccggtcggctgcatcagccagcgcgcgatcagctgggcgctggtcaacgccctccagatcgtctcggcggtgtgagggaacacatcgtcgatgacgatgtcctttgtttcggctttcaacgcggcagtactcacggatcgatctccttcaagaaatcacgcaggttctggaagcgctcgcgccagaacacgccgtaatggtccatccagttgaccagaggctcgagtccttgcggcgcggcgcggtagtagacgttgcggccctcggcccgttcggtgacgagaccggcctgcttgagcgacttcaggtgctgcgagatcgcaccctgggttacgccgctgccacgtgtcagctctgcgacgctgatctccttgctcgcgaacacccgctcgaaaacggcgcggcgcgtcggatcggcaagagcgcgcatcacggttgtgacggggttttgggcggcttcaatcatgaagtttcaattagcgaacgctaatgcattagtcaacactaattcgttttggcacctgccggttcttgttcttgacaatgactgactagtcagtcattcatctgggatgaccaggaagtcgaccaaaagcgttacgcggtccgcggctcgcgtccaccagagcggcggacactccgaagccagcggagctgctccggcctccaaccgtgccacgcgcgcggcggagcggcgcgcggccattgtggaggcggcgatggacgaattcatcgcgcgcgggtttgccgcgacgcggcttgacgacattgccaagcgcgccggcgtcgcaaagggcacgatttatctgcacttcaaggacaaggaatcgatgttcgaggagctggtgcgcaccgtgatcgtgccggtggtcacgcgcctcacgacgctgccgccgcccgccggaacggtgcgtgaagtcatcgagacgtttgccggcaatttcctgaaggaggtgatcgggacgcgtcggggcgatctggtgcgtctgatcgtggcggaggggccgcgctttccctccgtggccgacttctactatcgcgaggtcgtctcgcgcgggatcgccgccatgcgcgcactgatcgagctcggcattgcccgcggcgagatccgtcagaaggatctcgcgcgctatccgcagatcctggttgcgcccgcaatgatcgcggtgatctggcagagcctgtttgcgcggcatgcgccgctcgatgcgcaggagatgctgcgcgtccatctcgatttgatttttggcgaacggaggacgacatgaggtcgtcgcaagcagttttgaggtttgcattgacgcttgtggtcgcaaccgctcttgcggcctgcaaggagaagcgcgatcccggcttccagggctgggtcgaggccgacatgattttcgtcagtccggacgaagcgggtcggatcaccaggctcaacgtccgcgagggtgacgaggtcaaggtcggcgatcccctctattccgtcgatgacgatctccagcgcgccgatctcaatcagaacaaggcgacgctggcgaacgcgcagcagacctatgaccgggcggcttcgctgagcaagaccggctcgggcacacaggccaacctcgattccgccgtgtccgccttgcgcatcgccgaagcgcgagtagcgacctcggagacgcggatggcgaggcgcaagggctttgcgccggttgccggcaccatccagcagatctattttcgcgagggcgagatggtggcggcgcagcggccggtgctgtcgatcatgccgcccggcaacatgaagctgcgcttcttcgtgccggagaccgaattgccgaagctggcgatcggcgacacggtgcgcatctcctgcgacaattgcgcggccgaccttaccgcaaagatctatttcatcgcgacctcggccgaatacaccccgcccgtcatctatagcctcgatgagcgcaacaagctggtctatctgatccaggcgcggccctcgcggccggatgccctgcgggtcggacagccgatcgatgtctatctcaatcccaagaattccgagctcaagacaccggtggcggacagacgatgagcagcggcaacgacatcgcgatcgacgtcaagggcctgacgaagtcgttcggcggccgcgaggtcgtgcacgacctgtcgatgcaggtgaagcgcggctcgatctacggctttctcgggccgaacggctcgggcaagaccacgaccatccgcatcctgtgcgggctgctcacgcccgacagcggcgagggcacctgcctcgggtatgacatccgccgcgatgccgagaagatcaagcgccgcgtcggctacatgacccagcgcttcagcctctaccaggatctctcggtgcgcgagaacctcgagttcgtggcgcggctctatggcgtcacggacgcgcgcggcgctgcgcgcgacatgatcaagcggctcgggctcaccgggcgagaagagcagcttgcgggcgaactctcgggcgggtggaagcagcggctggcgctgggggcatgcacgctgcccaatccgcaacttttgctgctcgacgaaccgactgccggcgtcgatcccaaggcgcggcgtgatttctggaacgagatccacgcactcgcagccgaaggcctcaccgtgctggtctcgacccactacatggacgaggccgagcgctgtcacgagatcgcctacatcgcctacggctatctgctggcgcacggcacggtggaggaggtgatcgcgcaatctgcgctggcgacctacacggtcacgggcgaagcgctgaacgagcttgcggcggcgctcacgggcaagcccgggatcgacatggtggcgccgttcggcacctcgctgcacgtgtcggggcgcgacatcgcggcgctcgaagacagcatcgcgccttggcgcgagagggggggattgcgatggcagaagtcgcaaccgtcactcgaggacgtcttcatcgagctgatggggcgttccaaggacaacttccaatgagcggcgtcgatgcccctgattcagcccgcgcaatgcgcgagcgcttcggctttctgcggcgctcctacgcgatgttggtcaaggagttcatccagctcaagcgtgatcgcgtctccttcgcgatgatcgtgatgctgccggtgatgcagctcatgctgttcggctacgcgatcaacacgacgccgcgcaacttgccgagcgcggtgctgctccaggaggactccgatcttgcccgctcgatcctgaaggcgctggagaacaccgcctatttccgcttcctctatgaagtgcaccacgtcgatgatttcgacaatctcctgaaatccggcaaggtgctgttcggtgtcgagatcccgcgcggcttcgagcgggcggtacggcgcggcgacaagccggcactgctggtggcggctgacgccaccgatccggtcgcggcgagcgcggcgatcggctcgctgggtatggtggtgcagacggcgctcaagcatgatctctatatcggcgatcccccggagatgccgttcgagatccgcgcgcacgcccgctacaacccggccgcggcctccagcctgaacattgtgcccggcctcgtcggcaccattctcaccatgaccatgctgatcttcaccgcactgtcggtcacgcgcgaggtcgagcgcggcaccatggagagcctgttggctatgccgatcaagccggtcgaagtcatgttcggcaagatcgtgccttacgtgctggtcggtttccttcaagcgttcctcattatcggcatcggcgtcggtctgttcggggtgcccgtgctcggcagtctcttcctgctggcgctgctctcgacgttgttcatcaccaccaatctgtcgatcggctataccatctcgaccgtggtgcagaaccagctccaggccatgcagatgtccatgatgttcttcctgccgagcatcctgctctcaggcttcatgtttccgttcgccggcatgcccgcctgggcgcaatatctgggcgaatgcctgccactgacccactatctgcggatcgtccgcgccatcatgctcaagggtgcgagcatggagaatctgcgcttcgacacgctggcgctggcggccctgatgctgctggccatgaccatcgccgtgacgcgcttccgccgcacgctcgattgaggcacaatgcctctcgatagccattccggagcacgcctcgcgtgcgctgtgtgcgccattgcgcatctgggaattgcgagattccggagacgcgacttcgcggcgccccggagtgacggggggggtgatggtcaggtttgcaagcaggaaggcacgacagcatgccgccttgtcggcagatttcgaacgcgagctgacgcgggaggtgctgcgtaccgagctgctgcgggtaagggcactaatcctcacgggttgcgtcatgatgctattcctgaccgcgatctatctgatcgaccctgctgtggtgaaccgcgtctggcgcgggacggaaggactcgtccaggtctatggccttctcgtcggcttcattctgttcgaggtctgggtccacacgcagatcaggaagaacctgcggctcgatcgcgatctgccggtagtccggcgctatatcggtacgctgatcgagacgtcgctgccgacggtaatcctcatcctgcaaatccggaccataggcgtggcccaggcgctcggctttgccgtgccgctgatgtatttcatattcgtcatcctctcgacgctgcggctcgatttctggctgtccacgttcaccggattcgtggccggagccggacttctggccatcggcctgtattacaacgcggagagcgaggccggcgaaccgctcgtctacttccacgccgtgcgcagcactatcatcctgatctgcggcgtgctggccggcgccgtcggcgcgcagctccggcggcaattcgccgccagcatcgctgcggcgaccgcccgggaccgtgtgaccaatctgtttggccagcacgtctccccgcaggtggtggagcggctgatggcggcgggaacgagcgcaaccggtgatctccgccgcgtcgctgtgatgttcgtggattttcgcggcttcactgccggcgcgcggtcccgcacgccgcaggaggtggtcgaccggctcgacggcgccttcgccgtactggtcgacattctcgatcgccacggcggcatcgtgaacaagtttctcggtgacggcttcctcgcgctgttcggcgcgccgctggaagcgtccgacgccgcgcagcgcgcggtcgccgcgggccgcgagatgctgaccgcgatggatcgcatcaacgcccagagcagctggcggctgcgcatcggcatcggcatccatttcggcgaagtcgtcgcgggcaacatcggctccccccggcgcaaggaatacaccgtcatcggcgacaccgtgaacttcgcctcgcgcctggaggcgctgaacaaggagttcggttcgcagctcctgatctccgcctccgtgcgtgaggcgctgggcgatgatggcagcgatgccgtcgcgctcggcgaagtcgaggtgcgcggctatgagcggccggtggccgtgtttcagctgggatagctcgctttggatatcgccggttgacggcgtctcactctcccttgcgcggttgctccgattgctccgattgctccgaattttggggcatgacggccgacgtcgccggcttgtagactgtcgcccgtgcggccggttgcggccgcgacttgcatgaggaagagaatatgctgcgccgctacgtcaccgtcgacgtgttcaccgaccgcgccttcggcggcaaccagctcgccgttgtgctcgatgctggcgggctcacgaccgggcagatgcaggcgatcgccaccgaattcaactattccgagaccaccttcgtactgccgccgcgcgacagggccaatgatgccgaggtgcgcatcttcaccccggtccgcgagctgcccttcgcgggccatcccaatgtcggcaccgccttcgtgctggcgacgatcgccagggagccgaagccgcgcctgctgttcgaggagagggccggtgtggtcccggtcgacatcgtgcgggagcagggcagggtcatcagcaccgagcttaccgcgccgcagccgctggcaaggctcgcgcagctgtctgcagccgacgtcgccgcctgcatttccctgacggcggatgacatcaaaaccgatcatcatgcgccgcaggtcgtcggcgtcggaacgccgttcgtggtcgcggaggtgcgatcgcgcgaagccgtgcgcagggccaagcccgatgccgcagcgtttggccggattttgccgagagacggcgcattctcggtctacttctacacgcgcgatgtaccggcagcggaggcgccctgcgagcggcaggcgcggatgttctttcccggcgcaagcggcctgatcgaagaccccgccaccggcagcgcgacggtcgcagccgccgcgctgttcgccgatctcgattcgacgcgcgacggcgaattcaagcttacgatcggccagggctttgacatgggccgtccgagcatcctcctcacccgcgtgcgcaagcaggacggcaagatcgtctccgctcatgtcggcggcagctgcgtgcagatgatggaggggacgttcaagctggcgggggaagggtagatcaatccatccgtcattccggggcgcgatcccggaatccatttgtccaccaaccctgccgcgcgacggattctcaggtgcgcaattgcgcaccgcagctcgcgccaacaggcgcgctggaattacggagtgtggctacagctgccgccccaccagattcttcaccgtcaccccatcgcgctcctcgatcatctccgcgatcatctggcggtgacaatgggtgtggtcgcgctcgtagcagagcaggcacacagggccggccttcttcaccagggccgagagctcgtccatctcttcccgtgcctgcggcgttttcaggtgctttgaatagatcttctccagcacgtcgtagtgaccgctgcgtgctgcgaggcgcccatcttttggcgtgccgagcgcggcgagatggacgtaggcgatgccgcgctcatcgagacctgccgaaagctgcttcttcgaaaaacccggccggcgcgacgacgtcaccgcgcgcacgtcgaccacgagcttgacgccggcatgttccagctcgtccagcaccgccttcggcggcgtctgctcatagccgatcgtgaacagcttctttgcctttgccatggaatacctcagctcacgcgtgcgatcagctccatggccccgtggggcgcgcgcacctttccctcgtggatgacgtaggcgaacacgtcgcgcggctcctttttcggcctggccttgtcaactttcggcaggtcgtccggttcaccgcctgacgcccaggcctgaaggcgctcagcccaggcgtccagctgcttcggcgggtagcaggtcttgatctcgtcgctgcccttctggagccttgcgtagacgaaatcgccggcaacgtcggcgatcgccgggtatttgccgtgctcagcgaacaccactggagtctcgaactcgcggatcagcgcaacgaaatcaggtgtgcagaaactgtcgtggcgcacttccacgacatggcgcagggcgcgtccgtcgagcttgcgcggcaagagctccaggaacttgccgaaatcgccggcgtcgaacttcttggtcggcgcgaactgccacagcacgggcccgagatgatctccgagctccagcacgccggaatcgtagaaccgcttgatggaatcgccggcctcggccagcacgcggcggttggtggcgaagcgcgggcccttcaccgagaacacgaagccatcagggacttcgctggcccatttgcgaaagctctccggcttctgcgagccataataggtgccgttgatctcgatcgacgtcagcttcgaggcggcgtaggacagctccttcgcctgcgcgagcttctccggatagaatacgccgcgccagggctcgaaggtccacccgccgataccgatgaagatgttgccggatttttttgacgcggtttttgctttggccacgggaggatctcgcatcgacggggagggatctcatcctaatcaaaccagatgtgattggccagttggccgctcccgtctaagctcgcaagggcccgcgaaagaaggagaacaacatgcggatgctgttggtgggagccgcgctcgtcatgatgacatctgctgccatgacccgttccgccttggcggatgacgacgatgccaagagtatgcagaagctcgcccagcagagccgcgacgactactggcattgtctggcgcgggaatattcgcgcgaatccaaccagggcctgtcggagcgggatttcggccgctcggttgcgggcgcctgtccctcggagcggcaatattaccgggtgacgctgctcgactatctcaccacgcaatatccgagcatcgatgccggcgcccatctcgccaccgcgaacagggcggtcgaggcagcgcagaaggacatcgtgacggcctatgtaaagcatcgggcaccagcgaaataggaagtggcggatggcgaggagcgaggagggctgaggccccggttgcctcattcgctattcgccattcgcccggggccttccggccgcgcgcgcatccgtggtactactcgccgcatctggagtaggggtggacttgcatgtcgtctgagtcgctggggggcattctgggcgcgatcgtcgcggtgatcgtgcttgcggttgccgtcgtgttcgggccgattggccagtacggcaagccgcccaagccggcgaaggtcgagccggcccccgcggccgaaccggcggcccccgctgtgcccgcgccgcgcgggccgatcatccgggaagtgcctaaccaatagggcgcgaaaaatggcatttccgccctcttgcgaagcgccttttccgtccccatctggtctgtaacggcgacgttgagcaaaaactccggcgctggaacgaccttggaatagcttgggcttgcgccggatgtacgcgcggcccgccgttccggggtcgttggcattttagccccccatttcggccgttctccagagcccccggcttggcagcgcaggacgcggcggatatacgctgccgtcatgaacgaagcgatcagacccggcgccgacatcccgccgcaggctcaagagggcccggaactgtcggtcatcgtcccgaccttcaacgagcgcgacaacgtcacggtgctgtatcggcgactggaggcgacgctcgccaacattgcctgggaagtcgtgttcgtcgacgacaattcgcccgacggcacctgggacgtggtgcgcgcgctgtcgcagcgcgacagccgcgtgcgctgtgtccgccgcatcggccgccgcggcctgtccggggcctgcatcgagggcatcctcgcctcgagcgctccttacgtggccgtcatcgatgccgacctccagcacgacgagacgcagctgccgaagatgctgttgctgcttgcaagcgatcaggccgacctcgtggtcggcagccgctacatcgagggctacaagagcgagggcttcaacaagcagcgcgccggcgccagcgcgcttgcgaccgagttcgcaagaaagatgctgcgggtcgagatagccgatcccatgagcggtttcttcatgatgcgccgcgatcgcttcgagcagatcgcacccaagctgtcggtgcacggcttcaagatcctgctcgatgtcgtcgcgaccgcacacggcaccctgcgcacggtcgagattccctatacgttcggcgcccgccagcatggcgagagcaagctcgattccatggtcgcgctcgatttcctcggtctcgttctcgccaagctgaccaacgacatcgtctcgctgcgcttcatcctgttcgcgatggtgggcggtatcggcctcgtggttcacctgaccacgctgttcatcgcgctccgcctgttcaacgcgccgttcgcggaggcgcaagccgccggcgccatcgtcgccatgaccagcaacttcatcctcaacaacttcctcacctaccgcgaccagcgcctgaagggttttgcgctgctgcgcggcctcatcgccttctacatcgtgtgcagcgtcggcctgctcgccaatgtcggcgtcgccttctcggtgtacgaccaggagccgatctggtggctggccggcatggccggcgcgctgatgggcgtggtgtggaactacgcgatgtccggactgttcgtctggcgcaagaaatagcgcgtgatgggcgaggctgacgcgcggatcgtccgcaacaccgcgctgctgattcttgccctcgtcgggttgcggctggttgcggctgcgttcacgcccatcaccttcgacgaagcctattactggatgtggtcgaagcatctggcgggcgtttattacgaccatccgccgatggtcgcctatgtgatccgcgccggcaccatgatcgcgggcgataccgagctcggcgttcgcctcgtctcgatcctcctcgcgctgccgatgagctatgcggtctatcgctccgcagcaatcctgttcggcggcgtgcgcgtggctgcgaccagcgccatcctgctcaatgtgacgctgctggcctcggtcggaacgctgatcgtcacgcccgatgcgccgctgctggtcgcttccagcttcgtgctgttcttcctcgcgaaggtgctggagaccggccggggtgcctggtggcttgccgtcggcgcggccgtcggcgcggcgctgctgtcgaaatacacggcgatgttctttgggccggcgatcctgatctggctcgcggtcgtaccgaagctcaggcgctggttcctttcgccgtggccttatctcggcggcctcgctgccctggcgctgttttcgccggtgctgctctggaacgcggaccatcaatgggtttcattcgcaaagcagctcggccgcgccaggatcgaggacttccgccccgtattcattgccgagttgatcccgacccagatcgcgttcgcaacgccgctggctttcattctcggcgccatgggcctgcacgcgctgacgtggcagcgcaccggcgcgctggcctcgcgcgtgctgatcgggacgatgttctggaccatcgtcgcctatttcgtctggcattcgctgcatgcccgcgtcgaggccaattggttcgcacccgtctatccgcccttcgtcatcgcggcggcggccgcagccaatctcgcgcaatggaagccgcgccagcggcgtctcgtcgccttctgccggcgctgggctgcacccgtgggcatcgtgatgtttgcagcgttgatcgttcaggccaatacaggctggctgtcgggctatcgccgcgatgccacggtgcgcagcgtcggtgtcggctggcgcgaactcgccgcagagatcgaagcagtgcgcgtgcgcagcggtgcgacctgcgtgctcgcgcaggactacggcactacaggctggctcgcgttctatctcccgcccggcacgtgcgtcgcgcagcagacccagcgcatccgctgggtcaacatgcccgagcccgaccccagcctgctggccggcaagctgctctatgtcgacgaactgcgcccggacgggcatcccgccttgaatgatctctttgcgcaggtcacgcggatcgcgcaattgcagcgcaagcgcgggccgctcgtggtcgagacctacggtatcgatctgctcgagggcgccaagggcgacgtgctggaccgctcgcccccgccggaagcgcggtagcagacctcagacgattgtctcggccgtggtcgcaacctgacccggcccgtccggatcccgccagaaccacacggtcacgacggctgagcggccgcggatgcgggcgagcagggggcccgacaggatcccgtcgggggttccctcgaagtcggcggcatccagcagcgtatcgctcagcgcgaggcgcgcatcgttctgggcggctacctccatcagccggctcgcgacattgacggtgtcgcctgttgccgtcaggtgctgatggctctcgccgagccgggaggcgacgatctctccgtaatgcgcgccgattttgaagccgagctgccccgcgatcggcggtggcagcgaggcgatccagcgttcgacgccgcgatgcagatcgatcgcgcatttcagcgcgcgcgccgcgtcgtcgggcatcgggcgcggcagcccgaacaggatcatggcgccgtcaccgagaaatccggtgatcatgccgccgcaatcggccgcggtcctgtcgatcaaggcgtgaaacgccttcagaagattcctgagctcgtccggatcactccgctcgctcaggccggtgaacccggagagatcgaggaagactaccgctgcgtcctgccggacgggcttcgacagaaagtccggatctcgcgccagccactcctgcaccgccggagcttggaattgcgcaagcgacctgctcttggcagcaagatattgcgtgcggcggcttcccgcccacagctgcacgccggcaaaaacgagaaccggcgggaccgctgcggccagcgtggttgcggcgttcagccagacgccgtgcgtgaacgtaaacaggttgagcccggcccaggccatcatgatcgccgccgccgccatgatcccgagcgcactgcgtcgccaggcgagcaggcccaccaatagcaccggcagcagaatcgcagtgagcgcgtcgacgatgcggaccctgcggtcgcgcacgatgccgtcgccagcgacgagttgcgtgattgcggtcgagaccacctcgacgccgggcatcaatgaatcgaacggcgtcggatagaagtcgccgccgcccgccaccgaggcgccgatcacgacgatccggttctcgatcgctgcgcggtcgagcgtgccgtcgaagatgctttgtgcactgaccgtgcggatcgtgcggcgcgggccgtaataagtgatcggcagcgcgaaatcgctgtcggtcggcaccacgcgctcaccgattcgcagatggtccggcgcgacggtcaacggttcgtcgagagcacgggcggcaacgcgcaatggaaacgacaactcgaccttgtcgcgggtccggaacagcatcggcactgacagcggcgaccccgattgtcccgtcgcgacgttgacgatgccgacctcggcgtgatcggcgaaggcgggcaggggctgcaggaagcgttcggcctgcggcagaacggcaaggggcccttcgctgtcgggcgccactgtttcgctggcggagggaaagatcgccgcggcggcgagcaccatggggccggtggcgagcgtgttggccagcgtggcatcgccgatcgcagcgctgcggtcgacgagcaggagatcgattccaatcaccttcggcttgaactgcacgatggtgtcgacgacgcgggcaaggtcggcacgcggcagcggatagctgccgccgcgcttcacgacggtgtcgtcgatggcgacgatggtgacgaggtcgggcggacgctgcacgccgcggacctgagtccgccaatccgtcaacgtcgcctcgagccggtcgagaaagcgcaggcggccgttggcatgagcggcatagatgcccgcgccccacagcgcggtgaggacgagtgccaccaggatctgaacgcgtcgcctgcgcatgcggtcgtcttgcaatctactgttgttcaaatatcgagggccgaggccgtctcgacccagccttattgtccgagccttgccatgagcgcgtcgacgcgcggctggccccatgtcttgaccgtcagcgggccggttgcctcgacgtcgacgccttcgccgggtccaagcacgacgccgcgtccgccagtcctgcgggtcaccccgacccggccgtcggcgacgaacacggcggtcttgatgtcggccacgtcgaccgcccatctcgtgccgcgcacggcggcaatcgcctgtggcgtcagcaccttgaagggagtgccgcgtggcttcctgggtacgtcgaccagcagggctttgctgctcaattcgacggcgtctatacgtccgtcgcggttggcgtccttaagttcaaacctggcgccgttttccgcaacgatggtgatgccgttgtcacagcgccaggtctgcgttccggcaagggagagcgttgccgtgcagcccgcattggctgcgggctgggcagtcgcagatccaatcagcaagaacgaacccgccagggcgacaagacctgcgcgcgcgatccctttcatgccggcctccgtttgcgtgttcggaacagctcaaaggtgggatgatactgcatcgtatcacacgaagaggccgccgaaagtgccgaggcagcagctattttcttgtgacggcggtgtccagaaccgatgcgatcaactttcggtcacgcgccggcttgccggaagccgtgcggcgcgtgatgcgcatgggccgcgatcggcggcagccgtaaggccggccgacgtggagccaccagcttcgcgcaacgctaccgaactagggtcgaggccggttcgacgatcacgaaaatgacgttgtcgaatgcgtcatgagtgcggccgcaagcgtcggagaggcgacgcaaaccggtcgagaaacatggttaacagatgcgactaagtccgtaattctgcgggatttttctcagaatgggacagcattaacgagttgcctcacatccgcccgaacttaatccgcatttaactaaaagtcgccttaatgacgctccgaccctctgcgagatgctgttcccggatcgtgaccagcggcacttcgaggggggactgagtgacaccgtcctggacgcaaggcgaatgagtacgagtatcgctgcgcaaagtaacgcggcacggaagtccaagaattctcttcggaagccttcccggaagatgaccacgacgagttggcttggcgccgcggcgatcggctgcgtcgtgatgggcgccggctggaccatctacagcaacattctcggcgcgagcgtctatccgaccgtcggcagcatcggctacgacgagccggtggtcaggcgcgcgcccaaggtcgtgctgcgcgacgccggcgaggccatcaaggacgcctttgcgttgttgcccgaccgtttgcaggtcgcgacgccgatctcgcgcgagatgttcaacgagcgcttcgccgccgctgcgacccaaggcgtgccatcgaatgcggcgagcgccgcccccgcgacccaggttgccgcggccaaagatgccccgaagcagagcgtgatcgcgaaggttgcggacgcactgaagccggcagccaagggagctgacaaggctgcagacagggccaagcgcgcgccggaggcccagctgcagcttgcctcggccgacccggcccagatcgtgccggcgcccgaagccaaaccaaaatccttcgccgaccgggccaaggccgcggtgatgtcgatcaccgctccgcgccagtcgatggtggagaagctctggggcaagcgcgagccgtccggcgggctgctcgcctatgcctccgccgacgccagcattactgcgtccatcgcgccgaaggagcagaacccgatgctcggcggcgctccgccctacgagcgcgacaccgccgtttacgacatcacggccaagatggtgtatctgcccgacggcaccaggctcgaggctcattccggcctcggcgccaaccgcgacgatccgggctcccgccgcctgcgcatgcgcggcgtgacgccgccgcacatctacactctgaaaccgcgcgaggcattgttccacggcgtgccggcgttgcgactgacgccgatcggcggcgagagcgcgatctacggccgcgacggtttgctcgcccacacctacatgctggggccgaacggagattccaacggctgcgtgtcgttcaaggactattacgcattcctcgacgcctaccgcaacaagggcatccgcaagctcgcggtgctcgagcgggtggagtgaggcattcacgccgccatcgccttgcggcagcgggcgcgctgatgctgcgcctccatatcggcctccctcagcgcgatgcggctcgatagcgggcaggccgtcggagaaataaagctgcagcgtctcacgcgccatcaagtcagcgcgtcgacttgcgcgatgatcgcgaagcgatccgacagctcggcgagcgcgacctggtggatcgtccgggcgtccagcgttccgcctcggccgtctggcaggtcgcgcgtggcgcaggcgtcggctgcgatcgtcgtgcgcaggcctaggtcgagcgcggcgcgggcggtcgaagagacgcacatatgcgtcatgaatccggccagcacgacgttcttgagtccggtcgcggcaagccgtgtctgcaggtcggtgccggcgaaggcgttcggcagcgccttctcgatcacgggctcgcttgcgaggggcgccagccggtcaacgattgcgccgcgtgcggtctcgcggtcgaacaggccgccggcgcggcccttgtgcgcgatgtggaagatcgcggctccgctctcccgtgcccgcgccagcaggcgcgcagccgcggcgatcgcgggctgcgcatcgggcaaagccagcggaccggcgcaatattcgttctgaatgtcgaccagcacgaggcaggcctcgtggagtttcggcggattgagatcggcgccggcgagttcgagcagggtcttgggagcggtcatgctggcaggctttcctgtggatgtcggatgacgcgacactagcgcagccggcgcctgccgatgtgcaggaatattgcggcatatggctgcgaatttgcaggatgccgctgtctcctgctaggctcctggaatgaactgggacgatctgcgcatcatcgccgcggtcagggacgagggcacctatgccggcgccagcgcgcggctgcgcatcgacgagaccactgtcggccgccggctggcgcgcatccagcgggatctcggcgtgccgttgttcgaagccgtggatggcttgcgccggccgacgcgccattgcgaggcggtgctcgagcatgtcggcgcgatggcggcgcatgccgcggcgatcgaccggatcaaggagagccagcccggtccggtcggccggctccgcatcgcctcgaccaatgccattgccgaagagctgttggcgccgcatgcgagcgacttcctgcgcgaccatccagggttgacgctgcaattcctcaccgccagcggcaatgtcaaattctcgcgctggcaggccgatctcgccattcgcctgcgcaagccggagaagggcgacttcaccatctccaagcttggcgaggtcaggctgtatttcctcgagcccgcggaccgcagcgggatcgagccggttgcgtgcgtctatcccgacgaactcgacgcgatcccggagcagcaattcttacggtcgaaacgactgaagaacgcccgttgcatcaccgacaatgtccgcatcatccgcaccatgatccagtcgcatctggccatcggcgtgctgcccgagtacagctgcggcctgctgctcgccgaccgcagcctgcgcgccacgttgctgccgaggcgccgggacgtctggctcctggtgcagaaccacctcaagcgcgatccggcggcgcggctcaccatcgaatgggtgcggcagtgcttcagggatatttcccagggctgacagcccggcgacgttcacggccccgcgttgaacgcagcctgctcgacgtgcgacaaatttcggaattcgcaggagattgcgcatgcgcgcaggagttgccaatctcgcgatgacatgattttgaccagggcagttgcatgactacgtgtcaggacacgatccggccgcccgcgcggcgagcggcacaatcccgggaatggagggcgatcgtcatcctgatcctgctgatcccggtgctatggtcgccgccgttcctgtttcgctacttcctgtatcagccgttcaacatcccctcgaactcgatggcgccggcgctgacggtgggcgactacgtcttcgccgcgaagcatgcctacggctacggccgctattccgtcccctttgcgccatcctggatctcgggccgagtcctcgccgccgatccggaatatggggacattgtcgtattccgctcctcgaaggataccgcgaccgacttcgtcaagcgcgtggtcgggctgcccggcgaccgcatccagatgcggcggggccggcttttcctcaacgatcgtcccgtgacgcgtgtcgcgcagaagaaggcacaggtcggcgacacgtgcggcgtggatgacgacgcgacggcgaagctctggcgcgagacgctgccgaacggcgcgtcctacgtgactctggactgcggcgacgacgacaacctggataataccagcgtcttcacggtgccggcgggccatatcttcgtgctcggcgataaccgtgacaattccaccgacagccgcatgccggggatcggattcgtcccgatggacaatctcgtcggcaaggtcacgcggatcttctggtcgctcgacgaggacggcgagccgcgcttcgagcggctgggcaaggtggagtgacggcccctcattccggggcggcggggtcgattgtgccgcgctgtcattccgggctggcgcccaaggggacgcgccccggagtgacgttccatgaaacaaaaaccccggcatcgctgccggggtttcgcatttcgtcgtttgcctgaaaggctggactcagaagtccatgccgcccatgccgccgcccggaggcatcgccggaccggcgccgcccttcttgggcagctcggcgaccatggcttccgtggtgatcaggagcgcggccaccgaggcagcgttctggatcgcggtgcggaccaccttggtcgggtcgatgatgcccttcttgacgaggtcggcatattcgccggtctgggagtcgaagccgtaattgtaggtcttgttctccaggatcttgccgacgatcaccgagccgtcttcaccggcgttgatcgcgatctggcgagccggagccgacagcgccttgcgcacgatctcgacgccggtcttctggtcgtcgttcttggtgcgcaggcccttgagctgctcggaggcacggagcagggcgacgccgccgcccgggacgatgccttcctcgaccgccgcgcgggtcgcatgcatcgcgtcatcaacgcgatccttgcgctccttcacctcgacctcggtcgcgccgccgacgcggatcaccgcgacgccgnnnnnnnnnncgccttgatctgggccacgcgcgcctcgatgtcggccttcttgccggcgccgttgacgatcgtggtgttctccttgtcgatcatcaccttcttggcgcgaccgagcatgttgagcgtgacgttctcgagcttgatgccgagatcttccgagatcgcctggccgccggtcaggatcgcgatgtcctgcagcatggccttgcggcgatcgccgaagcccggagccttgacggccgcgaccttgaggccgccgcgcagccggttcacgacgagggtcgcgagcgcttcgccttcgacgtcctcggcgacgatcacgagcggcttgcccgtctgcaccacggcctcgagcagcggcagcagctcgttcagcgaggagagcttcttctcgttgatgaggatgtaggcgtcgtccatctcaacgcgcatcttgtcggcgttggtgacgaagtagggcgagatgtagccgcggtcgaactgcatgccctcgacgacgtcgagctcggtctcgagcgacttggcttcctcgacggtgatgacaccctcgttgccgaccttcttcatggcatcggagaggaacttgccgatctcctggtcgccgttggccgagatggtgccgacctgagcgatctcctcgttcgaggtgaccttcttggagttcttctggaggtccgcaacgacggcttcgaccgcgaggtcgataccgcgcttgaggtccatcgggttcatgccggcggcgacggacttggcgccttccttcacgattgcctgggcgagcacggtggcggtggtggtgccgtcgccggccgcgtcagcggacttggaggcgacttcgcgcaccatctgcgcgcccatgttctcgaacttgtcctcgagcnnnnnnnnnnagcgccgaacgacttgtcgagcacgacgttgcggcccttcggaccgagcgtgaccttcactgcattggcgaggacgtcgacgccgcgcagcatcttgtcgcgcgcttcaaccgagaatttgacttctttggctgccatctggaattttccttgagtggtgtttgactggggggaggagaagggctcttaagccgccttcttcttggactcgctgacttcgagaacgcccatcacgtcgctctccttcatgatcagcaggtcctggccgtcgatcttgacctcggtgccggaccacttgccgaacagcacgcggtcgccgaccttgaggtcgatcgggatcagcttgccggactcgtcgcggccacccgggccgacggcgacgacttcgccctgggagggcttttccttggcagtgtcgggaatgatgatgccgccagcggtcttctcttctgcgtcgatgcgcttgaccacgacgcggtcgtgaagcggacggaatttcatgcagtcctcctaagcatttgcacgagttgaggattttgagattgttagcaatcgttgcccgcgagtgctagcacgagcgaggctcaaataggacaggaattttgcgggggcaagggtttgtagcagaaaaattagcagccgacagttcgcactgccaggatctctcagccatcgttaaccgaggccgaggccgtattagcacggagcggcatctgctgctaacgcattgaatttcaacagcttgttaaacttttgggcttgagatggattgtcagtttgcgtcacatttctcgtctgtgagcgcatcgtttccgggtggctcccggggcacggatcaagccaccccctgaatgcgctcctgcaaaggaggtttggcatgggactgcgcgttgggggtgtttccgacgatttccggaagcagatgctgggatacggactgacgacggcacaaattctctatcggatgccggatcatccgtcgctgctccagacctatgtctggcagaactacgacatgtttccgaaatttccggcgctgaaggatttcctggcattctggcaggagaagctcgacggccctctccactcggtcacggtggcgcattccaagctgatcaagcccgccgagctgcgcgcggtggacggcgtattccggctgcattgagcagagatcaggcgcaatcgcggcagtaccgtttccacatcgcgcggtaggcgtcgtccaccgcgcgcgcgtaggagacggggtcgccggcggcagcatctctgatccgttccggcaattcgcggcgcagctgcgaaacgtcgccgatcccaaatgcgcggattgccgcgatgtcggcatatgtctgatcgcaatcggcgacccagtccggcaggccaagcgcggtcaggatggagcccgccgcacggccgggcaggctgttgccgagcttcgccaccaccggcacgcccatctgcaaggcttcccaggtgctgacgccgccgttctgcgggaatgtgtcgaggcagatgtcgatgcgattgaacgacgccagatgctcgtccctcgaagtggccccgagcagctcgacccgttcggctggcaggcggcaagctgcaaaccgcgccagcaggttgtcgcgcaccagccgatcgtccagcgcaaaatccttgatcagcaggcgcgaacctggcacccgctcgagaatcctggaccagacgtcaaccgcctcgtccgaaatcttgctgatgcgggtgaacacgccgaacgtgacgaagccgttcgagagagccggcgcccccgcccgcgcgatcccggccggcagcggcgccagggtcacgaagcacggcagatcgatgacggtctccacaaacagatggcggaccgcgacaggaatcgcgacggggtccgagaagagatattcgatcgtcggcagtccggtgccggtgccgtggccccatccatgaacctggatcggcgccggcttgcgcgcaaacacgccgaggcggttgcctctggtgtggccggacaggtcgatcaggatatcgacgccatcggcgcgaatctgagcggcgaggcgatcgtcggtccattgcgcggcgtcgcgccagcgatcggccattccttcgaattcgcgcgtcgtggcgtcgaccctcgacgaacatgaatagcacacgatctcgaaccgtgcccggtcgtggtgttgcaggaccggcttgaaaatgaatgccgctgaatgcgcgttgaaatccgacgagacgtagccgagcaccagacggcgatccggatcgcagctgttgtcgtacgggcccgccgcttctgatgcgattttcgccccgacccgctcccaccagacttgccgcgcttgctgatgctgctcgacagtcgcgtccgccgcaaagtcgagcgtgaagatcttgctggagatggcgctctgaaggtcaggctggatgtcgagggctcggtcgaaacttgcgagcgcttcatcgacccggccaagtccggcaagacataggccctgcaccaggtgagcttgcgcggaatcggaagcaagcgccagggccgtcgcgcaatcggaataggcgcgggcaatttgcttgacttggagcaagacactggcccgcgagagccacccattcgcgtcgtcgggggcgagggcgattgcccgatcgcagtccgccatggcctcgtcaagccggtgcagctcgcgccatacgacggaacggttggcaagcgcggcggcatagtcgggctagatcgcgagcgcgcgatcgaggcttgcgagagcttcgtcatagttgcgcagtcggcagagcgcagagccgcggccgttgtgggcttcggcaagagttccgtcgattgcaagcgccttgtcgtagctctcgaccgcgtcctggtgcagatcgagcgcggcgctcgcgttgccgagattggcaagggccgcggcgtagttgggtcgcaaggcgagagcctttcgatagctctcgcgggcctcatcgtgacgcttcagcccgttcagggcgatgcccaagctcatatgagcttcggcagagcgcggatccacggcaaccgcccggctcagcagggcttcagcctgctgaaagttctttgcgtcagactcgagagcgccgagcatgtgcagcgcgatgaattgggtaggcgcgatctgcaggagctcgcgataggcagctctggcctcggggaggcgtcccttcttgtgcaactcgagcgcatgcccgagcaatggcagaactacgcccttttgccgtttgtgaagccgggcattctgaaacgcacgctgaccgacgctgttgcccatgaatcattcccccaagatctcctggcgagactagttcagcgagcgagcgaagacgagacgagcgccgctcgccacgacagcttgggacaagctacgatctgctgagcaatcgaatgactggctcaagcttggcgattgctgcctcgccccggactggatagtctgcctttcgggtcgtgcccgtccggcggacgcggctcagatcagggaggcaaacaatggccaagcacaaggcatcgagacccgcaatgaagaccgcgttgaagaagcggagcggcgccaatgttgcggcgcgatcctcggcgcgcaaggcggtgaaggcgaagccgcgtaccgtcgctccaaagaagcccgtgcggccgaagcagcgcatcgccatcagccatcaccgcgaggaggacttcaaggccgacggcctgcgtgcctacgcgaagtaccgcgatctcggcatcgctgcggcaacgcacggcctcgcgcaggcgcatgtgatccggctgcagggcccgtgcaatcctgccgaggtgtcgaagctgcacttccacgacgtcgagttccagatggtctacgtgctgaagggctgggtgaagacctatatggacgggcagggcgagaccttgatgaaggaaggcagcgcctggacccagccgccgaagatcaagcacatgatcctggattactcggatgacgtcgaactgctggaagtgattctgccggctgagttcaagacggtggagttgaaggcgtaggtgctcttcctgtctttccccggatgcacaccggattgcttcgtggagcctgtcgtcgggccgcgcgctgcgcggacccgttggctcgcaatgacgagcggggagcctacgccaacactcccaccaccgcgcccatcaagcacgtggtcagcgtccccgacacgatcgacttcaagcccagtgcgttgatctcctcgcgccgttccggcgccatcacccccaggccgccgatcatgatgccgaggctggcgaaattggcgaagccgcacatcgcatagagcatgatcaggcgcgagcgcgggtcgagcgcttcgggcggcagcttcgagaagtcgacataggcgatcaattcattgagcacggtcttagtgcccatcaggctgcctgcggcaatcgcctgatcccacggcagtcccatcaaccagcataccggcgccatgacgaggccgagcaggcgctgcagcgagatcggggcaccgccgagatgcggcagcaggccgagcatggcgttgacgagatagaccagcgccaccagcaccagcagcatggcgacaatgttgagcagcaaatcgaggccggcggtggtgccctttacgatcgcatccatcgtgccggacacgtccatctcgggattctgcagagcgccgccggtgcgcttgtcggaggtctcgggcaccatgatcaggctgacgaggatcgcggccggcgcgcccagcaccgaggcgatgacgaaatgcgcggcggcgtcggggatgaggggcgccagcagcgtcgcatagagcaccagaacggtaccggcgatgcccgccatgccgccggtcatgaccagaaacaattcgctgcgggtcatctgtgccagatacggccgcacgaacagcggcgcctcgaccatgccgaggaaaatgttcgcggcggttgacagtcccaccgcgccgccgacgcccagcgtccgctcgagcagccaggccatgccgcgcacgatcggcggaaggacgcgccaatagaacaagagcgtcgtcagcacgctcatgaccagcacgatcggcagcgcctggaacgccaggatgaaatccgcgcccggcaccttcagatcgaacggaagggtgccgccgccgacatagccgaacacgaaggcggagccggcgcgggaggccgcggagatcgtgccgaccgcctcgttgatggcgccaaacgcatgcgccacgaccggcagcttcaacaacacgattgcggcgacgaaggtcacgacgaggccgatcgcggcctgccgagccgataccgcccggcggttttcgctcagcacccaggcgatcagcagcaacgcgaagatgccgagtgcagattgcagccgcagcatgatgtccccaaaccctcaacgattatggccgtgcaaacgccgaaggcaatgccgtcgtggcgccgccttctccacgtcattgcgaggagctcttgcggagaagcaatccggaaatctcaccgcggacgcagcccggattgcttcgcggagcctgtcatcgggnnnnnnnnnnattgttgagataatctgcggacttagctcgcgccaccccgcagcggggcaagcagtagacgcctcttgacgcctactgtgcatgaggttgttttcgcgctttgggtcagccccgtccgacgaacggcatcttggttgccatcaccgtcatggtcagcacgttggcatcgagcggcaggctggccatgtaggccacggcgtcgccgaccgccttggcgtccatgcgcggctcgtgcttggtcgtaccgtcgggctgcagcacgccggggccgttgaccatgcgatcggtcattggcgtcgcggcgttgccgatgtcgacctggccgaccgcgatgtcatacatgcggccgtcgagattggaggccttggtcaggcccgtgacggcgtgcttggtcgaggtataggcggcagagaacggccgcggcgcatgcgccgagatcgagccgttgttgatgatgcggccgccgcgcggggtctggtccttcatgatgcggaaggcgtgctgggtgcacaggaacgggccggtgaggttggtgttcacgaccgcctgccattgctcgaggctgagatcctcgaagttcacggcgggcgcgcccctgccggcattgttgaagagcaggtcgaggcggccataggttgccttcaccttgtcgaacagcgcggcgatggaatccggcttggtcatgtcggcggtgacgcaaaggctttttcccgcggggccgagcttcgcggtctcctcgagcatgtcgagccggcggccggcgagcaccacggtgaagccggtgttcatcagcgccagcgacgccgctcggccgacaccggtgccggcgcccgtcaccaatgcgatcttcttcgcttcactcatcgtttcctgccttttctcgagctgttcaggtcttgggttctttgtcgttcttgtaaggcgggcgcggaatgttctgatgcgccgcgcgcagggctgccgaccagcgcgagcgcagatcgtggaaataaggctcgcccgcctcgatacggtggttgagatcggcctcgcaggcatcgttgcgcaccaccagcacgtcgatcggaaggcccacgccgaggttcgaccgcatggtcgaatccatcgagatcaggccggtcttcagcgcctcgtagagctcgacatcgtagtgcatggcgcgatcgagcaccggcttgccgtatttgtgctcgccgatctgcaggtagggcgtgtcggtggtacactcgatgaaattgccggcggtgtagaccatgaacaggcgcatgcgtgcccccttgatctggccgccgaacaggaaggagacgtcgaaggagacgtcttcggatttcagcgccggcccttcggtcgcatgcaccgcccggatcgcccgcccgatgcgctgagcggcctggaacatggtcggcgcgttcatcagcgtctcgacctcgcccgtgttcgggtcctccaggccctcggtcagggtcgagagcaccgactggctgatggcgaggttgccggcactggcgatcgccatgatgcgctcgcccggcttggagaagatgtgcagcttgcggaaggtcgagacattgtcgaggccggcattggtgcgggtgtcggcgatcatcaccagaccgtcccgaaccaggattccgcagcaataggtcatttccagtccccgaacgcgtttgcgcggaattactagccaatttcagggggccatgaaacccccgattcccgcgggggaaagctgtcattccggggcgcgacgaagtcgcgagcccggaatccattgggctgcggcactggtggatgaatggattgcgggttcgcgctacgcgtgccccagaatgacaggcaaggtacgctgctgcgaccgccgacctcaatccgcgccatcgaccagaaacgcctggtcgaccgggacgccgagcgccgtgaccagccggttcgtctcggcggccatgccgacgatggcgagcagctcgccgtattcggcctcggtcatgcccttggcccgtgctgcggcggtgtgcgaatggatgcagtagctgcagccatgcgcgatcgagaccgcgacgtagagcatctccttgaccttgggatcgagcgcaccaggcgccatcacctccttgatgctttcccaggtccgtcgcagcgtcttcggatcatgcgccagcgcgcgccagaaattgttgacgaagtctgatttccgcaccttgcggatgtcgtcgaaaacggcgcgcgcctcggccgagagttcatcatccgaaagcagtttcacagtcgccatgggccacctcacaggtccgatctgatcctgcaatgtagcacggcgcaggcgctcggcggtgcctagctctgtcgctgcgactgcgattgcgactggccgccgcggccggcctgctcgaccttcacggtcaccgccagcgtttccgtgccgccgccatagcgcgtgccgcgcaccggggccgcgccgagatagtcgagcccgatcgcgacgcggacatgggcatcggtggcgcagatgctgttggcgggatcgaaaccgacccagccgagatcgggcacgtaagcctccgcccaggcatggccagcttcctgatgcaccgcgtcgtctgctcgcaagaaatgcccggagacgaagcgcgccggcacgccgccggcgcgagcgcaagcaatgaagatgtgcgcgtagtcctggcagacgccgcgcttgagcgcgaacgcgtccgcggcggacgtgccgctgttggtcgggtcctcgtcgaatgtcatgtgatcggcaatctgcgtcatgagcgtgtgcaggaagccgagcgtgtcgctctcggcctcgctccgcagctggcgcgcgaccgccgtcatcgccggattgacgcaggtgaggtcagtggagcgcaggaacatgccggccgggaaacgctcgtccgtgccgcgcaggacgccgccggtgtcgtgggtctcgaccagtccttcggcggtgatccggatgtcgccgacgggcccgcaggacagcacatgggtgacattgccgaacgcgtcctcgtgcgtgtcgagcttggtgtccgtggagacgtcgatctgccattccgcgacgtattgcccgtcgtggctgcccggcgtcatgcgcaggatctggatcacgctggtcgccggcggctcgtagcgataggtcgtggtgtgctggatacgcaggcgcatggtggaccgttttgttctggcatcgtcattccggggcgatgcgccggcatcgaacctggaagctcgaggtttcgggtctgctccttcggaccatcccggaacgacagcttgggtcagatcaaatactgcttcgtgatgatttcgcccagccttgaattgtccgtgatgaattcctgaatgaattcatgcacgccgtgctggaaaatgtcgttcatgttgctgtgttccagccggttgcggatgccgcgggcgtggcgctgggcggggccctggcggccataggcgacgccgatctggtcgaggttgcgcacgaggttgccgtagcagctcgccagcgagcgcggcagcgtgtcgttgaggatgagcaggtccgcgatcagccacggcttcagagtctcgcgatagacccagtgataggccgtcagcgccgagaccgagcgcaggatcgagctccattgatagaagtcgagcgggccgccgacgtgctcctcttcgggcaatagcacgtgatacttcacgtcgagaatgcgggcggtgttgtcggcgcgctccaggtgcacgcccatccgcgagaaccagtaggcatcgttgcgcagcatggtccggtaggccgagccgtcgaatcgcagcgaggtctcctgcacgaagcggaggaacttggcgagatcctcgcgggtcgaggtgcccttgctccacactgcctggagctcgatccaggccgagttgatggtgtcccacatctcgctggtgagtgcggtgcgcaccgagcgcgagttcagtcgcgccgcttcgatgcagttcctgatcgaggacgggttgttcggcgagaacgagagatactcgacgacgttgtgctcgttggcttcctcataggcttgatagaagccggcggcgacgccggcggtgagcagcgccgagtcccattcgttggtcttgccgatataggcggcgggaagcgcggtgacgcgcagcgtcgcatcgatggtgcgcgccagatattcggcccgttcgacgtagcgggcgagccaatagaggttttcggcggtacgcgacagcatctctctactcgtccaggatccaggtgtctttggtgccgccgccctggctcgagttcaccaccagggagccttccttgagcgcgacgcgtgtgagcccgccggggacgatggtggtgctcttgctgccggtgagcacgaaggggcgaagatcgacatggcgcggcgcgaggccggattcggtgcaggtcgggcaggtcgagagcgccagcgtcggctgcgcgatgaagccttcaggctcgcgcttgagcttgtcgcggaacgcttcgatcgtcgctttggtcgcggcgggaccgatcagcatgccgtagccgccggagccgtgcacttccttgacgacgagctcgcttaaattgtccagcacataggcaagatccttcggctcgcggcagcgccaggtcggcacgttcttcaggatcggctcctcgccgagatagaacttcacgatgtcgggcatgtaggagtagatcgccttgtcgtcggcgatgccggtaccgacggcgttggcgagcgtgatgttgccggccgcgtaagccgacatcagcccggggacgccgagcacggaatcgggacggaaggtgaggggatcgaggaaatcgtcgtcgacccgccgatagatcacgtcgacccgcttcagcccctccgtcgtgcgcatgaatacttcgttgttcttgacgatgagatcgcgcccctcgaccagctcgatgccgagcttgtcggcgaggaaagagtgctcgtagtaggcggagttgtagacgccgggcgtaagcagggcgacggtcggctcgccggatgcgccttgcggcgcgaccgagcgcagcgcggcgagcaattcgtccggatagcgctcgaccggcgccaccttgtggcgggcgaacagatccggaaacagccgcatcatgatctcgcggttttccagcatgtaggagacgccggaaggcgtgcgggcgttgtcctccagcacgatgaagtcttcggcgtcgacccggacgatgtcgatgccggcgatgtgcacgtagacgtcgtgcggcacctgctggccgttcatctcgggccggaacaccgggttctgaaagatcagatcgtcgggcacgatctcggcgcggaggatctcgcggccgtgatagatgtcgcgcaggaacatgttgagcgcgcggacgcgctgcttcaggcccttctcgagcagcgcccattccttgccggacatgatccgggggatcacgtcgaaggggatcaggcgctcggtcgattcggaatcgccgtagaccgcgaaggtaatgccgattcggcggaacaggagttcggcctcctggcggcgatattcgagcgcctcgggaggcgtctccttgagccagcgcgccagctcctgataggcggggcgaaggtccccgccgggaatattcatttcgtcaaacgcggctgccatagattccgactgttctcccccagggcgttgcctgtggccatgccgtgagagtgcatgacttccgtaggaggtagcaagggccgggccagcgcgataagcatggaggagagacgtttgccgggaacggccagcgacttgcctgaaaaaatggctgaggactgcttatttcagaagcaaaaccgcgtgacttcaaggcgttacctcggcaaagtcggcgtcacaggtgagggatttaaggcatgagcgacatcgtcacggcgggcattctggtcattggggacgaaatcctgtcgggccggaccaaggacaagaacattgggttcatcgccgaatacctaaccaatatcggcatcgatctgaaggaggtccgggtcgtctccgatgacgaggcagacatcattgccgcgctggacgcattgcggcatcgctacacctacgtcttcactaccggcggcatcggtccgacccatgacgacatcaccgccgacgcggtcgccaaagcgttcggggtccggatcgaccatcacccggaggtcgtcgcccgtttccgcgagcgctggagcgagcaggacctcaacgaagcccgcctgcgcatggcccgcatccccgacggggccgagctgatccagagcgcgacgattctcgctcccggcttcaagatcggcaatgtcatcgtcatggccggcgtgccctcgatcatgcaggcgatgatggacatcgtcgcgcccaagctgaagtcaggcgtgcggatgctctccgaatcggtccgcgccaatgcgcgggagggcgacatcggcgggcctctgcgggcgattgccgccgcccatcccgacaccatcatcggcagctaccccttcatggacgaggagcagaagccgaacaccaatctggtggtgcgctcgcgcgatccggagaggctggcagcggcaatgactgctgtgaaggaaatgctggcaggattgaacgtctcgcgctagcaccggcagacgcagcaggagacgacaatggctggcgaagcaccggaaccgagcgcgcaggagcgggcgggcaggcccttcccggtctcgtgggaccagttccaccgcgattgccgcgcgctgacgtggcggctcaacgaggtcggccctttccatgcggtgatcgcgatcacccgtggcggcctggtgccggcggcgatcgtggcgcgcgagctcggcctgcgcgtgatcgatacggtctgcatcgccagctatgatcacgacaagcagggcgagctccaggtcctcaagggcatttccgacgcggtgatgaagctcggcgagggcaccggcaaggggcttctgatcgtcgacgacctcgtcgacaccggcaagaccggcagactggtgcgcgagatactgccggacgcgcacttcgccacggtctacgccaaaccgaaggggcgcccgctggtcgataccttcatcaccgaagtctcgcaggacacctggatcttcttcccctgggacaccgcgctgtcctaccacccgccgctgcgcgatggcgcggcctgactgagcgcgaatggtgactagcgagtagggaatggtgagtagtgaatccccaattcgcaattcgccattcgctacccgccccctgcaaaaccgcgtcacgcccaccggcgagatcatcgccacgccgcatcgcggcctgttcaccggcaatcgcggtatcatccatgatcccgcgacgaagacactgctgaacaagcgctggtcgtcgccggcgtggattacatgcctgtgtgaattccgcggctggcggcgcccggtgatggcgcggcggagctggaccgagctgttcttcctcgacgaggccaccgcctttgccgcgggacaccgtccgtgcttcttctgccgccgtgacgatgccaatcgcttccgcgcggcatgggagaggggcaatggcgcgagcaaggtgagcgcaaaggcgatggacgcgcagctgcacctggagcggctgcatcatggtcgcaagcgcctgcatgcgctgccggtgcagcttgcagaactgcccgatggcgcgatggtgcagcagggtgagcagagctttctgatgacgagaggccggccgctgctatggtcgccggccggctatgcccgcgtggagtacgagctggagggcccgatgctgctgacgccaccctccacactccgcgcgctcaatgctggatatcagccggcgctgcatccgaccgctctggactaactggcagggcgatctgcggatcgccgccgtcaccccagcttctcgcgtgccagcgcggcgccggcgccgagcgccatcagcttggcttctgcgatctcccgccgcatcggcgccatgccgcaattggtggtggcgatgatgttgctcttgggcacgaattgcgacaccgcgtcgatcaccttcacgacgtcctcggcggtctccaccgtgtcgctggcgacgtcgatcacgccggcctgcacgatcttggtcttgagcagcgccagcaggtccagcggcaccttggaattgcggcactcgatcgcgacctgctggatcgggctcgcgtcgatcgccgggaagatctgctcgtactgccgccattggctgccgagtgtctccttccagtcggtgttggccttgatgccgtagccgtagcagatgtgcaccgcggtggcgcaggtcaggccctgcgcggcgcgttccagcgccttgatgccccagtcgttgacctcgtccatgtagacgttgaaggcgggctcgtcgaactgcacgagatcgacgccgtcggcctgcaatgccttggcctcctcgttgagaagctcggcgaaggcgaaggccatcttcacgcggtcgccataatagcgatcggcaatcgtgtcgatgattgtcattgggccgggcagggtgaatttcagcttgttcctggtgtgcgtgcgcgccacgcgcgcctcgaaggcgtgcacgcgtcccttgagccggagcggagcgaccacctgcggcaccattgccttgtagcggtcgtttcggatgcccatctcgaccttgtgggcgaaatcgatgccctcgatcctctccaggaaaccgtggacgaaatgctgtcgggcctgctcgccctcggtgacgatgtcgatgccggcgtcttcctggatcttcagccagatcaaggtcgcatcgcgcttggcccggagcagctcgtcgccgtcggacttccagggcgcccacagcatgttcggctccgccagccattccggcttcggcagggagccggcgatcgtggttggaaacagcatggcggccctcccggcaggttgtgttgcgcctcttcctgccatgacttaacctctagcagtctgctgaaaaaccggcaaatt

SEQ ID NO: 314 - DNA, 8883 bp, Bradyrhizobium colbertium
  misc_feature (4019)..(4028): n is a, c, g, or t
  misc_feature (4122)..(4179): n is a, c, g, or t
gagcggccggaaatgtgggtaattgaaagccggtgaaggccgcgggttagctgcgtttggcgcgcttgccttcgggtttgcgtgaccattttttggcgagggcctcaacttccgtggtgagccactcggcctcgtcgatgtcaggatcgaagtcgtcgccgatccattcggtgagttcggcgtggcgttcgtgggtggggtccttgatggcttcgaggagttcggcatagccccagggaccgccacaatcctcgggaggacagcggccgctgacttcgatcagacgcggatagagcacgcctggctcgggatcgatgaggcgctcgaccttgatcgagtgctcccagccgtcaccgaagtcatagaggtatgtgagcttctttgttccgacatcttcgaggatatcggtaagccgagccttgcgggcatcgaggaactcgccgacgccccaatctgcatccgggtaaggcgtgctccacccgacgtcgccggcgcgcagctcgtagagatggctgttggtccaacccatggccgctcggatggtcaggtgcaggcggtcgagcttgatgtcgaatggcacatcgacccggcgcagaaccaccggcttgacgtcatcgagcgtaatcttgaggcgagcgattccgacggtcataccgccagtttacggcgctctatctcggaggcccagctccatggcaggagttcctcgagcctgtggacagcgtgatcgttgatgcgggccaagacgtccgccagccaggcttgcggatcgacgtcgttgagctttgccgtcatgatcagcgtcgccatgatagcggcgcggtcggcaccacgttccgagccggcgaacagccaggacttgcggcccaaggcaaagccgcgcagcgcgcgctccgccgcattgtttgtcaggcagatccgcccgtcatcggtgaagcgagcaaaccgttcccagcggcgcagcatgtaatcgattggcttggcgaccgcggacgagttcgacagccgggcacgctgctcgcgcagccaagcttccaatgccgttaaaagcggggcgctttgttctttgcgcacccgcagccgctcttcggcgctttggccgttgatgccgcgctcaatatcgaacagtgcatcgatgcgcttgaccgcctctagggcaatcggcgagatcgccgcggcgttcttgccggccctcgcattggcggcgatgtccgccagctcaaaaaactgccggcgggcgtgggcccaacagagtgcaggcgtgatcggtccctgcgcgcgcgaggcgtcatatagctcattgtagccgctataggcatcggcctgcaggatgccagagaagctttggagatgccgtgtgggatgctcctgccgccggtcgcgcgaggcgtaatagagcgcacccggcggcgcccgtccgccgaacggccgatcgtcgcgcacataatgagatggacggtccccgccctgataagctgcgaaagggcacccaagaaggaggacaagctatggtgacaatcgggcttgatatctcgaagagctggtttcaaatccactggattacggcggatggagaaattatccgcaagaagctcgcccgcgggaaggttctcgatttcttttcacggcttccaagttgtctcgttggtcttgaggctttgcggcagcgctcatcattgggctcgtgaactaataaagcttggacacaaagcacgtcttatgccggcccgctacgtccgagcctacgtgaagacaaacaagcatgatgctgctgatgcggaggcgtgctgggaagccgtccaacggcctggcatgcgctttgtccctgtaaaaaccgtcgaacagcagggaattttaatgctacatcgcacgcgagatttgcttattcgacagcgcacaggcgcgataaatgctctgcgtggtcatttgggcgagttgggaatcgtgaccgggaagggaaaagcaaacgcgagagagctcatggcactcgtggacgttgacgagcgcatcccacagagcgcgcgtagcgctctttcaatccttgtcgatcagatcgaagaccttgagctacacattgaaagccacgagaaaatgatccttgcaactgccaaagacaatgaagtctgtcggcgtctcatgaaggtggcgggcatcggcccatttgacgccaccgccctggcggcgtctgtcgatcatccacaacagttcgcttcggcaaggcatttcgccgcctggcttggattagtaccgaagcagcattcgaccgggggaagggagcgtttgggcggtatcagcaagcgcggcgacggctacattcgtaagttgctaatacatggcgcccgagcggccgttcatcgcgtccgtatccatcaggtcaccaatacctggataacagagctgctcggcaggcgtcccttcaatgtcgtgacggtggcgctcgctcacaaaactgcacggatcgcttgggcgatcatggccaatggtgaagaataccgcgcaagtataaatcgagcgtggctccgtttgcgagggcaaagcagagtgatggcaaccagtcggaccggggtcggctaagcccgttggacctatcgagcttcagagctcgccaacgtaattgggcgccgatccgcggatctcatcaaggctcgtggcatgccataaagccggatagatagctgcaaacgatcgttagccaaaacaaagcaaatggccttgcaaagcggggaccgtccatagataggtccagatccgcccggtcgtgcacttgctcttggccaggatgcggatggtggtgtcgtcgccatgcagacgctcggcagcgagcacatgacgctcgatcaggtggaagagcggcatgacggcgaaggtcccgtggccgacctgatccgccagcgtcgacagcggcaggtcgatcctctcggccttaaagcgcgcactctggcgattgagcgggatgtgcataccgaacttgtcgaacaggatcgtcgccagcaattgcgggccgatgaagccgcgcggcgtggcatggaacggcgccggcggctggctgatcttctcgcaatcgcggcaggtgaacttctcgcgcactgtctcgatgaccttgaagcgacgcgggatctcctccagcgtctcggtcacatcctcgccgatcttcgccagtcgcgatccgccgcagcaggcgcagctcgtcggagcgtcaatgacgacgcgctcgtgttcgatatcgtccggccagggcttgcgcactggtcgcttgcgcgtgaaggggcggacgttctgcgtcttcgccgccgcggcctgcgcggcaagctcatcctcgctcgcggtggtgacgagttcttcgagctccaattccaactctcgatcagccgcaccgtgcgctcggagcgctgcccgtacagttcgtgtttgagcttctcgatccgcagctcgagatgcgcgatcagcgccgcgttgtccgacagctccgcccgcgcactggcagccaccgcctcggctcgcagccgcgcctcacgctcggcctgcagcgccgccagggcactcgcaaggtccgatggaagatcgtccggcttcgctatcatgaagccattgaatcagatcaagcgccagattcaaacgcaaaacgctatccgacccgcgtcggacgttgggtttcttgagggttgcgccaatcgattccggacaacaggtagctcatctgcgccggtgagatcgttacggcttcgcccgcaaccgatggccagatgaactttcctctctcgagtcttttggtgaacaggcatgctccttggccatcgtgccagatcaccttcacaagatcgcttcggcgaccgcggaagacgaacagatgaccgctgagcgggtccttgcgcagcacctcctgcacttggagtgctaacgacggaaagcctcgccgcatgtccgtgtagcccgtcgcgagccatactcgcgcgcccgtcggaaccgggatcatcggcgtaccaaagcattgatcttcccccgataaagtggacgggttnnnnnnnnnnttcaccggagggttacggcctacgcaccggtcgcttgcgcgtgaaggcgcgcacggtctgggccttcgccgccgcggcctgcgcggcaagctcnnnnnnnnnnnnnnnnnnnnnnnnnnnnnnnnnnnnnnnnnnnnnnnnnnnnnnnnnntcgttgtccgacagctccgcccgcgcgttggcggcatctgcgacggccacatcgcgttcagcctgcaacgcctcacgctcggccagcagcgccatgtaggcactcgcgaggtccgaaggaagagcgcccggcttcgatgtcatgaagccattgaatcagatcaggctgcagattcaatcgtaaaaaggctatccaactcgcgttggacgccgtgtttcttgagggttgcgccagtcgattccagataagagataactcaactgcgccggagagatcgtcactgcttcgcccgcaaccgaaggccagatgaatcttcctctctcaagtctttttgtaaacaggcatgccccctgaccatcatgccaaatcaccttcaaaagatcgccgcgttttcccctgaagcagaaaagaccaccgcccatggggttgtgcttgagcacttcctgtacgcggagagccaggctcggaaagccgcaccgcatgtccgtgtggcccgtggcaatccagaccctgacgccgcttggaatcgggatcatcgccgcctcagaagctcaaggacgcgctgcagcgcttcaccgtcgacgtcccggtcaacccgaacgcgacagcctccgccaagttcgatctcgatgattccagtcctcgcacgctgcgcaggcggcgaagacgccggttgcggcgcgctgatcgatatcggagccggcgccggagtgatttcgacaggaacgagaactgacaccgcgtcaccgcccaggcggccctgtcgcgcctgccgacgccaggtgaacagcaggctcggagccaccccatgccggcgcgcgatcccgcagaccgtctcacaagcttgcaaggtctcctcaacaagtcggaccttctcgtcgtaacgccatcggcgccggcgctcggcgcccaataccttcacctgcatagcggcatgaccttaaggctagacttaaggtcacatcctcagaaagacgcccaaacttcacaagacggccgccgccggagggatactctcatcatggcctggctgcaacagcagtccactcgcgagaggccggatacatttatgcaactggaatcgtcgtcggcgatgtcgcgaacccttgcacggacggggcggaccatacattctttcccaagaggttcttcaaggccgcgttgtccagcatggcgtcggccagcagccgtttcagccgcgtgttctcgtcctccagcgtcttcagccgcttggcctccgagacctccatcccagcgaacttggctttccatttgtagatgctggcgtcgctaacgccatgcttgcggcacagatcggcgaccgacacgccggcctcatgctccttcaaaatcccgatgatctgttcttccgaaaagcggctgcgcttcatgctctggtccttgtcgtgggccagagcgaacttcaaactggattaagtccgtggggcaaggtcacgtgcgcaagcgatcctgagtggttttctgctccaatccaatcttgtcgtccgcgagccgctctgaggcgaaacagccaagatcatcacggcttcgaagccgaaaggggacgatgcgctcggctgcgactaaaaccaggagcgaagccccacaacgaacttcgttgagccgctgtccttgcccgaagcctttgcgtactcagccgtattccctagtttctgatcgtacgaaatgccaatatagggagcaaattcccggcggaattcatatcgcaggcgcagtcccaactcggagttggagaggccggctccaactccaatgtcctgcgaattctgagcagcgaaattcagttcggcgcggggttgcaggaccaactgctgagttaagagcagatcgtaagagccttcgagccggccgagcagttctcctctgttcgaaacaaagagagctccgtcgaactcgaaccaatagggaaacagttgctgcacgccgaacgtgagataggcccgcgtcggatccggcttgaagtcgtagcgaatacctgcctggaggtctgtatagggagccacggctcgcgaatagagcaactggacttcagcgctgtcgagaccctcgcgacggctcccatcgccctggctcttgacaacgaaccggttgatgtcgccgccgagccaagcctgcccgtcccagcggtagccgcccggctggcccaattggaattcagctatattgaaaaataccttcgaatagatccctccgccttgctcttggcgaagttcgcggcgcgcctcggccatctgcgctggatcgtaataatagtcggcagcgtgatatgccggaggcggaggaggcggtgagtatggaatgggggccgcggcgggagcggtttttcctcctgccggcttcattcctggcatttgcatgcccggcatcgacatatcctgagcggattgcgaagccggcgacttctttgcagctgccggtgcccttcgatccccaggctttttctgcggcttagccgcattcggctggctcgccggcatgttcatgccaggcatattcccactcatttgagctgccgccggaacgctgcaagtcccgatgccggctgccgctaggatcagcacagacctgttcatgcgttgtcacctgagagtggccgcacactgaacacctgaaacatgccggcgtgcatgtggtagagcatgtgacaatgaaaggcccagtctccgggttcggcagtgatgtcgaagctcacctttccaccgggcaagacgttgaccgtatgcttacgtggtttgtggctttcgggagctccattcaccacctcgaaaaaatggccatgcaggtggatgggatggagcatcatggagtcgttgatcagcgtcacacgcacacgctcgcgttttctgaacgtgtagggctttgtggtttcgctgaatttctctccatcaaagccccacatgaacctttccatgttgcccgtgagatgaatgtcaagggcacgggtgggggtgcgagcgtcgggattgcgctccaaggcgatcaaatctctgtatgtcagcactcgatgccctacgctttcaagccccatccccggatcgcctgttcgatcctgcggcatgggcgcgatcgtctggacacccggtcccatctttacgcccggagcattttttggatcacgcatgtccatttccggtccgctcatcacgtcagaaccgcgcggcttgggaggagccattccgggcggcgtggatgatgacatcgaactcatgcccggcttgccggacatcccgggcattccttgcatgccggctgactgctgcatcccttttcgagctcgaccggaaatctgggcgccaccaggcatgctcgacatacccgacattccgttgttggatgctgccgatggcttcatgtcgctcatcttcatggcggacatgtccatgcccatgtctttcatcgtcgccagcggccgctcgcggagtggcggcaccggcgccgtcattcccatccgtggagcgagcgtagctcgccccatgccggaacggtcgacggcttcggacacgatcgtataggctttatcttcccgaggctgaacgatgacatcataggtttcggcgttgccgatttggaattcatccacctggaccggccgcaccatctgtccgtccgcggcaacgacagtcatatgcagaccgggtatccgcacgttgaacaccatctgcgcgcccgcgttgatgaatcttaagcggatgcgctcgcctggcttgaacagacccgtccagttatcttccggtccatgcccgttgatcaggaatgtatataccgcacctgtgacatcggaaatatcggtcgggtccatcagcatcttggcccactgcagcctctcggccagtgtttggtcgcggccggcgagcagactggcgacagtttgccgttgatagttaaacacgccgccttcctgcttcaatcgttggatgatcagctccggagacaggaaactgaagtccgagagcatcaccacatactcccgatcatagcgaacaggatcagcgccttttggatcgatgataatgggcccgtacagcccgacctgctcctgaaagccagagtggctgtggtaccaatacgttccgttttgaatgacaggaaactcgtagacgaacgtgctgcgcgcagggatccccggaaatgtcacgccgggcacgccgtccatgcgaaacgggaccagcatgccgtgccaatgtatggaggcggtctcgtccatacggttcgtgacagctatccgtaccctttgtccctctttcaggtgcagtatcggacctggaaccgtgccgttgattgttatcgccgagcctgcctttccatcgaccggccaaaccgctctgtcgagcgtcagctcaatgttactcccggaaacttccgaaagccggcttggtggatgtaaagggctgctttgcgcccagctcgggagtgctgacgaggccaagccagcagcaccggacagggaggcgagacggagcaattggcggcggctgagctcgttcaatgtccaatctcctacacggttcggcgccgaagttcggcagaggcgatcgagagtacccgcacggggagctgcagtctcaataacatgcagcaagaagcgtaagagcggcgcctcggcaaagatattctgtctgaatgtgaccgcctggccacactaactggcggcttttgccgcgcggcaatcagggtgacagtgga

SEQ ID NO: 315 - DNA, 9048 bp, Bradyrhizobium colbertium
  misc_feature (624)..(639): n is a, c, g, or t
  misc_feature (3040)..(3049): n is a, c, g, or t
  misc_feature (7865)..(7888): n is a, c, g, or t
ggcgctgcaccaaacttgcgtcagagccaattttggacgccgatcccccggcttacggggtcaatattgcaagccgaatgacagcgatgcgcgtatagcgggccgccctgtcactacctggagccggtagtgacagggcgggcaaacgcccctgccctgtggtggcgcggcaacacgcgccatcgagagggcgcaccctctcaacctctccgccttgccatgcttagggcttcgccttcccgcagggcagcgggcgctcgggccgcgcccacacccaggcccaacgctcactcactacagcgcactgtgggggcgcgttcgttcgcgttgccgaaagcaagaaaggcaacacacatgggtgcatcggagatcggccttacatctgtcatcgaggcaggctgtggccgcacgtcatccggtgaatgacgcgaagggatgcacgcccgtctagggccggttctgtgtgtgttgaggtggcgcaatcgccgcctatgccgtcaagggcagtgcaagcggcctccggccgccctatgacggcggcggcagatcgcgcctagcggctgccatggctcaagcggcgaagtggccgcttgcgcctggccgttttggttttcttagaaagtnnnnnnnnnnnnnnnnccagccgcagcgcatggcgctgttgcagtttaccgcccgtctcctgggcgagcgcggcaatcacataagcaacattgtggttcatgctgttacctcgacagaacggaaagcgaaagtgataggacgcgaatgccctataataaagcaccttagctgcgcaaatttattgaacgacttacgatgcaggcatgttgcgcccgcatcgcttgatttacgccctcgccttcatggccggagcggggcttatcgctaatgcgaatgctgccgaatgggccgactacgccactgtcagcatgaccgatccggttacgccaaagctgacggcgaaccgactatgttacaccgacggccgcgacgtggcgtgcgacggcgcggcggggctgctttccagcagcggaagtctggtgatctccacagtggcggcgggcgggcttagcgtaacaggcaacaccagtttgaccaatgtgaatgccagcggcatcgctcgattcattggcgtgatttcagatacgaatcaaacaaacctgcggctcaccgcgccgggaacggcacaaatccaaaacgtcggcttgagcttttacccaacgttcgacggcagcggctccgacaacggcccgcgccgcgtggccgatattttggcaggcttcaacggcggcgcttggggacatcaatatctatcattcaacgtcggggacgtaaacaacgataccggcgcgctcacggccgaacggatgcgcatcaccgccaatggctctgtcggcatcggcacgtctacgccaagcacaacgctctacgttaatggcaatacaacgttggctggtgagcgtacttatctcgccgggtttgatgcctcacacatccattggttaggtatcaataacggtagcggtgaaccatccaacctttttatgggttttgtatcactagatggtttgactgccgaccgcatcaccatgaatcctggcggcagcgccagcagccttattgttgtcagcaccggcctagttggcattaacctctcgcgtgaccctgtgaggtcgcttgaagtgtccggcaccatcagtgccaccaacctcgtcgttggcggttgcaccggctgcggaggcaagggtgctgatcggcaggtgtttactgtcagcggcacctggaccaagccgagcggctacagcaccaacgcgatggcgtatgtgcagtgctggggtggcggcggcggcggtggcagggcaggctacagctcctggacgggtaatggcggcggcggcggcgcttaccgtgacgggtggttcctgctttccaccctgggtgccaccgagacggtgacgattggggccggcggcggagtaggaactgcgggctatggcgttggctatgcgggtggaaacagcagattcggtagtaaattgactgcgtatggcggcggcggcggcggatcgtccagctccagctggactgcggcaggccagggtggccagcttacggcagccggtacgaacggtggtgctaccggcaatccgattacgacagagagtgtgggaggcgatggcggccaaagcagtatcataggtgccgctggcggggcgtcgtactttgggggatcgaccacacctgccggcacgtcttccatgggtggcaacggcggcgggattggcgcgaacggcagtgcgccaggtggtggtggcggtggagcttatgccactaacggcgggtatggtgccgccgggcagtgcatcgtgagcgtgttcaactagtttacatgcaacagcggggtcatggtcacgcatcttaccgtcaccaacggcgttcgtgtcaaccgtcacagggctaggctcgcacgcacgcccagcaaacctataggctgatgctaaagctcgccgctgagggtgttgcggcctgcaccaccatcgcggcggaactggagcgacccggcttcccggccgtcgtgacgggcgcatcacacgggagcgcctttatgagataaggcaacgattgcgaaaaccctaagccgaccaagaatacgcatggcttgcgccatctgctacttgcgaacaacacccgtgatcgtgcggttacgatcccaatacgtcccggttgccttacagggcgcacgattcgcaccgcgatgtatcgtgacgaccttacggttgcagacaacgcaaagccggacgggtcagccacaggtcttaccgatcgcgggcgagctgtgcaggacatctcaagcgtgcttcggctgggaaatcgccgccggtgccaacgcccaaattcggttaacaaaatgcaaaaaagcgggtttttccgatggattcgactttgattctatccgactgttgcattcgagcaatagtaaccctggtcatcttcaactaagttccgtcatcagagacgaagggcgtctccattggannnnnnnnnncagccacatttgcgttgcttgttgctggcaccgccgctgcttccgcagctgaccttccaacccgcacctacacgaaagctcccgtcctcgttcaggtttataactggaccggattctatatcggcgtgaacgccggcatcggtggcgataaaaccgattataacttcggcggcgttgccagtggcaatgtcacgtcgttcggcggctttggcggcggtcagatcggttacaactatcaattcgctggtaactgggttgccggtatcgaagccgacattcagggcggcagcctcaagagcgaaatcaatgcgagcattccaccggtcgggcttagtggcggaactgagatgaagtggttcggcaccgtgcgcggtcgcctgggctacgcatttgatcgcgttttggtgtacggcaccggcggctttgcttacggatcggaagacacctaccttaacgcagcgccgcttttgaccttctcgcgcagcgctgacctgacgggttggacagcaggcggcggcgtcgaatatgcagtgacgaataacgtctcagtaaagaccgaatatctctactttgagttcgaccgcaacaacatcgccgcgatcggtccgactactatcgacaacaaggtcaccgctcacactctgaaggtcggcttgaactacgctttcggaaaatgactttcgatttcgctaaccaagtttggtatacttcaaaccccggctgaaaagccggggttttttgcgattggtagtgatcggccaatccgatcagcaacacctcatgtgattgcagctgtcctccagccgcaggctataagggtagctccaccgcctacgcgatctgcgcacgtttgcagtaagcgatgcggaaagtcgtctggcagcgacacgcgagcgcaacagttatgtgcataagtcaaaacttatgcacataaagaaagccgagtgtttctaggcgcttgtgccgtgcataagtctcgtgcataataaggcatgatttccggctacgcccgcgtatccaccaacgaccaggacaccgccgcccaagtggagcagctcatggctgccggtgcggtcaaagtgttccgcgagaagatcagcggtgcgaccgccgagcggccgcagctcaagaaggccctcgcctctctcgaccaggcccagtcggcccgaagctgcgattttggccaactcaaagaacggatagcgaacgtgcagtcacgtagaagctgactccggaccttgaccttccaacgcgcggtagacagtcatcctggaaatgttcagatcacgggcaacggcggctttcgttgagccagccgtgatccgcctgcgaatctcggcgtcatcgacattcttcttcctgcccttgtagatgccgtcaacttttgctgcgtcgatgcccgcacgttgtctgtctttgatgaacttgagttccatgtccgcgaccatgccgaggatggtgatgaccatccggcccatgctgcccgccgtcgtcacttcgggttcaaggacgcgcagggatgcgcccttttcgtcaagctcatgaacaagattgagaacgtcgcgggtggagcggccaagccgatcaagccgcagcaccaccaactcgtcgcccgcatgcagaaactgcatgatggtttccagctcggatcgccccttccgggacgctcccgatccggtttctgatcggatgatttcgcaacctgcggccttcagacgctcgttctgaatatcgaggtcctgatctgtggtgctgacgcgagcgtatccgatgcgggccatggcgattctgtaacattagggtggttccgattgtgtaatatcaccttgatcgaaaatccacccttttgttacactctgcgcgcgtcacatttgaatgcctctttagggcgtacccaaatgtgatgatcgggattgcctcggtcatgccgccagccgcccaaaatcgatcctactattcaggtcgaggtcgaaacgaccatacgggttgacgtgactgtaaatcagcggcgtgaggccgcgataatcctccggcgtcatccggcccgcccatttcggttccaccagcacggtctgaagcatgcgggtgttcacgtagacgagcgacgcctgcagcaaatgcagtgcaaaggcggagatctcctgctcatcgacccggttggtggcgatctctccgcccttgccgaagaacacgaacccgttggcgctgttccagttctccacgacattcagcccctcatggatttcacggcggaacgtctcctgacgaagataccggcacaggaagattgtcttgaccgcgcgaccgagttcgctcagcgccttgtaggtcgggtgcattacctcggcccgtgcaaaccggcgcaggatcgcctccgggtccgccgttctcgtctgcatggcggcggcgtatttgaccatctcatcatattgctgctcgatctcctcccagttgatcgcgccggagaggatcggcaggagattcggcagccgcgcacgcatcgccgtgtccgggatcgccagcttctggcgggcaatggctttcaggcgcggggcgagttcgaacccgagaagacggcaaaacgcgaagccgaccgcgctctgaccatggctgtcgacatactggcgctggatttccatgtcggtgcaatggcgaagaacgccttcgatcatggaagcgacttccgaagacgagcaccgcttgagctgcgagtaaacgcaggtcgcgcgtttctcaacgtgccagtagatcatgacgccgcgcccaccatagcgggcatgccattccgtcatgagattgcggtcccacgcgccgaacttcgtggaatcggacgcgcaggccgtgcccgcgtcaccccaaacggctgcgttgcggatcgccaaggtcgcgttcgcaacccgcgcgcacgcctctctcagtgccggtgcatggatgaagcgacgatgaacatgcagcaattcctcatagctcacatcgggtgttgcgcccgcgacccgcttgatcccggcattcgtaccgagcgcatagaggcacaacaaaagccgtcgatccagcgtctctttcgatagggaaaccctcgacgccgacgtttcgaaagcatccagaaggccggtatcgagtgcagcctccttcagcacgtcgagcagcccggtcatcggccagcgtccgccgatctcgcctttgatcgcattgaggcctttcggctcgggtgcaggcttgaacggtgtgatcgagatacggttttcgccacgccacagaagccggaccttgtcattgtccggaatattggcgttgagaagcaacagttcctgctcaagctctgaacggatggcagacgtaaacgtcctcgcgtcgggtgtcaggtcgaggccggaataataggcgtcacgccggatttcgaagtcttttggaagatcgtcgtcagggttccggtaacggtccgcgccaacgacccagatttccttggagcgaatgcggtcgcgcaactgggtgagaacacaaagctcgtagctgatccggttcacacgcccatcgccatcgatgacggaactgcgccacctggcgggaataacctcatcaatcggaatgtcctgcaccggcacgaaccggcagccgtcatccatcttgctccgaatccagtcgagcgccgcaagtaccgggcgccacaccgtgttgttcgaccggaattccagaaccgaaagcaagtcgggcagcatgcgccggtaatgattggcccaggaagagcgcatcaccttatatatacgccgatcgagcgcccctttcgcctggctctccttgacgatcgccgccagcttgtccttgccgacgatcgggaaaatcacatcgcagacgcgcccggacggttcttcgatcgaagcgctggcgatctcgaccagcagccgttcctttccgtagacccgttcgatgtcctttgcgatatcgcccacgaccttgcgtttcgaacgcgttccgatcttgtggaccgtctcgatcagaagatcgaccatcgcatccgtcagctgcgcctcacgggacaggagataaaccgcatacagcccgatctgccgcgcaggtgcatggcgccgcatttccgaggccttttcgccgccaacgcgacgaacaatctgctccacccaggccttgccggtcgccgcgagaagatcccgtggcagatcgagtttctgaatgaaggcgagtttcgccgtcatgccgaggatgttgtcgagtgatgcctggccagcgtcgcctttcatcgtattgaacccggtctggccctccggatcggcgattgaagcctccagcaatgcgaccgtgcttgccgaaagccggtcgtgcacgccgctcaaccagctatccagatggtgctgccgttgcgaccgcaccaggcgttccagttccttgcgcgaaggtccgtaaatacgccggtcccggcaccacaggaaaacatgctcgagcatggcgctgaccgactgcccgctcgggcacagttcactggagatccaagacgtcagttgctctcgatctacccgcttcagacgccgaaagccaaggtgctgcaaaatctccgcgtaatgccggcgggcggtgcggccgacgaaatcatagtggttcacagcttcaacatcgaggccgagctgctcggccagatacaaaacaccatcggccgggatcgccgcatgatcctgcacaaagaagccgtgcgcggcgaagaatttaagctgaaccgccaatcccagccgcgccagctccggtttgccgttcacaaaatcaatgtcgcaaaagctcaggctccagcgcccaatcagatctccactcnnnnnnnnnnnnnnnnnnnnnnnngtcctgcccggcgtatctgtcatcgaacggctttgtgctgacgccctcgtcgccgccgagcgccagattgaaagccggatcgctgaccggctggatgatatgatgaagggtcggttggatgatctgttaacggagatggtcgatggcactgtcagccggttcatctggcttcggcagtttgaggttggcaaaaactcagcgggggccagccgtcttctggatcgcctggagtttttacagggaatcgggttatcgcccgatattttggatggtctgccgccccaccgggttacgcaactgcgccgccagggtgaacggtattttgccgatggcctgcgagacatcaccagcgaccggcgtctcgccattctggcggtctgtgcggtggaatggcacgcggggattgctgatgcggtggtcgagacccatgaccggatagtgggcaagacctggcaggatgcgaagaggttgtgcgatgcgcgcatcgcggatgcaaaatctgctctgcacgatacgctttgctccttcaaaaatctgggcgctgcccttctggaagccaagggtgatgaggcctctcttcataccgcgaccgaaacgtcctgtggttggcttcagcttgaaggccttgtggcaaccgcggccgaactgacggatacgatgtccgctgaccctatcgctcatgtcgtacaggggtatcatcgattccggcgatatgcaccgcgcatgctgcgggcgcttgatatccaatcggccaccgtggccttgcccttggtagaggcggcacggggcgttgctgataatcggaatggcagatcccggtccaccagcttcctgcggcgtggttccaagtggcaccgccactttaacgctcaggcggccgatgatctccggctctgggaggtggccgttctgtcccatctccgcgaagcgtttcgatcgggcgatatctggctggcccattcacgtcgctatgcagatctgaaacaggccttggttccggttgaagctgcacaggccacgcccagattgaccgttccgtttgatccggaaagctggcttgaagaccgcaaggcgcgactgacagatgggctggaccgtttggctaaggcggcacggtcgggtgccatccccccccgcgggtcacttcaaattcctccggg

SEQ ID NO: 316 - DNA, 45634 bp, Bradyrhizobium colbertium
  misc_feature (3371)..(3380): n is a, c, g, or t
  misc_feature (5599)..(5608): n is a, c, g, or t
  misc_feature (7409)..(7418): n is a, c, g, or t
  misc_feature (8708)..(8796): n is a, c, g, or t
  misc_feature (9607)..(9616): n is a, c, g, or t
gatcagcacctcgtggcgggggccgcccttttgggcctgcacttcgagatagaccgtaccatcttgatcctcgatgcccgagccgacggccttgccgccgaccgcttgttctgcggttgccatggcctctgccatactgaccttggcgttggccatgaccgccgcttcgtcggtcggagcatcgcgggtttttggcgtaagccgcgactgagccgccgatcgcgcccgaggcaagggtaccggccaggatagcggtcataagtttggtgcggagcattggtgtctcctttcgtccgccgcgaagcgaaggcttcgctgataggccgaaccatgaccgggagagcattgcctgaaatcgaccgacgctatacgttttggtaatgatcgcccggatatcgcgagggtgccgcgatatgcggtccgcctcgggaccctaaaatccattatggaaaacggatgatcacctcggtgatcggctgacgcaaggcgaccgtcgcgcgcatcacgatggccgccaatagcgccgtgcccatgccgccgactacgtccgaaacgtagtgcgttccgacgtagatgcgcgagaccatcagcagcgccgccggaatcgccaagatcagcgcgcggagccggcgatgctgcagcagtgtcgcggcgacgatcgccatcgcggccgtggcatgatctgaaggaaaggaggggtcggagctgcgtgcgacgatgagatgggttatacctagctcgtaggggcggagacgacttacaaacaacaggataaactggttaatgaggagaccgaaaagaaaggtcagtccggcgtcgaccgcgagcatcctctcgtttgccctgtcctcgcgttgccaccaccgcaccgcgaccgccagaaccatgaccggaatcgtgaaatccgtcaccccgatcatgaaccaatcgagcataggacgatgtccggccgagctgttgagccactgagtaagcgcgatatcgagaccttgtcgcatgcgtggtgctaagcctccaggaaagcaacgccaatctgggtttgcgttctccaggcggcccggcaggcctttcgcgctttgtcggcgttgacaagaaggatgaactcgtccggaattccgcaggtgttttcgacattcagcgcagcgccaccctgcgacaagttcttgatggtgcagtcgatgattgagcgcccgtggttgaaaacaatcttgccacccttgaaggtgcgccgtctgtccgcttgccgcttctccatgactgccccaactcggcgcgatccatccgacgagaacaggagcctagcagtcgacacctgacggggccttcaccaaaactataccgatttgtaatgtcggctcgacgagttctggcgagcagggggcggttttaatgtatgcgacgctcgcagtcctgatcttccggatgaggcgatagcattcgacttgcggtttgcaagtctgccctcgcgccgccttgcagtccgcagaatacgaaattgtatagagcccgtaacctcgcggaaggagaacagattgcactctgcgcgttgtcgcgtcgttcaaatcaggaggtgctcacatgcaagagagaaatgccggtcgccatgcagggcaggacttctcatcaccgtctgcttcaatcgaactgcaggattttgccacaaaagtaccggcggttactctctcgttctgggtgatcaagatcgccgccaccacgctgggcgagaccggcggcgataccgttagcatgacgttgcattgggggtacctcgccagcaccgcgctgtttctctcgatccttgcggtcttggttgtgctgcagaccgcagcgaagaggttccacccgttcctttactgggccaccatcatcgcatcgaccacggccggcacgaccatggctgattttgccgatcgctcgctcggtatcggctatgctggcggctcctcgatcctatttgcttgcgtcatctttaccctgggtttgtggtactggtcgcagggatcgatctccgtcgacaccgtgaacacgccaaaggtcgaggcattctattgggcggcgatcaccttctcgcaaaccctgggcaccgctctgggcgactggacggccgattcgaccgggcttgggtacgaaggaggggcgattgtctttgcggcaggacttgccgtcctcgcagcgctgtattatcggaccacagtttcacgtgttctgctgttctgggctgcgtttatcctgacacgaccattgggcgcgaccgtgggcgacttcttcgacaagcccgtcagccagggcggtctgcacctgagccgccctatcgcttcggccgtgattgccgtcttcatcgtcgcctgcctcttgattttccctcagcgggccggccgacatccggcagggcgcctcgccagcgatgcggtctaaaccctcagcccacctggcaaaacgcggcccggcgtcaggtgaagcagcacccaaagcaagcctgtgcaggacatgcggatgacaaccccattgcagtacggcaccaccgcgagagttcttcactggctcgtcgtcgtactgctgctcgcgcaatattcgattggatggctgatgccggacattcaccgcggcgagcagccgggcatcggcatgaccctccacgccagcttggggatcctgatcctggccgcaatgctgctgcggttcgcatggcggcttgcccatcctgtcgcgccagagagctcgctgtccacctggcagcgcttgagctcggaaatggtgcactggtcgctttacgcgctggtgctcgcgacgacgctcacgggatggctgttcgcctcttttcgtggctggtcggtctccttcttgttcttgaccccgctgccgatgctgggttctgtcgatgcgaccgccgctcgagccattgatggcctccaccaagccatggaatggaccctgctggcgttcatcgttatccatgtgtcggcagccctattgcacatcctgctgtaccgcgatggggtcgtgcagcggatgctacgatagagccctttcgtcgcgcgcgttcgcgggcggtgtggagcatcgcagcttcatccgcgggatctcggaatcagatagatttccatgccgggcgcgtcatcgagcgaccagctggaaggccaaccgttcaggagcccggcccctccttgagggggcggccacgcctctcatggctttcgcgcccggtcacgttcggaacagccggcctgccaaggtccatcacaacagacccaggctgcggaccagcatgtagattgcgactgcgaatatgagcgccgcaaacacggtgttcaacgcgcctttgcggccagcgagggaggtcgcggagcgggcgccgagaagcccgccgagannnnnnnnnntgaggaacccaccgcgtacaagatcggcatgccggtggctgcgatcagggcgggcacgatcagaaagccaccgccgatcccgaagaagccggataaggatcccgtgacgaggccgaaggccacaagcttcggcagattttcgcgattgagcctcaccgacggctcgccctcgccagagcggcctttcatcattagcgcgcccaccaccaacatgacgatggcgaaaagtgcgagcagcttctggccatcgatgatcttgccgagagtggagccgagaaaggcgccagctatgcctgcaagcgcgaacaccgaggcgcagcgccacttcacgttaccggcgcggacgtgattcgccaggttggcggcagcgtttgccgcgacggcgatcgcgctcgtcccgatcgcgacatgaggatccgctaccccaaccagatagatcagcagcggaaccgccagaatggaaccgccgcctcctaccaggcccagcgagaagcctaccagcgagccggaggccagaccgagcgcgccttgggtcagggacagcatggcgacaactcctccttcatgcggctcgcgccggcgcgccgtaaacttcgcggttccaaggcgcccgcatgaggatgcgggccatgccgcaaaagcctgtgagcccggccgtcatcagtccggcacccaccaaagccggcacggcgaagaaccaaggcgaggccaaaaggccgagcagcgtgccagcgaagacgagacttccggccccgatctgcacctgccgctgaagctcgatcggcagccgtcggtcggtcacgaccggcaccagccttgcgccaagcgtcgagcccgccatcaacgacgaaggactcgcaagcggcatcgagttttgcggcgagccgcggcgcattggcttgggtacgggcgccgctcttgcaatgaaagatgatcggcttgtgatgcccccgacatcggcttcgtcgagtttcgacaatggtaggtttcgcgcccccggaattttctcgcgcgcgtgctcgtctgcttcgcggatatcgacgagggtggcgccctcgtcgagaagacggcgggcgtccatcgggttgatagtccgtagcgacattcctagttccttcttggcttatctgctcttggctttgacgggcgtgcaaaacagcttgtgcagcgtggcatagagctgctcgatgcgcggatcggcgatgcgataccagagcgtctggctttcccgccggaaagtgacgagaccctcgtcgcgcatcttcgcgagatgctgcgagaacgccgattgcgaaaggccgacggcctcggcgagggaactcacgctgtcctccccgcattcaaagagcctgcacaggatcatcagccgacgctcattggcgagagcgcgcaggatggaggcaacctcaaccgcctgcttttcgaaagtttccggatcgaacgttgctgaggccaccgccctgttcccattatttcagtcattgctgaattagatattgctaatatatccgtcaagaccaaccgaacaatggcatcagggagttccagaatgtcacagccaatcatccgatcgttcttcgacgagccgacaaacacggtgagctacctcgtcgccgatccggccacgaaaaaggccgctatcatcgaccccgtgttcgactacgatcacaattccggcgaggtggatacgcgctccgtcgaggcgatgctggtggccgccgaagaggcggacaacactgtcgaatgggtgttggagacccacgcgcatgccgaccacctctcgggcgcaccgttcatcaaggcgaagaccggcgcgaagatcgggattggcgagcacatcaaggacgtgcagcgcatcttccggccgatcttcaacgccaccgacttgaagaccgacggcagcgacttcgatcatctgttccgcgacggcgagcgcttcaagatcggagaactcgacgtcgaggttctctacacgccggggcacacgccggcggacatctcttacaagatcgaggatgccgtgttcgtcggcgacacattgttcatgcctgattacggcaccgcacgcgccgacttcccgggcggcgatgctcacaagctctaccggtcgatcaagcggctgctgtcgctcccgcaggaagctcggctgttcatgtgtcacgactacaaggctcccggccgcgacactttcgcgtgggagaccacggtacgcgagcagnnnnnnnnnnaggaaggcgtttcggaagacgaattcgtcaccatgcgggaggcgcgcgacaccaaactgtcggcgccgaggctgctgctgccttccattcaggtcaacattcgcgccggcaaattcccgtcggctgaagccaacggggtgcgctatctcacgatcccagtgaagctgaagggcggggcgcagacctgcgtataggcctgagacatcgcgcgtcatgccgcggcaccggccggcaatcatacgtcgaacgtcagctccgatctggtgccgctgcgaccttcgcgattcgatatggtgagtttcgccccgaccttcgcaagcgcgagcttaacgatcgcaaggcccagcccgcttccgataggacttctcagtctgccccggaagaagcgctttccgatttggtcgagttcgtcggctgggatccccggcccctcgtcctcgatgacgagcgcgttgccccgggccgtccacgcgacccgtcccccgcgcgtgtgctgcactgcgttttcatgcaggttcctaagcgcgagttgaagacattcggcattcgtgttgagcgtcatcgtcctgacgcactcgtcgatcgtcaccgtcgtccgttcgtgccttggcgttgcggcgacgatctcctccaggatcgggccgactgcgaccggcgccaacggtgcgtcggcggtgtcggaatccagccttgcgatcgtcaggagctggcgcaccaggcgcgcgctcctgtcgacagcggtgacgatctgttccaacgccccgcgcacgacctttgggtcgtcggcggccagagccacctgggcttgcgtcttcaggcccgccagcggtgtgcgcagttcgtgtgcagcgaaggctgtcacttcgcgttcatgccggcgcgcggcttcgaccctgctgagaagcccgttcaaggcgaccgccagcggcctgacctcggtcggagcacgttcggtctcgacgtgccgcatgtcgtccggctcgcgcgcgccgagatcctgagccatccgccgcagtgggcgcaggccctgtcccacgctcgcccagatcgcggcgccgagcagcggcgcgatcagcagcgcaggccacatcagccccttgatcaggtcggtcaccagacgctcccgcagcccgacgcggtcccccaccatcacacgcagattgtgatcggcgtcctcgaccgagaacacgcgccagggttcgccgtcgatgatccggtccgagaagccggaggcggcgggcgagagctgctggtcgggcgcgccgctcgatttcgcgaccatgcgaccgtcgagcgaccagatctgacacgacagttgacgttcgtagctgccgagcggctgtaccggggacggggttgagcttcccggaagggtgtcaaagccggacgcgagagaggccaccatgcgcgcggcctcctgcaggcgcgtgtcgagaacgtgctccacctcgtcgcggcttccgacgtagatccagacgactgccgccaaccagacgatcccggtcgctgcgagcagcatcgcgaacagcctcagtctcaaggacctcatcgggctgtccccatccggtagcctacgccgcgcagcgtctggatcgtgtccttgccgatcttgttgcggagattgtggatgtgaacctcgaccgcgttgctctcgacgtcctcctgccatccgtagaggcgctcttccagttcggcacgcgaacggacctgctccggacgctccatcagcgccgccagaatcgcgaactcgcggcgcgacaggttgatcggctcgccggcgacggtcgccgagagatcagcnnnnnnnnnnatggtcgggaccgcacgcccaccttcccggcggacgatggcgcgcaggcgcgccgccagttcatcgaggtcgaagggtttcgccaggtagtcgtcagctccagaatccagtcccgaaaccttgtcgccgacgcggtcgcgcgccgtcaagagcagaacgggcgtggcgtcccgccgtccccggagcctgcgcagcagatccaggccgctaccatccggcagcatgatgtcgagcacgaccgccgagtagcgcgacgtcgcgagcgcggtgtcggcatcctcgcaggtgccgaccgcgtcgaccgtggcgccggtcaacgacagtcccgcccgcagaccatcggccaggatcggatcgtcttcgacgacgagtatgcgcatcagtacctccgaggttcctctcgttccccagccttaaggctggcttaaggtagcctatccaagtcgtggcatccgctcacaaaacgcagggccgccaccgacatgccgggctttcatcgactatcggtcatattgttcgttctcctgtcctccttcgcgttggcccgggcgggaacgccgccgtccgccgaccaggcgttccagttgaaggtgtcacgcgacgacgccgcgctatcgctcatctgggcaatcgggcctggcagctacctctaccgcgcaatgatcgccgccaagaacgcggtgcctcccgggacggctgtcacggtccagacgacccatggagaacccaaggacgatccgaattttgggccacaggaaatctaccggaacgcagcaaaggccgagatcgcttcgatcaatctacgagggttgcgcgaaatcgtagtgacctatcagggttgcgcggagcagtaccaaatctgctacccgccggtcgccaagacgatcaatctggaaacgctggcgatcaaggaccgcgacgccaccgccccgtcctcgtccggttcctcatccttcgtggacgctccggatgccgcggttggagcgagcgacggcgtctcggcgacgatcgcgcccgcacctcgcgagggcatctcctactgggtgacgctcggcggcatgctggcctcgttcttcggcttcggcattctattgtcgttctcaccctgcaccttcccgctggtgccgatcttcttcggtctgatggcccggtcgcaggagcgtctttcgttcggccgggggcttgccctcgcggcgacgtttgtcggagcgtccgcatcggcttacgcaacgcttggtgcgttcgcagcctggtccggatccggagagaacctgcagatcctgctgcagnnnnnnnnnnnnnnnnnnnnnnnnnnnnnnnnnnnnnnnnnnnnnnnnnnnnnnnnnnnnnnnnnnnnnnnnnnnnnnnnnnnnnnnnnttcccgcgttctgtcgcagcagaccacgctgcagctttggggcgcgctcgcgacgggtgtctccgtctatctcggaacgcaattccttatgacgcacagtcgatggcgctttgtgtccatgggcctggcgagcatttcgcttctgatcggctcggtcctgatgatcggatcggcaggtgacgacagtctcaacgcgactcgcatcctcgatcggttcgtgacgcgcgagaccggatccgaagaccccgtccgaacgatccgatcggtcgccgccttggacgacgaactcgctacggcccgcgcggacgagaagcccgtcatgctcgacttctccgccgagtggtgcgtcgaatgcaggggcatggatgccgtcctgcgcaaacctgaagtccgtgcacgcctgcaagccttcagaatggtgcgtgccgacgtgaccgccgtcgacgacgcgagccgagccctgatgaagcgcttcgacatcgtcgggccgccgaccattctgctgttcggcacgctcggaagcgtcgatccgacggtcaaaatcgtcggcgcggtcgatgccgacgccctgctcggaaagctgtcggcggccacctcggccgactgacctcaactcccagaacaaggaaaactaacatgcttcagcacgtctccagacgcacgctcgcccaaatgatcgccgtcgcgggcgtccgctacctggtcggccccgcgcgcgccgacgacgctcccagcgaagcggacatatcgcgcgaagccattctctacgatccggccgcgccgaccgcgggaaacccgaagggcgatctgnnnnnnnnnncatcgtcgtcttcttcgactacaactgccccttctgcaaacaggcggagccagagctcgagcggctggtgaagaccgacggcaagattcgcctcgtctataaggattggccgattctgacgccggattccatcaagggtgcgcagtgggcgctggccgcgaagtatcagaaccgctacgacgccgcgcacttcgcgatgatgggaattcccgggccgaagattccggccgagcgtatgcgtgaagcgatcgcgaagtccgacgtcgacatggatcgtctcgatgccgatctgaaggcccacggcgacgacatcaccaagctcctgcgacgcaatcttgcccaggccgattcgctaggcctgatgggcacgcccgcctacatcgtcggccagtaccgcgtgacgcaggccttgaactatgtaggcttcaagcgcgtcgccgccgacgcgcgcgcccgcgcagcaaagaatgagtaacgcgggctcgcgctcttaagcctggcttaagctgcagatcgagactgaccgccattggcgaagtcacgttgggatcatcggatgtcagggccgcacttcttttcagaggacggacgcatggcgggcacaccaaatctggacagcctcaaggcggaagacgaaggtgtccgcctcgttcacaaggattggccgatcctgacgaacgcctctctctatgacgcccgcctcgcgtgggagttcggtataaaggcgggtacgacacggcacaccacacgctcatggccatccccggggccaggatgcgcagcagcagatgctggagagcctccgcgcatccggcatcgacatggaggcgctgcaggtcgaccttcgccgccacgccgacgtcatcgatgcgctgctcgtccgcaagtccttgagcctcgccgagacgccatcgtaactgatcggaagtcctctctacaacacgctcgactacgcgggctttcgccgggcagtcgccaacgcgcgccggcaggcggcaccgaaggaatcaatatgacgcttcgaaagcaatgggctgtgtgtgccgcggcagtgcttctgccggcagcgctggcgggctgcgtctccgacgccgacatcgtgcccaaggccgcggccgcgagctacgcgccgatgtccgacccgcgatatggcgcggtctcggacggcgcctataccgttgcggcggttcctggcggcgacctgaagacccgttacatgcgtcaactcgtcgacgatccgaccgggcagcctgccgggaccgtcgtcgtggacccgaaaaaccgtttcctctatctggtgcaggaaggcggcaaggcgctccgctacggcgtaggcgtcggcaaggagggcatggcctggtcgggtaccgccaatgtagcgatgaaacgcgaatggccgcgttggacgccgacgacggagatgatcgcccgggagccggggaaatacgccaagtgggctcggggcatggagggcggcacgcaaaacccgctcggcgcccgcgctctctatctcttcaagaacggcaaggacacgctgtacaggattcacggcaccaacgagccatggtccatcgggcaggcgatgtcgtccggctgcatccgcatgatgaaccaggacgtgatcgacctctaccgacgcgtgccgtcgggagccaaggtcgtggtcctgccgacgggcggtgcagagaccgcggcgtccggcggatgaacttcgatcggcgcgcgacctcgacgaaagcagggatgccccaaggggcggggatcccgctcctacggcggtgctgagtgcccctgtcgacacttcgtcaggcgacgtcgccgagctggagcgatgcaccaacacaaagaccagaaggcctttagatggcttcgaccgccgccctcaattcgccgcggaccttctccgcgatcgtcgccagtgattcattctgtatggcctgcattgacgctaccggatccaccgctgccacttcggtcttcccatcgaattcctgaaccacaacgttgcacggaagcatggttccgatcttgtcctcggccatcagcgcctcatgcgccattctcgggttgcacgcacccagtatgacgtaaggccgaaagtcggcgccgatcttctccttgagcgtcgattgcacgtcgatcctggtcaacacgccgaatccccgggccttgagtgccgttatcgttttgtcgacggcctccgcaaacggaaggtcgagtgttttcgagaaatagtacgacattccaaactcctgtactggtgtgcctcagcgctacgctggtgcagtcgcgtttgggacacccctcgcagcccgaagggcgctatccgcggtttccgccacgtgcctgaaatcgcctcgtaacgccatcagggctcgacgttcttgctcgatttcgtaggaagtgcgaaagcccagctttctcaagacaggcaccggggggcaccacccctggatcgtatgctggaacagaaagccggtcaccagcgccgggagtgcgagccagcgctgattgtgagcggccgccagaacgatgccagtgaatccggttacagctgcattagcttcgatggttctctcgatgtcccactcccggtcgagctcgcgcaacctgtcggcaatctggtcgcggtgttcggcgaaaaaggcgacgttcgcccgcatcgtgcgctcgctgcgacaattatcgctcccagacgaacgtaggggtacccgattccgcgtcgtggccatctatcagctccgagacgtcctcactggattacgcgcgctgtcctgatttgttcctactgcgcacgcgctgacgacggccgactgtcgcgcgaaggtgcagcggacagctatgtccgacgattcgtcgcgacgatcactgacggctgtttcaaggcgcaatgtcgagcctcgggcggtaacgaatcaggcgcgctccacgtcgcgggcttcgcggttccgaaatacgagctgaagaacgttgccggcggcaggctcgctccgtcgaccccttagtgcgtcgaaccgcttgctcttcaacctttctccaatttcatctaacgccgacgcaattaagttgattttgccgcgcactccctcacacttcaaatagcctcgcgcaacgctgcaatggtgggagctgtcgtaatgccgcaattcgatcccgagctggtgtcgcgaatgaggagcgctcttgaagatgcgatgacgagggtgccctcagacgtcgccacggtttccacaaaggcgtttctcgccgaatgcattctcaaggccgcggcgcaaggtcacaccagctacgccgatctcgtcgcagccgccactgaccaaatccaagccctgatacgatattgtcgtgaactgccgaccaatcacatcacgaagcaggaagggacgcggccgccgcttcctacgatatttgacaaaggcgacgtgagaccgggactgagatatgagatcggcgcagatgcatgagcgaggccagcgatggatccgttcactcttctgaaaaattgatggttcttcttctcggtcatgctcggtgtccggcaccgccgcccgatcgagcggctgtgccgctgacagtcgccaccccgcgtacgcccgcgagaagatcatcggcgcgggcctacctggtcgacttccgacgacgaagggagaggccgtgcacgcatacataccggtaagcgcttggaactctgtcccgtaagcgtcgttgctcacactaagagtttcacgaaagcgcaggactatgggcgaacgctccccgatggcttgccggagatgacaatgctgtggcgttcgcctccgccaatgggaggccattcaagccctccaatttgctgcaggacgatgtcatgatgtctcgccgcgctctgctcaccggtgctgctctggctggcaccggcgtcgtcgtggccggttcactctggcacgatcgtgcagcccccgagccgcagctactgcggattcccgatctgatcgaccttcgggggatggggcaatcggcgtccctcaaggtgcagcgaggcaccacctcgttctttccaggtcgagagagcagaaccctcggatacaacggcagctatctcggccccacacttcgcgtccacaatggagacgacgtcgaggtggcggtcacgaatgcgcttggcgacgacacaaccgtgcactggcacgggctccttgtcccggcggaagtggacggcgggccacatcaactcatccgtcctggcaccacatggcgccccgtgctgccggtccgccagcccgcggcgacccttttctatcactcacacgtccatgatcggacggccgaacaggtctacactggtcttgccggtgtacttcttgtgaccgacgacgaagagaatttgctcgggctcccatcagaatatggtgtcgatgatctgccgctcgttctgcaagacaggcaattcgaggatggtcggctcgtcattcctaacgggatgataacgttgatggctggtaggaggggcgacacaatgctcgtgaacgggacagtgaatccaatagcgagggtgccgaggcagctggttagattgcgttttgtgaatggatcgaatgctcgcatttttgatctttcctttacggatggccggacgtttcactggattgcctcggaaggcggactgctggagcttcctgtcaagctgcagtcgctgagccttgcgcccggcgagagggcggaggtccttgtggatttttctgatggacgatcagtcgcgctgcagacggcacccgaccgtaacatgcccacgatgatgcgcatggtcggcggcccgcgaaacttcctgcgggatctcgtcgacctcgatcatgagcgcgtgctcgcgttcgaaccaacggaaacagcgggccatcgcaccaagacaaccgttcccgaccgactcgtcacacgcccgaatccagactcaagcagggccgtgaggcgccggcggtttgcgctgaacatgggtatgggcggcatgatggccatgatggctggcagaggcggaatgatggaaggtggcagaggcagtggcatggcgatggctggcataaatggccgcgcctttgacatggatcgtatcgacgagaaagtccggctaggtgattttgagatttgggaagcgtcgggcgagatgatggcccatccactacacatccacggcgtgcacttccaagtgctaagtcggggcggagccaaaccgtctgttcgcgatcagggtattcgggatactgtcctagtggaggagtctgtcgaattgctggtacaattcacacagcccgcttcgaaggcggcgcctttcatgtatcactgtcacatcctggagcatgaggataatggaatgatggggcagttcacggccgcctgatattttcatagccctattccaaatatggtcatctgataggacgaaaccgcagctcgtcgacagtgggcggcggcctcctcatcgcgaaagcaccgatgtgctgccgtttcgtgtagtcgatttcgcccgcttttcgttgcacacgctcggctggaaagacccgacacctgccggccaacgccacccacaaatgaagcaagtaaacccaaatagaatggcgcaaactcaggcgttctaaagagagagatcatagacacgcccgtgtattcttgccccgcacggccagcaaccccgccagcgcgaacccggctcccgcgacgaaagttccgctcggcccggcggcatcccagagtgcgccggcgatcacgctcgcggcgagcatcgccaagccgcccagcagattgaaaaacccatatgccgtccctcgcagttccggaggcgacgtatccgcaatgagggtcgccagcagcccctgcgtgaatcccatgtgcagtccccaaagcacggtcccgacggctatgccgctggtcgtgggaaggaaagccaatgccagatctgccgcgatcaaaagggcgaggccgagcgcaagcagtcccgtccagtcgatgcggtccgagaggatgcccgccggataggccgccagggcatagaagacgttcatcacgatcagcaccgccggcaccagtgcaatcggcagcccgacgttctgcgcgcgcaggatcaggaatgcctcgctgaaccgcgccagcgtgaatacggtggcgaccgccacgacccaccaagtacaccgcgctgagacgcttgatctcggccaggctgatcggattgcgcacctcgcgcatccccttcgtccgcgccggctcatggacggcgaagatgatgagcgccagcgccagaagggcggaaagaccgcgaaccagaacacggccttgaagttgtcggccgtccaccacatcagtgcgatcgccagcgtcggccccgtgaagcctcccgccgtatccagcgactgacgtaagccgaaactcgcccctcgcagatgcaccggggcgatgtccgcgatcagcgcgtcccgcggcgcgcccctgatgcccttgccgacccggtccgtgaagcgcgcagccaccagccggtcgaccgtagatgcgagcggaaacaccggcttggtcactgcagcgaggccgtatccgacgacggcgagcagcttgcgcttgccaagccggtcggagagggcgccggagaagatcttcgtgatggatgctgtcgcttcggcgatgccttcaatgaaaccgaccgtgaccatcgaagtgccgagcacggtcaccaggtataccggaagccgcgtggatcatctccgacgagacgtccatcaatagcgcaacgaagccgagcgcccagacgccggtcggaatgtccctcaccgagtatttctgcctgctcgcctcagccatttcgtagcccgcctgtgattttgtgaatcgcgccgccccgtcggaaagcatcaagctcgctcctgccggcacccgcgcctgccaggccgctcctatctagatcaccgggaccgctcccgcggattgggcccgggatttccagttgcagtcgacggctggaacggtcgagatcacgttgccgcgatccatcccggcaaggcagcgcgagccacgtgccagagcgctgcgtggtggcgacgcgtcgccaggcagagccgtctgtgctttttcgcgtcatgcgcaactcctcggaaattccatggtcaccgtggtgccttccccgagatgactgtcgatctcgacatgcccgccgtgccggacgacgatcgatctgacgactgcgaggcccagcccgacgttgtgttgcgaacccgtccgcgccttgtcgacccggtagaaccgttcaaagacgcgcggcagatcagccgggggaatcccgctgccggtgtccgagacggcaacggcgagagcaccttttgaagcctgcgccttgatgcgaagccgtccgccgcggtccgtgtgggttatggcgttcgagaccagattgcttagagcctggcggaacaacgttcgatcaacgcgcgccgtgagcgccggaggagcgccgagctcgaagtcgatacccttctcggcggccgagggttcgaagaagtctttcacgctcgcgatctcgtcgcggacgtttacctcctcgacgtcgagttggccgaccgcgttgtcggcccgagccaggaacagcaggctttcgatgatacgcgaaatgcgggcgcactcctccaggctggagccgaggatatcgcggtagtcctcgttgcttctcgcccgtgtgagggcgacctcaatctcgcccctcaagttgttgaccggcgtccggagttcgtgcgcgacgtcgtcgctgaattgcgagatgcggtcgaacgagccctgcagccggtccaacatgtggttgaaggtggaggagagtcccagaagttccgtaggcagatctgcggtatcgatccgctcatggagcgtggtcgagcggatccgctccgccgttttgctgatgccgccgaccggacgcatggcgctgcgggcaatcgcgtatccgaccagcgagctgaggaccacggccaacaccagaatcaggtaaaggcgttctcggtagcgccgcaacgtcttttcttcggctccgcggtccatcgccacctgcacgtactgcgcgtccgggctcctggcgtcggcgggcgcgcgcgtggtcaggatcttgaacgaccgcttggagcgggtcgcgatgtcccgggtctccggcggtccggtcgggagcgtttccagggtctccgccgacggcggcggaatctcctgcgtcatgccgggggtctcgaccagcagtcggccgttccggtccagaacgcggatgtatatctgcgtgtccgccggcgaggcatcgggtgctgctggctcggtgagaaagcccgagccgtgctgcggcttcaggagcagtcggagattatccaggttgttggtgaggatgcgccgatcctcttgattgaggttggtcgccatcgcccaatagagcgtgccggtcgcggccgacactatggccacggcggaaagcacgtaccaaagggttatgcgcagagcgatggaagtcgggccgcgccagatcggccaccgccgtgcccccgcagcttcaggatcgcgtttcgaggacatagccaattccgcgtacggtatgaagaagctttctgtcgaacggatcgtctacttttgaccgaagccgccgaatgtggacatcgaccacgttggtgtcgctatcgaagttcatgtcccatacctgttcagcgattacggtccgggaaaggacgtcgccggcacgccgcaagaacagcgaaagcaggagaaattcctttggcgtgaggtccaacggcttgccggcgcgggtggcacgcccgcgattgagatcgatttcgagatcgtcgagccgaagtatcgtctgctcgcgcttcgcgctccgccgcagaatggaccgggtgcgcgccagcagttccgaaaacgcgaaaggcttcacgagatagtcgtccgccccgagatccaggcccttgacccggtcctgcagaccatcgcgggccgtgaggaagaggacgcgcacgtcgctttgcgtgcgcctgatctccgtcatgacggaccagccgtcgatgaccggcagcatgacgtcgagaatgatcaggtcgtatggtcccgtacgcgcgaggaacaacccgctttccccatcatgcgccacgtccacgacgaagccgttctcctcaaggcccttcttgagatacgccgccgacttctcttcgtcgtcgatgacgaggatcttcatttaccgaacgactccatcgcttcaacttcgcacgcgcttgatccacgtcaacataatctccccgtcgcgtctttggaaatcaatccggtgccgacgccaagatgacgaaatcgtcatcttgcaggtgcacctccgattcgatcaatgcgctctggacatgcgaccggccgacgttcggcgcgccggcggaggcaaacattttatttcggtcactggccgagttgtggaacgatttggcgagccgacggagcgatcggagcgtaccccagtctcgccccgtgtcgattgtgcgccacagacacagtggtgatggctcaatcgcaatcgccgaccggcgtagcggccaggtttgcgcatcgctgcacatcaatggcgctgatagagctgcagacttgctcggatctcaagcatcagttcatcagagtctcgcggcccgaacaccatgcctgccgggccgacgatgcgattgtgcgcatattccaagtgcaggttgatgagcttcttgaagtggggaggaggattgtaattgatcccaagtctcaccgcttgatgccgagcacttccgccaaaaccggcggcgcttgcattcaccacatcatggcggacgaagaggtcgagatcgccccagatttcggtgtcgaacagcgaaagctgggccatgacgtagccgccaccaattttcgtcttgctgccgctgaagttcgaaagcaagccctcggcttccaaggtgataggatgtccgaaggccttaaacgaataggacacatcgtcttcgacggtcaacttgtcgccttcggccgggagggcgcccaagccagattggccgacggcggtcagcagcctcagcattccgttgtggatgtccatcgtatgatcgatgccgccccccaaagttagtttctgtccgctttccctatcctcgaatggcgtcgcagagagctttgccgagagcgaattgccgatcgagtatcgagggcggtcgacgttgaacgagccgcggttatcgagggcggcaaaggcgatcgtgtattgcggcgacaacgcctgaacatactcgaaccaaattgcgcgccgaagagattcgctgtcccatgctcttctaggatcagagatcgattgatggttgggagattgccggacgacagattgtcctcgcgcgagagaatatgggggttctggccgagcagggcgcgcagatggccgggatcccggacatcctgaatcgcaacgaaaaaattttctagattgcagcggccaaatccgcttgttccgccgatgccgttcttgaagaagtaagaattgaccatgtcgatttcgtagacgagcgctggccgtaactgatcggtgatacggggaagatcaaactcactgccctgccggaagcggcgccatgtgctgttgttgtcgccctgcgcgtcgaccagacgttcagcatagccccaaaacgtccatcgaaaatcgacgttctggtagaagagactggcgcccggatcaataggaccaagttccccacggtcgctctgaagtgaccgatggggccgtcgctccggccatccgggtcgcgacgttcgtcgattcatctgcgagcgccggtagctgaccgagaacggccaagcctgccagcatggccatgtgctttgcggctgccatgaaaaacctcaccctgatggcgcctgttcctgacgtttgatgcgaactggcggcactagatttcacgccaaaaacaccgaaagcctcattcgactgcatgcgggcgatccaattcgaacgggactcctaccgcgtcctccgaaagtggcctcacgtcaagctagtccggcccgagaagacaagcttgatctccgtcacgaaaggcgaagcgcattgctaccggcagatgacgaaatcgtcatcttggcgtcaggggcctgtcaggctcgcttctgtaggcaagtgtaggtgtcgaggtttggatgaatccaatgtggcgggcgaacttattcggtcggaagtcgatgtggaccgcatttgccgttcccttgacgatcgtcgtcgcaggctgcgcccagtatcggcccgagccgttttccgccgagcgccacgctgcggcgctcgaagaacgttcgctccacgatccgcgattgggcgagttcgtcgagcttggtttgcctcggcaacggaaggggggccgggcatgggagctctcgagcttgacgctggcggcgctatactatcatccggatctcgacgtctcgcgcgccaagcttgtctcggcacgggccgccgtgattaccgccgcgcaaattccgaatcctacgctgagtgcgagcgcgacctacaacgccacgatgaccgcgccgacgccgtggaccgtcggccagatcgtaggcttcctgatcgagacgatgggtaggcgcgagtataggattggccaggcggaaaacctggtcgaggccgcgcgcgaggacttggcgacggccacctggctggtgcgcgggcacgtccgcgccgccttcctgaacctgtgggcggcccagagaaggctagaactgaacggccggcgtgcggcccttcagcgccaactcgtcgacctgctccaacggcggttctcggaaggtcaggcctccgcattggacctcacgcgcgagcggataaacctcaatcaggtaagtcttgcggtgcgcgatgcagagcggcaacgcgccgaggcacgggcgcaacttgcgaccgccgtcggcgtgccgctccgagcgttggacgccatcagcctctcgttcggcgctttcgagcgggcacctccattccgcctggaggccggcgaattgcgccgcgaggccctcgtcggtcgcagcgacgtgcaggcgctcctcgccgaatatgcggcaatgcaaactgccctgcagttggagatcgcgaagcaattcccgaacgtcaatgtcgggcccggctacaccttcgatcagggcgccaacaagtacaatctcgatctgtccttcgaactgctgatcttcaaccagaaccaggggccgatcgccgaggcggatgcccgccgcaaggatgccgccgctcgcttcgacgccttgcaggcacagatcatcggggcgatcgacaccgccgtctcgagctatcgcgcgataaaccagacgatgacgacggcggatgcgctggttgccactggacgtcggcgtcaggatgaagtctcccgctcgttgcaggccggggacgtcgatcgctccaccctggtcacggccgagctcgaggtggcggcgatcgaaatctcgcgtttcgacgtcctggtgcagcagcgacaggcgctgggcgcgctggaggatgcgcttcagcacccgatattcgaaccgcgcgtccgcctcttcgtctcggagacgaatccacgcggaccatcagggtcaggcatatgatcgaatcgaagccatcgaagaagcgctggcggccgttgcgccgtttccttcttgtacttgtcctggccggcgtcggaggcgggattctctggggtttcgtggcgggacgaatggggggggggctcgaggccgagcgggaaagacccatcaaggctccgctccgcgtctccctggataacgacgagcaggtcgtgacgctggacgccgaagcccagaagcacaacgggatcgaaacgtccccggttgcggcggcgccatatcgggagcgcgtccgggcctacggcacggtcgtcgatctggcgcgcctgaccgacctgagcaacagctaccagaacgccaaatcctcgctgcaggccgcgaacgcccggctcgcggcatcgcgccctgcgtacgaacgtgcgcagacgttgaacaagaacgagcagatcgtctcgcaggcgacagtccaggcggcgcaggcgacctacggcgccgacgtggccactcaggcgtccgccgagtcgcagctccggacgctcgcggccaccgcgcaacaggagtgggggccggttctaggcaaggcgctgatcgagggatctccgacgatcacccgattgatcgagcggcaggactttctgttgcaggtcaccctgccgccgggggtgtcgataccgacgcctccgccgactgccgcgatcctcaccgccaacggactgcgcgcggacatcaggttcgtctcgcccgcgacgcggaccgatccgaagattcagggcgtgagctatttctatatcgccgcggccgacagcggcgtgttgcccggcatgaacgtgattgcgtatctgcccagcggcgcaactgtcgaaggcgcggccattccggagccggccatcgtatggtggcaggaccgggcctgggtttaccggcgcagcgcccccgacaagttcacccgcgtctcgatcgcgaccgactttccggcgcccggcggaggctacgtcgtcaagggctttccgaaggatgcccaaatcgtgacgcgcggcgcacaggcgctcctgtccgaggagttccgcgcgcagatccaggtcggcgaggacaagaaatgaccggcgcgcctccatcgggaccgcaggcggcggtcatcggctttgcgatccgctttcgcggcatcgtcatcgcgcttgcgtgcctgctgctggcgtacggggtctattcgttggggcgggtcaagtacgacgtgttcccggaatttgcgccgccccaggtcggcatacagaccgaggccgccggcctcacgcccgagcaggtggaaattctcgtcactcggccgatcgagaccgcgatcaacggagtgcccggcgtgcagacgttgcgctccacctctatacaggggctctcggtcgtcacggtgttcttcgatccctcgagcgacatctaccgcgaccgccaggtcgtggccgaacggctggccgcagccgcccagcagcttcccgtcggcgtccagccgccctcactgacgccgctcacgtcatcgaccagcaccgtgctcgtcgccggcctgacctcggattcgaaatcgttgatggaactccgctcgatcgcggaatggaccgtccgcttgcggctgctcgcggtgcccggcgtcgccaacgtcgcgatcttcggcggtgagacgcgggccattcagattcaggtccaccccgataagctcatcctgtacgaccttggcctgaacgatgttctgaccgcggcccgcaaggccacgggcgtgcgcggcgctggcttcatcgccaccaagaaccaacgcatcgtattccagaccgaaggccaatcgctccaggcggcgcagatcgcccgtaccgtgctgctgagccagaacggctcgagcgtcacgctcggcaatgtcgccgatgtgagggacgctccggagcccgcgatcagcggcgccgccatcggcggccggccgggtgtcattctcaacgtctccgagcagtacggcgcgaacaccgtggacgtgacgacctccgttgaagcggcgctcgaggatttgcggccggggttggcggccagcggcattagcgttcagtcggacctgttccggccggcgaacttcatccacaccgcgaccagcaacgtccgcgattccttgatcatcggcggcgtcctggtcatcgcaatcctgttcctgtttctcttcgacatgcgcaccgcggcgatttcctgtatcgccattccgctgtcactgctggccgggacgatcgttctccaggtggtgggggcgaccctcaacaccatgacccttggcggccttgcgatttcgatcggcgtcgtggtcgacgacgcggtgatcggggtagagaacatcgtccggcgcctgcgcgagaaccggcgcctgcccgaaccgctatccgaagccagggtgattctggacgcctgcatcgaggtccgcagcgccgtcgtctacgccaccttggccgtcattctcgtcgttctacccatcatggcgctttccggacttgccggtcggttgttcgcgccgctcggcttctcctacacgttggccgtgctggcgtcgctcctggtcgcgctcacggtgacgccggcgctctcgatggcgctgcttgccggccggaccgccgcagcccacgatcctccggtcgtccgttggacgcgcgccgcttacgaaaacctgctgcggggcattgcgcagcagccgcggaccgtaattgccgccgcggtagcgtttacgctagtcggctgcgcggccttgccttttttcggaggcgggttcattcccgagctcaaggaggggcacttcatcattcacatgtcggccgtgcccggcacgtccatcgacgagtcgctgcgcatcggagcgcgcgtcgccgacgcgctgcggactctgccttcggtccggtcggtcgcgcagcgggtgggccgggcggagaaggtcagcgacacctggggaccgcactacagcgaattcgaggtcgatctgaagccgctaagcggcgatgaggccgagggcgcgcaggctgagatccgcaagacactcgccggcttccttggcgtcaatttctcggtcaagacgttcctgaccgagcgggtcgaggagaccctttcgggctacaccgcctccgtcgccgtcaacatcttcggcaacgacctcgacgttctcgatcggacggcgcaggagatcgcacgcgtcctcggcgggattcccggcgccaccgaagttcaggtgcagtcgccgccggggctcccacagctcacgatccgcttgcggcagccagatctggagcgatggggattcgatgccgtcgaggtgctcgatctcatccgcaccgcctaccagggcgatgtcgttggccaaacctacgaaggtaaccaggtcttcaacgtcatcacgattctggatccggaaagccgcggcagcgtgaccaaggtcggcgaccttccgcttcgcgtcacaagttctccgggcacggcatcggccacggcccgtgcaagctcttccgggggcggcacctacgtgctgctgaagcagatcgccgatatctacgaagtcgccggacgctaccaggtcctgcaccagggcgggcagcgcctgcaaaccgtcactgccaacgtggcggggcgggacgtggcttccttcgttcaggaagcgcgtgcggcgatcggctcgaaggttcggcttccggcaggctcctacgtgaccttcgccggcgccgcggaagcgcagtcgcagtcgcagcgcgatctccttctgaactcgctgatcgccgccgttggcatcgtactgctactctcgatcgtgacgggcaactggcgaaacctgctcctggtgctggtcaacctgccgtttgcgctcgttggtggcgtgctggcggtgttcgcaaccggaggcctactgtcgctggggtcgctggtcggtttcgtgacggtgttcgggatcacgcttcgcaattcgatcctgatggttgcgcactacgaacatcttgtcgaagtcgaaggaatgagttgggggccggataccgcgatccgcggcgccgccgatcgggtgacgccgattctaatgacctcgctggtcaccgccctgggcgtgctgccgctggcgatcggcatgggtgatcccggccgcgagatcgaggggcctatggccgtcgtgattcttggcgggctgttaacgtccatggcgctcaacctgctcgtgctcccgacgctggcgctgcggttcgggcgtttcgaagcggaggccaatgaattcgcaactcgacaagcaagcccggggcccgctcccgcagagtagatcggatggcgaacagcgcgatcttcgagcgtcttggccgatcgcggcggcttctgagcaaagagagacctctgccacgcatagcccaacaacataggtccagtccggatctctcgatcgtctaaatgatttgcagacagtaccgagcaatgaatcgcgggacgtgccgagcagcattttagctggaagaggctttcgcgtgggcgcaactaggacgcggactcattaaggcgcaaccataatctgattgacgcgagttgaacgaaggcaaggtagttggcggcaagcttgtcgtagcgcgtcgccacccgacgacattgtttgatcttgttgaagaatcgctcgacccggttgcgagcgcggtagagatacgggctgaagcagatcggatcgctgcggtttcttttcggcggaatgttggcccacgtgcccttcttcatagcaagctctctgatccagtcggcgtcatagccacggtccgcgagcagcattgacccggatttcagacgagatagcagttttccggccagtcgaacgtcgtgcgcctcgccggggctcaacgccagccgtaccggcagaccgttgctgtcgaccaccgcatgaattttactcgtcaagccgccgcgtgagcttcccatcgactggcactggttccttgtgcaggctccatgctgatgtacgcggacaatggaggtgtcgatcatctgaacagcggcatcatgggcagcggcaagtgcgtccataatgcggccccagacaccagcccgccgccagcgaacaaagcggttgtagcaagtggtgtaaggaccgaatgccgccggcagatcacgccagggtgcgcctgatcgtaagacccagaaaatgccattgaggacacgtcggtcgttcacccgaggaacgccgcgcggcttgtttggtagcatcggcttgatgccgacccattcataatcggcgagttcgtagcccatgattcgagcccccagtttgggagtttgaatcacgggggtctggccgaaagcaatgctcctagccaggtcctcctggtccggcgcttacgggcggaagtggtcatcaaccaaccaacaatctcccccgaaaccgccgaaaatgacccaagatgaaggattgcatcgcgctaaggttggcgcggtcacttcgctgagatgattatgttgcactgttccccataatccggcttgatccccggcagcggaacgtcgagcatcgaatgcagcagatcgaagactggcttgagaagttgggcatgtctgcctacgcccggcgattccttgagaatcatgtcgacttctccgttctcggggatctgagcgatcaggacctcagggaactcggggtcgtccttggcgatcgcaagaaaatgcttcgcgcgatccgtgagctgcatcctccagggaagatcgcgcccactgccatcccggcagaatcgcctcccgatgcggccgagcggcgccagctgaccgtcatgttttgcgatctcgtcggctcgacggctctatccacgcagctcgatccggaggacttgcggaagatcatcggtgcataccaccggacctgcgctgcaatcgtcgaacgacatggcggtttcgtcgccaaatatatgggcgacggcgttctcgtgtatttcggctacccgcaagcccacgaacatgatgccgagcatgctgtggaggcgggacttgccctggttggcgccatcgcaaaactccatacagcggcgccggggcggttggaagtgcgtgtcgggatcgggacgggactcgtcgtcgttggcgaccttgtcgggtcgggagaggcgcaagaacgcggtgtcgtcggcgagacgccgaaccttgcggctcgactgcaggcggtcgcccaacctggaatagtcgttatcgccgacgccacccggcggttgctcggtgatctctttcaattgacgagcctcggtgcacaagacctcaagggcctcgccggccctgttcatgcctgggccgtggaaggtatgaacaccattgagggtcgcttcgaagcgttgcatggtcgcggactgggagcccttgttgcacgtgagaacgaatgcgcgtcgctgcagcggagctggtccaaggcgagaacaagccaaggccaagtcgtactcatttccggtgaagccggcatcggcaaatcacgtctggtaacggccgttatggaacaaaccgccgcggacgcgcccacgcagctacgctactattgttctccgcagcacaccaatactgcgctctatccgatcattaagcagatggagcggcgcgcaaacttcacgcgcaacgacgacaccaagacgaagctcgacaagctcgaagcaatgcttgaccattcatccgtgtccgtcgtgcacaaggccgtgcttgccgacctgcttgaactcgccgaagacgatcgctatcccgccgagagtttgacaccggcccagcgtcgtcagcgtacgctggaagcgatcgtgcaggacatccagagcttggcgcacttcggaccggtcctgctgatattcgaggatttgcactggatcgatccgaccacccttgagcttctcgaccagatcatcgatgcaatcgcggtgcttcccgcgatgcttgttgcgacctttcggaccgaatttgtaccgcgctggagctcaaccctccatgtaaccgtgatgtctatcgctcggcttgacccgcgggacacggaagcgctggttaatgacgtcatcggagcagcgtcgcttccggcgcacgtccggcaggaaatcatcgatcgtgcagacggcatacccctgtttgtccaggagatgaccaaggcggtgctggaagcgggcaccgaagcgcgaactgtcggagcggttccggcggccgcaagcccggtgccagccactctgcacgcatcgctaatggctcgattggaccggctcggtcccgccaaggagggggcccaattagcggctgcgatcggccgcgaattcagctatgcgctgttgtcctcgatcgcgccagttgccgaaccagaactcggccgctcgctcgatcgcctcgttgccgcgggcttgctgtttcggcagggtgagccacccgaggcaaattatctgttcaatcatgccctggtccaggaagccgcttatgggacgctgctgcgtgaaaagcgccgcgtactccacgctgcgctcgtccagtccatcgaactggatttcgcagacatagccgatagccagccggaagtgcttgcccgtcattgcaccgaagccggcctgttcgaaaaggctgcaagcgtgtggagcaaagcggggcggcgctccctttcacgctcggcgctggtcgaggcggctgagcagctttcgcgcgccctcgatctgatcgccgcgctgcccgagaccacggggctgcgacgcgagcgcatcacgctgcagatcgagcttgccaatgccttgattcatacaaggggccatgccgcgcccgagacacgagcagcattcgcacaggcacgcgcgttggtggagcaggcagagacgatggggaaggagacggacgatcctctcgcgccgttcgccgtgctctatggcttctgggttgcgagccgcatgtcgttccaagccgacgcgacccgggagctcgcggttcaattccaggggctcgccgagcagcgccaggccgaaacgcctgtggtgcttggacatctgctgatgggaatttcgctggtgctcgccggccacctcacggccggattcgcagaactcgatcgagtcgaggcgctttatgatcgcgccaggcatcgaccattcgcaacacggttcggccacgatattcttgtgtccgctttgtgttggcgagccttgtcgaactgggcgctcggtcgcgccgaagcggcagcggccgacgccgcgcacgctctaaaggaggcgcgtgagttcgggcatgccgccagcttgatgtatgcactttcccatgtgtcgcttacattgatccatctgggtcagctcgcgacagtggccgtgcttgccgatgagcttgtgcagttggcggaggaaaagctatcaaccttttggaaagcttacggcatgctgttgcgcggccgcggactttccctcgaaggtaagaaccatgccgcagccgatttgatggaagcgggcatttccgcaatgcgatcgaccggtgcaacagcctacgcaccctggtacttcagcgcattggcggcagcttatgctcagagcggacgggcagaagccggacagcggcttgccaaagacgcgatagctaggatcagcgaaagcggcgaaagctggcaagaggcggaggcatactgcattgccgcagaggtggagctggccctttcgccgccaaacatcgcgcaagcgaaagctcattttgaccgagcacttgttgttgcaagacaacagatggccaaacccttcgaactcagggtggccgaaggcttgagatcgctttctcaatccgaagcaaatactcggctttaacagccagagacagggaccagcttcgctaacgtcagcttttggctctgcgcgacacattgcgctgcgcacgaacttggtcgctatgggggcaaagcgcacatcggcttagtcgcatcacgcgtcgggttttatgggtacacggcctagtctagcgacggctctcaatctcaatatgggagtgcatagacgagcggtcagaggacctcatcgttggtggcgagcgctgatcctccggcgtgctcaggatggcttctgccaaagccttgaatcctgcgtgcgttcgtcctgcattcacaggcgcagcattaccggaaacgctcgttgaggcatcagtgaaaccaggatgacggaatcttaatcgcgatattggcagcccgtaatctgcgcctgatagggaccgcacactactcgcctcggctcactgcattttcgaggggagctttgtgggaatcgcttatgagctggcatcgatgagcctgaaaggccggcgaaaggcccccacttcagatcagtgatccacttggatacgcgccacagatgagtccgccaagcctatccgaaccgaaacccaaagcgaggtctgccggtgtgccgcacgcctcggacatgcaaagctcgtcgatggatatcgtcgggaatgcccatccggcagcgcggcggcgcgatcttcgcctcgacctttttcgtggcttggcgaactgggcgatcttcctcgatcatattcccaacaatgcggtcgcgtggttgacgacaaagcactacggcttcagcgatgccgccgatcttttcgtcttcatctccggctatacggcggctctggtctacggtcggacgatgctcgagcgtggattcgttcccgccgcgattcggctgctctcgcgtgcttggcagctctacgtggctcacgtccttctgttcgtgacgtatgtcgcggcgattggatatatcgctcgcacctacgaacactcgcacctcctcgacgaattcaacgtcgcccaggtcatcaagaatccgcttgccacactggcgcatggcttgactctcggattcaagccgctgaatctcgatgtgctgcctctctacatcgtgctgatggccgccttcccgcccgtgctctgggtcatgacccgacggcccgaccggacccttgcggtctcgttggtgctttacttcgcgtcgagacatttcggatggaatctcccgtcctttccgtcgggcgtctggtacttcaatccgtttgcttggcagttgttgtttacgctgggcgcatgggccgcgctaggcggcgcggccaggtgccggagcctgatcgaatctaacgtggccctagtactcggattgacgtatctcgccttggcactggtccttaccatggccggtcgtttcgatcagttcgcccatctgctgcccgactggctggtgctggccgtgaatccgaacgacaagaccaatctggcgccctaccgcgttattcatcttgtggtgcttgccgttttggcggtgaggatcctgcctgcagactggagaggcttcgactctcctttcgccaagcctctgatggcctgcggtcagcggtcgctggaagtcttctgcaccggcatctttctgtcggtcgccggtcacatcctactcgaaatcgagccggactccttcgcctttcagatgttggtcagtgctgccggcattggggtgatgactggcgtcgcctattacagatcgtgggcgagaaatctgggcgggcaaagcagcgccggctccggaacgcggggccgggaagcatgacaggcgaacgcaccgggtccgccacgccgctggtcgcagcagccgccctcgatcttcgccgagacttggccatggcgctgttgagcatcggcaaggaatcgccggtctgactgccggcgctcgctctgtttgcagcggtcttgttgtttttcgaggaatgtgtcgatatcgaggtcgcggtatcggtgaaggaattgtctcctggcgtacggtccgctttcgatgcggtcaaccgtctggctctcggaggaatctggatacctctggccgccgccgcttgggcagtatcgaagttcgttcgccgcaaccacccgcgcgctgagtaggctggttttgtattctgctgcctgatctcggccggcctgctgtcgaccgtgctgaaggtgtttttcggacgcgctcggccgatgcagttttttgccaacggggtgtacggtttcgatttcttccacgtcgaagcagcctggctatcgttcccgtccggtcacgtggcgacggtggccgctctgacggccgcgttgttctttttgggatcgcgcgcgtggagggttgcggcgtcgctttccgccgcggtccttgttgggcgggtggtcgttggcgcccactatccgagcgacgtgctggcgggcgccgcgtgcggcgtgctgggagcatatctcgtctttcgggcattccgcgtgcggagaccgtggttccccttgcactcgaccgcaacagacgcaatggaaggggtcgtggagcaggctttggctgggaatccgcgcaacgcgcaatctggcaatcgccgcgattaagagctgctacacggctcggatcgtcggtcgggctgcaagccgtcgggtccggcccaagggccgccggttgggacccgccgggttgatgggtaccggctcggaaggctggtcccagccgttaagcggcgcgccgttggcgggccggactctggaatccgagcttctttcgctccttctcgcacgcggcgagcagggccttcacctaaacagccatgccttcggccttgagatcgatcttttgcgagcggttatagtgctgctcggtgactgaagcgagcttctcgcgttcttgggtgcgatggtgcgcggtcttatgtcagagatcacggtcgccgctgcgtagcggccatcgcaagcagcgcgaacgacggtcggcggccgcgccatgcgtcgcgtcgcgcggtcgagttttcgttcgcgtctccctcgcgcagccttgcgcgtctccttcgctgtcttcgcagccgcaacctccatgcgacatcgagggcgcgggcatcaggccgccgattcaggatccgccgcagacgctcggtgagtcgcgctccgcccgggtgcagcgcgtcggcgaccaaaatcctgacgtgtcatggtcgtggccgccaccgagcattgcttgaggatgtccggcgcggctttgggtgcggctcatcggaagcgcttctcgccgaaatcgaagacgacgggcttcggctcaaagggccggcgtgggcacccacacccgtcggtacccgaccggcattagggccgtttcatttcaagccgcaatccggtcggcacgcaggtcgcggaatttccggctttccttcgcatacgcggcgagcagggccttaagagccatgccctcggccttgagatcaatcctctgcgaccggctgtaatgctgctcggttaccggggcgaggcgctggcgatccttggtcttcccgttcgatgtcttgtgcgcgaggatcgccgtcgccgagccgctctgcgattgcgccgagtcaaccgggagtacgacgccttcatgcgggcgatccatggacgattcggttggcggtcgtcgatggaacgcggcggtggaaagcgttaactatccgcccgattccgcttgagctgggatatcggttccagtacatactgccggtacacgcaacccgccgcggttgtccggaatcgctgattttacagcagttttcgagccccctggggccctggcagagaatccctccctctccgccattctgtcatacgttcccatttgccgacgcttccatcggttgagccgccgcctatgcgctcagttcttgaatgacggcatctgatgaagtcgacatttccgagctatgccttcgacgtcggctaccgacacttgccatttctagcccggagccgcttcccgaagcccaccacggagggtgaacatcggggcggacttcagacggtccgaaccgtgccgccgtctatgacgaactcggcgccgtggatcgctgcggcgcgatcggaggccaggtaggcgatgaggtcggcgacttcatagggctcggccgcacgcccgatcgggatcccgcccagaccgtcgagcacgacttgccgcgcttcctcgatcgagccgccattggcggcctgcagacgcttcagcatgtcgacggacgactcggtcatgatccagccgggggagacggcgttgacccgcacgcccttcggccccagttctctagagagggacttgctgtaggttctgagcgcagccttggcggcggcgtagccggtggtcgactcgggaagaggcaggactgactgaatggaggtgacgtgcaccaccgtgccggtgccccgttcgatcatctgcggaacaaggagacgatcaaggcggactgtggccagaaggttcaggttcaactcggcgagccagtgatcgtccgtcagggcagcaaagccgccgcccggcgaggacgagccaccaatcacatgggccaggatgtcgacgccgcccatatgctcaagcgcggctttggccaggatttcccctccctcggccgtcgtcaggtccgcctggacgaacgcgacgccgtcgacgggctccaggatgccgcgggcagcggtgatcacccgagcgccgccgaccaggaagcggtcgacggtggcgcggcccagacccttgctgccgccgctgatgagcacgcgctttcccgcgaactcggtcggatcagccttgatggtcatgtcgtgatctccaaggctgtgatggcattgttttcgagggtgaaaccataggtgaagcggattgggctgcctttgaagtcgccatgggcaaggccttcgaccacgacctgacccttctcgtggcaaacggtatccggcgcaaatatcgccttcgcgccgaccaccgcctcttcgagcaaggtccgcacttcggcgcggccctcatgacggtgcccgttgtccaagacgaccgcattggcggcgaaaggcttcagcatgccgtccacatcgagctgggcgttggcttcaacatagtcggctatgggcttgggtagttcgatcgacatcgctcggctccttgacgtgacaaggttgatttagcgagagacatcactcacgataatcggagcaaaccgccatggggtgtttcgaaaagtgggacaatgccgaagcacggtctgatcgaattcgatgctgtcctcgccattgcgcggcgcggatcgttccgggcagcggcgctggaacttggcctgtcgaccaccgcactgagcaacgtcatcgggaagctggaacgccaactcggcgtccgactgttcaatcggacgacgcgcagtgtttccctgacagatgccggaaggaaattcgtcgatcatgtcgggcctgccgtaaagacgcttcacgatgcgatgggggccgcccgttcgcagcaggaaatcccgtccggaacgcttcggatcaatgcattcgcaacgggagcgcgggaggttcttggtccgctcctgctagagttcttgcgacgctatccccacgttcacatcgatctcgtcaccgagggccggatcgtcgacatcgttgccgaagggttcgatctcggcctgaggagcgccgacctggtgccgagcgacatgatcgccattcccgtcggtcctccccgtagctttgccgtggtcgcatcgcccgaatatttcaaggccaacggtaagccccgcgtgccgcccgacctgctgcgccattcatgcctgcgcatccggttgccgaatggcgcgctgcatcgctggcagttcgaaaaggaaggtcagcccgtccagatcgacgttcaagggcctatcacgctggacgaagccagcctctcgcgcatcacggtgctcgaccatgtcggcatcggctacttcatggagtccgatgtgcgcgaagacatcgaggcagggcgtctcgttcgggtcctggaggactggacgccgctacttgcacccctgtgtctctactatcccagcaggcgcaatccctcggccgcgttcaaggcgttgatcgacatggcgcgtggtgctgcgagctgacggtctgctagatgactggttctgtccagagcgcgagttggcgaatgggtgccaacgaccgagcttggtccggggccattcgtttgctgtcgtcgtgccacagcgtgggtacagtgctcatccttcatctggcgtggcccgtcggcgatttctggttctttccgcccggccgatatcgcacgtgatcgatgaggctgcgcagcttcggcggaagattccgccggtccgtgaagtagaggaagaagcctgggaagaacgggcagtactcctcgagcacgggcaccagctcacctcgttcgatatagggccgaaacgtctcctccatgccgaacgtcaggccgcctcccgcgcaggcggtccgcaccatgacccacatgtcgttcgtcgtgatcctcggctccaccgcgacgttgaactcgcgccctccttccgcaaattcccagcggtaaggcgcgacgtgcggcgcgggtcgccacccgatgcagcaatgctgcgaaagctcgcgcgggtgagaggggacgccgaaccgctccagataggccggagcggccaccacgagctgacgctgatcgcctgagaccggcactgcgaccatgtcctgctcgatcacttcgccgagccgaacgcctgcgtcatagccctcggccacgatgtcgaattcctcatcggtcacggtcacgtcgacctgcacgccgggattggcgtgcgtgaattcggccagcaacgggccgcgaatgaatcgctcggcgatggacgacacggcaagacgcagctgcccggtcggctgcgcgtcacgatcccgggcgccatcgatcgcctgctcgacttcggccactgccggcgccacgcgctcgtgcaggcgtaggcctgcttcggtgagactgacgctgcgggtcgttcgctgcacgagcgccacgcccaggcggtcctccatgcgccggatggcctggctgacggcggagcgcgtcacgccgagccggtcggcggccccacggaaactcctggcttccgcgacggcgatgaagacggcaacgaggttcaggtcggtggtcattggttagttgagcttaccaccctggtcatcattggccaacttgcctcacctttcgccggaaactacgtctccgccatacgatggaggcactgatgacgtcacttgaccaataccgcctgctgggccgctccggcttgcgcgtctctcccctcgcgcttggcacgatgaccttcgggaccgagtggggatggggcgccgacgccggcgaggcccgccggatattcgacctgtatgtcgagcgcggcggcaatttcatcgacacctcggtgaactacaccaatggtgcttccgagcgcttggtgggccagttcgcccgcgacaagcgcgaccgcctcgtgctcgcgaccaaattcaccatggcccgcgaccccggcaacccgaattccggcggcaaccaccggctcaacatggttcgttcggtggagcagagcctgcggcagctcgataccgatcgcatcgacctgctctacctccacgcctgggatgcgacgacacggccggatgaggtgatgcgcggcctggacgatctcgtgcgcaccgggaaggtccagtatgtcggcatttgcaacacgccggcctggcgcatttcacagttgcagacgatcgcagatctgcgcggctggtcgcccttcgttgccctgcagatcgaatacaatctggtcgagcgaacggtcgaacatgaactcattccgttggcggcggccctcggcctgggcgtgctgccctggtcgccgctcggcggcggcgtgctcaccggcaagtacagccgggccgatctcaaggattcccaggaacgggcggttggaacgacacgcgcctcggtgatcgcttcatccggccttctcaatgagcgatcgctggacgcggccgagacggtgcgagccatcgcctgggagctcggcgcgacatcctcgcaggtcgccatcgcatggacgctggccaatcctgcgatcaccgcgccggtgatcggggcccgcacgctggagcaggcggaagacaatttcggcgcggtcgggatcacgatgtcgcctgagcagatggcgcgcctcgaccatgcgactgcgcccgatcccatttttcccggccgcttcctgcgtcgcccgatggtcgagcagctcatctttggcggtgccgccgtcgcgcggcgcggatagatcctaaaacaacaggtcggcgatgtctggccgaccatgtgtgcatcacttcggggcagacgattgttgcactggaaagggagacaccaatggcaaccctgcttaatcgcgcgcttgcgtcgtgcgtctacgcgatcatcgtgacggcttccaccctgacgacggccgcaccctgcggccaggccaaatccgtgccggaggccaacaagctgatcgtcaccgatgcattcgatcgctgggcggcgggaggaaccaccttcttcaacgacctgctgcacgaggacgtggtctggcgcatcaagggatccggcccgagcgccggcgaattccgaggccgcgatgtattcctggatcgcgcggtccgcccgttcgcgagccggttgtcgacgccggtccgcccgacaattgtgcggatcttcgctgatggtgaccatgtcatcgcgcattgggagggcagcggcgtggcgcgcgacggcaggccctacgcgaactcctatgcctggatcctgctcatgcaggacggcaaggcggcggaggtcacggcctatctcgacctcgcaccctacgacgacgtcctgcggcgcattcctgcgccggcgcaataggccggctgcgaggagcagggtcatcgcaaacgggagtgatgtcgcttctggccatccttcgagacgcccgccgttggcggacccccaaggatgaggaccgagtgcgtggcgctggtttcagcgggctccgatgccgcttagcctcatcctgaggagacagcgaagctgtcgtctcgcaggacgaggcgcgcgcccagctcgcgcaaagcgccatatgcgatagccccggctgcggggaagaggttgaacccaccgcctggacgatccgacctagcaaggtcccgccatccggcgggagccaggtgatcccaggaccatattcgagcacgatgttcgacaaaacctaccggcagcgcctcgacgccgatctggcgcgatgggaggccgacggcgtgatcgcgccggcggtggccgcctcgatccgcaacgcgctgccgccgcttccggccggcatcaacatcgcaatggtcgtcgccatcgtcggcggcctgttgatcgcggccgcattcctcgccttcgtggcggcgcactggaccgagatcgcgcggctgatgcggttcgcgatcctgctggccggcatggtcgtcaccggcgttctcggggcctggttcgccaccaccggccgcaacgttctcgccgatctctgcgccggcatcggggcgatcatcttcggtgcgggcatcgcgctggtcggccagatgtatcatctcggcgaggactttgccggcggcatgctgctgtggtccgtcggcgcgtttgccgccgcagtgctgaccggctcgcgcggggcgctcgcggtcggtctggtgtccgccggcatctggacctgcatgcggacctacgacgctcccgacgtcctgcatcttccgttcgtggcggtctggctgatcgccgccggcctcgccttcgcctggaattcgcgcgtcgcggctcacctcgtcgcgctcgcgctgctgccgtggtggatcgcgacgtcgctccgcttcgaattcgacggcgcccagccgtccttcctgctcgcgaacggcgcggccctgttgttcggcgccgggcttgcgatcgccgccgcgccgtcgccaagggcgcttcgcctcggcagcgtgctgtcgatctacggtgcgtttgcgctggccggcgttgccgccctcgaggtgacgacggtcgacgacatcgtccgtctccggaccgccacggcgccggcccagccgccgtgggcgatcctgtgcggggctgcgggtgtgatgcttgcccttgtgtccgccgcgctcaccaggcgcacgggcgaagtgctggcggcatgcgcgatcgccctcgtgctggtcgccgcgccgctgtggccggcagaagccgcgggcgagccctggttcgcttacgccgcgctgctctgcgccatgctgtgcctcgtcgtctccggcatgctcgacgaggtgcgtccgcgcctgattgccggctggctcgggatcgccgcaatcatcgccggcatcacctgggccgtgaagggctcgctgctgcgccgctcggccttccttgcggcggccggtgtcgtcgccgtcgtgttcgcgacagccctgggccgcgcgctgccgaggaccgaacgatgaccgggctgctcgcgtccgtcacaaaattcgggcagcgcatgcccaaggccgtgctgttcggcgccgccgtcctgctgcaatctgcgctgctggtgctgatggtggccgaccgcatgcagatcctgcgcgaaggggtcgaggtgaccttgcagacgcagccggtggatccccgcgatctcctgcgcggcgactatgtcgtgctccgctacgacatctcgcaactgccggccggcagcctcaaaggcaaggtcgccgattcgcgccatcctgatgtcttcgtcaagctcgcccccaatgccgacggcatccatcaggcggtctcggtgcatgccgagcccgtcgcggtcaccgcgcccgaagtgctgatccgcggccgcgtcgccaattacggcggctcctgcggcgacgaccgccgaaggttctgcgacaagctgccgatcaaatatggcctggaaagctatttcgtgcccgaaggcgagggccgaaagctcgaggacgcccgcaaccagcagaagctgcgcatcgtcgccgccgtgctgccctcgggccgcgcggcgatcaagcggctgttgctcgacggcgagcccgtctacgaagagccgctgtactaaggcgggatggcgttaggaacgaatggactggagacgttgggacggccgccctctgcggacctgccatccctacgtgtggagcggtgggctacttcgtgccgctgaaaagatcgaagactgaagctggctgggcggcgtcctgctccgcctcgggctgctggtccgcctccccatgccgacgtgcaacgatctccttcgcagccgcgacggcgcgcacatacaattcagcttgttccctcatttccgcgttcgagaggaggtcgaaatcccctcgtttccaaacctcgggatggcgaaggttgtccgaagctgcgcgcggaaaagagatgaactcgcccgccgacgcttgaaagtcggttagcgaaaagacggcgtcttctaagacggtcatcagcaatctgcgttgaaagcgcgatagagacatcgtcgcccacccgacgatgaagatcggcttcagaataccgccttcggaaataacaatgagaggcttgaccggaattcttacgtcacggctgatgctgtatggcgccacgtattgatcgtatgaaggaaggccggagtagttgcgttcatcatcgtaatcgtaaaacgcgtttacgtactcagcgacaagagggcggctctttgggtgtcctttggtgcgcgcggccttcagcgcggtgtcgcgatccaacttcaacgcgatacgatctcgaatgatcggttggccggctgcgtatgaaatctggggcgtcgccgtgatgaaggatactacggcctttgttgttgacagttcatccgggaaattgaagcggacccaattgtgtacataaggtggccgatcgattttcacggacattaaagcctctcagctagtgcctagtttgacacctaaagtattgctggatcgcctcgtcggaaattcgcattccggggttcgattcgccagagtgattatacacctgatcccatgggccgcccgactcgtgggaaagtctcaccaacgaagctggtgtcatctgtaaataacgaaggagcaggggctgcaaaaattcttcgtcttcgcgctctatgccaacagggcaaacctcttccttcgcagttgagggattccgccttgttgcgaggactgtgattcgacccgccccgaagggtttgaactgcatatacaattcgcggaaaacggggccatagtcccatgcctcgatcttcgcggtcacaaggggttgccctgttttcgcgaggaaccacgcatgcagaaagtagacaatcttgttcacagagatgttggtaacggtaatatctaaccgctccgccgtctctaggacgtagtttgctacagatcgaacgtcatatggcatgaccgaccgcgcggcgcgttggcgcctagctcagcgtaggcgagaatggggaactgcaaaaatcttcgaagcccggacacgctccaaggcttgcttccgaatgctcaacgtcccggaatcgatgaagtttctgacacaaccaatttcagccgtcgaactcgcgcgcgtatcggctttgcccggattcaggtcaagcgacaattgctgtggagaattctttggcgcgtcttgcttagacatttgggaaccctgcgcctgattcgctaatgatcagtatcttccttcgccgacaggtccgcaatgatcttcgcctcgtattcaacaggcgagtccaacggaacccggaataccggcaatgcaacttccgcgggctgtcgggcaaagtggccgtcctgcttccgcggcgtgctaggtctgaatagccgtaagtacaagtgcgggcttatgccgtcgtactgttgaaacacgaccttcgatctatcttccgggtcctcggtaatggcgtcgttatgcaaggcgattgctaagctcttgcggtatggctcgatataaatgaccttcgaaatccctgctgccacaatgtgccgcgcgcagttgtgacagggatatgtggtcgtaaacatcgtcgcgccgacgagcgaatgccggccctcgcgcgctaccgctaagatggactccatttcggcgtggattgatcgcgaaaactcggttagatcgtcaacttcagtgccatccaaaattttgcgaacgtcttcgactttggtccccgcctttagcaatccggattctcgaattagcttcgcaattcggtcgccaatcttcgttcgacggacttcgttgtgacaaatcttgctgccccatttgaagcagcggtgatctttgtcatcaatggccctctttgcctcatcccagatgctctgatcatcctccacataaagaccgcccttaaacttcggcacgtcattccagcccacagagatgagttctcccttggctgatatgattgaggcgcccacttgtcgcgacatgcacgcagagctagccattgcggccgttgcttcgtacatcgccgactcggatttggtcggggtatgtacattggtatcgaagacaatttccaaatagcggtggaggcgcctttttagctcctcctctttcttgtcgttgcaaatgaagaaatcggacagcacaaatatcttgcgtgtcatttggccgaaggtagccggttcaccttgatcgcggtccaaaactgcttgtacatctttttcttctgcgcctttgtctaccagacgctttttccgaatgtcgtcaggcgcaaaaattccgaacaacatgagagtatcgcggtagatctgacgcagaagcgcaagctcctcggcatttttcagcgaatcgatgatgtacgcacgacgccccggtatgagtgcgccgtcctcgctacgatatccgccgcgcgattcgcgaaacttcgcgatccgttcaaccgccttctcagctaagtaattgttgccgaaccgctcgcgcagcctatttccagccgcctgcatcacctcgatgtaattgttgagcggattttgtggaggcgtggttacgtcgacgcggcgggcctcggtccggatgatatcactcattccgatgatgggcgcgacgtcgtatttgaaatgctgagtcaaaatctccgagagcagccgccccgaagtggagacgcctgagccaacagggccgaccaaagcgatgacaagttcttgcgaaagccgatcagatatttcggttgcgagcttttgttgctcttcaaccacgcgcggcctcaaaggcacagggtcaaccatcatcccccctatcaaaatggttgcaagtattcgcaaatacaccggtcttccggtgcggcgcaacccgcatgaagtgcggagtgttacgttgacagttcacaaaatgcgcgccgtccggcggcaaacagaactccgaaccagcgtccgacgcgcaactcggtcgccttgaagaggccggccggagccctgcctatcagcttgcaatgatgacatcatgctcctgttttgcccgacgaagcaaatcacgggagacgtcattcggaatgagcggcaacgatcgcggccaatcctcgtcggctcgcacgggcgcgccggagaggcgagtcaaaccgctgtctcttatacacatctcc

SEQ ID NO: 317 - DNA, 162409 bp, Bradyrhizobium colbertium
  misc_feature (51365)..(51374): n is a, c, g, or t
  misc_feature (52186)..(52195): n is a, c, g, or t
  misc_feature (52519)..(52528): n is a, c, g, or t
aggtgtccactcattcggaggaagttcagacctccccccctaaactccaaccccaccggcatggggttccgacgggccggtcgacgcggagtcatcttatgcccaaaccggaaaacttcccgatcgagaacatcttcgttcccaccaagcagaagaaggccctcaatcccgccaccgtcgcggagatcgcggaaagcatgctggacatcggacagcagacccccatttccgttcggcgcgacggagaccgcctcgttctagtcgaggggctgcatcggctcgaggcctgcaaggcgctcggcgagacgaccattctcggggtcgtggtcacggcggagtttgctgacgccaagccgcttctagccgaacgacccgaagtcgaggccgagcgcctcaagatggcgcgattgaaacaactgcggctggagaaggaagccgcggaggcatcggcggcggcctcgaggggcgccggcgcaacgcaagcgtcgcgcacgcatccggcgaaaggcgctcgcgacaacccgaaggcatcaccgggccggactgtgaaatcgaagccgaaatcattgtcggactggatcacgcagcaaaagggcagcggcggccgctattgactgtcggtgccggtagttctggggctaagtagggtgggttagcgcagcgtaacccacctcttcacccttcgcagacacaagatcggtgggttacgccttcggctaacccgccctgcgcgccgtcaccgtaatgacgactacgccgcgttgctgcgctgcgtgtgacgtccttccctcacctcttcgatgatcttcgcgctgaaggccttgaggtcaccgggattgcgcgaggtgatgaggccctggtcgacgaccacctccgaatcctcccacttcgccccggcattggcgacgtcggtcttgatcgatttgtaggacgtcatcctgcggcccttcgcgatgcccgtctcgatcagcagccagggcgcatggcagaccgcggccaccaccttcttggcgtcgaacacgctcttgatgaattgaagcgccttgggctcgacacgcagcaggtcggggttgatctggccgccgggcagcacgagggcgtcatagtcggcaggcttggcctggtcgagggtcttgtcgaccttgaccgggcggccccagtccttctcgtcccagcccttgatctcgccggcttgcggcgaaatgatctccactgttgcgccggccgccttgagggcatcacgcggcatttcgagttcggactgctcgaagccgtgggtggccagaatcgcgatcttttttccggacagttccatccgtgtctccattgcgtgtgaggcgatgccactcaatcgaatgctttcgcctttggttcctcacacgagatcgagagccgtaacccttgcgctgtcattccggcgcggatgacggtaagttccgcagcgcttcaccttgcgtggttgccaacgcatgacagccgcaacctttcgatcgcggccgtgtctccctcaccgatcaacctggctgtctcaagccgccttcgcctgctccggcgacgctttccatcgcgcgcatgtagaggtcgagcaggcttccgcgctcgtccgagtgggctgcctgcaagcgcacagcgccagtccatcaggtcatccaaacatgctagcaggaagctcctgtctagatgcgaggccccatgttgaacttccagctcccatggcacgagatctttgctccgacgcattctctcatcgagatgatcgtacggggcaccatcatgtatttcggcatcttcacgttgatgcgcctcatcctgaagcgacaaaccggcggaatcagcatcccggacgtgctcctcgtcgtgcttctggccgatgccgcgcagaacggcatggcgggtgaataccggtcgatcacggaaggcctggtgctcgttgccaccatcatcttctggaaccttgccatcgattgggtcggctatcacgtccccttcgtcgagcggctcgttcagcccccgccgctacttctgatcaagaacggccaggtccttcgccgccatttgcgacaggagctggttacgatggacgagttgctgagcaagctccgggaagaaggcgtcgacagccctgcggacgtcatcgaggcctacatcgagggcgacggcaacatcagcgtgaaaaagaaggagaagtgacacgcgaggtcgggagcggccgagaggaaagcgcgtagggtggactagcgaagcggaatccaccgtcttgcccgtcggatacgcggtggtgggttacgcctttcggctaacccaccctacgaagtagccggcattcgccgattgcagatacttccgcgaaagtgaccctctgctcttacgccgccttcgcctgctccggcgtggccgtctccatcgcgcgcatgtagaggtcgagcaggctttcgcgctcgtcgcgctcgttcttgtcttccttgcgcagcttgatgatctccttgaggatcttcacgtcgaagccctcgcccttggcttccgcgaagacttccttcttctgttcgctcaactcctgcatttcgctgtcgaggttctcgatccgctcgacgaaggaacggatcttgccgccgggaatggtgatgtcggacatggtgcctctttgctgactgaggtcgcgaaaatgaccgcaaagaaatgaccaatgtgttaaccctcgctgccggacctgcagcgaccgcgcgatcagaaggcgccgtcgaagtgcgctaacggccgtctctcaccaccaatacggccagcgccatccctgatagcgcacataggacggcaccagcggcgggccgtagggatcgaccttgtcgtcctcgggacgatagcgatagcgcggcacgatgttgtagtcccatggggtcggccgcagcacgggcgccgtgatgatcagccgctcctgcggcgcgcgtaccacttgcgccttccgcggtcttgcttcggcagccgatgttgcgaggccgcccagcaccagggcggttccgagcgcataggcgatggtctttgtcttcattgcgttggtctccttgccgccagagtgcaaaaggacgctttgcatggcaagcgaatttgttctcgactttgcgtgaacgaccgatgcgggccttcgcgacctcatccgtcgttgcgagccatcgggtccgcgcgaagcgcggcccgacgacaggctccgcaacacaccgccgccgccgcatattccgtcattgcgagcgcagcgaagcaatccatctccgcagagggagcctggattgcttcgtcgcctcgctccgcgccacgacggtcgagaggcacggacccggcaagctgcaatcgtattctcgcgcagctgcgccttacttgccccgcccgccgttcaaccgcgccagcgccgccggcacctgatcgcgatccgcgaccagcaaatattcctgccgcgccaggctggcgccgctcgcgagtacgatcgactttttcgggcacaggccgaagcatccggtcatgaccagcttggccggcttgatgccgtcgcgcttgctcgccttcagttcggacttcagcgcgcgcctgacgtcgcggccttcgtcgctgcgcttgaggtactttgcgcacaccagaaccggcgccgcgcggcgcgagtgcacgatcatcggacttgcaggtttcgaggatttttcgggcattccagacctataggagactcgatctcatatggggatggaaccgcgatcccgccgctgggcgatgtgatgacgtgatgagcgcgcccgccgctattggtgcgcgcggcgcaaggcctgctccagcttgagcctctgcttgtcccagcgctcctgctcggcttcggcacgcgcgtcgagcgcggcgcgctcggcttcgatcgcctccgccttggcgtcgtgctcgcgccttgccttgtcgagcgccgcctcggcggcggcaaccgctttgtcgcggcgggcgcgcgccctggcgcgggcggcctcttccttgcggcgctcggactcgcgccgccgctcttccttctcgaacgccgcggcggccttgcgcgccgccgcatcgtcctcctcgcgggatgtcttcttcgcggtcttcgctggcttcttggccggcttcttcgccggctttctggccttgcggccgggcctggcctcgctctcgacgagatcggtcggcagctccgcgctctccgtgaagcggccgtccgagccgacgggccgcctgagcacgacacccggcttcgccatggtcgccgcgacgatgtcggggtcgtcggtctccctggcaacgccctgatggaacaggttggagctggcgccccaggcctcgagcgccgccttcatcgagggcgccgcgatcgcctgatcgtagaagccgagcgaggtctggtaggtcttcagttttcttttcggcttgcttttcgcttgctttgccatgccgccccgatcttggctacgtagcccggatggagcgtagcgcaatccggggtcttgtgtccgcgggccaagcgtcccggatcacgcttgcactccatccgggctacgagcttccaagcagcgcgtcgtaccccttcccgctgaacgccagcaggcagaagccgtggccgaacggatcggccagcatcgcgatccgcccatagggcgcatcgcgcgccggcgcctccaggatcgcacccgcgccgaccgcacgcgcgacggcggcatcgacatcgtcgacgacgacgtcgatatgcatcggcgtccagtgccgctcgtagcgtcggcggtcgccgccagcccccggcgtgccggcctgcttggtgaggagatagaccggcgccggccagccgttgagctcgacgaaatcggtgccgaagcgtcgtccgacggtgaggccgaaggcctcggtgtagaaggtcgtggctttgccgacgtcgggaacgtcgatgttgaggaggaagctcatggcagacccgtcgcaagttgcggagcgaccgtagcccggatggaacgcaagcgtaaatccggggtgatgccgcacgtcgtatccgggatttggcaccctggatgacgcgcaaagcggctcgccacccctcgagcgccagcatgccatcatgcccctgttttgcccgacgccgcaactatttttcggtatcaccgaagtcgacgggaaccccgagcgatttcacggggacgtctactgtgcatggggttgttttcgcgaaagcgagtccgggcccgtctctcaacggctcctcaggctcaggatgtaggccgacagcgcatcggcctgctccggcgagatcacgatgttcggcatgttctggtggctcgtgcgccagaacaccttcagcgacagcgcggtggtgccccggcgatcggcgatggcctggaagctcggcgcctcgtcgaagaagtcggtcatgtgcggctcgatggcgtgacaggactggcaccacgcctgcgccaggcgatggccctccgcggccatgcgcgatgcgggcctcggcgcgccggcggcggtgtggaccacgctgaagaggaacagcaccgacaacacgatcaggacgatgatgccgatggagattcgaacactgtgcgacatcgccaaacctcgcgattgattcatcgggccagcgtaggtcggcaccgcccggtcaggttgatctgcgtcaagagcgcggtcgcgcaatgccgttgatgcagctcaacgcgcgcaggcgctgccgcatcgatcatgccgctcgccaggatcgcgttcaccgcataggctcgcgctcattcgaggtcaggaggcatcaccatgaacgagaaccgctattacggcgtgcgggtcgagggcgcgaaatacggcgtggggttcggctcggcgctcgccatcgcgatctcctacaccaacaaccattcgatcctgtgggcgatcatccacggcatcctgggctggttctacgtgatcttcgtcgcgctgtttcggtgacatcgcaccggcaggtcgggcccgccgcgcgcggttcgcagcttttccttgctttcccggttcccgcctctacggtcgcgccgcgcacgaacccgcgagacgagaccagagatgcccgacacgatgaaatgccccgcctgcaactccgagcacgcctaccaggatcgcgatctctgggtctgcccggaatgcggtcatgaatggagcggcgcggcggacgcgcttgcagacacggcgcaggatgccggcgtgcgcgatgccaacggcaatgcgctcgcggacggcgacagcgtcatcgtgatcaaggatctcaagatcaagggctcgtcatccgtggtcaagggcggcaccaaggtgcgcaacatccgcctgcaggatgccagcgacggtcacaacatcgcgtgcaagatcgacggcatcggcgcgatgaacctgaaatcggagttcgtgaggaaggcgtaacctcgcgctagctttgccgctgcgccaggtagaatccgcacagcaccgtcacgaggcccgccgtctgcagcatcgtcggcggctcgccgagcagcagccagccggtgagcagcgtcagcgccggcacgcaggccggaaacaccgcggcgcgggcaacgccgagacgctggaccgagacggcgtagagatagagcgcggcggggccggcaagcacgccctgcgccagcgcctggatggcgttctcggtgaaaccgatggccgcaacatgggcgaggccgacggtcgcgatgtagaccggcaccagcagcagcgacagcacgttgatcaccagcgcagccgagacggccgagacgcgccagcgccgcaacatcgcgccgaagccggcgaacatgaggcctgcgagcacgaagatcagatcgccctgcacgccctcggcgccgatgtggccgatcgattccgcgccgatcacgccgaggccgccgacgatgacgatcgcgccggccagacgcgaggcggagatccgctccttcagcacgagcgccgccagcagcaggccccccagcgtcgcgcaggagggctggatcacgctgccgtggccgagcggcacgaacaggaagcccgcgtaggagatcagcgacatcacgggaccgccgagcaccatcagcacgaggcccctgctccagccgatcccgcagagatcggagacgccggcgcgcaacacgagcggcaggaacgcgatccccgaccagacatagcgatgcaccaggagatcgaccggcgtgaagccgaccttgagcccgtgccgcgtggcggcaaagccgaacgcccagaacagcgccgccgcaagcccgcagaccacgccgagcagcgccggcgctgcatcgttcttctgagtgagagcgtcggcaccgctcgtccgctgatccatggatcaagcgatatgtcggcgcgccgggccgctcaacccacgcagttgcagggctggcacgcaggcgtcgccgaatgcggcgaaactccgcgatggccgcacgcgcaaatgcgcatgcggcgccttgattgtcgacggcgcgaggcgagccgcgcctcaggcgagctcagccttagcgggctgcgcccgtggtgacgtccgcggtcttgaccttgcgggggctgagcaccttcgcctggtggaccgaggccaccgtggcgggcgcctcaacctgctgctcgacatgcgccgcaccgagaacgcgcacctgcagcggggaaaccgggaaaccgccagcctcataggtcggcagctcggcagcgacggcagcggtgccacccgcgatcgtgaggacagcagcggcgatcgacaaagtcttcttgttcattggtgatgctccagaggtgagaactcggagcatatttaggtccgctttgctgcattgcgacatgctttgttgcaacgcaacagtcccttcaatgcatggcggtatgcttgatgcttacgccggtatggagaatcgcggcgacgttcgcctcaaccaccaagcacgttgccccatccgtcgaacacgtagttcctccaggcaacggttccgtctgcgccaggccggctggctcggcggtagtcgtcggcctgatcggcggtccaagtaatgatcgtgtcggaaagacgatcgtgcaggatggcgggctcagtgggatcgaaggcgtccatgggacgaagcgagggatgcgtcatggcgcctccaacgcaccagccgctgcaaagttgcggcagagacatcaagcaaaacaacgggccagaggccgaagatgcaggcgcctcatttcaatgcagttgccagcgattgcagctttgccacgagattgatgccgagagcatggatgacctcgatgattgcgagtgcgattccggctgcgacaagtccatactcgatcgcggtggcgccggattcatcggcggcgaattcggccaatatgcatttcaatttcacgggcagcgattctcccaattctactcgaaattgccggcgctcgtagaaatgcacgaccacaatccaagattgcgtaaacgcaattgctgcaagttgacaacaatccagcgtttgccgggtttttgccggcggcccgcagctcgggcttgcatggaacccgcgttgcacctcggcaacacccgcctcgaaaagccggtcctcgtcggtttgcgccattgcgccgccacacgatcccccgaacaatcggcgggctgcgtgcctttccatgcaagactgttttcgtcaagcgtctgcatcatgactgttcggaccagatggctcggacagaaccgtttggaggcaggatcatgaacgatcgacggtctcttctggttgcggtgtcgtgtccctccgccgttctcgccggctggctggcgttgtctttttctgcctacgcgccggccctcatcgagaacagcggagcgaatgtggcggtcgtctcaccggcgaaggatatcagccgccttgacctcgccgacgtaccgcgcgctgcgaccatcgaggacggcgttgccttgaccgccgaaatcgccgccgccatcactgcgacccctgccccggcgacgacaccgcaggagacggccgaggcgcccgccgccgccgtcaagctcgcttcggccgacccgctgctgatcctgccgacagatgcggcgcccgtagcgcagatctcgcccgaagccatcgtctccgaagctgcacccgcgccagagcccgtcaagctcgcgtccgccgatcccaccgagatcgtgacgacggacgcattgtcgcctgcggcgatcgcgagcggccccgtcccgcccgcgagcaaggcatctccaccggccgacaccgtcgccgtgctcgacgaatgcttcatcatggaagcctgcgtcgaccgctatctctggacgctttatcagcgcaccgccaaggaggacacgatgaaggtccaggagcggcgcgccgtcaccatcaagcgcaagggcaagaccgtcacggtgatgcgcagcttcaccaagctggtcgatcaggacttcacctggaaggatccgaaggcagccgagcgcgccggcatgtcgatgatggactacgtcatcggcggcatggacaagagtttcaagctgaagctgtttcgcatgatgctcgcggccgaagccgccggcctgtcgccgggcatcaccagcgcattccgcgacgactatcgccagtccatcgcgagcggcctcaaggccgcctccgaccggtcctatcacggcggcagcgcgcgcggcggttatggtcacggcatggcggccgacatcgtcagcacccagggcaataaccgcgcgcagcgctgggtctcgaccgagatcctgtggaagtgggtcgatgccaacggcaaggcgtacggcatcggccggccttacctcggccgcgatccgccacatgtcggcccgatcgatggcaaggaatatatctcgcgtcgcggcacggcggaccgcaaggaagcagccaacgtcaagccgaagaagacgcacaccgcggcccgcgcaaagccccccaaggcccaggcggcgcgagagcagaagggtccggcaaagccgcagaagtcggctcaatcgggcgtcaagcccgcaacctgaagccgttacggcttgcggcccggcagcggcacgaggcgcatttcggctgtgccggcctcctgcgtgcgcaccagcaccgcaaagatcgtctccactgcgagctgcaccgccacctccgtcgtctcgcccttggccagttgcgcggcgatcagaccgctgaggagatcgccggtgccatagggccggatcggcagacgcggcgtcgcaaagcgcgacagatcgccatcggcacagaggatcgtctccaaccgcccttccgccgtatccgcgagcgtgcagccggtcgcaacgacatcgatggggccacttcgcgcgatcgccgcacaggccgcgcgcaggtcctgcgcatcggcaatcgcaaggcccgcaagcagctcgagctcgaactggtttggcatcgtcagcttcgccaccggcagcagccggtgccggaccacgtccagaatgccgtcggcgacatagacgcggccgtcgtcgccgatcacggggtcgcagagatagaccagcttcgcattccgcatgagcgcgcgctcgacgaaatcggcaatcacgttggcattgccgggcgagcccagatagccggtgacgagtaccgcggcctcctcgaccaggccgcgctcctcgacgcccttcaggaggtcggccaggagcccggtctccagcacccgcccgcgcagggtcggatagcgcggatggttcgacagcagcgtcgtcggtaccgcggcaacgttcacgccttccgcctggatggcataggcagccgcgctattgccgacatggccgtggaccacctggctctgaatggagatgacgagcatgacagaggtccgtagggccaatcaggccaagacgcaagcaagcacagccctttgtcgcggactcgtcattccggcgtgatacaccctgccacacgcccgacattgtcatcccggacacagcctccgcatgacctccgccttcaacgcctatgcggcactcgctctcgccatcgtgttcgaggtcaccgcgtcggcgttcctgcagcaatccgcgcagttcacccgtccctggccaacgctggcaatggtgctgttctacgtcgcctcgttctacgcgttgtcggtggcgattcgcgtcatcccgctgagcatcgcctatgcgatctggggcggggtcggcatcatcctgaccgccaccgtctccttcgtgctgttccgccagatgctggatgcagcggccttcgtcggcatcgcgctgatcgtttcgggggtcgtggtgatcaacctattctcggagacggcggtgcattgatgcccgccgcttaggtggcgcaggcaactgacgccaaagccctccgacagtcgtcccctcgcccgtcttttcacgccgccgacagctgatcgaattcgggcggcgcgtaggccttgccgtcctgatcggtgatgacgacccgccacccctcgctcgcccacactttcgccttcgccacgatgagcagccggctctcgcggtcgaaactgtacttctcgttgtcgcgttctgcgaccattttgtaggccaactcgcatccccttgcgtcgccctgcaccccgcctcctcgtggcagcgggctttggcggcaattcgccgggagcgtggcaatttggtgccatccgcagcagtatggccagtcccgtctcttgctggaacggagtcgatcctgctgcgtcgaatcggcgccaaagcatgatccggacaagcgcgggtcggtcttccgcagagaccatgcgtaaacaacctagagcgcgacgacgatccaggatgccatcgcttagtggacgcggatgatgtgggggcggccgagattgatcaggccctgaaccgccgagaggcggtcgtcgagggctgcaatggtgagcaacagattgttgcggcgctcgtcgagaaaacccatctcggggctggaaagcttcgtgctcattcgttccttctggatcccttcaagcgacttgcgcagtcccgcgatcaggctggtcagctgcctgacctccttggtcatcgaccgcttcgcgacattatggcggcgcgtctccgcctggctctgtctcatcgcatcctcccgtgccccgctgccccgagtggatacgcacatccttgggtacacatcttacgatcgatgaaatctgccggcgaagaactttcttaaattgtacgcgcagggaacccgaatccccacgtagccggccggcgcatcatggcgacactgagcgaagtccaattatcgtccgctgtttcataggcgcgacggtcgagacgcctgaggcatcagttggccatcagcatgaagcggtcgaagtacgacgcaagcccggcataatcatcgagcgggagcacattcgcgacatactggtctggccgcaccacgaccatgcagccgaccttccggtcaatgccgcgcattgcgaagacatcgtgaccgcccttgagatccggacagaacatcttctcgtagtcgatcagaccgtagcggcccttgcgcggaagcagcagcggcggcatcgccgcgacggcaagctcgcgatgatcttgctggaagacggcgcgcaggtcgatgacgctgtcgatgtccgtgccaaggggcgtatatcgcctcaccggcgattcccctgcttcggtgaggaagtcgcacagcgcgcggatggccgagccggcggctgcaggatcttccgccggcgagaacgcatagatgcggaagcggccgtcggcttgcgcggcatggccgagatgtaccggtttggcgtctgccagccggatcaccggcgcggaatggaagcgcttgccgacaatcaggccctgcgcgaggtgctgatgcgaagccgcaccggtcaggatcgatgggctgtagtgcgttgccgtgcccgcggtgtagcgcccgtgcctgacgaaatagtgctgcgttttggtcgcgtcggcgccgccggccctggcagcggaggcgaggattcccgcccattcgcgatcgaaatcgatcagctccttcgcaaccgcctggcgctcggcagagtaggaatgcagcagacccggcgcacactgcttgcgcaggaccgcggcaagcttccagccgagattgaaggcatcctgcatcgacacattcatcccctgccccgccttcgggctgtgagtgtggcaggcatcaccggcgatgaagatgcgcggcagacgcgtatcgacagcgctctgcggcacgtcgtcaaacttgtcggtgaggcgctggccgatctcatagactgaccaccaggcgatctccttcacctccagcgtatgcggcttcaggatccgctgtgcttttgcaatcacgtcggcggcggagatgttgcggctcgcaacacgctcgccgacgtcgagttttgcgagctcgacatagatgcggaccatgtagccgccttcacgtggaatgatcagcaggctgccgtccttggccgactggatcagcgacttgaagcggatgtccgggaagtccgtgaccgccagcacgtccatcacgccccaggcgtggttggcggaatccccatgcagctcgcgcccgatcgccttgcgcaccgtgctgcgtgcgccgtcgcagccgacgacgtagcgtgccctgattgtctcgaccttgccctcgttcgcgggatcgacgcgctcgagccgcacggtcacggcatgatgggcagccggatcgacctggaggtcaagcacgcgccggctgtaatacggctcgagctttgccggagacttgcgcatgacgtcgagaaagcaatcatggatgcgcgcctggttgagaatgacatgcgggaactccgagagcccgtcctcgacgtcctgcacccggccgctgcgggtgatcttctccggcgtccgctcgtccggcttccagaacgtcgtttcgttgacccaatatgcttccttcagcacacgctcgctgaagccataggcgtggaacatctccatggtgcggcaggcgatgccgtcggcctgaccgaccagcaagcggtccggcttctgctcgacgatgcaggtcttgatatcgggaaattgcgcaagctgggcggcgagcgtcaggccggcaggcccgcagccgacgatgagaacatcgacctcgtcaggcacagcgcccgctgcacccgaggatcgcacgcgttcggcgggatcggtgatctcagggtcgccgggctgaaatccattgagatggaattgcatgcgcacctctcccgacaacgctcgttatgatattgctcagtatgctgactatcagtatacttgtcaaacgacgcctctcgccgcgacgtccggagaattcggtgaaagacaacaacgacatgcccgggcatttggcgcgccgcttccagcagatcgcggtggcggtcttcctggccgaggtcgaggacgccggcttcgacctgacgccggtgcaatacgctgcgctcgcgaccatcaaggccaatccggggctcgaccaggtgacgctcgccggattgatcgcatacgatcgcaccaccatcaccggcgtgatcgatcgcctcgttcagaagggcctcgcggagcgccgcccctccagccgcgaccgccgcgcccgcgagcttgagatcaccggcgaaggacggcgcacgctgcgcaagatcacaccggcggtcgaatctgcccagcgcatcatgctgcgcggcctcagcgcgaaggaaggcgaggagctgatgcggttgctgcgtaaggccattgccgcgggcaatgaactcagccgcgccccgctgcgcgacgcgcaggtctgatcccgggccaagtgcgtaattgtcgcagcgcacgaaaccaggaactaaccttcagctgctaacgtcgaccccattgggcgcttaacgcgcgattaactttgcggggcggagtttgggaatgttcaggttcctggttggggctgcagccatcgcgctctcgatcggtcaggcgttcgcaggtggccatggcggcggcgaccctcctccgccgaaagccgagccggcggttgcgccggcgaaggtcatcctgaccaagcagggcgccaagctcgtcgatctcaatggcatgacgctctactattacgagcgcgacacgaccggaaaatcatcgagctgcaacggcaagtgcacggaaagctgggtgccactggcggcgacggccgacgccaaggccgtcggcgatttcaccgtgatcaaccgcgacgacgggagcaagatgtgggcgtatcgttatcgtccgctctacacctcgcccgccgacaaggcgcccggtgacgccaacggcaatgccacgacgctgcaatggcgcattgcgcggccggagaactagagccaagtacggccggcggaaccaagctaaccgcaggcggccgtcagccgcgccagcgcgtgcccctctcggcttgcgcgttctgtcccggcggcagcaccacgaccatcgagttgagcttcacccgatcatagagatcgatgatgtcctcgttgcgcatccggatgcagccagacgagatcgcctgcccgatatattccggctggttcgtgccgtggatgcggtagagcgtgtccttgttgccgacatagaggtagatgccccgggcccccaacggattggcgggaccgccaggaacgcgcggcggatacgggccgaggcgcgcctggatgtcggctgtcggaacccagtccggccattccgccagccggccgacacgcgcaacgcctgagaacgccatggcttcctcgccgaccgcgacgccgtagcgcatggccttgccgtcgggcagcacgaaatagaggtagcgcgcgtcggtatcgaccaggatcgtgcccggctgctccttgcggtggtaatccacgatgtgacgcagatattgctcaggcacgttgaccttcgcatacggcgcgtgcgcgagcaattgccggtcgcgcggcgtcatgcttgcgtccgtcgatggcgaaagcgtcgtctgcatgcaaccgccgagcggcagcaaggcaatcgcaaataaaacgaacaaagatcttggcaccgccggccccccaactgcggacagcaacgcccccgcctccccacataccgtcaaaatcgtgctgaaaacaaggcggctcggaacacgtgcgcgtgtccggcgagatgggttccatcaccacaaagggcggagaagcgtcccaccatctccttcccctcgccttgctttggtcaaacgcggctggactcgtgggggctggggatgggcgacctcgccgatcggcgccgcgccaatgagaacgacctgggcctcacacgccgggcttcaaactgggtttccaccactgggcttcaaaggagctgcgatgctcgcgacgctgaacgccaagcaaatcgtcgatgagatcgtgaaggacacggtcaaggacaacgatccgcacgacgcggttcagatctctcccgaaatcgtgctggcctcacggccggtcaacgtatcgccggcgctggcgacggagatcgccccccgtccggagccgaagtttgctccggagccaaagttcgttccggagccgccgcgtgctcctgagcccaccatcaacgtggtgtacggaaaagccgctgcggcaccgccggtcgacacggccatccgcgtcacgaccagtgatggacttgtcacgcggaagcgatccgccgccggcaagtggctgcgcggtgcattcgtcgcatttttgttcgcgggcggcagcgtggctgcctcgatagcctgggagcaacacggcgacaccgcaaagcaaatactcgccgaatggaagccggtgcttgcgtcgttgatgccttcgacgtcgcagacgatgccggttgccgccgtgcaagccgacgatgggccggcacaagctgcagtggaacaatcggtcgttccatcagcctcgccgcttccaacgcaagctggcgttccaccggctgcagcgcagcccgacccggcgccactggtgcagtcgatgtcgaacgaccttgcggcgatggcgcagcagatcgatcagctcaaagccaacatcgccgagttgaaggccggacaggagcagatggcgcgcgagatggcgaagcctgccgcgcaagggccagcggctgctgaaacgaagccggtcgattcgcgcgcacgtgctgctgcgtcgcctccgcagccttcagcgcagcgggttcgcaagccgaagccgccggtgacccggacctattcgcccacgccgctcgcacctccaccgccgccgtcgcaagcttccgcggcgccgccgccggctgcggcggttgcaacgactcaagccgtagccgatgacgatggacctatcgtgcgtccaccgatgccgctgcgctaacatggttcgggcgacgtaccacgtcgcagcttgcccacgtgtcggagtggatgtgatcgattgagaccgggcaattacggtaagcgatatttcgctcaagagaaaaggccgtcgggatctatgccgccggccttctcttgcagctgccggttcccggagcccggttctgctgcaattccatgcctcatgatcgcgccggcatatttaataaattcttaacgagcccacgcgctgcacatcatttctgcgccataagcacagagattgcgcggcctgttcattcgatagatatcgactcagtggtacattccggcatgggttgagacttgcactgaagctgacatcctcacaccggggaattcggatgccctactactatttcgatcttgtggttggtggtgagttcaggaaccagggtggaatcatcctcgaagacatcgaggttgcctccgatcgcgccgaccaattggcttgcgagctgtcgcaagtgaagccggagctgcagcagaagggttgcgcggtgcgcgtcaccgatcgcgatcacaacgagctctatcgcacgccgctcgatcccgtgccagcctggcagcgctagctagatatcgagcaccggcggctcgaaccagttcgtcagcgacaatccgccgtcgacgacgaaggctgcgccggtgacgtagccggacagcttgttcgacaacacggtgagcgccatcggtgcgaggtcatcggccgcaccaagacgccccagcggaacgtgccgcgccagcgcgggatcggccacgaagccgccggctgcgatcgcgccaggcaccaatgcgttgacgcggatgttgtagcgcccgagcgtcttcgcgagctccttcaccagcatcgccattgccgccttcgccgtcgaatagtgcgccaggttgcgcggcgtgcccgcatgcagcgaggtgagaaacaggaacgagcccggttgcttcgccgcgatcagccgttttccgagttcgcgcgccaggtgaaagccggcatcgagattgacggcgtgcatctcctgccatgtcttgcgatcgaccgcgagcaagtgatcggattcgcgccgtggcggtgaggcgctgtggaccaaatgcgtgacctcgccgagcgccgcgtgggcggcaaccagcagctcatcgcaggcctcgagcctgccgagatcgccgacccagggcacagccagaccggggcgctcgcacgcggcgatcgcggcacgtacgcgctccgcgctgacatcggcgaacacggtgcggacgccctcgccgacgagggcctgcgcgatcgcacggccgatgccattgcccgctccggtgacgagcgcggtgtcgcgttcggggtcgaaaggcgtgctgaacaggctcatgtcgcgctccgagactggggagttccagattagcccaccacccggacgaacgacaatcgcgccgtgcaccattgctgagcagcgcgaccggcgctagcctctcaagaaaatggaggaggttccaggatgcgccccggttttctgattgcgggtctgttgctgctggctgcgccggccgtcgcgggcgacgcaccgccacgctcgacttatgtgaccatggtcttgcaggccttcgctgccaaggtcgagtgtcccaacacggatctcgtctaccaggacctcgtgcagagagcgcagcagatgcagctgcccgacggcaccaccgagcgggtgcgcaaggcgatcgcctggatgcacaccggcggcaagatgggcgagaagcaggacgacgatctcatggtcgaggtcgcggtcgcgacccaggccaccgatctggaccagcgccggctcggcatgtccggctggtgtgaggcccagaagaccaatctggccggcctgatccgcagcaagggcggctagcaagccggtcgtggacgttaagcacgccgcggcagcccggtgatctggctaaaaatcgtcacaatttttcacagcatgcggcttcctcgaacacgaacaggaggtactgatgcggagtatccatttcgttttcgccggcgctattgcggctgctgcgctgctgactgcgcccgcactggcgaggaattccgacgcccagaggggcgaggaaaaatccacctcgtcgtcctgcagtgcctatcagcaggcgccggacggctcctgggagcagctcccttgcaaggaggcaggcgagcgcgggcagccgcagacccagcatcgttcgtcatcgcgaggtgccgatcgcggggagcgttgaagacgctcgcgctcggatatcagccctgatgcgggccacgcatgatcttcatggcgtccgcaatgtgacgccactccctggcctcctcggcatcgccacggccctcgcaggcctgggcctgctcggccgccttcgcaatcgcagcaaagccgtgctgttcgagcatttgcctggcaatggtatggacctggacctcggacatcatgggcgctctcccgcttgagggaactgcggtgcagcgcgtcgctgccgccgcgggtcgctcataacgattgggcctggagctcgttccgtcagatcgaagcgagccacaccataatggcggcccgccatgcccggcggaccgcgtttctcccccaagaggccagagtcttcggccgggccctacgcgaccgccgcgcgcttgcgctcgaaatcgttgggcacctcgatatcgacctccagggtcgagacctcgtcgccgcgctcgagccgcacgatgaccttggtcgggtccagcgtcacgtgcttggacacgacggcgagaatttcctcacgcagcacaccgagcagatcgggctggccgcgcattccgcgctcatgggcaagcaggatctgcaaacgttcgcgcgcgaccggtgcagtggccttgttgccgcggagaagccggagcaaacccatgctcatgcagccctccgtcgcagcaggcggtccatgaaacccttgcgctcggccggcacctgcatggcgatcgtttcgccgcacagccgccgcgccgcgtcgatataggcgcgagccggtgcgccgtccgcattcgacagcgtgacgggcgtgccgacgttggaggcgcgcagcacgtcctggctctcggggatgatgccgagcaggggcgtagcgaggatctcgaggatgtcgtcgatggtcagcatctcgccgcgcgcggcgcgggcgggatcgtagcgggtgatgaggatgtgcttctcgacccgctcgcccttctcggcccgcatggtcttggaatcgagcatgccgatgatgcggtcagaatcgcgcaccgaggagacttccggattggtgacgatcacggcctcgtcggcgaagcgcatcgccatggaagcgccgcgctcgatgccggccgggctgtcgcagatcacccagtcgaaacggctgcgcaggtcggcaatgaccttgccgacgccctcttccgtcagcgcgtccttgtcgcgtgtttgcgaggccggcagcagccagagattctccagccgcttgtccttgatcagtgcctgcgggagcttggcaacgccttgtaccacgttgatgaggtcgaacacgacgcggcgctcggcgcccatgacgagatcgaggttgcgcaaaccgacgtcgaaatcgacgacgacgaccttgtcgccgcgctgtgcgagcgccgctcccagcgcggcggccgtggtggtggtcttgccgaccccacccttgcctgatgtcacgaccagtaccttggccatctcaattatctccttctggtcagttcagcgcagtaattcgcatggtgttgccctgcaggaaggcctgggccggccggccgcgcaaggcctcgtcgatgtcgtcggctgtctggtaaaacccatcgattgcaagcagttcggcttcgatcttctgacaatagatgcgcgcgctggtgtgaccgttcacgcccgccatggcgcggccgcgcagcgcgccgtaaacgtggatggagccgccggcgacgacctcggcgccggacccgaccgagcccagaatggtgacgtcgccgtccgggaagatcacggtctggccagagcgtacggggtgttccagcagcaatgaagtcggcttgacctcgaccttcgcgtcggccttcttcggcgcgctcggttccaccacgcagctgcgtccgccggacagcagcggcggcatcatgggagtcagccttccctcctccacgccctcgatgccgagcacgcggatgttgcggtcctgaagacttgtgagcagatggccgatgccagcctggcttagctccaccgaggacagatcgatcaccacgggccgtccggcgaagaatcccggcgagcgcgcaatggtggcgtcgatctcatgcagccagtcctgcaccggaaccgtcggcgtgaaaacaaaggccacataggagcgcccgcgcaggcgcaccatttggcgttgaggtttgactgcagcctccatggcggccgactcgttccctgttattgaatggttaacgatgcggccgacatggttaacggtcagttaatttccccagggcgtcacgtgggaacgtgaaccagcgacggctgccgtgtccgggtcgcgctgcgagcagtcacggcaagcggagcatgccctacgtccttcggatgtcatgccatccatgtggttgcaggcccgcttgccggattgacaccgtggtaccaactggtttcgatgcgcgtcccgcagacggagcccatcatgtcaattcagtcgtccatcagacgcaagaccgcgccggacatccgcgcccgcaagcacggcgagccggtcgtcatgctgacctcctatcatgcgcacacggcagcgctggtggatcagcattgcgacgtcattctggtgggcgattcccttggtaacgtcatgcacggcttcgagacgaccgtgccggtcacgctcgacatgatgatccttcagggcgcggcggtgatgcgaggatcgaagcgagcgctggtcgtcgtcgatatgccgttcggatcctatgaagcctccaaggagcaggcattcaattccgcggtacggatcatgaaggaaacccaatgcggcgcggtgaagcttgaaggcggtgtccgcatggcggagaccattgcattcctgtccgggcgcggcattccggtgatgggtcatatcggcctgacgccgcaatccatcaacacgctgggttcgtttcgcgcccagggacgcagcgagatcgactgggggccgatcgaggacgatgcaaaggcggtcgccgatgcgggtgcgttctcagtcgtcgttgaggccgtggccgagccgttggcgcgcaagatcacggaagcgatcgcgatccccaccatcgggatcggcgcgagcgcagcctgcgacggccaggtactcgtgctggaggacatgctcgggctttcgccacgaacgcccaaattcgttcgccgctacggcgacctcggtccggccattgaagcggcgatcgaacgctatgccgccgacgtgcggtcgcgcgcctttcccggaccggagcacgtctacgacatgaagaagggctgacgcagcgagcggtcaagcgccgctcacttcttcaccttgctcgcatccattttgatgctcggatccagcatcttggtcgtgaacgccgtcgtcacgtcgaacggcttctccatgccgagataggtctgcaccagctcgtagtccttcttcatccgctcaccgtcgatccagccgagccccttggtcgtcgtgaactcgtccgtcatcaggaacttgatgcgctcccactggcgctcctggttcgccttgtccaggcccgagacctggtccaacagcgccttcaggcatgggttgacgtcggcgacgcacgccgcgaacgccttctgcgtgacccgcacgaagtcctcgacgaccttcggtttcttctgcaagtaggcgccgttgacgatcagcgaattgccgtacgggttgagcccgatgtccttccagttgaggtagccgaggtcctggccgaactcgatcaccttcagatcgtgctcgttgtagaagtcgctgatgatgtcgacggtgtggctcttcagcgccgcgatcttcgcggtcggcccgacattgacgaagccgacggagtcgggcgcaaggccggcggccttggcgaaggccggccacatcacgcgcgaggcatcgccgggcggattgccgatcttgtggccggcgaaatccttgacgccattcacgccgtagctcttcagccagtagaaggtctggccggtattggcatagacgctcatcaccgcgacggtgtcggcgcccttgctcttggccaccagcatggtggcgaggtcggcgacgccgaacggcgagccgccggagccgaccttcgcggcggagacgccggagcccttgccggtctcgatggtgagatcgatgcccgccttctcgtaccagccctgcgccttggcgtaataatacggcgagtggtcggccgtcggcgtccagttcaggatcagattgacggcctctcccgcctgggcgggcaccgccgacacgccgagccccaaggccaacaccagggccgagcccgccgcctgcaaacgcttcatcgcatctctcctcattgccgcgacccggcttgtcgctctccccatgtgacgataccaatgcaacaagcccgccctccacttgtcaactgtttggttggaaatgcccgcaaaacgatccggcgacaccgcgccgcagcgccgcgaccccgtcgccacccgcaagaagctcctgaccgcggcgcgccaggaattcgcccggcacggccttgcgggcgcccgcgtcgacgagatcgccgagcgcgccggcgtcaacaagcagctcgtctatcattacttcggagacaaggacgcgctctacctcgccgtgctcgaatgggtctacgaagatatccgcgagcaggagcgcaggctcaatctcgaaggcctgccgccggagaaggcgatccgcaagctgatcgaggcttcgttcgaccatctcgcggcgaaccccgatttcatcgtgcttctgaacgacgagaaccgcggcggcgcccgccatgtccgcggctcgacccgcctggaagcaatgcactcaccgctcgtcagaagcgtctggcacatcctcaacgagggggtgcgcgcgggcgtgttccgcaaggggatcgatccggtccagctctatatctccattgccggcctcagctatttcttcttctcgaacacaccgacgctgtcggcgatcttcggcaaggacctgtcgagccgcaccgcacgccgcgcccgccggcgccacgtcgccgatctggtgctgcactcgcttcggccataatcaaccaactggttgaaacttgtcccgaggccggctaggctgacatcgtggcggcgaggccacggacaacagggagcagaacgtggcagccgaccgggcacgcgcggcacgcagctttgcgatcgtcctgatcgtgcaccttgccgtgctcgtgctctggcaggtcgcggtcgacgcgttccaggttccgaaattcatcctgccctcgccgctcgctaccgtgcagacgctgggaacctcgggctatgcctggggcgccaacacgctggtgacggcgatcgagatcctcggcggcttcgcgctgggcgccttcgtcggcgtgacgctcgcggtgatcttcagctgggcgccgctgctgagcctcgtgctgctgccgctgttcgtgacgctgaacatgatcccgaaggtcgcgctcggcccgctcttcatcgtctggttctcctacggcatcgtcccgaacatcctgatcgccttcagcatctgcttcttcccgatcctgctcaccaccgcacgaggattgcgcgaggtcgagcctgatctgctcgatctcgtcaaatcgctgcgcggctcgcgctggacgttgttccgcaagatccagttgccgggatcgctgccctacatcttctccggcatgaaggtcggcgccatcctcgcggtcgccggcgccatcgtcggcgagttcatcgcctccgagcgcgggctcggctacctcatgatccaggtgcaatcctccctcgatacgcccgcgatggtgatggcggtcgtgctgctgacgctgctcggggtcgccctttatggcctggtgctggccctcgaacgcatgttcgtggtcggcgacgccaggcagaactaggactggaaagatccatgctgctcacccgccagacgctgccgaagaccattcccgatatcgccgctctcgacgagctgctgtgccggccgacgcaggcgctcatcgacgacctcgagaaggtcgacggcgacatcatgatcctcggcgtcgccggcaagatggggccgacgctggcggggctggcgaaagccgccacgcccgaccgccgtgtgatcggcgtcgcccgcttcagcgaacccggtgtgaaggactggctgcacgcgcgcggcgtcgagaccatcaattgcgacctgatggacgagcgctcgatccatgccttgccgaaggcgccgaacatcatcttcatggccggccgcaagttcggcgccgagggcgatctgtcgctgacctgggcgatgaacgcgcatgtgccggcgctggtcgcgcaggccttcccctcctcgcgcatcgtggcgttctcgaccggctgcatctatccgttcgtgcctgtcgacggcaaaggctcgaccgaagacatggcgccgaacccgcccggcgaatacgcccagtcctgcgtcggccgcgagcgcatgttcgaatatttctcgcgcaagttcggaacgccggggcggctgttccgcctcaattacgcgatcgacatgcgctatggcgtgctgcacgacatcgcgacgaaagtgctcacgggtacgccgatcgacgtcagcctcggccatgtcaacttcatctggcagggcgatgcgtcctcgcaggcgttgcgctgcctcgcccattgcaccacgccgacttccccgatcaatgtcagcggccacgagatcctggcggtgcgcgatctcgcgcaaaaattcggcgcgaggttcggccgtgcgccggtactgacgggcaaggaagagccgaccgcctggctgaccgacacgtccagggcggtcgaattgtttggtctgcccgtcgtcgataccgagcagctgatcgcctggacggcggactgggtctcgcgcgccatgccgagcctcggcaagcccaccaaatacgaggtgcgcgatggacgctactgacggcccgccggtcatcaagctcggcgagcaggatgagatcgccgggctggcgctctcgacggaagcgcactggaaccagaccgaagaggactggcgcatcttcctgcgcgacggagtcgtattcggcatccgcgacggcgcccgactggtcgcgaccgcggcgctgctgccctattcaggcaacaacgcctggatcagcatggtgctggtatcgggcacccatcgccgccgcggcttggcaacacgtctcgtcgacgcttgcatggaaacggcgcgcaagagcggcctgacgagctggctcgatgcgacgcctgacggcgccaaggtctatggtccgctcgggttcacgccgaccctgcagttacgacgactgaagctggtcaaccccgcgccgtcatccgcgccggcgccatcggccgcaacgatcgaggcgctttgtgccctcgaccggcgcgccggcggtttcgaccgcaccgccctgctaaccgccttcgcacagcgcccggggtcacgcatcgtcgccgcaaacggatgcatcgcgctggtccgcgacggcagaaccgcgcgccatatcggcccgttattcgccgatcatgctgccgatgcgctggcccttgttggcgcgatcgcagcatcggagaccagcccgctcctaatcgacgccgtcgcatcgcaaagccagttcctggacggcctgacggcctctggctggaccatcgagcgaccgttccagcgcatgcggttcggccccgccacccatgccgcgaaggaaacgccattcgccgtcgccggccctgaattcggataggacatcatgcaccacagccagatcaacagcgacatccgcaagctgatcgccgagggcaccgtgctgcctgcgcatcctctcgcgctcaccgccgagcgccagctcgacaagacgcatcagcgcgcgctgacgcgctattacgtcgacgccggggcgggcggcctcgccgtcggcgtgcacacgacgcaattcgcgatccgcgacgtcggcctctatcgccccgtgctggagcttgccgccgagactgccgcgaactggaccaagcgtccgctggcgctggttgcgggcctcgcgggtccgacgaagcaggcggtcaccgaagcccgtacggcacgggatatcggctatcacgccggcctgctcagcctcgccgcgatgaagaatgcgtccgaggacgagatcatcgcgcattgcacgtccgtcgccgccgagatcccgctggtcggcttctacctgcagcccgccgtcggcggcgtcatcctgtccagccggttctggcaacgcttcgcctcgatcgacaacgtcatcgcgatcaagatcgcgccgttcaaccgctacaggaccctcgacgtgctccgcggcgtcgcagccgccggtgcgctcgatcgcgtcgcgctctacaccggcaatgacgaccacatcctgctcgacctggtgctgccgttcgacctgcgcgataacggcgtcaccacccgcacctacttcaagggcggcctgctcggccactggtcggtgtggaccgcaagcgccatcaagcagttcgagcgctgcaaggcggcgcgtcacaaggacagcgtgcccgccgatctgctggcgctcgatgcccgcgtcaccgattgcaacagcgccttcttcgacgtcgccaacaatttccacggctgcatcgccggctgccatgaagtgctgcggcgccagggcctgatgaagggcctgtggtgcctcgatccgaacgagggcctcagccccggtcagaaggaagagatcgatcgcgtcacgcgcgagcacgccgacctcagcgacgatgccttcgtcgccgcaaacctggacagatggcgggcatgagctcggcccctttcatcagcctgcagggcgtccgcaaggtctatcgcagcggcggcaccgactttctcgcggtgtccgacgtcaccatggacgtgcaggaaggtgagctggtctcgctggtcggcccctccggctgcggcaagaccaccgtgatgaagatcctggccgggctgcacggcgccgatggcggcaccgtgaaaatcggcaatgccagcagcccgttcgaccccacccgcgacatcggcatggtgttccagcaggcgctcctgctgaaatggcgaaccattctggacaacgtgctgctgccggccgaaatcgtcggccttcccgtgaaagccgcgcgcgaacgggcgcgtgacctgctcaatttggtcgggctcgccggttacgaacagaaatacccgcagcagctctccggcggcatgcagcagcgcacggcgatcgcgcgcgccttcattcacgatccaaagctgatcctgatggacgagccgttcggcgcgctggatgcgctgacgcgcgagcagatgaatctggagatgctgaagatctggcgccagagcggcaagaccatcatcttcgtcacgcattcgattcaggaagccgtcttcctgtcctcgcactgcgccgtgctcacggcgggcccggcgaagatggccgattacttcgcgatcgacctgcccttcccgcgcgacctgccgctcaagaccacggacgcgttcggtgcctatgcaaggcggatctacgcgaagctggggttgggaacggcgtagagcgccgttccgctgtcagtccggggcgcgacgaagtcgcgaaccacgatgcgcaattgcgcatctgagaatccatcgggcagcaaaacacgcgtgaaatggattccgggttcgcgccaagaggcgcgcccctgaatgacggtgcgcggcctgacgaccgcgcccggttcttccgctcaggtcttgttgcgcgtcttgctcagcagatagttgtcgtagaagttctcggcgatctgcgtgtagaacaggagctccttcatgtaggcgtcgtggctctccttggtccgcttgaacaaggcgctcttggcggcgagttcgttcaggtggtcctgggtcgcattgtagcaggcttccagcaccggctgcgggaacgccttcagctccgcgccattggcgatcaaccgcttcaacgctgccggattcacgctgtcatacttctccagcatccaggcaccggccgccgaccctgcctggttgacgatggcctgatactgcttgggcagcgacgcccatttctcgtcgttgacgatcatgtgcagcatggcgccgccttcccaccagccggggaaatagtagtacttggcgaccttctggaagccgagcttctcgtcgtcataggggccgacgaactcgaccgcgtcgatcgtgcccttctccagcgccggatagatatcgcctccggcgatctgctgcgggacgaccccgagccgcgccagcacatggccgcccatgccggcgatgcggaatttgagacccttgaggtcgtcgacggttttgatctccttgcggaaccagccgcccatctgagtgcccgaattgccgcagaggatggcgtgcgccttgaacggcttgagcgcttcgttggtgagatcggcaccgccgccgaagtgccaccacgattcctgatggcgatggttcatgccgaacggcgcaccggtggcataggccagcgccggctccttgccgatgtagaagtagagcggcgtctgcgccatctccaccgaggcggtgctgacggcatcgagcgcctggaggcccggaacgatctcgccggccgcaaaggtctggatctggaatttgttgtccgtggcctcggccacgtatttcgcaaaggtctgcgccgtgccgtagatggtgtcgagcgacttcgggaagctcgaggtcaggcgccatttgatctcgggcatgctctgcgcgatcgcaggtgcagcaaccagcgtcgtcgcaccggcgactgcaccgcccttgaggaatgtacggcgtttcatgatgaggctctccctgaaagtcagtttcaaacttatggacttgcggtcgcggaccgtttgcccgttcctgtagcggagttcaagatgcgaggagaaggcctggagcgcgggcggacgtaagcgcagggctatcaatccgctgcaaccccttcccgggctgcatccgggccgaggctgtgagctgaaaagccctcaaagcagcttggcactcacgaacagcgcccgcacggcgttggttgcctgcacggccagcatggcgttaccggcagcaccttccagggctgcgacggcgtcctcgtgcagggagcggaattccatccactcgaccgacttgaagttggtgaggaattgataggcctgaccgacggtcgcgatcgccagcgtgtcgccgttcagcttgatcttgaacgtcgtgcgcagcggtgtttcggaacttgagggatcactcatgggctgcttctggacgaggacggcttaacgaaggggaaacggcagccccgccgtcgcaggcgaatatcaggaatcggtgctcgcgcgctgcgaagcggtcgtcgcgccgcgcaggctcggcaccacgaccaggcggttgaactcgccattgtcgtaggccttgaggaaacgatcatagtccttgatcgagacgcagccgttggaatcgccgcgcggtccgagcaagtagctgtgcgtgagcagaccgacacggccgagcgcgctggtgccttcgaccggagtcatgcgcagcgcacggacgccgtggaacggcttctcgcgcggcttcaggtcgtaggtggcaggcggtgtcgcgccgaccatgcgccggtcgacatactgcggatcatccatcagcgcgcccaagccggaatgcgcttccagcgtgaccccgctcgggagatagaccgccttggccgagatgtcatagaccgcggtccgcgaatcgtagccgagggcggcgagatccggcgcctttccgaacaggccgtcgccgggcgtcagtgaggccagcttgatcttgtcggtgaatctttcgaagaaattgcggttgtcggcccgggaaccggtatcggcataggcctgactggaggcgatctgggcggccaggtccgcctggaccggacgcgagcgcggcattgggatggcgtcggcacggtgcgaggacctccgctcgtcctccgcgctcccgtcgtcgtcggtcagcatcgagcgccagtcatctccctggagcttctgcgcgagcatcgccttggcgtcccgcagcttcaactggaccgcattcacggtggagcgctccaatacccgcaggccgagctcgcgtggcgtcgggctgccggacgccgacgcgaaacggtcctcgaatgaaggggcattggccggcggcagcgcggcggagaccaacggactcgaatcgccgatatccgcgacccacgcggcagcacccaatgccagcgcgactgccgccagagacagcagaatcgtctcggcccgcccgacacggcggcgcgacaacagcctctcggcatgtgctgcgtcggaaaccatcagatccccaaatcgacccccgggggctacccacccccacccggagagactctataccagctaccacattgggagccaaaagttaggcataatcgcggcgcaaaggcctgccaaggtatccaatgaccgaccctttcgatctagaacgctttgtccgagcccaggacccggtctatcgcgacgtccggggcgagcttggccggggacgaaagcagactcactggatgtggttcattttcccgcaggtcgccggcctcggcttcagcgccatgtcgcaacgctacgcgatcggctcccgcgcggaggcgaaggcctatctcgcccaccccgtccttggggcgcgcctcatcgagtgcacgaggctcgtactcgccgtcgaggggcggaccatcaacgcgatcctcggggctccggatgacgccaaattccgctcgtcgatgacgctgttcggtgcggtgtccgacgagccgatcttcgatcaggcgattgcccgatattttgcgggcgaacgcgaccgcgccacgctggagatcctgtccaagctcgaccgggcacccggctgagttgatcggacctgcagcgtaaacccgcgattaacacggaccgcctaacgtccggcgaaatatagttctccgtcaattgccggacagatcatgaaaatcggtacgctcctgaccagcgccatcgtctcgctctcgaccgtgggcggtggcctcgccgtctacgtcgccgtgacgaaataccagaccatggagcggatcagcgaagccgagggccgcctggcgatcgtccgcgcggtcagcgacatcccgcgttacctcaaccccgagcgcggctttgcaaccaatatcctctacggaccggccaccgttgatccggcacagctctccggacatgacaagctgcgcaagcagaccgatggcgcccgcgacaagatgaatgctctgcgcaaggagctgccgggctcgctcgacgacggcaacgccatcggcaccgagattgacgccatcaactcgaagttcacggcactgcgcgaggccatcgacaaggcgatcgcaggacccgcggaggcacgcaaggatgccgccaggaaggtcgtagccgacaatgcggtgctcaacgccggcgtcaccgccttgctgaacgagcaggttcgccgcatggcgatcctcaacggcgatgccttccgccaggccaactacgccaacatcgccatgacgctgcgcgacatcggcggcctcaatgccagcgtccacaagaaccttgttggcggcaagaaggttgcaaccgacgccgagaaggcggacgttgcccgcatgcagggtcgaagcgaccagatcgtgatggccctgatggagctgcgcggccatccggcgaccccggccaatgtcggcgcagcattggaggccatgaattcgcgttatgtcgaggaattcggacgcgagctcaagatggtcaaggacggtgccatcagcggcaaatatgagcacgacgtcgagacctattacgcagcctcacaaaaaggtctcggctcgatcatcggcgttcgcgatgctctttacgacaatgccgagcatatcctcgccgacgcttcctccgccgcgcgcaccagcttcacgatcgcgctcgcgggcctcgtcgctgtgctgatcgcgagcgtcggcctcatcgtgatggttcgccgccgcgtctgcgctccgatcgtgaccctgacgacgcggatgtcgcggctcgccgacggcgaggttgccgacagcatccccggcgccgagcgctccgacgagatcggcgcaatggcggcggcggtgcaggtgttcaaggacaacatgatcagggctgaccggctcgcggccgagaagcaggcggagaacgacggcaagatgcgccgcgcgcaggcgctcgacgagctcacccgcgccttcgaggccaaggtcaccgagctggtcggcggcctgtcccgcgcctcggcgaccatggaaagcaccgcacagtcgatgacctcgaccgcggcgcaaaccaacagccaggccgcagtggtcgccgccgcgtccgagcagacctcgaccaacgtccagacggtcgccagcgccaccgaggagctgacctcctcgatcgccgagatcggccgccaggtcgcgcaatcgaccgagatcgcggcccgcgcggtcgacaacgcccgccgcaccggcgacaccgcgcgtacccttgccgagggcgcccagaagatcggcgacgtcgtcacgctgatccagagcattgccgagcagaccaacctgctcgccctgaacgcgaccatcgaggccgcccgtgccggtgatgccggccgcggcttcgccgtggtggcttccgaagtgaagtcgctggccggccagaccgccaaggccacgacagaaatctccgaacagatcaccgcgatccagaccgcgagcgacgagaccgtggccgcaatccgcaacgtcgccgaggtcatcagcgaaatcgaccagatcggcaccgcgattgccgcagcgatcgaggagcagggatcggccaccaaggagatcgcccgcagcgttcaggaagccgcccgcggcacccaggaggtcaacaccaacatctcgggcgtgcagcgcgccgccgacgacaccggctcggccgccagggaagtgctgggcgcagccgaacagctttccacgcagtcgcgcgacctcgccggacagttcgaccgcttcctcagcgaggtcagggccgcgtaggagggcggattcgtagcccgcaacgcgacgtcagtagggcggcgccttgcgcgcccgctgcgctttcgccgcctcgatccaccaggtgagatcgtcggcaaagcgcgggaacgagcgctccagcgccttgccgccctcgccgatcggctccccctccgccgacagcgtctgcgcgatcgggccgacgccaatggtgctcgacaccaccaccatgcccatctcggacagcgtgccgtgccatgcggtcgcggcacgcgcgccggacaggcggccggcggaatagctcacgatcgcggccgggcgccagaaccactcttcgaggaaatggtcggtgaggttcttcagccccggctgaatgccccaattatactcgccggtgacgaagatgaatccgtcggcatcgcggatctgcgcggccagcttctccatctcggcgggcgccgagcccttcgggtactccttgtacatgcggtcgagcatcggcaggccgatcgccttggcgtcgatgaattcgacgtcgtcgccgcggtcgcgcagccgattgatgacgaaattcgcaaggcggatgcccatgcggtcggaacggtatgacccgtagaggacgaggatgcggttgctcatgaccaaacggtagcacgaaaccgtcgcccggccctactcgattttctggcgcgctatcggccgcgtccgcgctccagcgtttgcgacggcgtctctccgaactggtggcggtagcttcgggagaaatcgctcagatgccagaagccgaacgccagcgcgaccgccttgacgctctcggccccggccagaagctgccggcgcaccagccacaaccggcgcaggcgcaggtaacggtgcaggctcatcccgcgatagcggcggaccacgtcgtgcatggtgcgaacggacagccccagcttctgcgcgatctcgtcgctgtagatcggctgcgacaggtcggagagcagcgagcggatctcctggaagatcctgaaactccgtccgtcgtttggggccagcgtccagcgggccgaaacgacgctgtggagggcttcatcaacggctgcgagcaaggactccctcatcgccgcgcccttcaatgaaagctccggcacctccacggagccggcggcctcggccagcacctcgcgaaccacgctgcgcagccgctgcaagccgtccgcggagatctcgaaaatcttgaagctggatggcgtaggcggccaaccacgtccccctacctccggcctgaaaaccaccgaggcgatttgacgctgcacctcctcgatggtggtgtagccggcgccactgctgccaatgaccacgaccggtcgcgcgcgttgcgagccgttgaagcggatgggcacgttgaggtcgtccatcgtgaagccaatcgccgtgcaattctccacgagctgtgcgtcgaccacccgaggaaaggcgtgcgtcagattcacgtcgcagccgggtaaggacaggatcgtctgctcggccgaaatcttccgtacgaaaggtgtgaattcgaaattcaacccgcgtatggcgcttcgaaattcgtcgacgtctgaaaaacgaaacgttttgagtgccgaccccggcacatcatcaatactgttcatggcgagatgaaccgcggcgccgcaattggcgcgcgtccggcgaccacgccggttagcttcccccttcggctttacgctaggcccgataatcaatcttaacttgtcctgagcaattggcgagggggctaattgcagggacaagccggggcgccccgtctcgccgaatttcgatagcgtttttggctccccagacggtgcggcgataccggagccgtcggtgcctaaaattcaaattaatgtccgtgaggctgaatgacgtcgtttgatcgtcaagttcatttcaattcaggctgctgccatgaaggcaaactcgcctactgatattttggtcgaattggaagatgcggtagcagcgtgtccgctcgaccgctgcgcccgcatcctgtccggcattgtgcagttgctcaccggcagcggcgaccggtctcaggagctgctcgcgggagtcaccgatggtgtgctgctgcgactgacagaccgggtcgaggccgttgcgcttgttcaactgagccatgcgcttgccgagttgaaggcagctccgccgcagaccttacgacgtctcgcctcacacgacgatccggacgtggcctgtccagtcctgctcaaatcaccggccctgtccacctcggatctcgaggcaatcgcgacctcgcgcggcaggcggcaacagctcgcgatcgccgctcgcgatttgatcgagccgccactgacgggggcgctcgtcaaggcaggcgaccgggccgtccacctcgcgctgatcggcaatgcaggagcactgttctccgatgccggctacgctgcgctcctcgagaagtgcgccggggacgacgagctcacgaaggcgctggcgctcaggcctgacacgccagatctggtcgtgcggaaactgctgtcggccgcaccggatccgaacgcccgcaggcagccagaggcgctcccggtctcgcgtccagaagctgccgcgtcgatcgcccccaagctgccctgcgcggctgactacgcaaacgcgaggcccgagatcgtcgcactcaaccgcatcggcaagctcaacgattccacggtgaaccgcttcgccatccgcggcgagaccgccaatctgttcacggcgctgtcggtactctccggggctccgatcgagatcatcgagcgcgtcatgaccgatcaggattgcgagggcttggtcatggcctgccgggcttcgcggctgaactggcagacgacgcttgccatcctcggcaaccgcagcggcaccaggctctccttcgccgagcgcgaacgcgcgcagcacattttcgagaccctgcttctgtcgaccagccagtggacggtgcgatggggtgaaatcgccgcaaacgccaaagggagcagtcgggaaaatcgcggcgcaaaaatgggagttaggcgatgaagttcgacggtcgcaaagcttcgcgcgtgcggatggaccacaggcatcccgtcaacctcatgggctccgacggcacatggcggcgcagctgcgttctgctcgacgtgtcgcagacgggcgcgaaagtcgaggtcgaggggacgctggacgtgctccaggcgaaggaattcttcatgctgctatcgtcgacgggactggcctatcggcgttgcgagctcgtctggatcgacgggaccacggcgggccttcacttcatcactgcagatggcaagaggaagccggcgagcggaccggcggccgcggcgcagaactccgatcatcccaaataggcagagaagttcatccgggcatattgcacttctggaatcacaggtcgaaccgtgcagaacgcgcgaaccatctcaaggcccgtcgaccgtaacggcatccgcgaaggtgaagcggcccgccccttcgtgcatgtgctggccgatacctccgacaagctggcgggcgtgtgctcgattctcgaggaacggttctccgtcgcaggcgaacggctggacgccgaggccaagctgtcacaggtgccgtccgccatcgtcatccgcgcggagcttcgcgacgtcgacaacatcgcggccatcaagaagcgggcgggcaagctggcgaaagcgaggaagcgaatcttcctcctggagcacgcgtctcacgtcggcgtttcacaggcctacgcgctgggagcgacgaccgtgttgcccggcacgatcaaccggatcaaattgctgtccgccctgtccgatccgccggctcggtcctccgcgtcagcaagcgaaactgcgcaatccgacgatgctgtcgagactgcggcaaccgcgatcgcctcgatgttcacggcggtcaccctgggccagccgctcgatatcgacggcaccagggaagccggccgccagattgccgaacgcatcaccgaacatggtttgtcggaatggctcacgacggtgcggcgccaccacgaaggaacctatcagcattgcctgctcgtgaccggggtcgccatcgacttcggcctgagcctcggcgtcagaagacccgatctggagcgcctctactcggcggccatgttccacgacatcggcaaggcgcaaatcccgctctccctcctcgacaagccgggccgcctcgatgcgcaggaacgcgccctgatcgagacccatccggccgcgggctacgagtttctgaaggggcacgacaagatctcgccggagatcctcgatgccgttcgtcatcatcacgaatatctcgacggcagcggctatcccgacgccctctgtgccgatagcatcggcgacatcgtgcggatgctcacgatctccgacatcttcgcagcgctgatcgagcatcggcagtacaagccgaccatgccccgcgcggaagcgtacgggatattatgcgggatgaccggaaagctcgagaaggcgctggtgaccgcgttcaagcaagtcgcactcacgaggtgagtgccgccgaaaccagcttgggcatgatccggaaagtgtgcagcggccttccggagagattgtgctcaagtaacaactcaaagcgagatgccttccatgatctcacggcgctttagtgcgtcgcacgatatctggcgcggcgccgaatggaccggcaggccaacccctcggccagcagcttcatgtcctcgtgcctgccgctacgaatgaggcggccgaactcgtcgggtgtgaaaggaagactcggatcatcatcgatcggacgccgcatccgcgggccgaagaaccgccgaaccaggctagccagccgccgcatgtcaaatccctcgcgccagcaacaaacctctcactccggacattgttcctcctgcatcttcgagattgcaagaggccgctcgcagcgccgcaccgaaaatttcggccggagaataatctcctcctgctcgtgctagtcggcaaaacccacgtaacgcacgaactcgtcgttgtgctcgcggtccgagcgcacggcattcgcggcaaagccgtcgtccgatagcccgtcgcgacgcaggtcatgatgacctcgtcctccggaatcttcgcgacctcgcgcacgatgtcagagcgcatgatgccctgcccgttgatgacggagccgaggccgcggtcccaagccgcgagcacgatgccgtagcaaagcgcgcccaggtcgaaatggcagactgcgcccggatcgagcacgcggtcgtaggtcaggaccagcgaaaccggcgcgtcgaactggcggaaaccgcgcaacacccagtcctgccgcatcggcttgtcgtctcgcgcgattcccatcgcgccgaacagtttcttggcgatgtccacctgccgcgtgcggtgcacgccctggtactcgccatggctgacgatgtcgcgcttgaccttggcgccgcccaccatctcctccatgttgcggcggcgcagctcttccaacggactgccggtgagcacgtggacatgccagggctgggtgttcatcgacgatggcgcgcgcttggcgctctcgatgatcgcctcgatcaccgcgcgcggcaccgggtccttcctgaaaccgcgtacgctgcggcgcgattggaccagcttttcgaattccactcgtgaacctccctgcccgttcgtccggcatggcacacggccggttgccgatgtcccgcgcaaaacctatgctagcccgcaagcaagaccaagaccctcgcgaggagacccgccatggccgcgccgctcgatcccgtcatcgcccagatcatcccgctcatgccgatgcgcgatcccacggtcatgacgccacagagcgcccgcgattccttgcgcgcactggctgcctcgcgcgccgccatcccgcctccgcccgtcgacagcgtgcaggacatcaaggtgaagggcggtgccggtccgctcgacgcacgggtctatcgggtcggcgccacgccggcaccgaccgtggtgttcttccatggcggcggctgggttgcgggcgatctcgagacccacgaccggcaggcgcgcaaccttgcgatcgaaaccggcgcggtcgtgatctcggtcgactatcgtcgcccacccgagacgcgctttcccggcgcctttgaggatgccttcgccgctgtgaacgacgtctttggccgcgtcgcggaatttggtggcgatgcgcggcgcctcggcgtggccggcgacagcgccggcggcaatctggcggcgaccactgcgatcgcctgccgcgatgccggcattaggctcgccgcacaattgctggtctatcccgtgaccgatgtcctcggccgttacgctgatccgcaagagaacgcgcgctatccatcccgcgccgagaacgcggagggctactttctcacccgcgcaacgatggaatggttctgcggtcactatcttgccgatgccaaccacgccaccgattggcgggtgtcaccgctccgcgcaccctccctcgccggggtcgcgccggccatcgtgaccaccgcctggttcgatcccctgcgcgacgagggcgcagcctacgcccgggccctggaagccgccggcgtgcgcgtcaagcaccatgaaggccccggcctgatccacggctatttcggcatgggcgatgcctccgacgtcgcgcgcgccgaagcgcagcgggcgcgagccgacttcaaggcgctgctcatccggggcgtataaccctagctgggagatctccgctgggcgccggtgtgcccccatatctcgtcccagtcctggccggccgcatcgaccacgcggccgtcggcttcgaagaacttgttcggcacctggaagatcgcaaggatcagggcgccctccgggcaccaggcggcatgccggctgcccgcctcgcgccagatgaattcgccggccttgcaggcgatgccctcagccgggccttccttgtcgacgagcgcgccttcgatgacccagctttgctcgatcccgacatgctcgtgatcgggcagcaccgatcccggcgcaaaacgcatcaacgcagtcatcagcccgctgctgcgatcgaacagcaatgtcttggcctcgcaccccggaaagcgggtcttttgccattccatgtcttgggggcgaaccagatgagaatgccggtcggcggattgttggcctttcgcgatcgtggcgtccatgacgatgctccatccagctagggtgatcgaagctagcaggatcgccggacggggtcagcgagcggtgcaacacgcaacagctgccgagccggcgttgaagaatcgccagggacaccggaccatggctgctcatcctgcttgattgcgccatgattcccggctccaatccggcggccatttctggttaggagacacccatgatgaagcggattttcctcgccgcgatcgttgccagctttgcggcgggctcggccctggcgcaagaaacctgcgagagcaaggccgtcggcaaggacggcaagccgctggccggcgccgccaagacctcgttcctgaagaagtgcaaggaagacgcctgcgcgcccaaggccgtcagcgccgacggcaagccgctctcgggcgccgccaagaacagcttcatgaagaagtgcgagaccggcgcctgatcgctgcagatcgctgcttccgcgaacattcgctccatgaactcgtcatgcctgggcttgtcccgggcatccacgtctggggcgtcgtgccaggagatcgtcgatggccggggccaggcccggccatgagcgagggagctattcccgcttgaaccgataatcgaacgccccctcaagcggcctgatcagcccgacggtcggcgcgggaaaatggatcggcaggatcagcgtgtccgtgtccacaacggaggcgaagaatttccgccgcgacagcgccgacagctttggatcccagtcgggcttggctgaccactccggctcacggcactggatctggtgatgcatgagatcgccggtcaccacggcgcgctgacctctggagacgatgttcacgcagcaatggcagggcgagtgccccggcgtcggcgtcagcgtcacggtgtcgtcgagcgcgtaatcgtcatcgaccaacagcgcctgccccgcttcgacgatgggcaggcaattgtcgcgaaacacggtgcccggcggatcgttgcccttggcgtgctccgcctcccaggccccgtactcgcccttgtggaagacatacttcgcgttcgggaaggtcggcacccagcggccgtcgcgcagggtcgtattccagccggtgtggtcgatgtgcagatgcgtgcagaacacgtagtcgatctgctcgaaggagatgccgagcgcgaacaattcgttgcgccagcgctccttgccgggaaaatcgaacggcggcgggtggcccttgtcctcaccggtgcaggtatcgaccaggatggtgtagcgcggcgtgcgcaccacgaagctctggtatgtgatgacgatcatgccgcgcgtggcatcgaacacctccggctccatcgtcggcagatggcgtctgaagaccgactcgtcgtaggccgggaagaaatcctgcgcccgccgccacggcccttcccgctcgatcaccgcatcgatggtgatgtcgccgatccggatttgcttcatgatgttcgctccctttggcgaaagcgtagcgaacggactcagggtattcaaggcgccgaacccggagcctccaatgcgccgcgtgccgcaaatcaacctcaaacgccggagaagatgatcgcggaatgaggactgtccggtgggtaggaaactgagagtgaccgcggcgatcgtgatcgccgtcgcagctgcaatctatgtcaacaacacaagccttctggcgtcacatcaggacgacaagccgctgttgctcgcccatcgcggcatggcgcaacgcttcgacgagcgcgacctgaagaatgacacctgcaccgccgcgcggatgctgccgccggcgcacgactatctcgaaaacacgctgcgctcgatgcgcgcgagcttcgcggctggtgccgacatcgtcgagctcgacgtgcacccgaccatcgacggcgagtttgccatcttccacgactggacactggactgccggacggacggcattggcgtcacccgcgcgcagaccatggcaaagctgaagtcactcgacatcggttacggttataccgccgacggcggcaaaaccttcccgtttcgcggcaaggggatcggaatgatgccgaccctatcggaagtgttcgcagcctttccggacaagaagctcctcatcaacgtgaaaagccgcgacccggacgaaggcgagagacttgccggcgtgctgaacgcactgccggccgagcggcgccggaccatcatggtctatggcggcgacgagcccatcgacgtgatccgtcgcctcgccccggatgtccgcacgatctcgcgcgcagccatccgaagctgcctgttccgctatatcggctatggctggacaggcctggtcccgaaggcctgccgcaacgcgttggtgctggtgccaatcaacgtcgccccttggctatggggctggcccgatcgcttcctcgcacgcatgaatggcgtagacagcgccgcgttcgtgctcggcccctacagcggcggcgagttctctacgggcgtcgacacgccggaattgctggcccgcctcccgcaaagctattccggcggcatctggaccaacgaaatcgagaccgtcgccaggctgaccggcaagagcaatgactagcttcgcaatcccggcgcctcctgcccggtgcgtgcgacatattccgtgtagccgccgccatattgatggatgccttccggcgtcagctccagcacgcggttcgacaggacgctgaggaaatgccggtcgtgcgagacgaacagcatggtgccctcgaagtccgacagcgcattgatcagcatctccttggtggcgaggtcgagatggttggtcggctcgtccagcaccaagaagttcggcgggtcgaacagcatcttggccatcacgagccgcgccttctcgccgcctgagagcacgcggcaacgcttctcgacgtcgtcgccggagaagccgaagcaaccggcgagcgcgcgcaaggagccctgccccgcggtcggaaacgcgtcttcgagcgactggaacacagtccgctcgccgtcgagcaggtccatcgcatgctgggcgaaatagcccatcttgacgctgccccccagcgccacggtgccctcgtccggctcgctcgcgcccgcaaccagcttgagcagcgtcgacttgccggcgccgttgacgcccatcacgcaccagcgctcgcgccggcggatcatgaaatcgaggccgtcatagatgcgcttcgagccgtagcccttgtggacgttcttgagcgccacgacgtcctcgcccgatcgcggtgccggcagaaaatcaaaggccacgctttgacggcggcgcggcggttcgacgcgctcgatcttgtcgagcttcttgacccggctctgcacctgcgcggcgtgtgaggcgcgcgccttgaagcgctcgatgaacttgatctccttggcgagcatggcctgctggcgctcgaactgcgcctgctgctgcttctcgttctgcgcccgctgctgctcgtagaattcgtaatcgccagtataggtggtgagcgagccggaatcgatctcgatcaccttggaaatcacgcggttgatgaactcgcggtcatgcgaggtcatgagcagcgtgccttcgtaagcgcgcaggaatttctccagccagatcaggctttcgatatccagatggttgctcggctcgtcgagcagcatcacgtcgggacgcatcaggagaatgcgcgccagcgccacgcgcatcttccagccgccggaaagttttcccacgtcgccgtccatcatctcctggctgaagccgaggccggccagcgcttcgcgcgcgcggccgtcgagcgcgtagccgtcgagctcctcgaagcggtgctgcacctcgccgtagcgggcgatgatctcgtccatctggtcggccttgtcgggatcggccatcgcagcctcgagctcgcgcagctcggccgcgacttcgctgacgggaccggcgccatccatcacctcggccaccgcgctgcggccagacatctcgccgacgtcctggttgaaatagccgatggtgatgccgcggtcggtcgagacttggccctcgtccggcagctcctcgcccgcgatcatccggaacagcgtggttttgcctgcgccgttcgggccgacaaggccgatcttctcgcccttgttgagggcggcggaggcttcaatgaacaggatctgatggccggcttgcttgctgacgttgtcgaggcggatcatggggtctttgtggggggattttgcgttgcagcgtcataggccatgcgggccgccaggggaagcccgggacaggcgaagtcgactgcaatccccccgtttaagccgcagctcggaggattttggacccagatgatccggctatcggtgctcgagctgtcgcccggcgccggtgatcgtcacttcttgagaatacccgtgttggtgtttccaagctgctggaccgcagcatttgccgcgggggtgttgtagttcggtcgagatccaccgccctcctgtgtaggagcggcgacgccaagtctctcacccgtggtgccctggcctttggcattggccgagttcggacctggcgagccgccggttccgctgagtgtggtcccgttcgacagcgtcgagccaccgccagagccagaaccagctgcgctcgcccctccgccggatgaagaaccgcctgaagcgcctcctgagctttgcgccatggctaacgaaatggtgctcagaagaatggctgcggccaaagctggaattctcatgtccgtcctccgtctgccagccggctcctgaaccgctgggttccttgtcacgaagagctcctatcgccggcgcgcgatccatgctccggccaggaacgcaataagcaatgaccgtaacggcgccttgacagtgatctcgcgcagctggtcagccagccgcttcgcggcgtctgcaggcggcgaccggagctgcggatcaaaagctccgctttgccctccggagcccgaccgcaagctcgaactctgctctatgccgccctgatcgtccgtcagcccggaggcctctgtcatcgcggcggcttccttcgtgtccatgcccatgctccaatcctgctgcggttgcagaacaaccacgtcctctcgggtacccgtccgaccccggcaccaatgggagcagctatggcgtcggcatcgacgcgaactatatgtcttctcgaaagcctcgccgtaccgctcccttgaaaaagcccttgctgatctttctgttccttgtcttcgccccgctgaccgcatccgccgtcagatatttctggctgggcgatggccgccagaactggcaaacggccgatcggtcgagtgccggtctcttgactgccgctgccgatcaccctgcagccgtcatacgggtgttcggggcgagaacggtgagatggcgcagcatcttcgccattcacacctggatcgtcgtcaaggagaaggatgcggcgacctacacccggtacgactacacggcgtggggcgagccgctccgcaccaacggctttgctccggatgggcggtggttcggcgccgcgccagaaatcatcgtggcagtcgacggagagcgagcggaggcgctgatcccgaagatccggcatgtgatcgaaaactacaggtttcgatcctacggggattacagcgtctggcccggtcccaattcgaacaccttcgtgcaggccgcactcgactccgtccctgaactccgggccgtcctgccgccgaccgcgatcggcaaggacttcccgtacaccggcaaatggttcggcctgacggcctccggaacgggcatctttgcttcgctcgccggatacgttggcctgtccattggctgggtcgaaggcgtggagatcaatttcttcggcgccgttctcggcctcgatatccgccgcccggcgctcaagctgcctggcctcggccgccttggggtaacgccaggcgcgtaacaggctctcctgttgttgcggctgtcaacgaagctgatcggctgctacctgaaattgcaccaactcgtcggcgggaatgccgattgccgagacgcacgaatagacgtgacgatgcagatcgatgagaccgggcatcacgatcttgcctgagcgcggtatgctgcggcgctgatcgttgctcaaacatcgaacgtcagctccgatctggtgccgcggcgaccttcgcgattcgatatggtgagtttcgccccgaccttcgcaagcgcgagcttgacgatcgcgaggcccagcccgcttccgatcgggctcctcagccttccccggaagaagcgtttgccgatctggtcgagctcgtcgggagggattcccggcccctcgtcctcgatcgcgatggcgttcttgccagcgctccagaccacacgtccttctcgagtgtgctgtacggcgttttcatgcaagttccgaagcgcgagttggaggcattcggcattcgtgttgagcaccatcgttcggacgccggcgtcgatcgtcacggtcgtccgctcgtgccttggcgtagcggcgacgatttcctccagaatgggcccgaccgcgacgggcgccagcggcgcgttgacagcgtcggaatccagccttgcgatcgtcagcaattggcgcaccaggcgcgtgctgcgatcgaccgcggttacgatctgctcgagcgcaccacggacgacctgcggatcatcggcagccagagccacctgggcctgcgtcttcaggcccgcgagcggcgtgcgcagttcgtgcgcggcgaaggcggttacctcgcgttcgtgccggcgtgcggcctcaaccctgctgagaaggccgttcagggcgagggccagcggcctgacctcggccggggcccgctcggtttccacctgccgcatgtcgtccggctcccgcgtgccgaggtcctgagccatttgtcgcagcgggcgcaggccctgtccgacactcgcccagatcgcggcaccgagcagcggcgcgatcagcagcgcgggcagcatgagtcccttgatcagatccgtcaccaggcgttcccgcagcccgacacggtccccgaccatcacccgcagattgtggtcggcgtcctcgacggagaacacgcgccagggttcgccgtcgatgatccggtccgagaagccggaggcggcgggcgagagctgctggtcgggcgcgccgctcgacttggcgaccatccggccgtcgagcgaccagatctggcacgacagctggcgttcgtagctgccgagcggctgcgcggccgcaggcaccgagtttccggggagattgtcgagtcccgacgccagcgaggccaccatgcgcgcggcctcctgcaggcgcgtgtcgagaacgtgctccacctcgtcgcggcttccgacgtagatccagacgaccgccgcgacccagacgatcccggtcgcggcaagcagtatcgcgaacagtctcagtctcaaggacctcatcggacggtccccatccggtagcccacgccgcgcagcgtctggattgcatccctcccgatcttattgcggagattgtggatgtgaacctcgactgcgttgctttccacgtcctcctgccagccgtagaggcgttcctccagttcggcacgcgagcggacctgctccggacgctccatcaacgctgccaggatggcaaactcgcggcgcgacaggttgatcggttcgcctgagacggtcgccgagagatcggccggtgaaagcacgatggcgccgtaggtcatcgttggacccgcacgcccgccttcccggcggacgatggcgcgcaggcgcgcggccaattcatcgagatcgaacggtttcgccaggtagtcgtcggctccagaatccaatccggagaccttgtcgccgacgctatcgcgcgccgtcaggagaagaacgggcgtcgcgtcctggcgtccccggagcctgcgcagcaaatccaggccgcttccatccggcagcatgatgtcgagcacgaccgccgagtagcgggtcgtcgagagcgcgttatcggcgtcctcgcaggtggcgaccgcgtcgacggttgcgcccgtcagagacaggcccgctcgcagaccgtcggacaggatcggatcatcttcgacaacgagtatgcgcatcattttctccgagactcccctcggtcgcccgccttaaggctggcttaaggcagactatccaagtcgcggcatccgctcacaagacgcagggccgccacaggatgccgggctttcatcgactatcggtcatattggtcgttcttctgtcgtcctccttcgcggtggcccgggcaggaacgccgcctcccgccgacgaggcgttccaattgaaggtttcgcgcgacgatgccgggctctccctcgtctgggcgatcggaccgggcagctacctctaccgcgccatgatcgccgccaacaacgcagtggttcccgggacgcccgtcgcggtccggacgccgccgggagaacccaaggatgatccggacttcgggtcgcaggaaatctaccggaactcagcaaaggccgaaatcgcatccaccgatctgcaagggctgcaccagatcgtagtgacctatcagggctgtgcggaagagtaccagatctgctacccgccggtcgccaagacgatcgatctgcagacgctggccatcaagaaccgcgacgacaccagcgcgttgtcgcccggatcctcatcacctttcgtggatgctccggtcgcagccggcgtaccggaagacgatggtttgaagacggccgccctcacacctgacgtggacatctccttctgggtgacgctcggcggcacgctggcatcgttcttcggcttcggcgttctgctatcattctcaccctgcaccttcccacttgtgccgatcttcttcggcgtattggcccgttcgcaggaggagctttcgttcagtcgcggtctcgccctggcggcgactttcgtcggtgcgtcggcatcggcctacgcgacgctgggcgcgttcgcggcctggtccggctccggagagaacctgcagatcctgctgcagacaccgctcgcgcttggcgtgatcagcgcggtgctcgtcatcctttcgctgtcgatgttcggcttattcgacatccagctgccggccgcctttgtcgcgcgtataccggacgtggcctccggcggcggtcgcggaccgctggccgccgccgccgttctcggcttcggatcggcgctgatcgcggggccctgcgtcacacctccgcttgccacggcgctgctgtatgtcgccaggaccggcgacgtcgtgtgcggcatggccgcccttttcctgttcggcgtcggcatgggcgtgccgcttctcctctttggagcgctagggccgagattcctgcccaggcccggccgctggctcgtccgtgtcaggcatggcttcgggttcatcctgctcgccgtcgcgatctcgatcnnnnnnnnnnctctcgcgctctgtcgcagcagaccacgctgcagctgtggggcgcgctcgcgacgggtatctccgtctatttcggcacccagttcctgacagcgcatagtcgatggaggttcgtctcgatgggcatggcgagcttcgcgcttctggtcggctcggtcctgatgatcggctcggcggacaacgacaatccggacgcgacgcgcatcctcgaccaattcgtgagccgcgacaccggacccgacccctccgtccgaacgatccgatcggtcgccgcgctggaccatgaactcgccgcggcgcgcgccgacgaaaggccggtcatgctcgacttttccgccgactggtgcgtcgaatgcagggtcatggatgccgtcctgcgcaaacctgaagtacgcaaacggctgcaagacttcaggatagtgcgtgccgacgtcaccgctgtcgacgacgcgagccgcgccctgatgaagcgcttcggaatcgtcgggccgccgacgatcctgctgttcggcgcacacggaagcgtcgatcccacgaccaaaatcatcggcgccgtcgatgccgacgccctgctcggaaaattgtcggccgtcgcctcggccgactgaccccaaactcacggaagaagaaaggcagacatgattcagcacatctcccgacgcacgctcgctcagatgatcgccgtcgccgccatcccctgcctggtcgggcccgcgcgcgccgacgacggcccctccgaagcagacgtatcgcgcgaggcgatcctgtacgatcccgcggcaccgaccgcgggaaacccgaagggcgatctgnnnnnnnnnngatcgtggttttcttcgactataattgccccttctgcaagcaagcggagcccgagcttgagcggttggtgaagaccgatggcaacatccgcctcgtctacaaggactggccgatcctaacgccggactcgatcaagggcgctcagtgggctctggccgcgaagtatcagaaccgctacgacgccgcgcacttggcaatgatgggcattcccgggccgaagattcccgccgagcggatgcgggaagcgatcgcgaagtccggcgtcgacatggctcgtctcgatgccgatctccaggcccacggcgacgacatcaccaagctccnnnnnnnnnntgtgacgcaggccctgaactacgaaggcttcaagcgcgtcgctgcggacgcgcgtgcccgcgcggcaaagaagtgagcaacgcggagccgctctcaaacctggcgtaggctgtagatcgaagcttgccgccatcggcggtggcacgccgggatcgtcgaatctcggaggcacgccttctctcaaggacggacgcatggagcgtaggatatttcccgggaccgggtacgccggcgtccctgatcagcgatcttcgctacgacaaactcgactacgtcggcttccgccgggctgtcgcgaacccgcgccgacaggcggcgtcgaaggagccgaaatgatgtctcacaagcgatgggcggtagctgcggcgctacttctgccgatggcgctcgcaggctgtgtgtccggttccgacatcatgcccaaggccgcggcctacgcgtcgacgtccggttctcgatatgatgcggtctcggacggagactacactattgctgctgttcctgcccgcgacttgaagactcgctacatgcgtcagctcgtcgacgatccgaccggagagtctgtcgggaccgttgtcgtagatccgaagaaccgattcctctaccttgtgcaggaaggtggcaaggcattgcgttacggcgtgggcgtcggcagggccggcatggcgtggtcaggtacggccaaggtagccatcaaacgtgaatggccgagctggacaccgaccaggcacatgatcgcccgcgagccgaacaaatacgtcaagtgggcccgaggcatggacggcggcacgcagaacccgctcggtgcgcgcgcgctctatctgttcagaaacggcaaggacacgctgtacaggattcacggcaccaacgagccgtggtcgatcggccaggcgatgtcctccggctgcattcgcatgatgaaccaggacgtgatcgatctgtaccgtcgcgttccatcgggaaccaaggtcgtggtgcttccggccgccgtggagtccgcagccgcccgcgaatgatttcatgccgcgattgaggtccgacatgtcgtcaccgacgaggcgagtaacgccagcgcgacttagatcgcttcgaccgccgccctcaactcacggcgaacttgttccgcgatggctctcagggattcgttttgtatcgcctgcattgacgcgaccggatcgaccgccgcgacctccgtctttccggcaacttcctgaacaatcacgttgcacggaagcatggtgccgatcttgtcctccgccatcagcgcctcgtgagccatctttggattgcaggcgccgagtataacgtagggccggaagtcggccccggttttctcctttagagtcgactgcacgtcgatcctggtcaacaccccgaacccgcggcccttgagcgccgatatcgctcggtcgacgccttccgcgaaaggaacgtcaagcttcttcgcgaagtagtaggacattccagactcctctactgggtgaccggcagagctacgccggtacggtcgcgttcgtcctaccggtagaagcccgaagggccgcgtcggcgctttcagccacgtgtccgaaatcgcctctcagcgccatgagggctcggcgttcctcctcgatttcgtaggacgtccggaagcccagctttctcaaaaccgggaccggagggcaccagccttggatcgcgtgctgaaatagaaagctcgtgaccaacgccggaagggcgagccagcgccggctgttagtggcggccaacgcgatgccggcgaagccgataaccgcggcattggcttcgatcgccctctcgatatcccactcctcgtcgatttcacgcagtcggccggcgatctgatcgcggtgttcggcgaaataggcaacgttggcctgcatcgtgcgtttgatgcgcaggttgtcgctttcggaagaatggagaggcacacggtttcgcgtcgtcgtcatgaatcctccacgcgttggcccgactacgcacggggttttggtttgttcctaatctacatggcgataggtttggtccgcgccgcctgggtcggatcgcgggagttgctcctcgccaacatcggccccagctcaagccgcttcgctcccgaaacctgcttcggcccaaggacaccgttcaaacttgaacagcattcatgttcaatcgagtggctgacacaaccgtgtgagtacgggtcctacgcccttctcatcagcttgagcgaggccgcaaggcgcaagctgcgtttgccggcaagtgcgatgccttcgagctcgccgctgtcttccgtgcaggttccggagaacccgatcccgacctcgaggccgccgaacaccgggttctcccccttcgccggcgtatgctcctggttcagcatctcgcccttccagcggccgtccgccgaggaataggagccaagataatagaagaacgcatcgccgccgaggatgcgaccgtcgatcagcagcatcactccggacagtccggcatcgatgccgtccagcgcgctcagcttcatcccgtagagcccgttggcgatgccgcccggcccgaccgcaccgctcggaggcaagccctcgtcgtcaagtcgcgtgagattggcccagaatctggcgcccggcatcgtgtccgagctgccctccagacggatctcgttgccatacagccggccgcgcgccccgatcgaggcgacgtccgcacccatcagcggcttgtagttgggatcgtggttgtgccgctcggtgatgaccccggcgataatctcgccgtcgcgctcgacgtacgtgcctagatgcgcaaaccccgaattgccgcccagcatcttgccgtcgtgcaagcacatgatgctgcggccaaaaccgtcgttgacgccgtattcaaccttgtagagtccgtccagcaacgtcatgaacccgaaatcggaaagaattgcgcgctacctagcatcgtggccggcttgaagccacacggcttttccgcgcatgaccgctcacgggaccctcagcgctacgatgccagtatgtccctgttttgcccgacaggtcaaatcgactgcgcaaaatccgcattcgtgtgatttcagtggctcggctactgtgcatggggtcgtttttcgatttcgtgtgcggctcgcgcaagagaccccggacgcagtcggcatgacgcttgaaccggcttcctccaaggcacgaccaagcggcatgaatgcgacaccgcaagcagccgatgacgagctcagcgcgatcatctccagcgccgcaaggcagccgctgctcgatgcggcgtacgagctctggcgccagcgccatcgcctggatacgattgcgggccggccgacggccgaagagatccgtttcaaccgcaccctcacccctgagcagctcagcggcaagtaccgccaagatcgcgaccacgcccatgaagggccgatgttcggctatgtgaagcgtgcccatccgcgcgccgacgaccaggcgatccggcaggccatcatgaccgccgtcaaattcgaggatgaatacaacaagcaattcgactggaacggcgatttctggaattgcgtggtgcgcgcggtggcgcaggccgggcgaaaatatccggactatctcgagaccacctaccgcgacgcccgcaacgatcttgcctaccacatgaagtgagctagaagcacagcgtggtgacgagcttgccctgcttgtccttgatcgcataggggcaacgaatgcgctccagcgccttcctggcgtcctcgtcgccgagcgcggcggcgcgctcgtagtacgccttcgccgcctccttgtctttcgcaccgccgcggccttcctgtgcgaatgcgcccatcctctccagcgcgccgggatggttttgtgccgccgccttctcgaacagcgcacgcgcggcggcatcgtccctggcgccgcccgagccttcggacagcatcaggccaagctggtactgcgcttccgcattggtctcagctgccttgccgagcagcgcgcgcgcctgggcggggtcggccggcgcggcgccacctgcgccgccgagcgcggcgagattgctgacgccgcgagggttgccggactgcgccgccttctcgaacagctttctcgcttgcccttcgtccttggcaatgccggagccggtggcgtaggcgacgccgagctcgaccatggccgcactcgatcccttctcggcagccttgcgccaggccgcaatcgcctcgccggtctgccggttggccgcatgggctcggccgagcgcgaacatggcgcggcgcgctgacggcgcggcctgcttgcagaacttgatggcggtggcgacgtctgacggcgcgatttccgtcacgcccttcacgtccgccggtttgtcgggatcgctgggatcggcggcaatgcggtcgcacaggacgaggtcggccgattgcgcatgcgccatcacgggcacggcaagcgcgaaaatcatcgcgaggagattggttcgcatagtcgttacgttgcgtccccgccccggcaaattcaaggctcaagtctcgaccagcaacgcagacacgagcgtcagaggaacgagcatcatcacgatgcaaaaatccgccggagctttcgctccggcggattgagaccaacccgggccagccccccagcccgggccgggaggatcttaggcggcggccttcttgtcggtcggcacggacgcgatcgtcttcaggatctgcgaagcgatctggtaggggtcgccctgcgagttcggacggcggtcttccagatagcccttgtagccgttgttgacgaacgagtgcggaacgcggatcgaagcaccgcggtcggccacgccgtagctgaacttgttccagggcgcggtctcgtgcttgccggtcaggcgcttgtcgttgtccgggccgtagacggcgatgtggtccatcaggttcttctcgaaggcagccatcagcgactcgaaatactccttgccgccgacctcgcgcatataggcagtcgagaagttggcatgcatgccggagccgttccagtcggtgtcgccgagcggcttgcagtggaattcgatgtcgatgccgtacttctcggtcaggcgcagcatcaggtagcgggccatccacatctggtcagcagcggtcttggagcccttgccgaagatctggaattcccactggcccttggcgacttccgcgttgatgccttcatgattgatgccggcagccaggcagaggtcgagatgctcttcgacgatcttgcgggcgatgtcgccgacgaacttgtagccgacgccggtgtagtacgggccctgcggcgccggatagccgtattccgggaagccgagcggacggccgtccttgtagaagaagtattcctgctcgaagccgaaccaagcgccgggatcgtcgagaatggtggcgcgcttgttggacggatgcggggtcttgccgtcgggcatcatgacttcgcacatcaccagcacaccgttggtgcgcgcgccatccgggaacaccgcgaccggcttcagcacgcaatcggagctgtgaccttcggcctgcatggtggaggagccatcgaagccccagagcggaagctgctcgagcgtcgggaacgacgcgaattccttgatctgagttttgccgcgcaaattcggagtcggcgtatatccgtcgagccagatgtactcgagcttatacttggtcattgagcctctctgtagatgatgcgaaaggttgggggcccgggaggcccccgcacgttttgtacccggccatcatcggccgggccttcccaagcatttgtcgtgccaaaaggacgcagggcgagaggttttccgcggagcgggtctctccgtgtcaccgacgaggccccacctggactgtgcgtcatagcggcgcaccctcgcgtgatgctgcacggcgggaatggcggggaaagcgcccgtttctcaagcagtggacgggcactttgaggttgccgaccaaacgcgcatcaacggccggcaattttcgcaaaggctgacacccctgcccagcaacctttggaacggcctacgcgttagccttcgagacgctgcctcggaagatgcagcaggccgcctgcctacaaaataagcggcaactgatctccttttcagcactttccaattcgggaagcgcggccgatatggggactccagtaaccacaatcgaacgagtcgggcgcaccatggaggccaaggcgcttcgaccaaggagaaatcgcaatgatgaacaatggtctaagtcacggatctgcgaagatctatcaattccccgccgggggccgcgcggctctcgccggacgccgctatggcgacacccgccttcctgccgatcacgcttcgccgccttcgaacgtctcgatttgcagcgacagctggtatcatcaggatgcagtcgacgaagccaagccgaaatgggaccgctgatgcctttactcggtttgaaagcgccgcaccctcgccgtcacgcggtggcagttcgaaaaggaccgaaacaacggagtttcggtcctttttgattccggcgcgaaccacatcattcagatcaccgcgcaggccgtaaccgggcgcttcaggtgcttcaccgtcgtgggcccggccttgggaatcctcaatgtgaccccagcccccgaatagcgtatccccgaaaccgccggtctcctggccagcgtgaccggctcaccgtcgatctggaggaaggcgcgcctgtcgccgtcataaagcccgataatgaactgcgtaccatcgacacagcgataggtctggaacgtctgtgcgtcggcccgccgtgctgccaggattccggccaccagcatggtgacgaccaaaacaatggccttgtgtcggtccatgttcgccctctctaatggactcaaggatgccgtagcgcatccatggaaccataacccaacctgatctcatgtcagactctcctgcccgtcatcttgccctgcaaggcgccagcaattttcgcgatctgggcggttatccgaccaccgacggccgcatcacgcgttggcggcacatcttccgctccaatcatctcggccagctcaccgctgccgacatcgagatcgtccgcgcactgggcgtcagaagcgcattcgattttcgcgggctggaagagcgcgcggccgggctctgcgccctgaacgagatcatggtgcatccgcttccgatcgagccgaccgtggtggccgcgctacgcaccgaactcgcccggggcaagctcacggcgccggtggcgctggagctcatgcgcgagtcctatcgcaactatgttcgccacaacacgcactgctttcgcgcgctgttcggccatctgctggaagaccgcgcgccgctggtgattcactgcaccgccgggaaggaccggaccggcttcgccagcgcgctgatcctgcatgcgctcggcgtgcccgatgacgtcattgccgaggactacctcttgaccaaacggcactacaggcgcgacgtgtcaaccgcctcggatcttcccgccgatgttctcgaggccatcggcagcgtcgatgtctcctatcttgctgcggctttcgaagccgtcggccatgaatatggcgatctcgaaacctatctgcgcgatgggctcaagctcggcgcggcagagcgaagcgcgctaaaggctcgctatctgcaatcataggcggccgcgccggagaacgacatgcaagacagagtcctgatagttacaggcgcacgcggcgcgctcggcaaggtggtcgtcgagatcgcacaatcacgcggcgcgcgcgtggccggcatcgatcatgcaccgtcgcaagagtccgcaacgcttgagggcatcgagatcggcggcatcgatctgtccgacgcggctcaagcgaaaactgcggtcgatgcggcggcaaggcatttcggccggctcgatgcgctgatcaacgtcgccggcggcttcgctttcgagactgttggcgacggcgacatcaagacctggcaacgcatgtacgcgctgaatgtcctgactgcactcaacacttcacgcgcggcgctgccgcatctcgccgcatccaaggctggccggatcgtcaacatcggcgcaacgggcgcgctccaggccggcagcggcatgggtccctacgcggcgtcgaaagccggcgtgcatcgcctcaccgaagcgcttgccgacgagtggaagggcaaggtcacggtcaacgccgtgctgccttcgatcatcgacaccccggccaaccgcgccgacatgccgaaagccgacttctccaaatgggtgacgccgcaggagctcgccgaagtcatcctgttcctcgccagcgccgccgcgagcggcgtcacaggcgccctgatccccgtcggcggacgagtctgatcacgcactgtctggttgctggcccgattcaatcggagccgagaaggcactagactggccaacaactgattctccgactcggaacgaccttggaaaccgcgctctatctgcccgtcaaacgcttccttgaggagctcggctttacggtcaagggcgagatcggcggctgcgatctcgtcgggctcagcgcgggcgatcctccggtcgttgtgatcggcgagctaaagcttgccttcaatctcgaactgatcctgcaggcggtcgatcgcgcgccggccggcgacgaagtctggatcgcagccaagatgtcagcgcgtggcaagggacgcgagaacgatgcgcgctaccgcaatctctgccgtcgtctcggcttcggcatgctgggagtgaccgatcgcggccaggtcgaggtgctggtcaagccgccgaccgcggcaccgcggcgcgagccgaaggtgcgctcgcggctcgtcgccgagcatcagcggcgccagggcgatccggtgctcggcggcagcacccgcgcaccgatcatgacggcgtatcggcagcaggcattggcctgtgcatccgcgctcgccgagggtccgaagcccgtgcgcgaactgcgcgaacgctgtcccgacgccggaaagatcttgctcaacaatgtgtatggctggttcgaccgcaccgagcggggaatctacggactcaccgaagccggacacgcggctctgaaacgttggccccagcagcgggttggggctaatgccggtccggcgacactgccgtgacgccggccaatgcatagctgagatgccacaccgatttcatattgcaatgcaacattctcggcactaggtatcccggcatcacgatgaggccgttatgagcgcagactggaacaccaaatatggcacgcggcgtgtccgccacgatccgcccaccttggacgaggcaatcttcgccgcggtcggcatcaccgacgatcaggcgcagcaggccgagatcgccgcagccttgatgggaatgccgctcgacgtcgtccaggccgaagtgaagaagcaggctcgaaccaacagccgcctcaccgcaacccgcgtgatcgccggcgagcaaggcgcgcagcgctccgtggtcgtcgagcgccgcgtcgtccgccgtttcggcaacgacaagcgcaccgggacctgagcgtttatttcatacccggaatacgaaagcggaccggccttgccggtccgcttgtgattcctgcccgttgttttcgggctatgcggcgcgattgccgtacatgctggagatcagcttccagcaagtgctgttgaagctcaggagagcacgcccggtcgtgaacggcgaggctgcgagatcggcgagttctgcctcgggcgtcttgacgaggtcgatcgtaccggtcgactccccgtggcggaaagccagatgcgcgccgaacttccgggcgagcgcccgcatcgcgtgattctcggcgcccgtggtgatccgcagctgcttgtagcctttccagcgcgcctccgcgatcaggcgacggaacagcacggtgccgacaccctggcgacgcgcggaggcttccacgctgaaggcgacttcaggcaagcaatcaccttccggcgggtgcagttcggccgcgccacgcacgacgccatcgacgatataggcaacgatgacggtgccgtcctcagcgcagcgggcagcgtagcgctcgatgaagctgtcatcgagaaagccgttgaaacggtcgtgtcggctggcggcatcgagcctcagcaaatgatcgcgcaggagcggtaattcttcctgctgaatcagggtccgcacatagccgggagccgtgcggacggtatcttcaagtaccacgtcagaactcctcttggtgtccctcgaggaggcgttcgaatccctaggccccctatattgtgcatcgcagcatactttgcaagacgaggacctgcccaagtttgaggcatggaaaacgaccaattcgttaacaaaatcagagtcccgtagtcttacaggacgagctgagtctgggtgaccacggcaacgagcttgccgtcttcggtctccagccgcgtggtccagacctgggtccgtcgtccccgatggaccggcgttgccgtggcaatgaccgtggttccctccttcgccccaccgatgaaattggtcttgctctccagcgttgtcgtgcccttggcatcttcgggcagattgatcacggtagcagccgcgccaacggaatcggccagcgccatcaccgccccgccatggatggtgtggtgaagtgtgcagagatcaggccgaaccgtcatccgcgccaccacgcgatcctttccggcctcgatgaactcgacgcccttgaactcggcgaacggcatcttcatcgctttaagtttctcgagcggcgtcatcatatctcctcccaattcgttgttctcgcagcgtgaattgcttgacgcggcaaagcaatgacctcggaggtaatggccgtgctgacataggcccgctgcgccgacagtctcgtgtcccggacgcgcagcgttgctgcgccgcgttcgggcacagcagagctcacgtcaccgcattcacgacctgatattctggccgccgccacacctcgtccacgatcacctcctcgatgatctccgcggcccgcacaatctcgatctcacctatgtagagcggcgtaatcccgaacctcatgatgtcaggcgcgcggaaatcgccgatgaccccgcgggcgatcaaggcctgcatcgctgcgtagccggcctcaaaggcaaaggagacttgcgagccgcgatgctcatgtgcccgcggggtgacgagcttgagctgcgggcagcggcgctcgacttcactgatgaggagatcgcccagcgccagcgaacgcgcgcggacctcggcgatatcgacacggtcccatacgtccagtgaggcttccagcgccgccatcgccagcaccggcggcgtgccgacgcgcatccgttcgacgccgccggcggccgcataggcgagctcgaacgcaaacggcttcgcgtggcccatccaccccgacagcgcagcacgggcgctctcggcatgccgcggcgagacgtagaggaaagccggcgcaccgggaccggcattgagatatttgtacgtgcagccggcggcgaaatcgacggcgcagccggagagatcgaccggcagcgcacccgcggaatgggcgagatcccagaccgtgacgatcccgagcgcatgcgctttcgcgctgagcttcgccatgtcgtggcggcgtccggtgcggtagtcgacctcggtgatgtagagcactgcaatctcctccgacagcgcagcctcaatcgcctccggagccaccaggcgcaattgatgcccgcgcccgagcgtcgcgatcaaaccctcggccatgtagaggtcggtcgggaaattgccggtgtcggagaggacgaccccgcgcgaagcattcatgtcgagcccggcggcgagcgcctgatagaccttgagcgagagcgtgtctccgaccatcaccgaaccggctgcagccccgatcagccgcgcgatccggtcgccgagatgacggggttgggcgtaccagcctgcggtgttccaggcgcggatcagctcgttcccccactcggccgtgatgacgcggttgacgcgctcggcaactccgagaggcagcgcgccaagcgagttgccgtcgagatagatcacgccgtcaggcagatggaataacgccctggtgtcgtcgtagacgcgaagcctggccatgacatccctacagaatcgtccgcacgcgccagagctcgggaaacagctcgacctacagcatacgcttgagatagctgacgccgcccgtgccgccggtgccgcgcttgaacccgatgacgcgctcgaccgtggtcacatgattgaagcgccagcggcggaaatagtcttcgaaatcgaccagcttctcggccagttcgtagagcatccagtgcgtctccggcgcctcgtagacgatgcgccaggcctgcagcacgccttcgttgaagctgtgggtctcgcgaacatcgcgcgccagcaccgccgcaggcatcctgagcccgttccggtcggccaggcgcaacacctcgtcatagaggcttggcgtcgcaagttcggcttggagcagcttcgtcgtctccgcatcgtgcgcatgcggcttcagcatggcgtgattgcggttgccgagcaggaattcgatcaaccggtattgggtcgactggaagcctgaggactgcccgagctgcgagcggaagcgggtatattcgctgggcgtcatcgtgcgaagcacgtcccatgccgcgttgagctgctcgaagatgcgcgacatccgcgccagcatcttcatcgcgggttgcacctcatctcgcgagatcgctcggcgcgctgcggtgagctcgtgaatggcaaggcgcatccacagctccgtggtctgatgctgaatgatgaacagcatctcgtcatgtgcttccgagagcggatgctgcgcgccgaggatcgcatccagcgccagataatcgccataggacatccgccgggcgaaatcggtctcggcgccttcgctcgtgggatcgtaattgctggacgtcatgacgggtgcctttcgatccatgttccccgcttcagtcaaggccgatcaggcgggctgtgattgccgacgacgcatccttcagtccgtcgaccacggtaaaatggttcagccctggatcgataacgaggcgggtgggtacgtcgaagccggtccagatattggccatcagatccgactggcgaatgaattcgggccgttcgccgccgccgacccaggcggtcaggggcgaatgcccgcgcggcagatgcagcgccgcgctttccagcgtcgcctcctccatcgtcatgcgtaacgtctcgttcatcctggtcttgagcagcggacgcagatcgtgcaggccgctgatcgaaagcgtgccggcaatgcgattgtagacggcgggctccagccggctgtcgtcgcacagcatgcgcgtgacgagatggccgcccgcggaatgtcccgcgagccggatcggccctggtatgagcgctgccgctttggtgattgccgcggcgatctctgcagtgatatcggagatgcgtgcggccggagtcagcgtgtagctcggcagcgccaccgtccagccgtgatgccgcgcgcctccggcgagatcggtccaggccgatttgtcgaagcgcatccagtagccgccatgcacgaagacgacgaggcccttgctgtcgccatcgggcaggatcagatcgagcttctggcgctcgccggcgccataggcgatgtcggagcgaaattccttcagccccgcgcggtaggccgccgcccgctccgcccagagtgccggcagcttgtccgagcccgggacatgggccgaattggcataagcatcgtcccaatcgcgcattgtgactccaccgtctcgtccagcgatcgggcgccagtctgccaccggtcagggcagcatcctagtctttattttaagcttaaaggattagcgaagccggtggatgggcagcgagaagcgcccctcccgtttggttggcggcggtgcgagagcgccttgcccacctactatcatccgtcatcgcgagcgcagcgaagcaatccagaacctatccagggcggcagtctggattgcctcgttgcaagaagtcctcgcaatgacggtggagagacgcctatgccttctccaccccgcaccactcggcaatgaacagggccatcgccttggtcgtcttcctcagtgattccaggtcgacgaattcgttgaagccgtgcatctcgccgccgctggcaccgaagcacaggctcggaatgccgtggttgaggccgtagaagcgcgtgtcggtgagcgcggtgaagacgagatcctcgaccgcaccgccatagacggcgttgaaggccttgccgaacgcggtttccggcgcggcggcgtcggtcagttcgtagccttccgacaggaagccggaccattcaatctccggcggattgttggcgaggaagcggtggttacgcgctgcagcagcgacacaagccgtgatctccttctggtgatcggcgatcgaccagcccggcaatacggcaatgcggcaatcgacgtcgcaccaagcggggacgctcgaggcccagtcgccgcccttgatgatgccgggattgaagttgatgggatggttgagcgtcttgaagtgacgatcggccttggcccgctcgttccattcgatctcgagcttttgcagcgcctggatcaggtgatacgccgccatgatcgcgttcgcgccggagcctgcgaaggccacgtgggttggatgtcccttcacgcgcaggcgaaaccagatcacgccgacctgcgagcggaccatcttgccgcctgtcggctccggaatgaagcaggcgtctgcgcgatagccgcgctgaagcgtcgagagtgcaccgaccccggtgctctcctcctcgatcaccgactgaaaatgaatccgtgccgtcggcctcaaacccgcggccttgatcgcgtccagggcgtagagcgcaccgatcgtgcctgacttcatgtcgcaagcgccgcggccgaacatcttgccgtccttgatgaccggcgagaatggcggcgtgtcccacagttccagcgggcccgccggcaccacgtcacagtgcccctggaggatcagcgatttgccggcattggtttgtggacggtaagtacccaccacagaacgcgccttcgaaaagtcgtgctcgatcggaccgaagccgcgcagatccttcagatcgtcgacgttgatgtgccaatcgtcgacctcgtagccgcgttcgcgaaggaggtcgccgatcatgtcctggcagggcccctcagccccgcgggtcgaagggatcgcgacgaaatcgcgggtggttgcaagctgagcttcgaagccgctatcgacggcgtcaagaatcctctgctgcgtttcggcattcatctggcaactccaatcggcattcggatcatcgatgccgcgcaacctactcgatttcagccgttcgggtactccacaaaataagcatcccgcaatgcatcttcgagcagccggccttccctatagccattcagcgtcgcaggccggctgacgccgtcgagcaggcgcgggcacggctccggggggccgagcacggtgcggaccgggatgcgctcggcgtagatgggcaacgcatagtcctcgtcgtcgtcagctacacccttggcgcggatcttggccgaggcctcctcgatctccatcgcgataaaggacgttgccttgatctcctgcgtggtgctctggcgcagactcgccgtgcggcccgggaaaaagcggtcaaccatcgcgatcaccgcgcggtccttctcctcgggatcagtgacgagataggcagtaccgaatgccatgaccgcgcggtaatcggcggagtggttgaagccgcagcgcgctaggacgaggctgtcgagatgagcgaccgtcaggcagacgcgctcgcccttgctctggttgcgcaacatccggctggcgctcgatccgtgccagtagagcctggtgccctcgcgccagaagaaggtcggcgtgcagtagggctgtccatcgatgacgtaggaaacgtggcagagcatcgaggagtccaggatgcgatgaaccgtctcatgatcgtagaagccgcgatcgtgccggcgcttcacttggttgcgcgccgatgtcggataggaatctgaggtctcggtctggctcacggccgctcctgttcggattggaagaactgcaaggagttgtagccgcgtatttggtctgcgatagttccaattccatgcaaaaaattccaaccaattccccctcgcctggcaaggcggagctgcccctcgacctcacggggccgcacatcactgcgggtgcttccgcagcgcaccgtctgtaccaggccctatgcgagatgatcgtctccggtctcgtgaagcccggcgaggcgctgccgccatcgcggacgctggccaggcagaccgggtttcggcgcaatgccgtcgtcaccgcctatgagcgcctgatcgccgacggctttgccgacgcaaccgtcggttccggaacgttcgtggccgcacgcattcccgcgagggcggcagaagcgaataggccgaaggtcgttgtcgaaacgccgaggcagggcgcgttcgcgcttggctgcacccatatcgacgagcgcgctctgcagcgctttcgggccttcgtcggccgccgcatgcgcgcgttcgggtccgagcacctgcattacggcgacccgcgcggcagtcgggagctgcgcgctgcgatcgccgaccatctgttgtcagcgcgaggcctgcgctgcgatcccgatcagatcatgctgacatcgggcacgctgcacgcgttgcgcatcgttttgagcggaatcctgaaatccaacgaccaggtctggtgtgaggatcccggctatcccgccgctcgcaacaccatcgcgcattgcggctaccgcgccgtgcccgttcccgtcgacgagcatgggatgcgtgtcgcccgaggccgtatcgcggcgccagccgcgcgcgcggcatacgtcacaccttcgcaccagtttccgcttggcatgcagatgtcgatgccccggcggctcgagcttctggagtgggcgaggcaaaccggcgcatttgtgatcgaggacgattacgacagcgagttccgctatgacggcgcgccgctcatgtcgctcgcgggcatcgatcgcctccagcgcgtgatctacctgggcacgtttgccaagacgctgtttccgggcctgcgcatcggctattgcgccctgcccgaacgcctggtcgcagtggtaacggcagcgcgcgccgcactcgaccgctttcccggcacactgatggaaggcgcggtggcggacatgctcaattccggcgcattcgccgcaaatcttcggcgcgtgcgcaaaatctatcgcgaggcgcgcgatgtgctcgcccagacgctggaagtcgcatccgatggcgcactttcggtgccggtgccctcacagggcctgcatcttgtcgcccggttcgatccttcggtcgccctgtcggtgccagcgcaggccaagcgtgcggccaacgcagaaggctggctcttggccgacacctattcgcgcgcgcccccgctgcctggcttcgtgttgggattttccggccatgcggttccacagctcgtcgcctcagccgaacgactggcccgcgaatcgcgaactgccttgcgtcgcggcagatccgcccaccgggggtagcaaacgttcactatgagaatcggctgcggctgcctacagtgcaggctcgatgtcgggatttctcaccatgctgttgggccgtgcggtctgcctctcgctcctgatcgccacgacgccggtcgtgacggcagacgcagctacggtcggacgcgagcaggatatcggcgatctcaagctgggccagcgcgtgcaagtggatgatggaacctgccccgccggtcaggtcaaggaagtgcgcggcgccaggatgaccgacaagggggtggcgcggaccagcacttgcgtgccgcgctacggccccaaatcgaaatgacgagctgaagcgctactttgccggatcgaacatgcactgcaaggtcggcttggcgatcttggtgaaggtcgggccgatctcgctctgcttggaggccggcacccaatcggtctcaatggtgggcacgcccgtctcgctgatgccgcgcaacagtgcttcacgcagatcgcggtcctcgacggccgcggcggcgtgatcgtgcaggcagccgcagacctcctccggatgttcccagcgcccgagcatgtgcggggcgcattggcgcacgaattcgccgcgtggatcgggaagcctggagggtgcgcgcgcttgcgcttgaacggaaccgatcgtcagcagaaacacgaaggctgcggcgcagagacgtagcaacatgattgcctttgccagctgttttctcgtgcgcggtcaggagcgcgcggcgaccatgacctgcttcgcggtcgcggccggcgagccgctgtactggaaggtgccgattccggggagattgccgtcgggcgtccccgccaacgacgggccggcgagcacaaaaccgaaggccaggatgaagctgagcgcgcgcatgatcgtgtgtcccaattcagtggcgtcggtacgccgtcgtcgttgtgaagctgataaccatgggcggtttcctggatgatgcgccaaaagctgaaaatggtttcgtcttggtgagaattgtttcgtccgtcgctggacaacgaagcaattctcagaaaacgccagtcatttcagagggggcgagctgcaggtcaaagtggtctgccaggttccggctcagttgccggagacgtacgacgcagacgccgtcatgccctcgccttgaacgcttcacacgcattttacgtttctctgctgaaaggagcggcaaacgggggctggactccatcgaaccagcggtggttcggcagcgacccaagccatcggaaccaagacgcccggaacaccgggcgcattcacgtgagggatggccaccatgatggcgggaaatcgcgcaacgccgcgcgatgcggatccggggacggaccgcggggatcaaccacccattcgcggcagcgccggcgaaatggcgctgcaatcaagccggggcttcgaggccgcaccgcagatgttcgtgcgtctgaccggttcgcatctcgcgaagctgcgcgatcgggactgagcgagcgcaaggcgccgcaggagcgacgccaacgcattactgcgtgaagaactcgccgcacttctgcacgttcacgtccgccgtcccccatggcataatcggcaccgtcgaggtcgagttcttgggcgatccttcgatcagcctgtccgaatagaccatgtaaaccagcacgttgcgcttggcgtcgcagccgcgtacgatctgcatcttcttgaagaacagcgagcggcgtcgacggaacatgtcgtcgccctgctccatcttgttcttgaacttgatcgggccgatctggcggcaggcgagcgagatgtcggagacctcctcggcaaggccgagccaacccttgaagccgcccttctccggcaccgtgaaatggcaggcgacgccctcgacctcgggatcgtcgataccgtaggtcgcaagcttgtcgttcgggctcatccatttgaacacggtggagcggcggaagatcagatcgggctcatcggctgcagatgccgacgccattggcgcggtcagggcaaggaggaataaagcaagacctttcagacggatgccggaaagaatgcggaaacgagatgacatgaagttctccggtaacaagtccccgcaatgtaggaacgcaagcgacgatcaggaaggtgacggaccgcgagaggcagccgccgtttaccgctccgtgaggcttttttgctacgccttggataagagtgacggacggcagaaccgccctgctggtgaacgcgtattcccttcgcgagactaacgtctgatttggattatggattcgaggatgaacagcgtgagcgggtcggattcttctgccaagcaggggcggctgtggcagatcgccattgtgacggcggcgggtgtgatcggcgcgaccagccacgcagacgcagcgtattattattggacggactattccgacgggtcctattacgctcgaccggatcgctatcccgagataccgcgacagaagccgcaaaagcgcggcacggcaagcaagaaggaaagcatcgtcgagaaggaagccggcaccaagccgcaaggaccgctcatcatcgtggtctcgatcgaccggcagaaggttacggtctacgaccgcagcggcatgttcgcggaatcaccggtgtcgaccggcatgaagggccattcgacgccgatgggtgtgttcagcgtcattcagaagcataaattccaccgctccaatctctatagcggcgcgccgatgccgtacatgcagcggatcacctggtccggcgtcgccatgcatgcgggcgcactgccaggctatccggcctcgcatggctgcatccggatgccgatgtcgttcgcgatgaagatgtggaactggacccggatgggtgcgcgcgtgatcgtggcgcctggccagatgtcgccgcaaagcttctcccaccccttgctcgcctccgtgcgcgtgccgccgcagccgacggtgagcctcgagccgcagaccaacggcgacaagatcgagaagaccgtcgccgaaagcaggccggtggagaccaagaccgccagcgccgacagcgtgctcgatcttcgctcgtccgtcggccttgtcgtcatgtcggatgtgaccacgggcaatacgccggcgcgcgaagccgccacgccggccaagtcggccgaggcacccgacgcggccaaaccccagtcggaaggcgcggtgaagcccgccgacgacaaggttgaggctgtcaagaccgggccgggcaagacagaagcggtgggcgccgcaacgacgcccggtgcacaagccacagcaccggcgcccgcggcctcgcccgatgcgaagacggacgcgacacgcgttactgaacctgcgcctgtgtcaaagccggatgcgccgaagcgggccggccagatcgcggtcttcatcagccgcaaggattccaagctctatgtgcggcagaatttcgcgcctctgttcgaggtacccgtcacgatcgcgcccagcgaccggccgctcggcacgcatgtctttaccgcggaggtcgacaaggccgattccaatacgctgcgctggtcggtggtgtcgctgcccgtctcagcccgttccgcggcacgagccgatgacagccgccttgcgcgccgccggcagggcgcagtgatgccgattgccgccaagcccgtaatcgcgccggacagcccggctgacgcccttgaccgcatctcggtccccgccgacaccatggcgaagatcagcgagatgctgacgtcaggcggctcgatcatcgtcgcggaccagggcatcagccagggcgagaccggcgaaggcaccgatttcattgtccgcctgtattagcccttgttcgttccgataacgcggtgttgacgaggcagatcgttacggcggagtagcatgcccctcggatcatttcgggggacgccgtcatgatgaatcgcaggaccatgctcagcgcgacgcttgcaagcgtgctcgcgccggcaacacgcgcctttgccgatggcggcatgagccgggtctcggcctacgcgttctccttcccggccctgtcgggcgacgatatccgcctcgccgccttcaccggcaagccgctgctggtggtgaacaccgcctcgctctgtggctacacgccgcaatatgccggccttcaggaactctgggacgaatttcgcgatcgaggactcaccgtgatcggcgttccctccaacgatttcggcggacaggaacccggcggctccaacgagatcacgcagaaggcgcatcaccaatatggcgttaccttcccggtcacggccaaggccgtcgtcattggagcgcaagcacaccccttctacagatgggcggctgcggcgcgaccaaaggacgccccgcggtggaacttccataaatatctgatcggccgcgatggctatatcgctgacgtctttccgtcagcagtggaaccgcccgatacgcgaatcaagactgccattgccaaggcactggccgtcagttgagcgggtgcgccatccggctgggcacaattgtgccggcggatcaaacagccgttgcaatggcgatggcccaccatctaggctaggattcgtttggcaggatggttctgcggcaggcgaaaagccgcggcggaacaacgggatcaatctcgaggacaacaccatgcgtgtggcggcaggactgattttggcaggcgcaatgtccatggcgatgaccggcgcatcatgggcgcagacaccggctgccaagcaggcgggtgcaacgcagggcgcaccggcggcgatgccaggcgcgtcagcgcccccgacaggcccggcagccgctcccgcgacaggcgccgcgccgacggggttcgtcaatccgcccccgcccaagcaggcgccgcagccggcccgcgcagcctgcaacacgccgggcgcgctgggggttgcccgcaccgtcgagatcgacaccacgggcggtccgggcttcggcttcgagcacttcaaggagctcgacttcctgcgcgacaaggaagtggtgctgaccttcgacgacggcccgtggccgcgcaacacccccgcagtcttgaaggcgctcgcggacgaatgcaccaccggaatcttcttcatcatcggcaagcacgcgacctacgagccggagatcctcaagcaggtctacgcagccggccacaccgtcggcgcccatacctggtcgcacgccaacctcaacaacaagaagctcaacgaagcgcagcgcaaggacgagatcgagaaaggctttgcggcggtgaagtgggcgctcggcggcatttcgcccgcgccgttcttccgcttcccggcgctgcagcatccgcccgagatggtcacgtatctcggcaaccgcaatgttgcgagcttctcctgcgacatcgactcgttcgacttcaaggcctccaagcccgagaagatcgtcgagaccgtgatgaagaagctcgataccaagggcaagggcatcatcctgatgcacgacttccagaagcacacggctgaggccctacccgagctgctcaagcggctgaaggccggcggctacaaggtggtggcgatgcgcgccaagttcccggcctcgacgttgccggaatacgaccaggagctgctcaaggacctcaagctgccgacggtgagccagcgccccgtcaattccgtggtgacgaccgtttccgaatagaaggcaattgtctttccgcatcgaaggctacgtcatcgtctccgcggacggcatgcttgccgacgccgatcgcgtgatgccggacagcctgaagttcgaaggcgacaagctgttcttcgagcaggcgctcgatcgcgccgcgctgatcgtgcatggtcggcactcgcacgagcagcagccgaattcgccaaagcgcaagcggctgatcctgacccggaagatcagggatctcaccgtcgatccggagatgccgaatgcgacgctgtggaatccggagcatgctagcttcgaggcggcctgcgccttcgcggatgtcgcctccggcacggtcgccatcatcggcggtccggtcgtgttcgacatgttcatggaccgctacgatacgttctggctgtcggaagccccgcatgtgcggctgcctggcggcgaaggctgttttgtcgatgtccccgagcgaacgccccatgaggtgctggcttcgcacggaatgaagccggacgcgccgtacctgctcgacgcggcgcacgaggtgactgtcacgccgtggcgacggtgagtctccgatcgaaatcggaaaacaaccccatgcacagtaccggcaaccagatacctcttcgtatcctgttcgaatgtcggtcataatgggtcccgccgccggccggcgcaaagccggctggcatatgtgccgaggtccgataatcggccccgacggcggtgatggcgctatagccaatgtccgcgccgatgcgtcaagacgggctcacggccgagacacaccgtatcaatagactgagacgaaagcgcaagactggatgggcattggaacgaggcggcccgcctcagagaggccgcagatggtgcacgaacgagccatttccctttgccgcatatcaacttccacccggacatgattgcccagccgacctcccgcgtctaacgtcggcccagacgcgacaaggccagcatgaccgaccacggtacgacgacgacaggtccggcagacgcctccggactgactgacgacgcagccccgatttcctccttgttgcccgccttcggcttcaccgccgatcagatggatggggatgcgaacgtcgccgcctggcggaggccgtcgccacgctgttcgagatcgacgagctcgccgcgggcgaaccgggcccgtttcgcgccgacatccgctcctacgccatggggccggtgctgatcgggttgagccgagccagcggccagcgtttccgccggacagctgaaacgatcgcgcgcagcggcgtcgaccatatcatcctacagctctacgtgacgggcggctttgacggcgtcgccggcgaccggccgatgcaggtgggcgctggcgacatctgcctgttcgacctcgcccagaccctggagacccgggcgacgccattcgagaacgtcacgctggtcgtaccgcgtccgatgttcggcacccatctcctgcgcgtcgacgatttgcacggcctcgtcctgccgggcagcagcgtgatcgcaaggctcctggcgggacatctcaccgccctgttcgaattcgcgccgcgcatgacgctcgacgaatgccaatcggtggtcgagggcacggtgtcgctggtggccgcctgcctgcgcaacgaaatcgaacgtagcgatatcgacgcaggtcatcctggcgccgcgaacccgtccttgatgcggatccgccaatacatcgaagccggacttgccagcgaggatctgtcggccacttcgatcgcggaccatttcggcctgtcccgggcctcactgtaccgactgtttgcgcccgtcggcggcatcgccgactacatccgcagccgccggctgcaccgcgccttcttcgatctcgccaattcgggcggccgaggcctgcgcatcagcgaggtcgcccggcgctggcagctcggcagcgacgcgcatttcgcgcgctcgttcaaggcagcctacggcatcacgccccgcgcggcgcgcgaggccgcattgctcggcctgcagcgcggcaccgatgcaacgaacagcgcaacgatttcccgctggatgcgcgagatcgctccaccgagagcggattgatcgctacacgtcgccgtaggccgcctcggccggacgcgtggtgcggccgtagccgatgatcatgcagagcgcaccgatgatcgacaggttcttgagcgcatcgaccagcatcttggcgttgtcgggcgccgccatgttccagaagtcgtagaacatcacggtcgcgacggcgacgtagatgatcaacagcatcgcgaagaagcgcgcgccgaaattcagtgcgatcatcaaaccggccaagatctccagcgctccgatcgcgatcgccagcagctgcggcgtggtcatcgcggtcgccgcctcgacctgcttggcataaggcgcgaccgcgtcgggcaccacgagcttggtggcgatgaagtccgcggtggcctggatggcgaacagcttggtcgcgcccgtgtagatgaacagcacggcgaacaggattcgcccgaaagtcacgaacgctggcatgatcggcctcttggtaggagcgctacggcacggaacgcgtaagtggattatgaagagtcgtgcgtcggtttacaaacgaggaaatggagagctggcaaggaattcaaagttgccggtctcttcccttctccccttgtgggagaagggacaagcacctcgcgcggcgcagcagcctgccgctacgtaaacaacgtcggctgctgccgggctgcgcgctcctgcgcttccacgaccgcgacggccgtcatgttgaggatgccgcgcgcggttaccgacggcgtcaggatatgcgcggggcgcgccgggccaatcaggatcgggccgacgggaagcgcgtccgccagcgacttgatcatctgataggcaacgttggcggtgtcgagggtcggcatgatcaggatgttggcctcgccctccagcttggagtgcggcagcaccattcgccgagccgcggccgaaagcgcggtgtcgccctgcatctcgccgtcggcctcgatctccggatgcttctccttcaacagctgggtcgctcgccgcatcttgcgcgaggactcggtgtcataactgccgaaatccgagtgcgagacgaaggcgatcttgggcttgatgttgaagcgctgcacgtgaaccgccgcgagcgacgcgatctccgcgagttcttccgcgctcgggttgggccgcacctgggtgtcggcgatgaagaaggcgcctttgctggtgatcagaagcgcaagcgccgcatagtcgctgatcccaggcgagaagccgacgatctcccggacatggcgcagatggctcatgtagcggccctcgacaccgcaaagcatggcgtccgcctcgccgcgcaccaccgcaagcgcggcgatcacggtgttgttggtgcgcaccaccgtccgcgctgcatccggcgtcacgccgcgacggccggcgacctcgacgtaggattgcacgtaggagcggtagcgcgggtcgtcctcgggattgacgaggtcgaagtccttgccggcgcggatcgacaggccgaagcgattgatgcgcgcttcaacgacggaaggacggccgaccaggatcggccgcgccaggttctcctccagcaccacctgcgtggcccgcagcacgcgctcgtcctcgccctcggcatagatcacgcgcaccggctgggtcttggccttggcgaacatcggcttcatgacgaggccggagcggaaagcgaagcgctcgagcagcgcagtgtattcgtcgaaattggtgatcgggcgcgtcgccacgccggactctatcgcggccttcgccacagccggcgcgatgcgcaggatcaacctcggatcgaacgggcttgggatcagggaccccgggccgaagccctgcgtctcgccggtgtcgaacccctgcgcgaccgcatccgacggtgcctcgcgcgcaagctgcgcgatggcctcgaccgcggcctgcttcatctcctcgttgattgcggtggcgccgacatcgagcgcgccgcggaagatgaaaggaaagcaaaggacgttgttgacctggttcgggtagtccgagcggccggtgcagatcatggcgtcggggcgcgcctttcgtgcctcctcaggcatgatctccggcacgggattggcgagcgccatgatcaagggcttgtcgcccatggctttcgccatctcgggcttgagcacgccgggtgccgagagcccgatgaagatgtcggcgccgccgatgacgtcggcgagcgtgcgcttgtcggtcttctgcgcatagaccgccttccagcggtccatcgaggtatttcgtccctcgtgcacgaggccgtcgatgtcgcaaacccagatgttcttgcgctgtgcccccatcgacaccagcaggttcagcgtcgcgatcgcggcagcccccgcgcccgatgcaacgatcttgacctcggacagcttcttgccgttcagcctgaggccgttggtgatggccgccgcgacgatgatggcggtgccatgctggtcgtcatggaacaccgggatcttcatgcgctccttcaggcgcgcctcgatctcgaaacattccggtccgcggatgtcttccagattgatgccgccgaaggtcggttcgagcgcggcaaccgtctcgaccacgcggtcaatcgtgtcggcggcaatttcgatatcgaacacgtcgatgccggcgaatttcttgaacaggaccgccttgccttccatcaccggcttggacgccagcgggccgatattgccgaggccaagcactgcggtgccgttcgagacgacggccaccagattggcgcgtgtggtgagcgtggccgcctcggccgggttcttggcgatctctgtgcaggccgcggcaacgcccggagaataggccaacgcgagatcgcgctggttggcaagcggcttgctcgcctggatctcgagctttccggggcgcggcaaacgatgataggccagcgccgcctggtggagatcatcagaataggacgacatgcggtgtctcgcctcgcgttaccggccttcaatcaagtgccccggccagccgccacattgcggtattccggctcatggaaaccggatgaagcacggccggccgcccggtggcaacatccgaatgcgatctggtcaacagactatccgcgccgtcattgcgagccatcgggtccgcgcagcgcgcggcccgatgacaggctccgcgaagcaatccagactccctccgcggaaggattctggattgcttagctgcactcgcaatgacgatgttgcggcacctggcgcaatacttgtcgtatggcgtcgcggtgccatagcggcccgctcacttctgcggcaggttcacccggatgtgcagctcgcggagctgcttggtggtggcctccgatggcgcgcccatcaggaggtccatcgcctgctggttcatcgggaagagcgagatctcgcgcaagttggtggtgccacagagcagcatcacgatgcgatcgacgccggcggccatgccgccatgcggcggcgcgccgtactggaaggcgcggtacatgccgccgaagcgctcgaccacttcctgctcgccgtaacctgcgatctcgaacgccttcaccatcgcttccggcacgtggttgcgaatgccgccagaagcgatctcgtagccgttgcaggtgatgtcgtactggaacgccttgatcgtcagcgggtcctgcgacttgagcgcgtcgaggccgccctgcggcatcgagaacgggttgtgcgagaagtcgaccttcttgtcgtcctcgttatactcgtacatcgggaaatcgacgatccaggcgagctcgaaccgctccttgtcggtgaggttcagttcctcgccgaccttgttgcgggcaagaccagagaacttccagaacttgtcgggatcgccggcgacgaagaaagcggcgtcgccttccttgacgccgagctgcgcgcggatcgcagccgtgcgctcgggcccgatgttgttcgcgaggggacctgcgccctcgccgccctcgcgccacatgatgtagccgaggccgggctgtccctcgccctgcgcccacgagttcatgcggtcgcagaacgcgcggctgccgccgcccggtgccgggatcgcccacacctggttcttgggatcttcgagcatgcgcgcgaacaccttgaagccggagccgcggaagtgctcggagacgtcctgcatctcgatggggttgcgcaggtccggcttgtcgctgccgtatttgcgcaaggcttccgcgaacggaatccggcgccagcccttcgtgaccggcttgcccttcgcgaactcctcgaacacgccggtgatgacgggctccatcgccgcgaacacgtcttcctgcgtgacgaagctcatctcgacgtcgagctggtagaactcgcccggcagacggtcggcgcgcggatcctcgtcgcggaagcagggcgcgatctggaaatagcgatcgaagcccgacatcatcagcagctgcttgtactgctgcggcgcctgcggcagcgcgtagaacttgccgggatgaatgcgcgagggcaccaggaagtcgcgcgcaccctccggcgaggacgcggtcaggatcggcgtgttgaactcgaagaagccctgcccctccatccgccggcgcatcgacttgatgatctcgacgcgcgtcatgatgttctggtgcagtttttcgcgacgcaggtccaggaagcgatatttgagcctgatgtcttcaggatattcctgatcgccgaacaccggcagcggcaggtcgccggccgggccgagcacctctatctcgctgacatagacctcgaccttgccggtcggcaggtcgtcgttgtcggtgccctcggggcggcggcgcgccttgccgtccatccgcaccacgtattccgagcgcagcttttcggccagcgagaacgccggcgagtccgggtcgaccacgcactgggtcaggccgtaatggtcgcgcaggtcgatgaacagcacgccgccatggtcgcggacgcgatggacccagcccgacaggcggaccgtctcgccaatgttgctctcgcggagcgcgccgcatgtatgtgaccggtagcgatgcatggtcgtcccaaaatcaatgtcaaaggaagcgaatcgaaccgcctgtcacggccggtccgaagttgcggcagggtttacccgacgggacccaaggcggcaaccaagggaacgccctgttttggacctccactgccatttttggcttatcagagtccgagcctttgccatcaggcgttccagccctatcttaagcccatgacggtccatttccccttccagaactcctattcggcactgccggacagcttctttgcccgcgtcgcaccgaccccggtcgccgctccccggctgatcaagctgaatcggccgctggcgctccagctcgggctcgaccccgacctgctggagacctcggaaggcgccgagatcctggccggaaagacggttcccgccggggccgagcccatcgccatggcttacgccggccaccagttcggtcatttcgtgccgcagctcggcgacggccgcgccatcctgctcggcgaggtgatcgacagagacggtgtccgccgcgacatccagctcaagggctcgggccccaccccgttctcccgccgcggcgacggccgcgccgcgcttggtccggtcctgcgcgaatacatcgtcagcgaagcgatgcacgcgctcggcattcccaccacgcgctcgctcgctgccgtcgtcaccggcgagcgcgtcatccgcgagaccgcgctgcccggcgcggtgctgacccgcgtcgcctccagccatatccgcgtcggcaccttccagttcttcgccgttcgccgcgacaccgaggcgatccgccggctcgccgaccacgtcatcgcgcgccactatccggacctgcttcatgccgagcggccctaccacgccctgctcgcagccgtcgtcgagcgccaggccaatctcatcgcacgctggctcctggtcggcttcatccacggtgtgatgaacaccgacaactcgtcgatctcgggcgagacgatcgactacggtccctgcgccttcatggacgcctacaaccccgcgcaggtgttctcctcgatcgacgagatgggccgctacgcctatgccaaccagccgcgcatcggcctgtggaatctgacgcgcctcgccgaatgcctgctgccgctgttctcggacgagcaggagaaggcggtcgcggaagcccaggacattctcggcgccttctccgacacgttcagcgcggcgtatcaggcgggcctgcgcaggaaagtcggcctcttcactgagcgagatggcgacgaggcactgatccaggacctgctcgacgcgatggccaagaaccaggccgacttcaccctcaccttccgcaagctcggcgacgcggcggctggcgacgcagccgactcgcgcgcgcagttcatggagcccgcagccttcgacgaatgggccggccgctggcgcgcgcgtctcgcgctggagccgcagagcgccgccgagcggcaagccgccatgctcgccgtcaacccgatgttcatcccgcgcaaccaccacgtcgaggccgtgatccaggccgcggtgaacgacgacgattacgcgccgttcgaggaactggtgaaggtgctggcgaagccgttcgaggatcagcccgagtacgccgcgtatgccgatcccccgctgccggatcagcgggtgctgcagacgttctgcgggacgtgagccacaaactcggtgcgagggtggatcagccgaaggcgtcatccaccacttcccacaatacgcggcaaataaagaggtggatttcacttcgctaatccaccctgcgacgtccgcgcttgtggacgccggaaccgctgtcatcaaactgaaacacacgcgctctaaccgcctgtcagggtcgtcttgccggaggcgcccatccttcaacagtcctgacaagcgccatgcccttcaagttcatccacgtcactgacacgcatctcgcaaatcccggctcgacgctctatggcctcgacccgcgcgcccggttggatgcggcgatcgcggacatcaacaagcaccagtccgatgctgccttcgcagtggtgaccggcgatctcacccattggggcgagccggagtcctacgtcaacttcgccgaggcgatggccgcgttgaagattccctacatcgcgatggtcggcaatcacgatcgccgcgttacctgcctcgacgcgctgaaggccgcgccgcgcgatttcaacggcttcgtgcagggcacgcgcacgaccgagcatggcctgttcgttttcctcgacactctggacgagaccagccatgccggcgagatgtgcgagaggcgcctcggctggctggcgagcacgctcgccgccgcgcctgccgacatgccgttcgtcgtgttcatgcaccacccgccgttcccggtcggcgtgcacgcgatggacgagatcgggctgaagcagagcgcggagttcgccgaggtgatcgcgccctaccgttcgcgcatccgtcatctgttcttcggccatgtgcaccggcccatcttcggcagcttcggcaagatcccgttctcgacgctgcgcggcaccaaccatcaggtctggttcgagctcgaccagaacgcaccgcacctcgccagccacgagccgccggcctacggcgtggtgctgatcgacgacgagaacctcgtcgtgcacagccacgatttcctcgacgagaatctgcgcttccccttcgccccgccggcgggaatggacggccgcgattacgcgctcaattttcccggcgcggtgaaatgagcctcgccgaacccgcggctctcccggtcgcgacctcggcggcgccgcgaccgcaagtcctgaagcgcttgacgagcagcttcaaggcctcgctgccggcctatctgctgctcttgccttcgctggtcttcctcgcgctgttcacctatggcgcgatggggcgcgtgctcatcgatgcgctctatcagcgcacgacgccgaaggcgcccgtccgcttcgtcgggctcgacaacatcagcgccgtacttgcggaccccgccttcaccggcgccgtcgtcaacaatctcatctacgccgtcggcaccacgatcccgggcatcgcccttgcgctgttgttcgcgctggcgctgtcgcggacccacgccgtgagcagcgcgttgcgcgccgcgctgttcctgccggtgctgatcccgatggtcgcggcgtccgcgctgttcctgttcatcttcctgcccaatgtcggcctgctcgactattacatcggccggctgctgccggtgctgccgaactggctcggcgatcccgacatcgcgctcactgcgatcatgatcatcacggtctggaagaacgccggctattacatgctgttcttcctcgccggcctccaggccgtgcccgaggacgtcatgggggccgcgcatctcgatggcgcggggccgtatcgacgcctgcgccatatcatcctgccggagctcaagccgaccttcctgttcgtcaccgtcattgccacgctcaacgctgtgacgcaggtcgaccacgtcttcgtcatgacccagggcgggccatcgaactcgaccaatctcgtgctgttctacatctaccagcaggcggtcgagcattacgacatcggcaaggcctcggccgcgacgctgctgacgcttgccgtgctgatgggtctcaccgcactttcctttcgcaccctggcgaaccgcgagggcggggcatgaagctgttcgaccgcctgttcagggacgccccgctcgccacgcgcggcgagatcacgcccaagctcggctttgcgctgaccgtgctgctcgccatcgtctggctgatcccgtttctctggatgggcgtggcgacgttgcgtccgccgtccgacggcatcaacctgatggccgaactgctgccgagcctcaacccgacgctcgacaacatcagggatgcctgggagatcggcgatttcccgcgctacacgctcaacaccacgatcatctgcgccggcattttgctggtgcagttcgtcacgatcacgctggcgggctttgccttcgcgcgcctgaacttcgccggcaagacgctgatcttctacctgttcctgatgcagctgatgctggtgcccgtgctgctgatcgtgccgaacctgtcgctggtggcgcagctcggcctctacgacacgctcaccggcgtcatgatgccgttcttcgcctccgccttcggcaccttcctgatgcgccaggcgttcgaggcgatcccgaccgagctggaagacgccgcactgatcgatggcgccggcctgctccagcgcatccgccacatctacgtgccgctgtcgatgccgagcttctcggcgtttgcgatcatttccgtgaccagccactggaacgacttcctgtggccgctgatggtgatcaattcgccggacaagcggccgctcacggtcggcctctccgtcttcaccaagaccgccgagggcacgcaggcctggggcaccatcgcggccggcacgctgatggtgatcgcgccgctgctcgtcaccttcctgatcttccagaagcgattcatcagctctttcgtcacctcaggcatcaaataggagattttccgatgctgttctcccgcaggctcatgctcggccttgccatcgcaggcacgatggcaggctccctcgccgtcccggcgaaggctgaaggcccgaccgaaatcgacctgttcttccccgtccccgtcgacggcaagctcgcccgcgacatgggcaccctgatcaaggagttcaacgagacccatcgcgacgtcaaggcgaccgcggtctacaccggctcctatgacgacacgctgatcaagacgcgcgccgcgatcaaggccggcaagccgccggccgccgtgatcatgtcggcgaacttcctgctcgatatgcagatcgagaacgagctcaccaacctcgacagcctgatcgccgccgacggcagcaccaaggagaagttcctgggccaattcttcccggcgctgcacggcaacgcggtgatcaaccgatcggtctacggcgtgccgttccacaactcgacgccgctgctctacatcaacgccgacaaggccaaggaagccggtcttgatccgagcaagccgccgcagacctgggccgagctcaccgactgggccaagaagctcaccaagcgcgacggtgacaaggtgacccagtggggcatcgccattccctgcgcctatgattattgcggctggatgatggaaacgctcaccatgagcaatggtgggcgctactacaatgaagagttcggcggcgaggtctattacgacacgccctcgatgctgggggcgctcacctggtggaacgacctcgtctacaagcacaaggtccacgcgcccggcgccacccccggcccggccgtcagcacctccttcatctcaggcaatgccgcgatgatgatgctgtcgacgggctcgctgacctacgttcgcgacaacgccaagttcgcctacaaggtcgccttcatcccccgcaacgtccgcaacgccgtgccgatcggcggcgcctcgctgatcgtgccggcagggctcgaggccgacaagcagaaggccgcctggacgctgatcaagtggatgacctcgcccgaaaagagcggctggtggagccgcgccaccggctatttcgcgccgaacatggccgcgtacaagacacccgagatggtcgacttcctgggcaagaacccggacgcgaagaccgccgtcgatcagctcgacgtcgcaaagccctggttcgcgacctacaagaccgtcccggtgcgcaagacccttgaggacgaggtgatgctggtcctcaacggcaagaagcagccgaaggaggctctcgctgccgcgcagaaggcggccgacgagacgctcaagccatacaatgcagagacgtcgctgaagctgccgtaaggccgcttacgacgacgaagagcttcggcgctccgcgatgcggggcgccgaaatcgtttgggcattccaatccattaaccccctgtccaccatcccatccgccccgctgccggtaaccacgagaattaacagaccctcaacagacccccgacaagtctagcaatgtttctggaggtttcgccgtggatctgttggttatcgagttcctgggactggctctggtcgtcatgtgcgtgctggtggtggcgctgccgtgcgcccggaaatcctcgcagcgcgtgcgatacgagtaggtcgtcggcggagaacagcgattccggcccgattgcaaggctcgaattcgcatcgagccccttgacatcacagcactttcggcagaacggctgatggcaagtgtcatgggccgttcatggatttgattaccaccaccgctgacctcgcggctgcctgcagccgactggccaagcaccccgtcattaccgtcgataccgagttcctccgcgagaccacctattacccgctgctgtgcgtggtgcagatggccagccccgaggaggccgtcgtgatcgacgcgctggccgagggcatcgacctcaagccgttcttcgagctgatgggcaacgaaggcgttctgaaggtctttcacgccgcccgtcaggacatcgagatcgtctggcaccaggcgggcatcatcccgcatccggtgttcgacacccaggttgccgcgatggtactgggctacggcgacagcatcgcctatgacgcgctggtcgagaaggtcaccggccaccgcccggacaagacccaccgcttcaccgactggtcgcggcgaccgctgaccaaggagcagatgcactacgcagtctccgacgtcacgcatttgcgcgaggttttcgcagcgcttgacgccgacctgaagaagcgccgccgcagcgagtgggtctccatcgagatggaggtgctgacctcgccccgcacctatgatttccaccccgagcgcgcctgggagcggctgaagacgcgggtgcgcaagcccaaggacctcgcggtactgatggagatcgcggcctggcgcgagcaggaggcacagagccgcgacgtgccgcgcggccgcgtgctgcgcgacgaagccgtcaccgacatcgcgacccacgcgccgactacgctggagaagctcgcgcatctgcgctcggtgccgaagggattcgagaaatccaaatggggcgcggacatcatcgccgctgtcgagcgcgggctggcgcgggatttctcgaagctgcccaagctggagaaaccgcgcaacaattccaacggcgccgccatcgtcgagctgctgaaggtcttgttgcggatgaccgcggagcgccacgcggtcgcaagcaaggtgatcgcgaccgtcgacgatctcgaggagatcgcggcggacgatgaggccgacgtgccggccctgcgcggttggcgccgcgagctgttcggcgacgccgcgctgaagctgaagcgcggcgagctcgcactggcaatcgagaaaggccgcgtgatcggggtgcagcgggcctagggtcggtgctccacatcgtcatcgcaagcgtaccgaagcaatccagactgttccggcggtctggatggcttcgtcgcttcgcttcctcgccatgacgaggagagagcgagaccttacgccggcgtcagcttggccacttcgcccttcatgtcgttcagcacgcccgagatcgcggcgatcagctcgtcgatctgggccttggtcgtgatcagcggcgggcagatcgcgatggcatcgagcatgttgcgcgagatcacgccgcgctcctggagcatgcggctggcgatgccgccgacggcaccgggcgtgctggcggcgctcttgcgtcccttgtcgagcacgagctcgatcgctgcgatcatgccgacgccgcggacctcgccgaccagcggatggctggtgagctcgcgcaagcggccctgcatgtagccgccgagctcggctgcgtgggcgaccaggccgcgctcctcgatgatcttgaggttttcgagcgcgatcgccgatccgaccggatggccgcccgcggtgaagccgtggccgagcacgccgatcttgttgctctcgtcggcgatcggctcgaacatgcggtcgttcatgatgatcgccgagaatgggaagtagctggaggtgatctgcttggagaccaccatcgcatccggctttatcccataggtctcgcagccgaacatcttgccggtgcggccgaagccgcagatcacctcgtcggcgaccagcaggatgtcgtacttcttcaggaccgcctggatcttgtcccagtaggtcgccggcggcacgatgacgccgcccgcccccatcaccggctcgccgaagaaggccgcgatcgtatcaggcccttccttctggatcagcgcatcgagctcttccgcccgccgcgtcgcaaacgcctcctcgctctcgccgggcgcaccgtccttgtagaaatgcggcgagccggtgtgcaggatgttgggcagcggcaggtcgaaggagcggtgattgttcggcaggcccgtgaggctggccgatgcaatcgtgacgccgtgataggcacgcatacggctgatgatcttcttacgctgcggctggcccagcgaattcgaacgataggcgatgagcttgaggacggtgtcgttggcctccgagccggagttggtgaagaacaccttgctcatcgtgacaggcgcgatcgcgaccagcttctcggcgaggtcgatcgagggcccgtgcgatttggccgagaacgtatggtagaacggcagcgcctgcatctgcttgtacgcagcctcgaccagccgcttctcgttgaagccgagcccgacgctccacaggccggccatcgcttcgaaatagcgcttgcccgccgcgtcgaacacatagggtccctcgccacgctcgatcaccagcggaccagcctgctgatgagcgcgcgcgttggtgtagggatggagctgataggccacatcccgggcctcttgcgaattgggcagcatggacatttgcgcagatccttgaaagcgtcacctcgccggagcagccggcgtcatcactcgatggcacgcaccttggctattgccacagcgcaaaacttgcaacgctaattcgtcggcagcagccgcccagcagcgatgcacaaagccgcacacggccggcccgcgccgcggcagccctcacgccgcgccgtcgtcgtccccaccgtcggtggcggcaccggcttccctcacctccaccagggccatcgagagcaaataggccgtcgtacgaagaccaagcctgcgcgccctctcggcggcacgcgacagatcgttcgccagctccctgagttcgtctccccgtgacaatccctcaccccgtcggcggccacctaaaccgcaacagcgccgctggttctgatcagttcggcgctggactggactgtagcaaaattcccgatgacattcaccaccgcattcctgtaggcggctgcatcatccgtgcccggctgccggcaagccacggcgtcaatgaccacttggtagcggtgactgcggtgaaacccgtcaacggccgtggccaggatggtctcgtccagcgagaagccgatcagaacgcaccgcatcgcccggatactggacatatgatccacgaaccgcgccgagctgtaggccgacggcagtggatgctcgaacgtcatctctcccgggtgcggcttggtttctgcgatccaatcggtcagcctggatgccggattgaaccaagccgcctgtgcgatacgcttcagatgcatcaccggccacagattgctgcgccacagcatcaggagttccaggcagcgcgccattgccgcatcgccgtcaaagatgacatggcggcggccgggggtcagatattcgacctgaagatccgcacagatcaggatcggcggatcatcatggatggacgtcagcattgtgttgcgcagagctgcaccagtttcagcggtcggcgagtgcgaggtcccgcagcggcgaggtcaccgcccgccccgccgaggcatcgaggacgccgggccgatcccaatcgccctcaggacggatgatcacatagggatcgctgtctagcgtgatggcgtccgggccgggctcgatctccagcaacatctccgtataggaaaaatccgagaaggtgatcttgcggttgtgaccgagcggcttggcgccgaaatgggcccagaaatcgaccagccggtcctgcgcctggccatagatcttgcgaaaacccttgcgcttcacatagtcgacactggcctgcaccagcttgaacgaaacgcgtgagcggcggtattggtgccgcactgccaggcgttccaccctggcgaaatcgccgaagaagcgcacccgcaggcagcccgcgggctcattaccgacgaagccgatgaaatgcgcggcgaccatgtcgttaccgtcgaactcctcctcgaagggacaatcctgctcggcgagatagaccgccgagcggatggcggtcaccagcatgagatcatttggatcgcgcgcgaggcggatggtgatcgcgcgggaacaaggcttggcgacaggaatcctagtaccgtgcatctgcaaagctccttgattggatcatcgcgcccggcatgcgcatcggctgccgatgccagggacgctcgtaacaccacaggtcgggttgaaagctcggaacgggcgcaaagcccgtcgccctcatgatgtcgcgtccggccaccgttgagggctgcgcatagcaatccgcgccgcgaaaccttatctgcctgagatgagccgcggccttgccgagaccggcgatgccgcgccccgtggcggcgatcgcccagatgtagatagcagcgacgtcctcgttcgccgacgcgagataacgcgtctccggcgcggtgaggcagatctcgtcgagcagcagcgcatcgtggccgcggtcattgagaaacaagaaggccatgccgccgacgagcttgcctttccggctgaacgtcaaaatgctttgaggatcgagagtgaagtatcgcgcaagctccaccgttccgatctgcacgcccggcaccagccggcgcgccatttccgaaagtgtcgcaatttcggaaaattgcgcacagcgaacgtcgacatccgggctcagcggcaaggcatcgaaatcatgccttgcggcaaacgagcccctttccatactcatatcacgcctctatcgttcgaggctttcgtgccccgctatggccatgagcttagcggctggggatcaggagtatgcagcagttattgcaccggggtgctgcgatgatgcagcaccgtgaagaagccctggatgcgtcctgggacgatttgaagctgtttttagcgtgcgcaaaatacaaaagttttcgcaatgcggccgaagagctcggcctcacctccacgaccctgatgcgccgcatcgaccggctggaagagagcatcgggtgcaagctgttcctgcgcgaccagagcggactcacgctcagcgatgaaggcaccgcgatgatcgccgacgttgcacatatggagcgtcatgccttcaacgtcttccgccgcgcctcgcgatcgtcgagcgacacgtcaggcaccgtgcgcgtcgctgtgacggaaggccccggcaatttctggatcctgccacgactgatcgatttccagaagacctaccgcaagatcacggtcgatctgcgttgcgcgatggagcaggccgacgtcgcgcggcttgaatcggacattgccatccagctcgaaccgccgaccaatcccgacctgatcgttgccaagctcggccgcctgcacatctatcctttcgtctccaaggagtaccagaacctctacggcgtcccggcgacgctcgctgagctgaagaaccatcgcatcatcaagcagagcgcgccgcaggtcgacgacggcgcctatgctcgcgtgctcggattgaactcgctcgagggcatcgtcgggatcaagaccaattcgtcggtcggcgtgctctacgccgtcgagcgcggcgccggcatcggcttcctgccgaccgtgtcgatcgcgctcggcgcgccgctcgtggccgtcgatctcggcgtcagccaccacgccgatctgtggctgacctatcacaaggagttccgcagctccgaacgtcacaagatcgtagtcgactggctgaagaagatcttcgatgccaggacctatccctgcttccgcgacgagttcatccatccggacgcgctggtgccgatgatgacggctgcgcgcgaagggtttggtttggcaggctatgttgcggcgacgccgacctgaacgcaggcgagcgtcggctcaccatttgtattcgaagccggccgtgccctgatgcgaggtcagttcgttgcggaacttgccgtcgtaattgacgtaaagccgtgccacgttggtcaggctgagcgaggccgaggcaccggcatccatgccgtagcggctctcgccgatgccggggacaatgatgctctgggcgcccaggctgacctgaaccgaccccagatcctggtaaaaattgtcgacgaacttgccgtaggccgaaaggtccagaaccttctgctcaatgatgaaatagcggccgacctccgccccgatcatcacacgcgcgcgagagagcgccgttgagccgacgttgagcggggcgaggccgccggcctcctgaaacgcggcgctcgtggcgcgcacatattcgagcgcgcccttgggcacgatgcgcatctggtccttggtccagtaatagctgatctcggtcagcgcgccgtcaacggcggcgcgatagcccgcggtcgcaaggccgaggccggtgtcgcgggaggaatgaaccttgccgaagccgtgcaccacggcaaaggcccaagtccaggggcccttgtcggccgagccgctgaagccgagctgggtcaggtcgagcgttgcggattgcaacgccagcggcacatcgatgtcggtgtggctctggtcgatcgaaaagccgatgttgacgcccggcgcaagccgcgcgccgaaaccggcgacgccgccaacggtcttgcgcttgtcgccgacgaagtcaccttgcgcatccgtccggacagagattccgtagccctcgaaccaggtgcggtagcgcggatcttccgtgctcgcggacgcgccgccgccgccgggattggtgcgaaacgcgcggttgataccgcctgaagcctggttgccgagccgctccaggaaccccgagccgaggttgagcgcgctgttgccggccgactgatcgtaattcgtcgacatcggcgacgggatcggggtcggtgacggcgtgggcgtcggggtcggggtgggcgttgggctttgcgcgaagctcggggtcgctgccgccatcatcacgaccaccgcgaacgccattgcgatcgcagccacgatccggggaacgcggaccagcccgatcgtctgccgtgtcccggagagctgcgcggcgcagcgcatgacgatgaatcccgaagcaaagtggcggcgcgcgaatacaacacgaacccgcggcgcgagcggcgatttgtgccgaactacccgggagcgtcaatcggtcgaagcgctgcgacagggcctattgccttcgattgtggttccgctgccacaggtcgtaaattgcagacgaacaggcccgcatcggccttgaaatccgcgcgcagcttgctcgcgcgcgattttcatgttgcaatgctggacacaatcggaattggccgctgcgctgtgcgtttcgcgacgttgagactcaagactcgaacagacttccggaagcccgcttgtggcgtggcacgcgaaaagcggccgcgtcttttttgtatctagtggaggagactagcgatgccgcaaaagggcaccgtcaaatggttcaacccgaccaagggctatgggttcatcaagccgaacggcggcgacaaggatgtgttcgtccacatctccgccgtcgagcgtgccggactctccaccctcaacgagaaccaggtggttgaattcgacctcgtggagaaccgcggcaaatcatccgcggagaacctcaaggtctcctgatgtcgcgcagcgcgcgggaaatcatgacgttgcccccggctttgccgggggattttgttcttggaggcacccagacgcggagggcgcttcagctcaccaccggcgcaatcagaaaattctccgacgccgcgctgcccgccgtcttgcacacatcgccctcgatccggaccttgccgctcgcgagcagccgcagcgcttcgggatagatgcggtgctcgacctcgaggatgcgttccgacagcgtatccccggtgtcgtgatcgccgacgggaaccgcgccctgcatcacgatcgggccggcatcggtctcggggatcacgaaatgcacagtcgcgccggacaacttcacaccggcgcgcaaggcctggccgtgcgggtcgaggccggggaaggacggcagcagcgaggggtggatgttgagcatgcgcccgtaccaggccttggtgaactcggcggtgaacaggcgcatgaagccgccaagacaaatcagctcgatgccgtgccgatcgagggctgcctgcagcactttctcgaatccggcgcggtccttgccgaacggcttgctctcgatcacctcagtcttcacgccgctcgcccgggcccgttcgagcccgggcgcatcggccttgttcgagatgacgagcgatatctccgccggaaaatccgcagcggcggcggccctgatcagcgcagccatgttggagccgcgcccggagatcaggatggcgacccggcgcttcatcacagcgcccgtcattacagcgccagatcgaggtggccgttatagacgacccgatgctcgccctcggccgggatcacggtgccgagctgcgccaccgtctcaccggcgtcggtgaagacctcgacgacctggtcgaccctatcgggctcgacgatcgcgatcatgccgatcccgcaattgaaggtgcgcagcatttccagctcggcaatgcccgcctgcccggccagccatttgaacaccggcagcaccggcaggcgcgcgaggtctatgccgacgccgaggtgcttcggcagcacgcgcggaatgttgtcggtgaagccgccgccggtgatgtgggcgagccccttcaccgcgccggtctcgcggatcgcgcgcaggcaggacttgacgtagagcttcgtcggcgtcagcagcgcgccgccgagcgtcatcacgggcgcgaacggcgcctgcgccgcgaagctgagaccggattgctcgacgatcttgcgcaccagtgagaagccattggaatgcacgcccgacgaggcgagcccgatcacggcatcgccggccgcgatatccttgcgcggcagcagcgtgccgcgctctgcagcgccgacggcaaagccgccgaggtcgtagtcgccatccttgtagaggcccggcatctcggccgtctcgccgccgatcagggcacagccggattcgcggcatccctccgcgacaccagcgacgatcgcggcagcggcctcggggtcgagcttgccgcaggcgaaataatccaggaaaaacagcggctcggcaccttgcacgacgaggtcattgacgctcatggcaacgagatcgacgccgatgccgccgtgcagcccggtctcgatcgcgatcttgaccttggtgccgaccccatcggtagcggcgacaaggaccggatccttgaagcctgccgccttcaggtcgaacaggccgccgaagccgccgatctcggcgtccgcgcccggccgcgcggtggcgcgcaccatcggcttgatcaggtcgaccaggcggttgcccgcgtcgatatcgacgcctgaatcggcgtaagtgagcccgtttttgcggtcggtcatgcccgatttccagtgggtttgcggctggttacgtcgaattccggggacgcgcaatggctcgcatggcgccccgctctatactatgtagatatcaaccggttcagcctcccaaggggggcggattcgaggtcaagccggggccgggaaagcgctttcgtgagtattccgaacatcattaccctgggccgcatcatgctggtcccgatcattgtctgggccatcgtgtcgagccaaatggaggtggcgttcgccgtcttcctgattgccggcgtcagcgatgccgtggatggtttcctggccaagcgcttcaacatgacgagcgagctcggggcgctgctcgatccgctcgcggacaaggcgctgctggtctcgatctacatggcgctcggcatctggggcgcgataccgcgctggatcgtgatcctggtggtctcccgcgacatcatgatcgttgccgccgtgatcgtatcctggctgttcgaccgaccggtcgagatgaagccgtcgaaggtgtccaagctcaacaccgtggcccaagtggcgttcgcggcgctggtgctggcggcgcttgccttcggcttcaagccggccccttatgatatgatcctgatgggcctcgtcacggtcttcacgctctcctccgtgtcgctctacctcgtcgagtggctgcggcacatgagtacgatcgaggccaaatgagccgggatgcggccccgcaaaaggccaagtctcgcaagatccagtctcgcaagatcaaggtctcgcacgaacaagtgccgcacgatcaagtcgaaccctcttcaaacgggccggcgcgccggcatggagcaaaacaagcgtggcaggccgcgttcacccccgacaattggcattttcgctcccgcatgcggagagcctcagccgggacaacttcctcgaaggccccgccaatgcggccggtctcggcctgatcgacagctggccggaatggccgaaccggatcatgtggctggccggtcccgagggaagcggcaagagccatctcgccgcgatctgggccgaggaggccggtgcccgctcgaccaccgccaatgcgctgaccgccgccggggtccccggtgcgctcgccaccggcgcgctggtcgtggaagatctcagggcaaacgatttcgacgagcgcgccctgtttcacatgatgaatctcgcccgcgaggacggcgcctacgtcctcctcaccggacgcgaggcgccggcctcgctggagatcgagctgcgcgacctgcgctcgcgtctgcgtgccgtgccggtggtcacgctgcagccccccgacgaccagctctttcgcggcctcatcgtcaaattctgcgccgaccgccagctcaccgtggacgagagcgtagtcagctacctcgccacccgcctggagcggtcctcggccgccgcccggcgggccgtggagctgctcgacagcgaagccctgcggctcggccgccccgtcacccgggcgctggccgccgagctcttgcgggacgtctgattggcccgccagcccccaaggcgccttgaggccgcttgacgggaccgaggggcggaacatcaatgtcatcgaaacgtcatcgctgtaacacatgctccccggggttttgcgcataagtcgcaaagtgaggcgagacaggatggaccgacttctaatggactctgcgcaaacggttgaaacgaaagaaaaacccccggaagccgagggcttgccggcgatcgcatccagccccgaacggttcatcaaccgcgagctgtcctggctgcatttcaaccgccgcgtcctggaggaatcggtcaatctcaaccaccccgtgctggagcgggtgcggttcctctcgatctcggcgaacaatctcgacgaattcttcatggtccgcgtcgccggcatcaaggcccaggtgcgcgagggcatcgccgaacgcagccccgacggcctgacgccgtcggaacagctcgcgctgatcaaccgtaccgtctcccagctcgcctccgaccagcaggcgatctggcgcgacctgcgcgccacgctggccgaggtcggcatcgtgctggtcgacggcaaggaggtcaccaaggcggaacgaacctgggtcgaggactacttcctcaacaacgtgttcccgctgctgaccccgctcgcgatcgatccggcccaccccttcccgttcattccgagcctcggcttcaccatcgcgctccagctcacgcgcgccgccgacggcaagcagatgaacgcgctgatccgcatgcccggcaagatcgaccgcttcatccgcctgccggccgaaggaacggtgcgcctgatctcgctggagcaggcgaccaccctgttcatcaaccgcctgttccccggctacaatctgcacggccaaggttccttccggatcatccgcgactcggagctcgaaatcgaagaagaggcggaagacctcgtccgcctgttcgagaccgcgctgaagcgccgtcggcgcgggtccgtgatccggctcgagatcgacgccaagatgccggagcagctgcgcagcttcgtgcagcatgcactgtcggctgccgacgacgaggtgttcctggtcgacggcgtgctcgccatgaacgagctctcgcagctcacccgtctcgaccggccggatctcgaattcaccccctacgtgccgcgccatcccgagcgcgtacgcgagcatggcggcgacatctttgccgcgatccggcagaaagacctcatcgtccatcatccttacgagtccttcgacgtggtggtgcagttcctgcagcaggcgacgcgcgatcccgatgtggtcgcgatcaagcagacgctctaccgcacctcgaacaactcgccgatcgtgcgcgcgctcgccgaagcggccgaagccggcaaatccgtcaccgccctgatcgagctgaaggcgcggttcgacgaagaagccaatattcgctgggcgcgcgatctcgagcgcgccggcgtgcaggtggtctacggcttcctggaattgaagacgcacgcaaaactctcgatggtggtgcgccgcgagggcggcagcctcacgacttacgttcatacgggcaccggcaactatcacccggtcaccgcgcgcatctacactgacctctcctacttcacttcagatccgaccatcggccgcgatgccgcgcgcgtgttcaacttcatcaccggctatgccgctccgagcgatctggagaagatggcggtgtcgccgctgaccctgcgcaagcgcatcatcgagcacattcagggcgagaccgcgcatgcccggcacggccggcacggcgcggtctggatgaagatgaacgcgctggtcgatcctgacatcatcgacgcgctctacgaggcctcgcaggccggcgtccaggtcgaactcgtggtgcgtggcatctgttgcctcaggcccggcatccccggcctgtcggagaacatccgcgtcaagtcgatcatcgggcgattcctggaacatggccgaatctactgcttcggcatgggccagggcctgccgagcgcgaaggcggctgtgtatatctcctctgccgacatgatgccgcgcaatctcgaccgccgcgtcgaggtgttgtgtccgctgcaaaatccgacggtgcatcagcaggttctcgagcaaatcatggtcgcgaacctcaaggacaatgagcagagctggcagttgttgccggacgggtcctcaacgcgtatgaagaccgcgaagggcgaggagcctttcaacgtgcacaactacttcatgacgaatccgagtctgtctggccgtggaaagtcgctcaaggaatcctcgccgcgtcgtctcacgcgccggaacgaacgccatcaatcctgatcggggatctgcgacgtgaagcagccgcgcaagcgcggctcgagcgtcgcggtcatcgacatcggctccaactcggtccgtctcgtcgtctacgaggggctttcgcggagcctcatcccgatcttcaacgagaagacgctgtgtggcctcgggcgcgaggtgcagagcaccggtctgctcgcgccggacgccgtcgacaaggcgctgacctcgctcaagcgtttccgtgcgttgtgccgcgtgatgcaggtcggacgcgtgttcgcgatcgcgaccgcggcctgccgcgacgcctcgaacggccccgacttcatcgccaaggccgagcgcatctgcgcggtgaacatcgagatcctgtcgggcccgcgcgaggcgcggctgtcggcgctcggcgtgatctccggcatccaccttccggacggcatcgtcggcgacctcggcggcggctcgctcgagctgatcgacgtgcgccggaacagcgtgcgcagcggcgtgacgctgccgctcggcggcctcgcgctccaggatctcgcgcataaatcgctcaagcgcgccgaccacatcgtgcgcgaggagctcgacggggtgccgcagctcaccgcgggccgcggccgcaccttctacgcggtcggcggcacctggcgcgccctggcgcgcatccacatcatccagagcggctatccactccaggtgatgcacggttattcgatctcggccgccgaggcgctggacttctcgcgccgtctccggcgcctcgtcgccgccgacatgctcgccgacatcgagatcgtcgccgacgcgcggcgcccgctcctcacctacgccgcgctggtgctcgagcacatcattcgggtcgccaagccgaagaccatcgtgttctcgaccttcggcgtgcgcgagggtctgctgcacgagaagctgtccgaaaccgaacgcggcaaggacgggttgatctgcgcggccgaggagttgaatcagctgctgtcacgctcggccaaacacgcccgcgagctgatcgcatggaccgaccgtctcgtgcgcgtcgtgaagctgcgcgaaagcgaagaggatcgccgcctgcgccacaccgcctgcctgctctccgatatcggctggcgcgtacatcccgaccatcgcggcgaacaaacgctgagcctcgtcgtcaacggcaatttcggctcgatcacccacgtccagcgcgccttcgtcggcctgtcggtgttctatcgctatgccggtctcagcgaggaaaaccagccgccggccacgatgcaggggctgctgccgccggcccagctcgaacgcgcgcgcctgctgggcgccgcattccgcgtcgcgcatctgatctcggcggcgcgtccgggtgtcctgcctgctacccatttccgcagccggggccgcaatctgacgcttgtgttcgagcaccgcctcggcgatctcgtggccgaccgcgtcggcagccgcttccgccagctcgcccgcctgatcggccgcaccggctcgatcgtgaggcgctgaagtgcgaacgagtcgcagatgctggcggcagatcatccgatctgaccgctgctcgtgatccaagcggctcaaggctgtcggaccgatcggcatcagtacagccgtcgtgaaaaccatcgtgtcctgacagcgtcggttgatgcaaatcaacccgccagcggcgcatccgattagcctgctgccacttgttccggactcaagttcgtcatgcaactccaacatgggattcggctttccgtccgcgcccggaaagcggccgtcggcgctctgcttgcgctcgctttgagttcttggccttcggcgccgcacgcgcaggccgaactgaagctgagcgatgcacaggcgcgcaatctcggcgtgcgcctgacccatccagtcgcggtccggacggatctgacgctgccctatcccgttcagatcgtgatcccgacgcagcaattgcgggtcgtgagcgcgcccatggccggcatggtcgccaatctcctggtcgggcgcggtgaccgcgtctccgcaggccagccgctggtgaccctggagagcccgagcttcgtctcccagcagcgcgattacctgcatgcgctcgcacaggagcatcttgccagccagcagctcaagcgcaacatggatctgttcgagggcaaggccgtgccacagcgcgtgctggaggccagccaggctgaagcacgccaggccgctctcgtcgtcgccgagcggcgccagatgctgcatctgagcgggatgtccgacgaggcgatccttcggcttggacaggaggcggccatcagcggtacgcttacggtcaatgcgccgcagactgcatccgtggtcgaggtcacggtatcgccgggacagcggatcgaacaatccgcgccgctcatcaaactggcgcggctctcaccgctatgggcggaaatcgcggtccctgcgacgaatatccgcgcgatccgcacaggcgcgaaggtcgagatcaccggctattccacccccggcaaggtcgtgctggtctccgagaccatcgaccctgccacccagaccattctggttcgcgcggaaatccccaacgatggagagctgcatcccggtcagaccaccgcggctcgcatcggctttctctccgcaggcgaaagcgcgtgggaaattccctacaatgggctggtgcgtcgtggcgagcagacatcggtgttcgttgccacggccggcggcttccggctcgtaccggtcaagctggttgcggaggaccaggaccatgtcgtcatctccggccaccttacggaccaggacgagatcgcgatcggcggcatctcggcacttcgcggcattctctccggactggggcaataaatgctccggcgcctggttgcgttcgcacttgcgcagcgactgttcgtcctgctgagcgtgttgctggtggtcggcgcaggcgccgtcctcctgcccggtctaccgatcgacgcgttccccgacgtctcgccgatccaggtcaagatcatcatgaaggcgccgggcctgacccccgaagaggtcgagcagcgcatcacggtccctgtcgagctcgaactgctcggattgcccaacaagaagatccttcgctccaccacgaaatatgcgctggccgacatcaccgtcgatttcgaggacggcaccgacatctattgggcgcgcaaccaggtgtcggagcggctgtcgaacatcgcgcgtgacttccccgacggggtgagcggaggtcttgcgccgatcacgagccccctgggcgaaatgttcatgttcaccatcgacagccccgagctgtcgctcgccgagcggcggaccctgctcgattgggtgatccgtcccgcgctgcggacagtcccaggggttgcggacgtcaattcgctcggcggttatgtccgagccttcgagatcgtgccgcgcaacgatgcgctcgccgcgcgcggcatttcgtacgacgtgtttcgtcgcgcgatcgaggccaacagccgcaacgacggcgccggacgggtgaaccagggcgaagacagcgctctggtcaggatcgaaggcagcatccgctcgatcgaagacatcaaggcaatcgtcgtcgacacccgcgatggcgtaccgatcctggtcaacgacgtcgcgagcgtcaagatcgggacgctgacccgctatggcgcggtcacgtcggacggcaacggcgagaccgttgaaggcctcgtcctcggcttacgcggcgccaacgccggccagctcgtccgcgacgtgcgtgcccggctcgccgagctgcagccggcactgccgaagaccgtttccatcaacgtgttctacgaccgcagccgcctggtcaaccgcgccgtcggcacggtggtgcgagcgctcggcgaggccaccgtcctcgtcatcgttctgctgctgctcttcctcggcaactggcgggcctcgctggtaatcgctctcagcctgccgctggccatcgtcatcgcgttgatcgtcatgcgcctggtggggatgtcggccaatctgatgagcctcggcggacttgcgatcgcgatcggcatgttgatcgacgcgctggtcgtcgtggtcgagaacatcgtcggccatctcggcaagcaggagccgggcaaaaccgttccactgatccacctggtgtaccgttcggtttgcgaggtgctggaaccggtcgcctcaggggtcctcatcatcatcatcgtgttcatccccctcctgacgctgcagggccttgagggcaagttgttcatcccggtcgcgctggccatcatcttcgcgctcaccggttcgctgctgctggcgctcaccgtggtgccggtcttgacctcctacgtgctcaagtccgcgtcgcatcgcgatcccatgctggtccgtgcggcgcaacgggtctatgcgccggcattggactgggccttgaacaacgagcgcaaggtgatggctgcggcggtgatcggactgatcgccgcgggattggcctatacgaaacttggcaagaccttcatgccgacgatggacgaaggcgacgtcatcgtcagcgtggaaacgctgccctcggtcaacctcgacgagtcgctcgccatgaatgcgagactccaaaaggcactgctggccgtaccggacgttgccggcatcgtcgcacggaccggctcggacgagcttggcctcgatcccatgggtccgaaccagaccgacacgttcctcgtgctcaagccagccgccgagaggcagaccgacgaccgcgaggccctgttgcagaagctgcgcgaggttctgaccggctttcccggcatctcgctcggcttcacccagcccatcgacatgcgggtgcaggagatgatcagcggcgtgcgcggcgacgtcgccgtcaagatcttcggtcctgatatcgccaggctgaacgaagccgcagccaagctgtcggccatcctgtccagcatcgacggtgccgaggacgtctacacgacgctgaacgaaggcgctcaatactacacggttgcggtcaatcgcatggaggccggccgcctcggcctgacggtggattcgatcgtcaactcgctccgcactcagatcgagggcaggacgatcggcaccgcgctcgaggaaggacgccgcacgccgatcctcgtccgcggcagcgagaccacccgggaagcgccgacgctgctggcaaacctgccgctgacgctcgcttcagggcagcatgtcgcattgtcgcaagtcgcccggatccagcgcgtggatggcccggtgaagatcgaccgcgaggacggagcgcgcatgagcgtcgtccgcgccaacatccgcggtcgcgatatggtcggattcgtcgaggaagcgcgccagaaggttgcgatcgagcttccccttccgaacggctaccgactgacctggggcgggcagttcgagaaccagcaacgtgccgccgcacgcttgtccatcgtcgtgcccatcgcgatcggcctgatctttctgctgctcttcaccacgttcggggccatccggcaggccttgctggtgctggtcaacatcccctttgcgctgatcggtggcgtcttcgcactggtcctgacgggtgagtatctgtcggtgcctgcttcggtcggtttcatcgcactgctcggcatcgccgtcctcaacggcgtcgttttggtatcctacttcaaccaactccgcgcccatgggttgagcgaggaccgcatcgtcgtcgaaggtgccatgcgcaggctccgtccggtgctgatgaccgcgagcatcacggcgcttggcttgatcccgctgctgttcgcgtccgggccaggatccgaagtgcaacgaccgctcgccatcgtcgtgatcggcggactgttgtcctccaccatgctcactctgattctcctgccgatcctgtatcgccgctatggcggagcgccgaaggtggcgaaatgaccgatcaaccggtctgtctcaccctgatcgtaccggaccagctccgcgaggagctgctcgactatctcaccgaccagaccgatctcgtttcgggattcacggcagcgcccggtgccggtcacggcgccggggttcgattgcagacggccgccgaacgcgtgaaggggcatgccgaccagacggcggtgcagatcatcctggcgaggagcgatgccagcaacttgctcgatcggctgcgagcctcatttggcggtaccaagctcgtctattggatcctgccggtgacggagttcggcacgatcgattgaccgcctcagaaatccgtcgccatcgacaagagcagggttcgcggcgcgccttgcgccagcgcggagaagctcgccacgccggaccaatagttggtatcacggaggccgcgaatgccgtcgggctggagaccccggcgagcgctttgacggcggacgccagaatggcaatgggagggcaaatgactctcgacgacatctcgcggcggcttccggtttgattgataccggagcgaggtgccgcgggaacagccggcgagtcaaagaaagtgtgtttattttcagtagcttagaataagataagatctaaacatggggagaagcgcgcgactggctgccgaatatagccgcgcggcatctgtagatcgctgccgtcaaattcactcggccgaggccctggcgtggtgctcggaagattcgagggctgtccgcatcaggctgcggcggcgccagatgaaaccgaccaccagcacgacgatgacgccgagcaccgcacagaaatattcgccgcctcctccgccatggccgaactgcggcggaatgcgcagcgcgccgagcatgccgtcgagggaggcgccgagcgggccgtcgaacagcgtgtgcagcttcggcgcgatgcctggatcggtcgcgatcacctcgcctgcgacccagccgagcagcgctgcaccggcccagaccaggaccgggagcttcgcgaggagcgccatgatcagcgcggcgccggccacgatcagcggtacgctgatggcaaggccgaggatcaagagcggcacgctgccattggccgcggcggcgacggcaatgacgttgtccagactcatgacgatgtcggcgaccacgacgatctggatcgcgtgccacaaatgcgcgcccgattcgacgtcgtcctcgtcctcgttttccggcaccaggagcttggccgcgatcacgatcagcgcgagaccgccggccagcttgaggtacggcaggcccatcaggctggcgacgatgccggtgaagatgatccgcagcatcacggctgcgccggcaccgaagatcatgccccagagccggtgccgcggcgagagaccgcggcaggccagcgcaatcaccagcgcgttgtcgccggagagcaggatgttgatccagatgattttgccgaccgcaatccagaaggtcggttcggccatctcgttgcgaaactgggtgaagaatgccccgatcgtagcgggatcgaagatctgccagagccagcccacaattaatcctttcgccccgtcgtcctaacctgtcgcctgacggatcagcccacgatctcgttgcccgagaagaactgcgcgatctcgatcgcggcggtctccggcgcgtccgagccgtgcacggagttctctccgatcgacttcgcgtagagcttgcggacggtgccctcggcggccttggctggatcggtggcgcccatcacctcgcggtacttggcgatcgcgccctcgccttccagcacctgcaccacgaccggacccgaagtcatgaagtccacgagctcgccgaagaacgggcgcgccttgtggacggcgtagaaggtctcggcctgctccctggtcatgcggatgcgcttctgcgcgacgatgcgcaggccggccttctcgatcacggcattgaccgcaccggtcagattccgctcggtcgcgtcgggcttgatgatcgagaaagtgcgttcgatggccataatcttgtccttgggagaaaagcggtggttcggagttgcggggcttatatcggcgcctttgccatccggcaagcgaccgcccgtacggccgcaatcgcttccgtcggaggacggacgctcgattcagcatggatgacaacaatttcaccaagatgaacccagtctgaaaccgccgtcagggttcggttcagctttagtggcataaggtcggcccatcgaaaccgaagcctgatcgtcaggcggaccgtttcggcggctttcccttcggcgcgatggccccgcgccggcagtcttgaggagatcaccatgtggaggaaactttcgcttgccgccgtcgccgcggtcgcgctgggtgccgcactggcgccgacctccgcatccgctcattggcatggcggatggcgtggcggctggcaccatggccacggctggggcggaccgcgcttctatgtcggaggtcccgtctcctacggttatggcggctgctatgtgcgccggttggtcccgaccccgtggggaccccgctggcggctgatcaaccgctgctactaagaccgtcagcaccttcccgaggtacctgagccccccgggtacctccaagagaagccccggcgcccccctcgccggggctttgccttgcacggacaaggtgcgcttcatacaatttttgcgagaatgcccaccattccccacagtcggcgaaaccaattggctagcaatgacttggtacggtgtccttactttgagaacacggaacccgcgatggctggcctttttgccaacgacagcgaacagatcgaccggcgcaccagccgctcgatttgcgacgccgtgggcgaacggctccagcagagtctgcgacccgagcctcgccttccgacgcacctcgagcagctcctcaacgccttgaggcagcgcgagcgcgagccgcattgacggaaaaacgagttgcgttcgaggcgccttgcggtgacaaggccgcatgcttctcatcaccgacctctccatccgtctcgccggacgccttctgatcgaccagagttccgtgcagatcacgcccggcgcgcgcgtcggcttggtcggacgcaacggcaccggcaagtcgacgctgttcaaggtgatccgtggcgagctcgctgccgagcacggctcggtgaccctgcccccacgctggcgcatcggcagcctcgcgcaggaagcgccgaacggccccgagagcctgatctcggtcgtgctcaaggccgacctcgaacgcgacgcgctgctaactgaagccgagcacgcgaccgatccgcaccggatcgccgagatacagacccgcctcgtcgacatcgacgcgcattcggcgccatcgcgcgccgccgcgatcctctccggcctcggcttctccgccgcggatcagctccgcccctgcgccgagttctccggcggctggcgcatgcgcgtcgcgcttgccgcaacgctgttcgctgcgcccgacctgttgctgctcgacgagcccaccaactatctcgacctcgaaggcacgctctggctggaggatcacctcgcgcattatccgcgcacggtgatcgtgatcagccacgaccgcgacctcctggaaagctcggtcgaccagatcctgcatctcgagcgcggcaagctcacgctctacaagggcacctattcctccttcgaggagcagcgcgctgcgcgcgaattgctcgacgcgaaggcgatcaagcgccaggaggccgagcgcgcgcgcctgcaggccttcgtcgatcgcttcaaggccaaggcttcgaaagcgcgccaggcgcaatcgcgtgtgaagatgctggaacggctgaagccgatcaccgcgctggtcaccgaggacgtgcgcgagatcagctttcccgcgcccgagaagatcctgtcgccgccgatcatcgccgtcgacaatgcctcggtcggctacgatccggcaatgccggtgctgaaccgcgtcaccctgcggatcgacaatgacgaccgcatcgcgctgctcggcgccaacggcaacggcaagtcgacgctcgtcaagctgctggccggacgtctcgcgccgttctccggcaaggtgacgcgagcggacaagctgtcgatcgcctatttcgcgcagcaccagctcgacgagctcaacgaggacgcctcggcttacgaccatgtccggaagctgatgggcgatgcgccggaggccaaagtgcgcgcccgcgccggcgcgatcggcttctccggcaaggccgccgacaccaaggtcggcaaattgtcgggcggcgagaaggcccggctgctattgggccttgcgaccttcttcggccccaacatgatcatcctggacgagccgaccaaccatctcgacatcgacagccgcgcggcgcttgcggaagcgatcaacgaatttcccggcgcggtgatcatggtttcgcacgaccgctatctgatcgaggcctgcgccgaccggctctggattgtcgccgaccgcaccgtcaccaactacgatggcgacctcgacgagtaccgccgcctcgtgctgtccgcgcgcaacgcggaagcgccgcgcgaacgcagcgcggcaaacgacaagccgcagcgaccgaagtccgacaatcgcggctcgctgaagaagcgcatcgccgaagcagaaaccgagatcgcccgcgtgagcgagatcatcgcgaagatcgacaccgcgctcgccctgcccgacatcttcacacgcgatcccaagcaggctgcgcagctgtcaaaggcccgcgccaatgccgcggaggcgctcgcacgagctgaagagcagtggctcgaggcgagcacgcaatttgatgaggcggcggggtagctagcgcttggtgccccggagcggaggcaaagcgaaagcgacgcgccgcagagcccgggacacagagagcctaagcagacttcttcctcggcttcgctgccctcggcaccggctgcggttcgggattgccttcgatcgaggacaggcggccggaggtgaacgtgtagatgcccgcgcgcgggccggtggcccaggtgacgaccgcgacgcgccggcccgcggcatcgttggaaagattgacggtcgagggcgcaccgatgccgcgcaccacgtcgcattcggtgtggccgagcgcgactgttccccccatcggcgcgggtgcagtcgtcgaggcattggcatcggccggtccgggaggcggcgtcatgccgggacaggcgccgtcggcgctgacgaggtcctcgggtccgaccggcttatcgggcgtcagcggcggcgactcgatcgagatgttcttgatgaagagccggccgggcttctggaaccatgctgcgtccttcgacaacagatcggtcccgcccgagcagcccgcgaccagcggtgccacggcggccaacgtaatcatgagcgagccgggaagcttttgatgtcgcacgataaactaattccccgcgtgaaggaccagccctaaacgattgtcccaacatccctttgcggcacgaaggtggccgaagccagcatcgctcgaaaagtgcaaattatcattaattgcgaacggcggctaattgcgcttctgccaccggccgcgctcgtcggcctgccaataggtgacatcaaatccccgcgccttgcaatccgtccagaccgtgcgggcaatcgccagcgcgtccggatcgtcgccattgaacagcagcaccatgcgctcgtagccctgtgcgtcctcgggcaacgcggcgttgtcgatcaggaagcggacattggcgccgttgggattgcccccctcgatcgccagcacgatgggctgatcggcggcgtcgttcacccgccacgtcgcgtgcggcaggaaggaatcgtcgcgataggtccacagatgcgcgtcgagcgcatcggcgcgctcctcagaagtcgactgcaccacgacgcgccagccgcgctcgagcgatttctcgagaagcggcggcaacacattctctaccgtcatgtcttgcagatggtagaacagcacttcagtcatttcaggtcatttgcgctcataatggtcggagaccaggcgatcgagcaggcggacgccgtagccgcttccccagctctggttgatgtcggtcttcggcgcgcccatggcggtgcccgcgatgtcgagatgcgcccaaggcgtgccgtcgacgaagcgctggaggaattgcgctgccgtgatcgagccgccgtggcggccgccggtgttcttcatgtcggcaaactgcgaatcgatcagcttgtcgtattcgggaccgagcggcatccgccagaccttctccccgctctcgatgccggccgtgagcagccggtcggcaagctcgtcattgttggagaacatgccggcacgctcggtgccgagcgccaccatgatcgcgccggtcagcgtcgccagatccaccatgaatttcggcttcacctttttcgccacgtaccagagcacgtcggccagcacgaggcggccctccgcatcggtattgatgatctcgatggtctggcccgacatcgaggtgacgatgtcgcccggccgctgcgcgttgccgtcgggcatgttctccacgaggccgatggcgccgaccacgttgaccttggccttacgcgcagcgagcgcatgcatcaggccgacgacgcaggccgcgcctcccatgtcgcccttcatgtcctccatgctgccggccggcttgatcgagatgccgcccgtgtcgaagcagacgcccttgccgacgaaagcaaccggtgcctcgcctttcttgccgccgtcccagcgcatgatcacggtgcggctcggccgtgcggacccctgcccgacgccgagcagcgcgcccatgccgagcttctgcatcgccttgacgtcgagcacctcgaccttgacgccgagcttgcggagctgagccgcgcggcgcgcgaattcttcgggaaagagcacgttcggcggctcgttgacgagatcacgcgcgatgatcactccgtcgatgacgtggccggccgagacaaacgccctcttcgctgcaccggcatccccaaccgcaagcgagatgtcggcgcgcaggccgccctcctcgccgtccttcttcctggtcttgtaacggtcgaacttgtagctgcgcagccgcaggcccgaggcgatcgcaacggcctgctcgctggtcatggcaccgccgggcagctccgccatgatggtcatggcgctggcgccggcgggcagcttgctggcggccacgccgccgaacttgaggaaatcgttcgccttcaggccggtcgccttgccggccccgatcacgatgagccgggtcgccttcacgccctccggggccagaatgtccagcgcagccccgctcttacctttgaaggcggcggcggcggccgcgcgcttcacgatctcgttggcgccccccagcgccttggtcgtggccgggccgagtttcaggccatcgtcgcagaacacgaccacgatgccacggggggcggcagacaacgggacaaagccgaccttgatggcatcggacatggatagctcctccaaaacatgggcttatcgcgatcggacgccccgcgcgcaggcgtagctgaacggcgattcactggacattgtccactatgggccactcgcccagcagatgccaagcacccccgtggccgccgggccacaacacgggaaatattaaccatataatgacggcgccacggggcagccattttgttgacggatcaaagggatgctagtgagagaatagcgtggcggaagaggtttcgcccaaccttggggatccccgtcggggattggttgggcggcacgggttccggccggcatcggggtcttggtgggattcgtgcggtagcgcatggggtcgatcgacaggtatatcttccgcacgacgctggcgtcgtttgcgctcgtcctggtcagcctcaccggcgtgatctggatcacgcaggcgctgcgcggcatcgacctgatgacgagccaggggcagaccatcctcaccttcctcggcatcaccagcctcgttatcccggcactggtgctgatcatctcgccgatcgcgctgatgatcgcgatctcgcacacactgaacaagctcgcgactgattccgagatcatcgtgatgaacgcggcgggcttctcacccttccggctgttctatccgttcttctacgccacctgcgtcgtggcgctgctggtcgccttcatcgcggcctatctcgcccccgacggcatgcgccggatcaagcagtgggatgccgagatcaccgccgacgtgctcaccaacatcttgcagcccggtcgcttcgctcagctcgacaagaacctgacgatccggatccgcgaacgccagcccggtggcattctcgccggcatcttcatcgacgaccgccgcgacccgaacgagcgcgtttcgatcgtggccgagcacggcgagatcgtgaagaacgagaccggatcgttcctggtgctggagaccggcaatctccagcgcttcgaggccggcaagcgcgatccggcactggtggccttcggccgctatggcttcgacatgtcgaaattctcgggccagggccgcgacgtcaccctcggcatccgcgagcgctatctgtgggagctgttctcgccctccgaggacgatcccgtctacaagcagattcccgggcagttccgctcggcgctgcacgacagcatcctcgcaccggtctatcccttcgttttcgcggtgctgacgttcgcgttcctgggcgcgccgcgcaccacccgccaaagtcgcaatttctcgatcggctcctcgatcctcgccgtgttcggcctgcgcatggccggcttcgcctgttcggtcatggcggtgaagtcgccgggcgcggtgctggtccaatacgcgatggtcgcaggcgggatcggcatcgggctcgccatgatcatcggcggcgtggtggtcgagccgcctcctggcctgatggaggcgatcaacagatcgaatgcacggatcgcgcggctgttcggacgtccggccgccgcatgagcatgctcaccaatacgctcgggcgctatttcgccggccgcttcgtggtcgcggcgctcggcgtgttcggcggcattttcctgctgctggtgctggtcgactacatcgagatggtgcgcaagacctcgggcctggcatccgcctcggcgatcatggtggccgagacctcgctgttccgggtgccgcagctcctggagaagctgacgccgttctgcatgctgatcggcgccatgacgtgctacctcgccctctcccgccggctcgagctcgtggtggcgcgcgccgccggcatttccgcctggcagttcatcgcaccggcgctcggcagcgcgctgctgatcggggtgatcgccaccgtcgcctacaatccgatgtcggcgaacctgcgcgagctgtccaagcgcatggaggccgagctgttcggctcggcgcccggcggcggcatccaggacgcctccggcttctggctcaatcaggtgaccagcgacggccagaccatcatcaatgcggcgcgcagtgagcagcagggcatccgactcacggggctcacgctgttccggtttgacccggaccagcacttcaaggagcgggtcgaggcacgcgaggcgacgctcgaggccggccgctgggtgttcaagggtgtccgccgcttctcgctggacgcaccgcccatcgaccaggccagcctggagattccgaccacgttgaccgaggcacaggtccgcaacagcttttccacccccgagactgtgtccttttggcaactaccgagctacatccgctcctccgaaagctcaggcttcgcgacagccggataccgactccagtatcagaagctgctggcgcagccgtttttgctggcggccatggtgatgctggcggcttccgtatcgctgcgcttcttccggatgggcggcgtgcagaagatggttttgagtggcgtgggcgcaggctttctgctctacgttctgtcgaaagtaactgaggatttgagcaaggctgagttgatgcatccgatcgctgcggcgtggctgcccgttgtggtgggcggcctcaccggctttttggccttgctctatctggaggacggatagtgactgccgtccgccgagggctcgtgtctcgtttgacgcggcgcacatcagtgcgcgcgaacgggtgcggtttgtccgtccgcagactcctgattgctgccgtcgctgcggcctcgctcggcgggctgatcgacgttgcagccgtgacgccgtcccacgcccagtacacgtataacccgctgccgccgcgtccgaagccgccgagggcccccaacgacaaccagatgctggttcaggcgaccgaggtcaattacgactacaacaactcgcgcgtctccgcggtcggtaacgtccagctgttctacaacggcacgagcgtcgaggccgaccgggtcatttacgaccagaagaccaagcggctgcacgccgaaggtaacatccgcatgacggatgccgacggcaagatcacctatgccgagatcctggatctctccgacgattaccgcgacggtttcgtggattcgttgcgcgtggacaccgccgaccagacccgcatggccgcgagccgcgccgaccgctccagcggcaactacaccgtgttcgagaacggcgtctacacggcttgcgcgccgtgtaaggacgacccgaagaagccaccgctgtggcaggtcaagggtgcgcgcatcatccacgaccagcaggagaagatgctgtatttcgagacggcacagatcgaattcttcggcgtgccgctcgcctacatgccttatttctcgacgcccgacccgaccgtgaagcgtaagtccggcttcctgatgccgggttatatttccggcaccgacaacacgggctatggcgtcgaggttccctattattgggcgattgcgcccgacatggacgcaaccatcaccccccgcttcttgtctcggcaaggcgtgctgatgcagggcgaattccgccagcgcctgatcgacggcgcgtaccagatccgcgcttacggcatcaaccagctcgatcccggagcattcgccgggctgcccggcgaccgcgatttccgcggcgccatcgacaccaagggtcagttcgcgctgaacgacaaatgggtctggggctgggacggcgtcctgatgtccgactattatttcttctcggactaccggctctaccagtaccgcgatccgctcggctcgttcctgttgctgccgacggaagcgctgtcgcagctctatctgaccggcgtcggcaaccgcagcttcttcgatgcgcgcacgatgtactggctgagctattcgggcaaccagagccaggtgccgatcgtctatccggtgatcgactactccaacgtgctcaattatccggtcttcggcggcgagttcagctacaagaccaatttcgtgaacctgtcgcgtgacgaggcggtgttcgatccgatcacgacggtcgccaacaccaacagcctctgcaccacggcgtcggccgatccgctggcccggatgccctcgcaatgcctgctgcgcggcttcccgggcacctacacccgcctcacggcggaagcgcagtggcgcagatccttcaccgatccgttcggccagatctggacgccgttcgccagcctgcgcgccgatgcgatcaactcctcggtctccaaccagcccggcgtatcgaactacctgcccgtcggcgacacccaggcgttccgcctgatgccgaccgtgggcctagagtaccgctatcccttcatcaacattcagccctggggctcgaccaccgtcgagccgatcgcgcaggtcatcatccggccgaacgagacctatgccggcaggctgccgaacgaggatgcccagagcctggtgttcgacgcctcgaacctgttcagcgtcgacaagttctccggctacgaccgtgtcgagggcggcgggcgcgccaatgtcggcgtgcagtccaccacgcagttcgataggggcggtgccgtcaaggtgctgttcggccagtcctatcacctgttcggcctgaactccttcgcggtccaggacaccatcaacaccggcctcaattccggccttgacaagccgcggtccgattacgtcgcgagcgcaagctactcgcccaacagcacctacacattcagcatccgctcccgcatggacgagcagacctggaacgtgcagcgcttcgaggcggagggccgcgccaacttcaatcgctggtcggtcagcatgctctacggcaattacgcgccgcagccggagctcggctatctgacgcgccgcgagggcatcctgaccacgggctcgctgaaggtcgctgccaactgggtggtgtcgggctcggcgcgctgggacctcgaggccaacaagatcaaccagtatgtgctcggtgccggctatgtcgacgattgcttcgtgctggcggcgaactatgtaacttcgtataggtattccgcgggtaccgcaccgcccacgctgagccacgcgttcatgttccaaatcggtctgcgcacgctggcgaactcgtcgacgaccagcagttccgccggcctccagtgaacggtttgaggtgccggccgcgtttgccccgtcaacgcgactgacatgcgagcgacatcatgatgatcccattgcctgtcttccgcctccttctcgctatctgtgccggactgatgctgaccggcctgccctcgccattgcgcgcgcagaacatcgtcgtcatggtcaatggcgatccgatcaccgatttcgacatcgagcagcgcaccaagctcacccagctgacgacgcagaagaccccgagccggcaggaggtcatcaattcgctgatcgacgacaaggtgaagctcaaggaaggcagaaagtacggtgtcgatcccggcgtttccgacatcaaccagtcctacgagggcatggcgcagcgcatgcgcatcacgccggaacagctcaccaagtcgctcgaatccaagggcgtccgcccggagacgctgaagggccgcatgaaggccgagatggtctggaccagcctggtgcgcggccgctacaaggagcgcctccaggtcggcgagcgcgacgtcgcgcaagccgtgcaggcccagaccggcgagaaactccagatcgagggcaccgagtacaagatgcagccgatcgtcctgatcgtgccgcgcggctcgtcggcgacgttcctggaaacgcggaagaaggaagccgaggcctatcgcgcccggatcggaagctgcgaggaagccaactcgctgtttcgctcgaccccgaacgccaccatccgcgacaccgtcaccaagaccacggctgaactgcccgagccgctgcgcaaggtactcgacgatacgccgatcggccacctgaccgcgcccgagatgaccaagaacggcatcgagatggtggtgctgtgctcgcgcaagccgaccatgatcgacacgccgaaaaagcgcgaggttcgcgagaagatgtatcaggagaagtacgagaagacccagaaggcctatctcgaagagctccgcaaggcggcgatgatcgaatatcgcaaccgctgatggccgagccttcttcagagcgcccggcaaagccccttgccctgaccctgggagagcccgccgggatcggccccgacatcacgatcgcggcctggctcaagcgccgcgaactgaacctgccggccttctacctgctcggcgacgaggacctgatcgcgcggcgtgccaaggtgctcggcgccaacatcaggatcgccggggtgagccccagcgatgccgcttccgctttcactgacgcccttcccgtggtcgcgaccggcgagcgcgcgagcgccgagcccggcaagcccgacacttccagtgcgccggccgcgctcgcctcgatccggcaggcggtcaccgacgttcgcgcgggtcgcgccggcgccatcgtcaccaaccccatcgcaaagagcgtgctttaccgcgccggcttccgtcatcccgggcacaccgagttcctcgccgagctcgcggcggagaacggccgcgtgccgcagccggtgatgatgctgtggtcgccacagctcgccgtggtgcccgtcaccatccacgtctcgatccgcgatgcgctgggagaactcactagcgagctgatcgtctcgaccgttcgcatcgtcgccaccgcactgaaagcccgcttcggcatcgcaaagccgcgcatcgcggtctcgggcctcaatccgcacgccggtgaggacggctcgctcggccacgaggagcagaccgtgatcgccccggcgctgaaggtgctgcgcaacgacggcatcgaggtcaggggcccgctgccggccgacaccatgttccacgcggccgcgcgacagacctacgactgcgcggtctgcatgtatcacgaccaggcactgatcccggtcaagacggtcgccttcgacgacgccgtcaacgtcacgctcggcctgcccttcgtccgcacctcgcccgatcacggcaccgccttcgacatcgcggggacggccaaggccaatcccgccagcctgatcgcggcgctcaagcttgcgagccgcatggccgcttcccaaggctgatgagcgcgatcgacgacctcccgccgctccgcgaggtcattcgccagcatgccctctcggcccggaaatcgctcggccagaacttcctgctcgacctcaacctgaccgcacgcatcgcgcgcgccgccgcaccgctggacgaagcgaccatcgtcgagatcggccccggcccgggcgggctgacgcgcgccttgctcgcgcttggtgcccgccgcgtcattgccattgagcacgacgagcgcgcaattccggcgttgcaggatatttccacacgctaccccggtaggctcgagatcgtgcatggcgatgccatgaccttcgatccgcgcccgctgctctcgggcgaacgtacgaagatcgtcgccaatctgccttacaacatcgcaacccagcttctcatcaactggctcaccgtcgagccgtggccgccttggtacgagatgatggtcctgatgttccagcgcgaggtcggcgagcgcatcgtggcgcgcgaggacgaagaggcctatggccggctcggcgtgctcgccaactggcgctgcgagaccaagatcctgttcgacatttcaccgtccgccttcgtgccgccgccgaaggtcacctcttccgtcgtgcgtctcgtgccgcgcccagaacccctgccgtgcgatcgcaggctgctggagcaggtcgcagccgcggcgttcggccagcgccgcaagatgctgcggcagagcctgaagccgctgggcgtcgatcccgcgcggctcgcgcaagctgcgggcgtcgatgcgacgcggcgcgccgagacaattccgatcgccggctttgttgccatggcgcgtgaattggcggatatacgcagcgaaacgtgacaatcagaatttcggaggaagaaatatggcgctgatgcgcaggcaatccctggtcaagttcgatgcgcccttgtgcgagaccatcgtcgacacgcccaagccgcaaggccgcgaggtgctggttcgcatcgaacgctgcggcctttgccattccgacctgcacatccaggacggctatgccgatctcggcggcggcaagaagctcgacaccacgcgcggcatgacgctgcccttcacgctcggccacgagatcgccggcatcgtcgatgaagtcggccccgacgtgccggcaagcctcgtcggcgccaagaaggccgtcttcccgtggatcggctgcggccagtgccgcgactgcgccaacggcgacgagaacctttgtgtgaagcagcgcttcctcggcgtctccattgacggcggcttcgccacccacgtgctggtacccgacgcgaagtatctgctcgactacgatcccctccccgtcaaccaggccgcgacactgatgtgctccggcgtcaccgcctacggcgcactcaagcgcctggtcgatcgcccgcgccaacgcaatctcttgctgatcggcctcggcggcgtcggcatgatgggcctgtcgttcgcgcaggccatgttcaagcagccgatcaccgtcgcggatctcagcccggccgcgcgcgacaccgcgctgaagaacggcgccgccgtcgcgtacgacccagccgagcccgacgtgatcaagcgcatcctcaaggagaccgagggcggcttcgacgagatcgtggatttcgcgggcaacgagaagtcgatggccttcgcggtcgcagtcgccgcgcgcggcggcaagatcgtggtctccggcctgatgggcggccagtttaccctgcccatggtgcaatgggtctataagcgcatgaccatcgaaggtttcatggtcggcacgttggccgaggcgcacgagctgatggcgctggcacgcgccggcaagatcaagccgacgccgatgcgcgaggagccgatgggcgatgtccagaaatggatcgacgaattgcgcgccggcaaggtcgtcggccgcatcgtgctgaagaactgactgacgccagcggcgggcctggcacaagtctcgcccgccgcacggaacgcctgcgggcccgccgcgttggcagcgcatgtctattcgctgtaccgtcgaaagcgcattctttatcgcctggggctgcctggagaagagcggcgagctcggcccccccgacgcgagcgcaaatcttctgctcgatgccatcgaagcgcagctccggaccggcgagcgccgagacttgatgctcgccaacaaggccatcgatgcctatcgcgcgcacgcggcacaagaccgatccttgcgggactgcgaagcgcacttcggataatgttcgttgccgcccgtcgggccctccggccctagcggcgttcggctgtagccgtgatgtcagcgatcgcccaagatcccggaagccgaaagcgaaagttttgtaacggctgaacatccgttgtgtgcactttggaaccgtcggttccgccgcggaaacgtaggttgcacgctggcgccgattcccggccccaagagaacccaacgtgaccggtcggccccagaacgatctgctccggcagctcaaccatcaggatttcgagctgctcgcgcctcacctccagccggtcgaagtcgaaacgagccatatcctgcaccacgccggagacggcatggctgcagttcattttccctgcggtcccacgctcgtgtcgttcgccgtgccagtcgaggacgatcgcgaggtcgagagcctgctggtcgggcgcgagggagcggtgggcattgcctccggccgcaccccttcgctcgcctattcgcgcatcgtcgtgaagctcggcggcacgctcttccgtctgccgctccgcgcattcgagcaggcgcagcagaggtcggcgacactccaggagtccttctcgcgctatgccgactgccagttcgcgcagttgctgcagaccgcagcctgcaacgcggcacactcgatcgagcagcgcgctgccaagtggatcatctcggcccaggaacgtgtcggtggcgccgaaattcccctcacccatgagcagctcgcaggcatgctcggcgtctcccgcagctatgccagccgcgtcatccagatgttcaaggcaaggcgcatcctcgcgacccgccgcggcgccatcctgatcctcgacgcggcagcgctcgaagcaagagcctgctcctgcaacgactgggtgaagaagcatttcgacgaagtgctgggcgcggcaattgccggcggttagcaatcctccaacgtcacgcccgcggcgacgactgccgcttaaggtgcagataggccggactgaaatcgccgagccgctgcagctcgcgccatttcagcacgacgagctcgccctcgcgcaggtccatggctccgctccgccgaaggtcggcgagtgtccggttcaccgtcgcgatcgccatgcccagcgtctcgccgagttggcccaggctgatcggcacggggcagcgattgccgcggaccagttgcgccgcgcgggcgcggtagaacagctcgcagaagaggtgcgccatccgcgtctgcatggaccgggcgctgttgttggtgatggcctcccgaaagatcgctgcgtcgagcagcgtctcacgccagacggccagcccaaagttcggccgccgccggaacgcgacgaacaattcgcgatgcgggatgaacgcgaccgtggccgggccgagcgcactgagcccgtgatccatctggtcgatgaacaggccctgcgcatccggcaggtcgccggtgaggtgaaacgccaggtattgccgccgcccgctgccgagcaggtggtagcgcgcgaccatgccagagaccaccagcgccgaatgctcgggttcgtcgccctggcggatgaaatcctcattggggtcgaaatcgcgcagcgtgaaggtgagcgcgcggatctccgcgatatcctcctgtgcgagttcggtgtgctcgccgaggttccggatcagcacgtcttgggctctttccatggggccgccaaaatggcgccggtctatcaaatgatacgtccggctcgggttcagcggactagaacgcggatcggaagcacaggttgctagccgaccagcgccccatcagtcgcatcccgttccgttgccctcgacgcgagccgagccgcccttcatgagccctacgacgatcctggagcgcatccgtagcctgttcccgccccgggcgagcgagcacctcgacagcatcggcgatgccttcgagaacggcatgatgaaggagccgatccggccgatgtccgatcaggaactcgcccgcgccatccgcgagttccgcgccgcgccggcctccgactggaccatcgcaaaactctcgcggcgctccgtcggggcgtcggtgccgcgggacgcctgaaccagcacgcgagactcatgccgtattcgaagttcatcgcgcgtctccaggcgatcgaaggcctatcggaggaggaacgccggcaggtggccgccctgccttctgcgctgcgccaggtcgccgacggcgagatcgtgctgcgccagggcgagtctgcctcgcgctgcgtgttcgtcgtcagcggcttcctctaccaggcgcgcatcgtcggcgaccgcagccagatcctcgcgttccacgttcccggcgacatgccctgcctgcacacgctgctggtctcgccgatggatgcggatctggtcggactcggaccgaccatcgtcggcacggtcgcacacagccagctcaagcagttgctcgacgactccatccatctgacccgcgccttctggcgcgagacgctgatcgacgcggcaatctcgcggcaatggatcgcgcgcctcggcgcacaggcagcgctgcccaaggtggcacatctcatctgcgagctcgccgcaaggctggaggtcgtcggccttgtcaaggacggctgcttccagatgcctatgacgcagcgccacgttgcggacgcctgcggattgtcgatcgtccacgtcaatcgcaccatccaggagctgaggcatcgtgaattgattgcctgggaaggcagcgaaatcgagctgcttcagtcggatgagctgcgcaggttagcggatttcaggcctgactatctgagctgagcgcgcgtagacgtgtgattacccccctccacgcggctttgtccgccaggcgctgagcagcgtgccgccgctccccatcacgggatccgtcttcggcctccgaaccttcgcgatgccgcccggcggggcaatgaagaaatccggctcgaagacaatcgtgtagccgaaccgcggctcgccgccgcgccggcgagccgaacatcgcggcaaggatgcaaatggccgactcatcccataggagagcttgacgcccttctcgtatcgctgatgattgcgtcgcgtggtcatttggctatagttggccattggctctttcgcactgcgcatgagtggatctgagcatctcgatcatctgattggccgcatctacgaggccgggctggtaccttcattgtggcccgaggtcctcaatgaaatcggtatcgccgtcggcgggaatggcggcctgctttttgccgtacgcgacggctatgtcagtgggatcaattccgccaaccacgaccagaccatgccgcttttcctgaaggagggatggagcgagcgtgatccgttgctgccgcgtgcggccgcactcaaccacgccggcttcctcgttgatggagaccttctatcggagcacgagattgcgaccaacgacgtgtattgcagtttctatcgcaggcacgggatcggctacagagccgggacaatcattccaatcccgagcggcgattcgatagcgatcgtcatgccgcggcatcaggacaatgggccggtgccgcgcgacgtcgtcttgtttctggatgacttgaggccgcatctggctcgggcgtccatgaccgcaaaccgccttggtttcgagcgcgctcgcgcgcaggccgatgctttgcaggcgatcggcctgcccggagcgatattgcgcgaaggcggccgattgctcgcggcaaaccgcctgttcgaagcgctgatgccatcgctatttcatgaccgcgccgaacggttgactttgaccgatgctgccgcggacgggttgttcttggcagcgctggcgacttcgtccgttgctggcagtcggatcgtcaagtccatcgccatcgcagcggcgatggatcgcgtaccgatggtcctgcatgtcatcccggtgcgcggatcggcgcgcgatatcttcacgcgagccactttcatgctcgtcgtgactcccgtcgatcgcggcgcggtaccgagtgcggaagtcctccaagggctgttcgacctgacgccggcagaggcccaggtggcgcgtcgcgttgcacaagcggaatcgctcgacgcgctcgccgcggcaatcggcgttgcgcgagagacagtccgcacgcagctcaaagccgtgctttcaaaaaccggtctttcgcgccagcaggagctcgtcagcctgctcgcaggcaaggcattgcgcggcgactagacagatgttgctgtgcatcaaaccgggatgattttgcaccggcttctcgcgggttgcgaagtccgctggctttgaagtctgtccggtctgatcccagcacgcgtcagtctggactaggtttgccttggtagaccaagccacttcttcacccatttgggtgaagacacaacccggcgctgtggatcaagtctgtccatgctgaatgtttgacgagaagcggcggcgatggtcagacccgagttcccgacatttgaagtggtcctggtgcagcgcaggaggaagtgggcctggaacatctgcaccagccaaggagtggtcgtggtgcacgggcgtgaaccaaatcgacgtgccgcaaagtaccaagccgaaagagcgctcttcatgctgcttctgaccgcgccctaccggtcgcgacttcctgtctagcgaggctcgcattcaagtccccggttggcggtcgtccaggctgaatggggcagcggggcatagatcggcggccccagctttccgcgccgctcggccttgatcggacaatgaaccacagcaggcggaacctgccgcgcgcctgtgggaagtcatggccgtcgacgagcgatcggaggtggaaacctattggcgacgatcatcatcccgcttaggaaccaaagccgcgcaggcccgattcaagccacatcgtctccggatttgcggctcattgccacccaactctttgaccagaaggggctggttgagagttgcgtcatgcgtaaccgggagaccaggatgggcaaccgcgccgcaaagttgatttctaccctcgtcgccagcatcgttgcgggcgcgccattagccgcggtgtcgcagaatgcgccaactgcttcgagcatggccaacgcggcccccgactgtctcgccgcgccgaaggacgctgcgcctcaggggcagcactggtactaccgcctggagcgcacgaccaagcggaaatgttggtatctgcgcgctgcgggcgacaaggacagcgcgaggaccgtgcagaccgcgcaggtcgcgagcgataatgcgacgacggatgcgccagtcgcgcagcagcagccgcagcagcagcagcaagcggtgcaggacgcccgggccgaatatctgaccccgcggagcggcgccgcctcgaaggcgccgaacgcacctccgcagcctgccgccataatgccggtccaacaatcgacggagcaggccgctgacggcaacgcccagcagcccgccgccaccacgccctggcccgatgtgtccacggcgcccgctccgcccgcgccgccgccggcaccaaccgtggtcgcggcagctgcgcagccgagcgcaaagccgtcaaaatccctgcccctcagtgcgcccgctgcggcggacatcgccgcggacaagtcgaacggctcgctccagatgctgctgctcgtgatcggcggcgcgcttgcgctcgccggaatcctcgccagcgtcatctaccgcttggccggggcgcgcgtccgtctgcagtccactgaccgtcacgcctattgggacgattgggagccgcaggatcaggacgccagccgcgcgccctggcgcgatgcggcttcggcgaacacgctgccaccgcgccccgtcgacttcgatgcggcacgtccgcgagcggcaaagcaggcgacaaagctcgccgcgatcagccgcgagatcgcgcttgtcgacgcgcgcaagcgccatgctgccgccccgaccgcagagccggagcagacgagaagcgaggagatcgaggtcaagcggctcgaacgcgaattcgagatcggggctgcttcccccaagctcgccgcaaatgagagaggcgagaatcgcaatgaggcgccgacagctcgcggcgccgaggccgtcgacatcgacgtgatcacgacgatgctggaacagctggcgaaggaagggccgcgcctgtcgcgacctaaccttgaagctgaccttgcaaacttcgaacgaagcctacgaggccgatccgccgctcgcgcttgaggcgttcggccttcaggatcgactgcacctcggcaaaggcctggtcgacgtcgtgattgatcacgatgtagtcgtactcggcccagtggctcatctcgtggctggcgcggctcatgcgcttgcggatcacctcgtcggaatcctgcgcccgcgaatgcaggcgcttctcgaggtcggccgccgaaggcggtaggataaagacgcgaacgacgtcgacgctcgctttctgatgcagttgctgtgtgccttgccagtcgatgtcgaacagcacgtcctgcccagccgccagcgccgcttccactggtgcacgcggcgtcccgtagagattgtcaaacacgatggcccattcgagcagttcgccctgctccaccatcatctcgaacttgcgcttgtcgacgaagaaatagtcacgcccctcgacctctccgggccgcttttcgcgcgtggtcgccgacaccgacatcttcaggccgggctcccgctcgagcaacatccgcgacagcgtcgtcttgcccgcgcccgagggcgaggacagcacgaacatcaatccgcgccgctcgacaccgtcaattccgtgaccgcccgtcgtcatcgatcactccagattctggacctgctcgcggaactgctcgacaacattcttcaatgcgagtcccgtgttggtgagctcgatgtcgttcgacttcgagcagcaggtgttgacctcgcggtgaaactcctgcgccaggaagtcgagcttgcggccgatcgggccgcccctgccgatcagctcgcgcgcctgcgcgatatgcgaagcgatgcggtcgagctcctcgcggatgtcggccttggtggcgatcaggatcgcctcctgcatcaggcggtcggaatcgaaacgatcggaagtgtcgagcagtgcggcaatctgctcggcgagcctggccttgatcgcctccggctttcggccgggcgaaccttccgctttcttcgccagctgctcgatctcgtcgacgcgctgggtcaggatctgcccgagcgaggtaccctcgcgcttgcgcatctcgacgagctcgacgagcgccttgtcgaaggcgtcggccgcagcggcacgcgcggccctgtcctcttcctcatcgccctcgggctcggcaacttcgaccacacccttgatggcgagcaacccgtcgatgctcggtgcgacggcgtcgacctttccggcgatcagcgcggcggccttcaggacggcgttgagcacgtcctcgttgacgcgcacgctggcggcggcgttggtgcgcttgacgttgagattggcatagacggttccgcgcgagagcagctcgccggcgcgcttcttggcgtgggcctcgagttcgtcgaagccctgcggcagccgtaccctgaggtcaaagcccttggcattgaccgacttcaattcccattcgaacgtgtacggcccgctcgcaccgtggcttcgggcaaagccggtcatggacgacagcgccatcagttcagattctccaggaacacgggattcgcgaggccatcaaggcacgcgaatcttaagactattttgccggaaagtggaatccgcaatgtccgcaggtaaggggccgcagacctagcgctgcaccacgggtggcgaggactgcaccgcgccctgccgagccggtgcaggattggccgggcgcgccgccggcggcctcttctgctggttgggtcgcgccggcgttgtcgccgtcggcgcatcggcggcgccgcccggcgcggcagcggccggcggctgcgcctcctcggccggttcgaccgtgtcgttctggatctgcttctctattgcgcgcagcttcgcaacgttcttctggtgcgcatcgtaggtctcggtgaacgcatgcccgccggtgccgtccgcgacgaaatagaggtcccgggtgcgggccgggttggcggcggcctcgagcgaagcgcggcctgggttggagatcggacccggcggcaggccctcgatcacgtaggtgttgtaaggcgaaggctgcgtgatctcgctgcgcttgatcggccggcccagggtgcccttgcctccgacgagaccgtagatgatggtcggatccgactgcagcttgatcctctgcttcaggcgattgacgaacaccgcggcgacccggctgcgctcatccggcttgccggtctccttctcgacgatcgaggccagcgtcaccaattgctccggcgtcttgatcggaatgtcctgattgcggcgttcccagatctcggccagcacgcgcttgtgcgcctgctgcatgcgctggatcacctgctcgcgcgtggtgccgcgcgggaatttgtaggtctccggcagcagcgtgccttcgcgcggcagctcgcgcacgctgccggtgaagatctcgttgtcggacagacgcgccacgatctgctcggaggtcaggccttcggggatcgtaaccgcatgctgcaccaccttgccttcgacaatggttgcgatgacgtcgcgcagcgaggcgttcttctggaaggaatattcacccggcttaaggtccgagctcgccttcagcgcggcgacgctcgcgatgaacacccagggattgacgtcggtcacgccttcccggttcagcgtctcggcaatgtcacgcttgccggcacgctgcgggatgttgacgatcttgtcctcttgcagcggcccgggggcttccaacacctgccggccgtaataatagacgccgccggcaccgagcatggcgatcaagagaagggtgatgatggcgttgccgacgaccacgagcggattgcgtgcgcggtccgaccgcttgggcggcggcggaagctgctcaggctcgagcgctgcccgcgggctccggggcgaaatgggcggcctttcactcatcgaaacaacctgaatcctgccggttcaatcgcggcctgacaaacccgcttgccctgccaaaatgcacgcgcccacgtccatgactatcgccgaatacggcaaaacggtggattcgtctcaaacgcaactaacttgccaagcgccggacgatgaccgacgcattggtaccgccaaaaccaaaagagttcgataatgcgacattgacctcacgttgcttcgccttgtgcggcacgagatcaatcgcagtctcgaccgagggattgtcgagattgatcgtcggcggcacgacattatcgcgaatcgcgagaatcgcgaagatcgcttcgatagcaccggccgcaccgaggagatgacctgtcgacgacttggtcgaggacatcgcaactttcgatgcggcgttgccgagcagacgctcgaccgcgccgagctcgatctcgtcgccgagcggcgtcgaggtgccgtgcgcgttgatgtagtcgagatcggaggccgtgagtccggcgcgcttgagtgctgccgacatgctgcggaagccgccatcgccgtcgggcgatggcgaggtgatatgataggcatcgccggagaggccgtagccgatcacctcggcgtagatcctcgcgccgcggcgcctggcatgatcgagttcctcgagtaccaggacgcccgcgccctcacccatcacgaagccgtcacggtccttgtcataggggcgcgaggccttctcgggcgtctcgttgaaacctgtcgacagcgcgcgcgcggcgttgaagccggcaatgccgatgcggctgatcggcgactcggcgccgccagcaaccatcacatcggcatcgccaagcgcgatcaggcgagcggcatcgccgaccgcgtgcgccccggtcgagcaggccgtgaccaccgaatgattcggccccttcagcccatgcgcgatcgagacatagccggaggcgagattgatgaggcggcccggaatgaagaacggcgagacccggcgcggcccgcgttccttgagcaggatcgcggtctcggcgataccgttgagaccgccgatgccggacccgatcatcgtgccggtcgcgcatttgtcctcttcagtctccggatgccagttggcatcgtcgagcgcctggccggccgcggccatgccgaagatgatgaagtcgtcgaccttgcgctggtccttcggctccatccacttgtcgggattgaagctgtcgttggtcccgtcgccgcgcaccaccgtgcaggcgatcttggtctgcagatcggagacgtcgaagctctcgatcctgcgcgcaccgctttcgccgttgaggatgcgtttccaggtcggctcgacgccacagccgagtggcgaaaccatgccgagacctgtgacgacgacccgcctcatatccgaaaactccgcatcgaaagattcacggccaataacaagaaaccggctgaccgctgcgaagcggcccgtccggtttcaatgttcttccccgcgaaatgaaagagccttagctcttcgcgttcttctcgagaaatttcgtggcgtcgccgacggtgagaatcgtttccgcggcgtcgtccggaatctcgcaaccgaattcctcttcgaacgccatcactagctcgacggtgtccagactgtcggcgccgaggtcgtcgatgaagctcgcgttgtcgacaaccttctcgggttcaacaccaaggtgttcgaccacgatcttcttaacccgctcgccaatgtcactcattgcttaacctcgtgttgttccctgtagacccgaccccccgggacgatacgagccgtcgtggtcgtttgactgccttcgcttacgaactttgattggcccatcccaaccgatgcaggcccgggcgaacgacggccaaaggctccgcatcgccaatatacagggtttcaaaaacctgcaatggcgttctttgcccatccgttgatggtccggttatcatacttcaattgccttgactacaagcctcatttcgctccggaaacggccgtttgccgcatcccgccccgccccgacgcgcgagacggcacgaagcatcagatcatggccatgccgccgttgacgtggatggtttggccggtgacataggacgcctcgttcgaactcaggtagacggcggccgccgcgatgtcctcgggcgtccccaggcgggcggccggaaccttggtcagaatcgtttcacgctgcttgtcgttgagcgcatccgtcatcggcgtcttgatgaagcccggcgcgatgcagttcgcggtgacgccacgcttggcgtattcggcacccaaggtcttgatcataccgatcaaccccgccttcgacgcggtgtaattgccctgcccgggattaccggtgacgccgaccaccgaggtgatcgcaataatgcgaccgaagcgcttgcgcatcatcagcttggtcgcagcgcgcgccaggcggaaggtcgcagtcagattgacgttgatgacttcgtcccagtcctcgtcacggagttgcacgaagagattgtcgcgcgtgatgccggcattggcgatcagaatgtcgacctggcccattgccgcttccgcagccggcaccagcgcctcgacctcatcggccttggaaagattacagggcagcacatgcgcgcgttcgccgagcttgccggcaagctcgtccagcacttccttccgcgttcctgatatcgccacggtggcgccttgcgcgtggagcgcctgtgcgattgcgccgccgatgccgccggtcgcgccggtaacgagcgcctttcggccagtcaggtcgaacatcgatacaactcctctaggcctgcttcgcagcggccaatgcatccttggcggcggcaatgtcgttggggccaccgaccgcaacgccaacggcgccgtcggcaatacgcttgacgagaccggtcagcaccttgcccgcgccgatctcgaagaaatgggtgacgccccgccctgccatataggcaaccgactcgcgccagcgcaccgtgccggtgacctgctcgaccagacgacgccggatctcgtcgggatcgttgatggcgctcgccagcacgttggacaccagcggcgcggccggtgccttgatcgcgaccttcgacagcgcctctgccatggcgtccgcagcgggctgcatcagcttgcaatggaacggtgcggagacgggcagcagcatcgcgcgcttggcgcccttggctttggcaatctcgacggcgcgatcgaccgctgtcttgtcgccggagacgaccacctgcccgccgccattgtcgttggcggcctggcagacctgcccttgcgccgcctcgcctgcgacctccatggcggcctcgtagtcgagaccgagcagcgcggccatggctccggcaccgaccgggacggccttttgcattgcgagaccgcgcgtgcgaagcaaccgggcggtatccgaaaccgtcaggctgccggccgcggccagcgccgaatactcgccgagcgagtggccggcgacgaaggctgcgtctcgtcccacggaaaaaccagcctcagcctcgagcacgcggagggtggcgatggataccgccatcagcgccggctgggcgttctcagtcagctggagagtttcagccggaccgtcccagatgacagccgtcagtttctccccgagcgcggcatcgacctcgtcgaacacggcgcgcgcgaccgggaaggcgtcggccagggccttgcccatgccgaccgcctgggaaccctgccccggaaatgtgaatgcagccgtcatcggcgctccctgcttgtcaggcatgatccctgcgagaaccagcagccgattacgcacggcctcggaccatggttccggatcatgctccagagggggccgtagacaccgtccggggccgcactgtcaagccgagacgggagcttggcccctcgttcaacgggggaatgcgcccgctcaaaacccgccggcggtctggttggcgtcgacctctgccccggcctgtgcgcggcgcgcactgctgacaagttgcccgggccgatcttcgcggttcggctttgccgtcgccagccgcagcaccgcggcgtagttcggctggacttccatacgacctgcgtaccggctcgcactcagcagacgatgcaccttcggcagattgtagcaaggcacgtagaacaagagatgatgctcgaggtggtagttcacgtagtagggcgcgatgaacaggcgctcaagaaaattggcatgcgtcgtgcgggtgttgcgcaacgggtcgctgctgtcgggaacaacggcatgctctgcgatattgcggatccgggtgatgaccatcatccaggtcaggagcggcaccagccagagcagtggataggcccaccagacgcccgccgcggcgagcgccacaagcatgatcgcattgaccacacattgcgggccaagcttctcccagaaatgcgccgcacgctggcgccagggccagtctttcggcccaagcgcgttgagcaattgcgccttgcgctgctgataaccggtctggccggtgatgtcgcgaatgaacttgcggcggtagctgatcttggtgatgggaaacggcgccgacagcacgaggtcgggatcgtcctcctgctgcgtgcgcgcatgatgctgcaggtgatagcgccggtagctgcgcgtctccgcaaacagcggatatgcgcagaaccactggctcagcgccagattggtcttttcgtcggcggacaggcagccatgcgcaccgtcatgcatcaggatcgcaaggccaagctggcgcgagccgatgatggcgacggcgacgatgtaggtgatcggattgggccaccacgcaaccagagcgatcgcaccaatgatcagcgcccaggcgtgcgcaatgagtgcgacgcccttctaggtgacgcgctggcgcacgtcggccagttgatcatcggtcaggaaatcccgggcacgcatgcgaagcgcggtcatggcctaaccctctccgttcgaattgcttgatgcatcaggctcctcgacgagacgcaggcgccccgtgtcgttcgcggatttcgcctgctctccgagcacgcgcaacatctcggcacaaagctgctcgggcgaacggcccatcgcgtaaccctcgagaatgacgccgatggcgacggcccagaatctccgcgaactttcgtcgggcgcccggagcgagcgccaaccgtgccgtgcgacctggctcgcataggcgcgcgcgccttcgccgtgcaggcgctcgatggtacgctcgaccaggggtgcgagatcctggcgccgacgcgtcagtgtcaatgcttccgcgaagaaggcgaccgaatcgctcgccgtcacggtctccgccagcgtgcgtgtgtattcctggggcgagcacgcctgcagcgccgtccgctctgtggcgcgcgccaggtacagcaattcgcggcaggcgcattcgacgaacagcgcctccttggtgcggaaataataggtgatctggctagggaaggcgttcgcggcggtggcgatatcggtgatcgccgtccccgacaacccccgctcgcgaaacagcgggctcgccgcatccaagagcagcgatcgcatcttgcgcccggccgagcgcgtcgcgcgcgcggtatgcttaggatcacccgccgcctggagcggctcctgggccgaggtttccgccatgaaattctctttgctgcattatttgtatgatatacaaacaaacaggtcaagcgccgatccgcatgaaggaaggtccggtgttgagcgacgagcgggccgaaaatgcccgcccaaccttgcaaagccggccaaaatccgtataaggcgcgcatccgcagaccccggccgggagctgaacggacggtctcagcaaatcattcgtgattttggtgtggcagggccagtcggcccgtcgtcccgtgtttccgccttctgagcttgatcccagagtcctttccgaaggtctcttaagggcttgacgccgggtgatgcgccaacatgaggaaaggacgtccatgcctctttacgagcatgtctttctcgcgcgtcaggacgcgagcccgcagcaggtcgaagagctgactgcgcagatgaccggtattgtcgagggtctcggcggcaaggtcaccaagaccgagaattggggcgtgcggtccctcacctaccgcatgaacaagaaccgcaaggcgcacttcgtgctgctcaacatcgacgcgccgtccgcggcgatcgccgaaatcgagcgccaggagcgcatcagcgaagacgtgatccgttatctcagcgtccgcgtcgaggagctcgaggaaggcccgtcggccatgatgcgcaaggccgatcgcgatcgggaacgtgatgaccgtggcggcggcttccgcggcgagcgcgaaggcggcttccggggcgaccgcgagggcggcttccgcggcgatcgcggtccgcgccgtccgcgcgacgaagctgaaaccacggatggggagtaagaccaatggctgaagctggtgcacgtcgcccgtttttccgtcgtcgcaagagctgcccgttcacgggcgccaatgcgcctaagatcgactacaaggactccaaactgctgatgcgttacgtgtccgagcgcggcaagatcgtgccgagccgcatcactgccgtgtccgcgaagaagcagcgtgaactcgcccgcgccatcaagcgcgcgcgcttcctgggcctgctgccctacgtcattcgctgatacaagccgatccgaccggcggccgctcggccgccggtcgtcactttctgaactcataaggcttccgggtcgtccggtcgccgatggttggggcgaacgatgcctctaaccgctcgaagggagcgggacagctgatgatggcgtttgcactgatagccctgatcgccggcgcggcgtcggccctgatgttcgcctcgatagcgtcgggcgcgctgatctcgctcgccctgttctacctcgcgccgctgccgctcatggtcgccgccattggctgggggccgctctgtgccagcctcggcggcattgccgccgcgatcggcctcggcgcgctgttcggcctcccctactgcatcgccttcgccgttaccgtcgcgttgccggcctggtggctcggccatctcgtcctgctcggccggcagttgggaagtgccgcgccggagggcacaaccgccgggccgccgacggaggcgaaggtcgagatcgagtggtacccggttggccgcatcctgctctggatcgcaggcttcgccacgctgacgacgatggctgccttgctcacgctcggcaccgacgccgaaaccatcatcggcacgctgcggcgcggcctgatgcgcctcctccgcaccaccgatccgcaaacctcgggcgaggccagccagttggtggacgcgctggtgcgcatcgccccagccgccgccaccattgtcgcgatgatgacgctaactctcaacctctggctcagtgccaaggtaaccgcgacgtcgggccggctgcgccgtccctggcccgatctgatggcggccgagctgccgccgatgacgctggtggcgctctgcatcgcgctcgccttttccttcaccggcgggctgctcgccatcgtcgcgcagatcgccacggccgcgctgctgatggcttacgcgctgaccggctttgccgtgctgcatacgctgacgcttgcgttgaagggccgcacgttctggctcagctcggcctacgccgtcgtcgtcgtgttcggatggcccatgatcgcggtggtgatcctcggccttgccgattccgtcttcggcttccgcgagcgcttcctgcgcagccggcagccgccacccctgccgaccccttaagtcaccccgaaactcaacctacagaacacttcaaaaggagaacggatatggaagtcattttgctggaacgcgtcaacaagctgggccagatgggcgaagtcgtgaaggttcgcgacggctacgcgcgcaatttcctgctcaagcgcggtaaggcgctgcgcgccaccgccgataaccgggccaagtatgacggcatgaaggccgagctcgaagcccgcaacctcaaggccaaaggcgaggcgtccaaggtcgccgagaagatcgaaggcaagaacatcatcgtgatccgccaggcatccgaagccggccagctgttcggctcggtcaccgtgcgcgacatcgtcatggcgttcgaaaccgacggcgtccacctcgaccgcccgcaggtgcagctcgacgcgccgatcaagaccatcggcaagcacacggtcacggttgcggttcaccccgaggtcgaggtcgagatcaccgtgacggtcgcccgcagccaggacgaggccgagcgcatcaaccgcggcgaggacatctcgacccgcaacgaggaccgcgacgcagcggccgaagcgattgccgctgccggcgagttcttcgatccggaggcccagcaggacgaagtcgagccggcgccggccgcggacgagaagtaagcggcacgtagaactcgtcatgcgcggggttgacccgcgcatccatcacgcgagcgtccgcccaagaagatggattgccgggtcaaggcccggcaatgacaacagagaatggatcagcccggctgcctcaggcggccgggcttttcgttttgccggcaacgtcctcgttcagcatcgcgatggatgccagcgcggtggccgtatgcttctcgacaccatccttgacgcagaacacatcggccgccaccaccgcgacctgacggcccggcttgatcacccgggcacggcagatcagcttttcgccgactgccggcgacaacaaattgagcttgtattcagccgtcagcgccggctggccgcgcgaagtggccgcagcgatcgtcgtggcgttatcgaccaggaaggccgtaacgccgccatggaagaagccgtgctgctgcagcagctccggccgccgctccactgcgatcgtgcaggtcccgcgtgacaattctgatagctccgcgccgaccaggttcatgaagccctgccggccgacattggcgtggatgcgctcggaaatatgcgcgaattccggatcagcttcggctcgcatgcagtctctcctcattgcttgatgatgcggtcgaatggccggagcgcacggttggcgcaggcgatcagcgtgtcgaccccgttgcgcggatcagtgcggtcgcgtcccgagaggaaggcgcggcagaagatctgcgccgggccaatcagctggcttatgaacatcatcggcggcatcggcaggagttcccccctcgcgaccaacggcgcacgccagcgctcgatcccctcggcaagtcgcgcattctgtgcgcgctgggcgtcgcgcacgtcgtcggcccattcgccacgcgaaatctcgaagaggtaccgagcttcgcgccggctggtgacgacccagtcaaggtgcgcccggatcaggcgatcgataccctgctcagcatcgggaatgggatcgagcgcggccagcatcgcggcatgatagtgccgcaagacttccagaagcagcgcaccggcgagctccttcttcgagccgaacgcgtgaaagaagctgccattggaggcgcgcgcacgggtgcggatagcggccacggtcgctgcctcgaagccgacgcggtcgaacaccatcagtccggctgccaaaagatcgtcacgcacactcgtccgcatcgacgcctcctagagttcaactctagagcagtactctaatggcggtcaagacaatatggaggccgcgatcaagcggcctccacatgtcaatccagagaacttagcgcgaaatcggcggtgccggcggaccggatgacgcagccggcgccgcgggcggggcggcaggagccgcgggctccgcctgcgccggcttggccgcaggttcggagcttgccgcaggtgcagccggcttggaagcagcctcatccgccggcttgggtatcgccggttcggcgggcttcgctgcggcaggtgcagccggcgtcacttgcggggccggctcggatcgcaaagccggaggctcgctgccgcgcggctcgactctcgggctctccggcttggtctccgctggcttctcggcagccttgccgctgtcgggctcgactttggcgccgtcgggcttgacggtctctggcttcggctcgctcttcttgtcctcggtcgccggcgcggcggcatcggccttcggagcatcttgggtgcccggcttaacccgccgcttgcccttacgtgcctcgggcgcttcctgtccctccggctgcgagccgtcctctgccggtggccgtgcagcgcgcttcggtcgcgggccatcaccggccggagcggcaccctcgccctccggcctggcctcctgcgagcgctggcggcggccctgatgctcaggcgactgacccgcagcggcgccgtccttcttgccgtccttggcctggtagcgggtgtcggtggcgccgttggagatcagataggtcgcaaggacgcccgccatgtccgagctcgtcgtgtaatgctgacgcaggaagcccggcagcgagcccggcgccacagacttcagaagtccgcgtgggctcttgtggcagacattgcaggtctgagcgaaaagctgggagggggtcttgccggcttcgagattcgtcggctgcgctagaacggaatcggccactgcgaagccgatcagaagcaataccgtcgcgaggctgagcgctcggctcgacatcccatgatctccaatgaattccgcaaaacgcagccggcaaatggcgcggcgcggtcaccttttaaccgattgagccgcgaatggaagcaggcttcccccgcgcgaggatgtgatcgaggcattttcgaatatcggctttgaataccgcgcaatggcgcggccccaaccgcctcgctagatttgcatgcaaacgcataggaaccgctgcggcgcctgggcgtgggatgtgaaagccgggttagtcgcatctttcgggttcgctcgagaggaaatgtcgatggaccgtttgttgcgtaaattcctgtctcaattcatccgccgcgggtcgatgacggtgacctgcgcaagcggatcgaagttcaccgtcggcgacggctctggcgagccggtcgcggtccgcttcgtcaccgcggacgccgagcggaaggtcctcgtcaatccagagctcgggctcggcgaggcctatatggacggcgagttcgtcgtcgagcgcggcacgatagcagatgccctcgccatcctgctcgatcaacccgacctattgccgcagtgggcaaaaccgtggtggcacctgcgctacctgacgcggcacctcaagcagttcaatccccgcgcccgcgcccgccacaacgttgctcatcactacgatctcgacggccggctctattcgctctttctcgacgccgacaagcaatatagctgcgcctatttcgaaacgcccgagatgtcactggacgacgcgcagcttgccaagaagcggcacattgcagcgaagcttctcatcagggacggccagcgcgtgctcgacatcggctccggctggggaggtctcggcctctatctcgccgagatcgcgggcgccgacgtgaccggggtaacgctgtcgaccgagcaattgcaggtagccaatgctcgcgcggctgagaagggcctgagcggctcggcccgattcctgctccaggactatcgcgacatcgacggtacgttcgaccgtatcgtctcggtgggaatgctggaacacgtcggggcaaggttctatgatgcctatttccagcgctgcgccgaactgctggacgaggacggcatcatgctgctgcacgcgatcggccgttcgcagggtccggattcgaccaatccctggatcgccaaatacatctttcccggcggctacattcccgccctctcggaggtgctgccggcgatcgagcgcgcgggcctgctggtcaccgacatcgagatcttgcgcctgcactatgccgagacgctgaaggcctggcgagagcgcttcatcgcccggcgcgaagaggccgtgcagctctacgacgaacgctttgccctgatgtgggagttctatctggcggcctgcgagatgacgttccgcaagcaagcgatgatgaacttccagattcagctgacacgccgtcagggcgtggtgccgatgacccgcgagtacctcccccgggaggaagcactgctgcgggcgcgcgaaggcgcgacccagcccaggctcaagctcgctggtgaataggcccaggccccttgttgaaggcgccaatggtcgaaatccgagaggaccgcaaagaggccgttaacgccagctgcgcccgcaactccaacaggatttcgggggcgaccggctgacgacgcacctcggggcgttctgcttgcttcatggccgcgatcaacccggacagccaatgccggctgcctgcctcgcttcgccagttctggtgctgccgttctggccgcatcgctcgcctcgtgttcgttccggcgggattgggacaacctccggcccgcctgccggttccggcataatccccgaaagaatccggggagatgtgatctgcttcacataaatcgggtcgggcttggcttagaccgtcgccatgagcaaagagacccgatcctccttcgatgtgcaggacgacctccgcaccgatttcgccctgatcgtcaccggcgtcggggctgccgtggttgcgctcgtctacctcctcctggtctgagctggagccgaacgcggccagcgggcctcgtttcacgcgcttctgataggtctgcgcgcccgtctacagggttcatgggtttcaggatttttccgcggcccaccgcagcttccgagaccggcgagttccacgaaagtccgtcaagcacggcgcgtgccgggactgccagtcatccaccattttcactgagcggttgatagcagtcagctttcgcttccgctttcgcctgcgtcggcgctttatcccggccccgcatccgcccaagaaaattgctaactacgtccgaccatggccctgactgattcgaacgttctcaaactcgcgcccgatgccggaactccgacctatcggagcgcgccgcacaatattgaggcggaacagagccttctgggcgcgatcctggtcaacaacgacgccttctaccgcgtctccgatttcctggagccgaagcacttcttcgagccgctgcaccagacaatcttcgagaccgccggcagcctgatccggatgggcaagatcgcgacgcccgtcacgctgaagacgttcctgcccgccgataccgacgtcggcggcatgaccatcgggcagtatctggcccggctcgccgccgaagccaccaccatcatcaacgcccaggactatggccgcaccgtctatgacctgtcgctcaggcgtgacctgatcggcatcggcgaggacatggtcaatgtcgcctatgacgcccccgttgacttccagccgcgggcgcagatcgaggacgccgaacgcaagctctacgaacttgccgagtccggccgctatgacggcggcttccagaagttctcgcaggcgctgacggtcgcagtcgatcttgcggcgaaggcattccagcgcgacggcaagctgtcgggcatctcgacgggcctgcgcgacctcgacaccaagatgggcggcctgcaggcctccgacctcatcatcgtcgccgggcgtcccggcatgggcaagacgtcacttgccaccaacatcgcctacaatgtcgcgcaagcctacgttccagaattgcaggccgacggcaccatgaaggccgccaatggcggcgtgatcggcttcttctcgtgcgaaatgtcggccgaccagctcgccacgcgtatcgtcgccgagcgcaccgggatcccctcctcccacatccgccgcggcggcatctcggaagccgatttcgagaagatccgccaggtctcgatcgagctgcaatcgctgccgttctacgtagacgcgaccggcggcctttcgatcgcgcagctgatggcgcgcgcgcgccggctcaagcgccagaagggcctcgaccttctggggatcgactacatccagctgctcgcgggctcgggcaagcgcgccagcgacagccgcgtgcaggagatcacggagatcacgaccagcctgaaggcgctcgccaaagagctcaacgtccccgtgattgcgctgtcccagctgtcgcgtcaggtggaatcgcgcgacgacaagcgcccgcaactctcggacctgcgcgaatccggctcgatcgagcaggacgccgacgtcgtgctgttcgtgttccgcgaggaatactacctcgccatgaaggagccgcgccccggcaccgaggagcacgccaaatggcaggccgacatggagcgcacggtgggccgcgccgaagtcatcatcggcaagcagcgacacggccccaccggcacggtggagctgcacttcgatgcatcggtcacgcgcttcggcgatctcgcgcatgacggccaattgccggatcgcaccgactattaatctcgtcgtgctcagagttccgcgggttgaaccgcgctggcctcttgcgtaaaacggcgccatgacaatggcgtccgacccgaaaacgaacccgcaatccgggcctctctccgcagaggccaatcaagccgctgcgctcgcggcctatggtggcgtgctgaccgtcgatctcgacgcaatcatcgccaattggcgcaagctcgagaagaccgcggtgccggccgaatgcgcggcggtgatcaaggccgacgcctatggctgcggggccgagcaggtgtcgcgcgccctcagccaagcgggctgcaagaccttcttcgtcgccaccatcgaggaagcgcgcaaggtgcgcgcggcggttccggagcccacgatctacgtgctgggcgggtatttccagaacaccggcgaacactatgcgaagatcaactgccgtcccgtgatcggcgatctcaacgagcttgccgaatgggacgtattctgccgtcgcaccggctggaacggaggcgccgcaatccacatcgacaccggcatgaaccggctcgggctgacgctgtcggaagcgcaggccatcatcccccgcatcaacgccggcgaccacggcatcacgctggtgatgagccatctggttgcggccgagcagctcaacagcccggtcaatgcacgacagcttgcggccttccgcgccatcgccagcgaattctcgggcgtgccggcggcgctcgccaattcctccggcatcttcctcggcgcgccgttccagttcgacatggtgcggcctggcgccgcgctctacggcgtcaacccgacgccggaagccgacaatccgatgcagcaggtcgtcgacctcaaggcgcgcatcgtgcagatccgcaccatcgagcgcggcgagacggtcggctatggcggcacctggaccgcaaggcggccgaccaagcttgcgatcatcgcggtcggctatgccgatggctatttccgcgcggccagctcgaacgatggcacccgcggcgccgaggtcatcgtcgccggcaagcgctgccccgtggcgggccgaatttcaatggacctgatcgccatcgacatcaccgacctgccgccgaacgcagtgcggcgcggccatatggtgacgctgctcggtgagggaatcaccgtcgacgagctcgcacatcatttcggcacgatcggctatgaggtgctgaccagcctcggccgccgctacgcccgcatctacaagggcggcaatgtggaggagccgctggtgaggctcgctgcagtgacgggagagcagccggccgctccgcagtcgctacccagctgatccgtgtgacgaccctcgagcggcttacttcttcttccggctgtccagcgccgccttgcagggcgcactgagctggtcgcgtttgccgttcaggcatgcgacgatgccgccgcccggtgcgatgccggcgcagaacttatcataatccgccttgcacgcgccgcgctgatcggacgattgtgcagatgcgcctccggaaaacgcgagggcgagtgcgatggcaacaaagctcgacttggacattgtaactccggtggcggaaggcaggagccggtagctctacatgaagatcgcgacattcaacatcaacaacatcaatcgccgcctgcccaatctgttggcatggatgcgtatcgcgaagcccgacgtcgtcgcacttcaggagttgaaggcaagtgatggcgaatttccggcggcgccgatcgaaaaagccggctacggcgcggtgtggcgcggacaaaagacatggaacggcgtcgccatcctcgctcgcaacgccgagcccgtgctgacgcgcgaccgattgccgggaaggccctcggatcacgaagcccgctacatcgaggccgccgtgcgcggggtcatcgtcaccagcatctatttgcccaacggcaatccgcagccggggccgaaattcgactacaagctggactggttcgcgcgcctcaagcgccacgccaagagcttgatcaagcaggacctgccggtcgtgctcgccggcgactacaacgtcgcgccaaccgagatcgacatctatccgacgcggtcatgggacatggatgccctgatccagccgaagagccgcgcggcgttcgcctcgctggtcgagcaaggctggtgcgacgccatccgcgagctgcacccgggcaagcgcatctacacgttctgggactacaagcggaaccgctggccgcgcgatgcggggctgcggctggaccatctcctgctgagccctgccctcgctcagcgcctcgccaaggccggcgtcgacaagaagatccgcggcgaggacggcgcgagcgatcacgcgccggcctgggtggtgttgcgctgactccctaaaagctcccgcgatccaccgcggccctagccggccgagaggccgtccgcagcggcccgcctgacaaaacgtgcaaaacaaccccatgcacagtagccgacccagtccggccaatgacttacggatatcccgaagaagagttgatccgtcgggcaaaacactggcataatgtcaccattgaagccatgacctatgttgccggcagcgagcgctcttcagaccgctccttcgtctggaatgttgagaatggtgccacaggccttgcaatgcacggcgtcggcatcgtgcctctgcagcccgcaagtcggacacggaaatcgcaccttgctgggactgaggagcgcgcgggcaagattgaagaacagcgtgacaccgaaaatcatgatcacgacggagatcaagcgaccgatcgtgcccggcagggtaatgtccccgaaaccggtcgtcgtcagtgccgtgacggtgaaatacagagcatcggcgtagttccggatctgatcgttccgaaacttctgagtctcgtaaacgagcccggtcatgacgaatatgaaaacggccaggttcgtgacggcgaagacgacgtcttcgttgcgccgaaagaatggagaatcgatgcgcaacctcaccagcatctggtagtcccgaagcagccccaacgtccgcaggatccggaggaagccggccgcctcgccggcaagcggagccaggaaggatacgattgcaaccatgtcggcccacgttgcgagctgggtgaacttgcgaagcggatgccgatcgaccaggagccgcgccgagaagtccgcaagcagcgttacgccgaacaggacatcgagcgtttcgatgatctcgctgggatgcacgaacgaggtcgcgatgatgaacagcaccgtcacaatgtcgaaggcgagcaaagcatagcggaatcgcacgccgctcggcgttgcgccctcgtagaggtcgcgaacgctgcttctgagggatgtgagggtcacggcatcatgatcgcggtttgcgcagatcattgcaactcggacggcgcgccgcaacatcgaacccgattgccgatgcgccgcgcgaaggttccgatgcctgcatggatcgctccagttgttgccgggggctaaactctcccgattcgtggagaatgtattggcctttctcttcgtcctcagcgtcggcctcgccgccggtaccgtttcaggcatcgtcggcaccggctcgtcgatcatgctgatgccggtgcttgtctatgcctacgggccgaaggaggccgtgccgatcatggcggtggcctccgtcatggcaaatttctcgcgaattctggcgtggtggcgcgaagtcgactggcgagcctgcgcagcctattcgatcacgggcattccggcggccgcgctcggcgcgcggacattgctggcactgccctcgcacgtcgtcgatctcgccatcgggaccttcctgatcgcaatggtgccggtgcggcactggctggcgcggcatgacctcaaggccggcctctggcatctgctcatcggcggcgcagtcatcggctatctcaccggaatcgtggtctcgaccggcccgctcagcgtgccgctgttcctgttctacggcctgtccaaaggcgccttcctcgccaccgaagcggcctcctcgctcggcctctatttcgccaaatcggtcaccttcgagcgcttcggcgcgctgaccggcgacgtgttcatgaagggcctgatcgcgggctcctcgctgatgtcaggtgccttcatcgcgaaacgcttcgtgctgcatctgaagccggacgtgttccgcctggtgatggacgcgatcatgatcgcagccgggctctcgatgctctggaatgcggccctgccgtagtcgcgtgcgctcaggccgcgaattccggcgcgatcgacgggctctcggcaaggacgcagctcgcctccgccgcctgcctgtcgagccattgcagcacggcttcgagcggctgcggccgctgatagaggaagccctgtccgaatctgacgcccatctcgcgcatggcctcggcctgctcggggcgctcgatgccttcgacgaccagagtcagccccagcgtgccggcgagcgaagcgatgaccccgacgatggccttgtcttcggcgctgtcgggaatttcccggacaaaggccttgtcgatcttgaccttgtccagcgggaagcgcctgagatgagcgagcgagctgtagccggtgccgaaatcgtcgagcgcgatcgtggcgcccaggcgccgcaggcgatgcagcgtttcggaggcgctggccatgttgttgatcagcgatccctcggtgatctcgagttcgagcgacgaggccgaaacatcgaagcgggcgcaggtcgcgcccagctcggcggcgagcgaatggtcggcaagctcggacggcggcaagttgatcgcgatccggatctgcggcttgcccgcagcggccaaccgctgcaaggcccagcaggcatcggtcagcacgtagcgcgtcagccgcgcattgttgccgctgcgctcgatcagcggcaagaattcgccggggccgattacgccgtgttcaggatggcgccagcggatcagcgcttccagaccgacgatctcatgagttcggagatcgacctggctctggtaccagacctcgaactgccgctcggcgaagccggcgggaatggcaagctcgagatccctgcggcggcgatagtcacgctgaagcgcctcgtccagcacggcgaccgtgccgggcgctttgctcttggcatgatagagcgcgatgtcggcgagcgtcggcagatgcgacaattccggatcgtcggcgcggcgcacggcaaggccgatgctggcacgcggcacgacctgcttgtcgtggaggcggatcggctcggaaatggcgttcagcacccgctgcgcgaatgcgtgcgccgacgcttcgttgctgacctcgggacgaatgacgacgaattcgtcgccgccgagccgcgcaacccagtcctccgcttcgacctcgttgcgaagacgctccgaaatctgaaccaggaacttgtcgccggcctcgtggccgaaggtatcgttgatgcccttgaagtcgtcgagatcgatgaagcagaacgcgaccagcgtatccggcgagcctccgttccggcttgccacggccaggcgctcggtcagcgagcgccggttcggcagtccggtgagcgggtcgtgcgtcgccatgtgtccgagccggtccagcgcgcctgacgtcgtgtgctgcatggcgttgaaggcccgcgcgagctgaccgaattcgttcgatgacgtgacgtccgccggataggcccgtccgtcatccttgctgcgctggatcgccgacatcatggcggccagcggcctgccgatgaagatgttggcggagatccgcatggcaatcagggtcgcaaacgttgcgagcaggccgacgaccagcagcagcaacaggcggctgcccgcatcggcgtaaagcgtcgcacgggaataggcgatcgagatgcggccggcctgaacggccatgttgccgttgctgtagtggatcgggcgcgagacctccgcgaccgcctggccttcgggccgcgcgatcgcgcgggcaatcgcggcaccggtatcgtcatagaccgccgcagccgcaatggtctcgtcgtgcaggatttcgttgagtacgcccgtgacctgatcgtagcgcatcttccagagcggctcggcgatcagcgcggcccggctctcggcgaggcgggccatgcgggcatcgatctgcctgagctgcgaccagaagctcgatgcctcgacgccggcggaggcgagcagttgcaccagcagcaggacgggcacggtcgcccagatcatcgcgtggacgaccgagcgcaagcgcggcgtccccgcctgctcgctgcaatccggatcggtcatcgcctcatcctttcgcatcagttcgccgcgccttccggaagcggcagcgacgagatgagcgcatcaagggagaagtcgtattgaccgcagcgtccgggcttggcctggaagcgcgtaaagtcgatccgctcgaacgcacgcgtcctgacgagatcgccgacggaagcgagattgtcgcgcgtgatcgcggatgtcttgacctcgacacgaggggaaacggccgcgaaatcgcagccatcggcatagtcgcgcaggagaacaatcgaccagccgccgagcaggaaatgcccgccgtcggtcaaaagcaggcgacccgccttgacctcgcgcagcgcctcatctgaccagttgaggcccaccacctggatgttccggccgggcacgaggccggcagcggtcaccgcgcgcagtgcgccgagcgccatcggatcgtttcccgcccatatgccggcaggccggatctccttgcgagaagcccagccgaggtaatttgccgtgacccgctcggcctcggactgcgtccaattggcgaacagcaaccggtccaccacgacgtcaggcgcggcatccacggccagcttgaggccggcgttgcgggcgatcgaggcgggcgtgatctcgtcgccgccgatgccgagaatgtggatcttgccgtcggagctctgccatttctcggcacgcgccgccgcgatcagggcgttggccatgcgcgcgcccgcagtccgaagatcggtcgtgatgtcgccgagccaggtcttgagcttctggcgcggcggcccaagacgcgccgcatcctcgccgatcagcgtgttcgaaagcagcagcgtcttgacgcccgcagcctcggccgcctccaggatcggaacggcggcagactcctcgttcgacaggatgaggaaatcgggcttgtcgggacgcgccaccacgccgaggccaagctcctgcatggtgcggtaattccgctggctggtcagcacctcgacgcgcgcatcgagcttgcggcccgcagcctgcatggtctgcgcgaccatgtcccaatagacctcgcccgtcttgccgggattgacgaacacgatgtcgaggggcttggcaaggctgcgtccagccgatgcgaaaacgccacagaccatgcccgcagcgagcaacacgcgcaggaatcttgtcatttctcttccgcccccgatggttccgagagtggacccgcgaccgctaacactttgcaaagcccagcgatcacagcggcacagagctaatgaaaagtatatcggacgtgccggattgagataatcgaagcgccggcgatccggggccgccattccgtgctatcagcaaatccgcaatccgcgactcgtagtccccatggccaaatccaccctctccttcgtctgccagaactgcggcgcggcctataaccgctggcagggcaagtgcgaatcctgcggcgagtggaatacgctcgcggaagaagacaccagcggcagcgtgccggtgtcgatccgctccaagcgcaagggccggaccttcgcgctggagagcctttccggaaagagcccggatgcgccgcgcctgtcctccggcatgaccgagctcgaccgcgtcaccggtggcggcttcgtccgcggctccgtgcttctggtcggcggcgatccgggcatcggcaagtcgacgctgctgacgcaggcgaccagcctgctggcgcgtgccggccaccgcgtcgtctacatttccggcgaagaagccgtcgcccaggtgcgcctgcgcgccgagcggctcgggctgtcggatgcgccggtccagctcgccgcggagacttcggtcgaggacatcgtctcgaccctgtctgagggcgcggtgccccggctgatcgtgatcgactcgatccagaccatgtggaccgataccgtggaatcggcgcccggcaccgtgacgcaggtgcgcgcctcggcgcaggcgctgatccgctttgccaagaagacgggcgcggccatcatcctcgtcggccacgtcaccaaggacggccagatcgccggcccccgcgtggtcgagcacatggtcgacgccgtgatgtcgttcgagggcgaaggctcgcagcaattccgcatcctgcgcgccgtcaagaaccgtttcggcccgaccgacgagatcggcgtattcgagatgacgggcctcggtctgcgcgaggtcaccaacccctccgagttgttcctgtccgagcgcgatctcggcacgcccggcaccgcagtctttgcgggaatcgagggcacgaggcccgttctggtcgaattacaggcgctggtggcgccgacctcgctcggcacgccgcgccgggccgtggttggctgggacccgagccggctgtcgatggtgctggcggtgctggaggcgcattgcggggtcaagctgtccgggcacgatgtttatctcaacgttgcgggcggcctgcgcatccaagagccggcggctgatctcgccgccgccgccgcactggtgtcgtcgttggttaatgcgcagttgccgaccgatgccgtctatttcggcgagatctcgctgtccggcgtgatccgcccggtggcgcagaccccggcccggctgaaggaagcggcgaaactgggcttccagcgcgccgtgctgcccgaatcagcccgcggcgagagcggcggcgatgcgggattgtcgctcaatgcggtcaacagcctgacgacattggtggccgagatcgccgcccgcggctcccgcagcggcgaatcgaacgcgccggcagagaaaaatgccacaccggcaagattccgccgtggagagggctaggcggaggtgacgacggaagccgccgccgctatacagccgtcacaaaagcagcatgggattgcgtggttgcggccttgccgggaacgccgtctgcccctcttttagggcagcggccaagcaccgattcggctagagcacctttgagagtaccagcggacccgaccagccgatgccagtaaccatcctcgacctgatcctgctcggtgtgatgctgatctcaggcctgctcgccatggtgcgcggcttcatgcgggaaatcctgtcgatcgcggcctggggcgccgccgcgatcgtcacgctttactcgttctcgaagctgctgccgaccgccaaggcctatttcaacaacgacacggtcgccagcgtggtcgtggtcgcgggcgtgttcatcggcacccttgtcgtggtgtccgtgatcacggtgcggatctccgacatgatcctggattcgcgcatcggtgcgctggaccgcacacttggcttcctgttcggcctggctcgcgggcttttgatcgtcgtggtcgccttcctgttcttcacctggctggtgccggacaagcagcgcccggactgggtcaccggggccaagtcccgcgtcgtgctccaaggaaccggggattggctgatggccctcttgcctgacgaccccgagaacaccatcttgaagagattcaagaaaaacaaaccagatgatgatcaagctgaatccgagcagcagccttcgggcagtggcgacgggtacagcaagtctgctcgtgacggcatgaagaagctgatcgagaaacctgcggcgcgttgatagagccctaaagagaggcgcggacgagatgcgacaccctgaccaggacgcccaacttgatctcgatccaaacgccggtccgggtccggccccgctggaggttcaggacgatctggaaggcgatacgctgcgcgaggaatgcggcgtcttcggcatctacggccatcccgacgccgctgccatcaccgcgctcggcctccacgccctccagcaccgtggccaggaagccgccggcatcgtctcctacgacggcagccgctttcattcggaacgccgcctcggtctcgtcggcgacaccttctcccgccgcgaggtgatcgaccgcctgcccggcaatgttgcggtcggccatgtccgctattccaccaccggcgccaccatcctgcgcaacgtgcagcctctgttcgccgagctcaatgccggtggcctcgcggtcgcccataacggcaacctcaccaacggcctgacgctgcgccgcgagctcgtgaagcacggcgcgatgatgcagtcgaccaccgacaccgaggtgatcctgcatctggtcgcgcgctccaagcgcgcccgcttcatcgagcgctatatcgacgcgctgcgcgagatcgaaggcgcctacgcgctggtctcgctgaccaacaagaagctggtcggcgcgcgcgatccgcgcggcatccgcccgctcgtgctgggcgaactcgacggctgcccgatcctgacctccgagacctgcgcactcgacatcatcggcgcgcgcttcgtgcgcgacatcgagccgggcgaagtcatcgtgttcgacgagaacggccaggacatccacaagccgttcccgccgatggctccgcgcccctgcatcttcgaatacatctacttctcccgccccgactccatcgtccacggccgctcggtctacgaggtgcgcaaggccttcggtgcgcagcttgcgcgcgagagccacgtgccgatcgacgtcgtcgtcccggtgccggattccggcgtgccggcggcagtcggctacagccagtattccggcgtgccgttcgagctcggcatcatccgcaaccactatgtcggacgcaccttcatccagccgacccaggcgatccgcgaatccggcgtgcgcatgaagcactcggccaaccgcgccgcgatcgaaggcaagcgcatcatcctgatcgacgattccctggtgcgcggcaccacctcgaagaagatcgtgcgcatgatgcgcgatgccggcgccacagaagtccatttccggctcgcctcgccgccgatcctctatcccgattattacggcatcgacctgcccgaccgcggcggcctcctggcggcgacgcattcgctggaggagatgcgcgagatcatcggcgcggactcgctggcgttcctgtcgatcgacggcatgtaccgcgccatgggagagcccggccgcgacccggccaacccgaaattctcggatcattgcttcaccggggcgtatccgacccacctcaccgaccagacccagaccgagccgcagccgcggcaactgtcgctgctggccgaggcgagctgacgcgaacggcgtcatcccggggcgatgccaagcatcgaaccgggaatccagatgtcgtctccggatccggttcggtcctcacggaccgccccggaatgacagggatcatggggcttgtcccggccatccacgcctgtaaaaccccgccatgaccaagcccctcgccaaccgcatcgctctcgtcaccggcgcctcgcgcggcatcggctatgccaccgcaattgcgctggccaaggccggcgcgcatatcgttgcgacggcccgcacgcaaggagggctcgaagagctcgacgacgagatccggaaggacggcggcagcgccaccctggtgccactcaacctcaccgattccgacggcatcgcgcgattgggcgccggcctgcatgagcgctaccgcaagctcgacatcctcgtcggcaatgccggcgtgctcggcccctcctcgccgatcggccatatcgagctgaagaccttcaacgacgtgatggcggtcaacgtctccgcgaacttccagctgatccgctgcatggagccgctgctgaagcagtctgacgcggggcgcgccgtcttcattacctccggcgccgccaacaaggccaccgcctatgtcagcccctatgccgcgtccaaggccgcgctggaaacgctggcccgcgcctgggcgcaggagaccgccaactcgaagctgcgcgtcaacctgttcaaccccggcccggtccgcacccgtatgcgcgcgaccctgatgccgggcgaggatccggagacgctcgacacgcccgagcaggtggccgaattcatcgtgccgatgtgcgcgccagactggaccgaaaccggcagattctacgattacaagacccgcaccttgatgagcttccgcgcaccggcctgatcgatcgcgtccctcccgagcgccaatcgaggcgaagggtaacgactataccgccgggccgatatcggaaagcgcgcagccagagactcaagccgagatcggaggcgccgaaatagcgactcaacgcattttgcccaatagttaaccgacagatgacgctacgacgcagcatcatccggctttaggtgcattgccgccggctgtgggacaggctagagcgatcaaccggaacaaggctccgcaagagagccgtccgcatatttgacaatggaggaagcttttatgacgacgacgttcgcacgccgctccgcggcccttctggcctgtgccgctttcggtcttgccacatccgcctacgcccaggacaagaccatcaagatcggcgtgctcaacgacatgtcgagcctctatgccgacatcggcggcccgaattcggtcgtggccatcaagatggcggtcgaggattccggcctgctcaagaagggctggaagatcgacgtcatcagtggcgaccatcagaacaagcccgacgtcggcgtcaacattgcccggcagtggatcgacaacgagaaggtcgacgcaattgcggacacgccgaactccggcgtcgcccttgcggtcagcaacctcgtcaaggaaaagaacgcggtgctgctgaattccggcgccgcctccgccgacctgaccggcaaggcctgcacgccgaacacgatctcgttcacttacgatacctacatgctggccaacggcaccggtaaggcgctgaccaaggcgggcggcgatacctggttcttcctcacttccgactatgccttcggccacgcactggagcgcgacacctcggcggtcgtgacagccaacggcggcaaggtgctcggcagcgtcaagcatccgatcaacaccg

SEQ ID NO: 318 - DNA, 31749 bp, Bradyrhizobium colbertium
  misc_feature (1877)..(1886): n is a, c, g, or t
  misc_feature (11035)..(11044): n is a, c, g, or t
  misc_feature (14790)..(14799): n is a, c, g, or t
gcgcttcccacccagattgtcgcgctataggcttttggcattcaaggaaccgcggaaccttcggagttgtgctcgcaagcccttccggtccactcttggcgctattgctagatacttgatattttgatggcgacgatgggccccataactgtgcgcagacgatgccctggacggtgatcttcttcggcatcctcgtcattccctagggggccatcagatcagcatcagttcgtcatcatccaccctatcgtgatcggtcttggagcaggtctgcactcgttgcggcgcttgcaggctcatgatcatcccgctcagactggaagaagtcgccgcgatgccagttcttgtactgacccgctgccgcggaaagcccctcattcgcacgttctttcgaggtgatgcagtcgatggggggcagacgatcaatcggatgggctctcgagctggagcgcgttctggactgattcaacacgaggcatctctttgccccgaaatcccgcttcctgcatgccgcatcggcgtgtttctgatgttcatatggctcgccttcgggatgaggaatgcgatggccaacaatgaccagcactgacgctctcagttgcaattgtcgcgaccgctgacgtgacgcggatgctgcagctagtggtcgtcatcttcggcgtgtggctcattgcaagcgtcgtgggcgtcgagcggcaacggtagcggcgttcctggagcagcgtggtctcaggtctcggattgaccattctcagtccgccgcttggcaagcgaacccgtgaacattaccctggctgggatcgctccgtcaccaaggactacccgaaaggcgattgaaatctctgcgcctgatgtccaaggcagcggttgtgcctcgggcagagcgaagatgtctttctgtaagaagcgcgtcaatccgaccctcgcgcttattgctcgcgaaaggcgcgagtaagctgatcgctgataggttttgcgaaatacgaaagggctgtcctggaagccgtttggacgaaggcttcaacgggcattccgggcacgagcttctcgtgtttcagtcggtccaaatcttctggcgacggtgtgatttgaaccttgaagtacgacttgccgctcttctcatcattgatttcatcggcgcccaccagcgtcacagtgcccccgacttcgggcgtcgtgcgctgattaaaggccgtgaagcggaggatcgctggctgtcgcagtctgatctcgtcaatgtcctttggcgcaattctcgcctcgactacaagaacatcggcttgaggcacgatgagcatcagctgctcgcctgggctgataactcctccgatcgtgtgcaccgagagctgatgaacaatgccgctttgcggcgatcgaatgtctattcgatttagctgatcctgagctgcaacgcgtttctcaacgagttctccgatcttgccttccgtttcacgaagctcctttgcaacctcacttctaagatcttggtcgacttggatgatctgcaactggatttcggaaacctttcccttggcttccgcggtcgaagccatcagctggccgtgctctcccttgatgcgtgctgcgtcacgttccagcgcggtcatgcgctggatcggaatgaggcttttggcccagagctcgcgcacgccgacgagctcccggttgatcagctcgacctcttgctttttgccggcaatttgctcgttcaagccctggatctgctctgtgatttgtccgatcttctcgcgaagctgggctttttgtcccgcgcgcgaggcttgccgcagctcgaacaatcttcgctcgccagcgagcaccttggcggctctggcctcatccgaaaagtcacgcaaggaggacggttgctcgactgnnnnnnnnnncggcagcatcgcgttcggcaattagcctcgcctgccgcacgtaaagttcaatcaggctattttcgaccgcggccagatttgcgcgcgttacggtttcgtcaagccggatcaggacgtctcccgcgcttacgacgtctccttcatgagcacgtagctctccgacgacgccgcccgtcggatgctggactttcttgacactggagcggacgaccaaggatcctgatgcgacgaccgcgccggcgagctcggcggttgtagcccagccaccaaagccgcccagcagcagcgcagctcccaccaagctcaatagcaagtggcgacgaaccgaccgatggaggtctgcggagccggtcatcatgtgcccactcgagtgatccgcaacgatgcacccgattgcggggtaagggctcgcgtgccttggggcagatgctcagctttgtcagaaggatctgcctgtctcaaagccttcagcacctcgtctcttgcgccgaacgcccgcatttggccggctccgagaacaaggatgagatccacgaccgcgaggacggtttgtcgatgggccataatgacgaacgcgatccctttttcgcgcccgcgccggattgcctccagcagcgcagcctcgccgtccgcgtccaaactggaatttggttcatccaacacgaccagaaaaggatcgccgaaaagcgcgcgcgccagtgcgatgcgctggcgttggccggccgacaatgacgtcccacgcggtccgatctcggtatcgtatccatcaggcagagagcatatcaagtcgtggacgccggcagccgcagcagccgagatcaccgaccctgagggcgcatcaggcaaaaagcgtgagatattctgggcaacgctgccttcgaacagctcaacgtcctgaggcaggtaacctatgtgacggccgagctgctcgggcaaccattgatccagcggtgcgccatcgagcctgatcctgccccttattgcctcccaaactcccacaagcgcgcgcgcgagtgacgacttgcccgcgcccgatggtcccacgaccgccaagacctgtccggcagagagggagaaattaacgtcgcgtagcaacaagcgctcccccccgggagccgccaagctgaccgattcgacactgatctggcgagatggcgggggcagcatgacggtcggatgtttctgaggcgagcgcagcaggaaggcacgcaagcggctccagctttggcgtgccgcaacaaagcccttccaattggcgatcgcaagctcaaccggcgcgagtgcgcgggccaacaggatggagctcgcaatcatgatgccgccggttgcttcgccttggaccaccagccaggcccctgtagccagtacgcccgactggaggcctaaacggatgaccttggtgatggctcctaatccgccggccacgtcggccacgcgcgcgtaattgccgccgtgagcatcgcgccgttgctcccaaagatcggccatgcgcggcaccataccaagggctcggagcacttcagcatttcttagcgtggctcccgccaagtccatggctgctgctgcagcgctcgccgaacgctgtgttggtcgccgtgacaacagctcggtcgccagtgtcaaggcaaggagcaagatagcgccaatcgaggcgaccatcccgatccagaagtggaaggcgaagcatagcaggacatagactggcacccacgggagatcaaacagagtggccggtccggggctcgacaagaaggatcgaatctgatcgagatcccgcaagggctgaagcccttcgccccgcgaagcccgtctcaaaggcgcctgcaccaccgcttcatagacctttcggcgaagagccaggtccacaaccgcggccagtcggacaagaagccgagaacgcatcaagtcgaaaaatccctgaaatatatagagccccgcaacaatagcgctcaagccaatcaaggtgggaatgctacggctcggcaagactcgatcatagacttcgagcatatagagcgagccggtcaggtaaaggacgctaacaagcgcgcttagaaaggcgatcccgacaagcgcaggcccgagctgtggccggcttgtctccttgtcgtcgctgcgccctgaggccaaagaagaatcctgcgcactcatctgtctctcaaaaaaaccctcgtgatgcagagccatgatggctcgcaccacgagagacgtgaggggaggagaacagcctcacgccatgggccaatcgggatgcccgttctgaaacagcattcggcttccctcggtgctgatttgggaatcgggcacgaaggccccgccttccacggcgttgaacatgaagtcatcctgagccatctggctcttggcgagcccctccaggaatatcgacccatcgccccaagcaaccagcacgcctgtatgggcatccccgtggttcgaagcggaatccgccacggtgacttcgttcggcatgatgtcagtgaatgcgatgtgatcgaacgccccgggacctggatcgaagcccccgatgaccacatcgttgccgctgccgtgcgcgacaatgaacgcgtcagcgccggcaccgccattgtagatgtcgttgcccatgcccccatcgagcatgtcgtgccctgcacctccgctcaggtaatcgttgcctgccccgcccatcaagctgtcgcccatggcgccgccgtaaagcttgtcattcccatcaccgccacgcaggtcgtcttgtccaggtcctccgacaagggaatcattgccggctccgccgtcgaggtgattgtcgccggctccgccggaaagataatcgttgccggccaagccaaagtagaagtcgttcttggcggtgcctagaagcgtgtcattttgagcatcgcttccgaattttacattgttgtcatcgaaagcgctgttgaatgatggactggttgtagcacctgtcggaccggggccagcttcattaccacccgtcgttcccagatgttcagcagtgacacgatgtgcgttttcgtcaaccggattgagcaggtgacgctcgtcggtaaacatgaagtcatcttgggccaggtcatttttgtagacgccttcgagcagaacagagccgtctcctttgctggtatcccaactgatcagcacgccccccttggtgtcttcgaaacgcagttgctcgggttcgagattcatgactgcgatatgatcgaacattccagggccagcgcgaaaatcctttatgatatcattgccgctgtctggcgaaatgacgaaagcatcggcacccaagccgcccgtcaggatgtcgttgcccggccccccttccaaatcgccgtgaccgggcccttcgttcaggatatcgttgcccggaccgcccatcagcatgtcagcttggtccccacccatcaatcggtcgttgcctgcgccgccgacgaggtgatcggcgcccatgcctcccgtgaggaaatcgttgccggctcccccgatcaggtcgtcgtccttcgaagagcccgacaattgatcgttgccaccccgcccaaacgcgacgttcatatcactgctcgaaccggagtaacggttggaaccgccatccccgatatagagctgatagtcatcgatgctccgattcagcgcatcgtcatcgccgcggtgctcgtgtttatggtccactctgctcatgccggtactccaattgacgcccctggagcttgcggcgcaccgccgcatcctctgctccgagcctgcaaacggcggttatcttcaaacgttccaaacggcggacggcatgggtagagactttgttgggagagtagagcaattccgaagcccctaacctgctcccctctcctggtggctggtcgaccgggctgccgagccgcctggagcagaaagagcggcgaacagggacgggatagggtaaccccggagttaccgagaggattgccgctggctgcgcagccgtcgagcgccgcgattggctttccagtaacgggcgccttcgcgcgcagttcaccaggcaatgacggcccggaattcttcccccaaaggctaatgagcgccagcgtcctgattgtcgctgcgtccggccttgctcgatgcggccaccgctgggtgaccgtagctgggaggtcgtctggcctgtaactggcgtggctcgcttggtcaggaaccagggccatataggatcgttcacgcgggtgtcgaaatctaaacaccaaaacgaggaacttaggatgaaaaagcttggtcagtttgcatttgccgcgacattgctggtcgtggggagcctcccggcggtcgcacagcaggcgcaaaccacgccgtccggcggatccatgcagggcatgtcggacaagaatatgaacccatttcagaaagacgctatgtctgcaatggacaagatgaacaagtccatgatgcaggggatgatggacgccgaccctgagatggcatggatgaagggcatggccgcgcatcatcagggcgcgattgacatgtctgaggcccttctcaagaacacaaaggacggtgaaaccgccaaagaggcgcgcaagacaatccagcagaatgagaaggatctgaaagagcttcaggcgaaaatgaaaaaggaagacaaaaaagaggacaaaaaaggctaggcagtaggatctcagctcgaatgactcttggttcgaacgagagccttggccatgggctgaaacgcggtgcaagcgactagcctcgcttgcaccgctgcgtagtcagtgttggtgcccagccggcttgtttgcctcggaagatgatttgggcgtgttttgctgacgcatgttgggcatgttctccatgtcatcgtcgggcggagctttcgcgatgatctcctggtattgagcgctggacatgcccttcagtttaaccacgaaggcgacgatgttccagatcgtggcgtcatcatgggagcgtccccaggcaggcatccccgtcatcttgattccatgttttgtcacccaaaatatcgcttttgcatccagactcgtttcggacaggctgggcggtttaggatagagcccttctcctaactctgtatcaggcttgccgggctccgaatgacagttcgcgcacattgcggcatactgtccggcacccttgagtattccttgctcgtcggaaagatcaggtgaggtcagagaggcggtgcgagccgcgatggagcgctcgcgcgtgagctccatgatctgccgcgtcagcgcccagtgaggtgtgtcggctccgatgtcatatgtccctgacgtgatgaacacgatcgctcctattgcaatgccgctgacaagcagagccgccgcgagtaagagttttctcactatatcaatccttatctttgggttctcttttggggtctcttattgatttagagccaggacgcttgcgactggccaccacgaccgaaatcctgcccgcgacgatcgaaaacgaccggtccggcgccagtgctcgcaacccggccagcgacaggcagctgcgccaggtgtcatcaaaatgcggtgcaacagcttcagttccccagagcaccgccgcaaagccgagcatcttggcttctcggctcgcagctggccggaccaactcgacgacgtggagacgaccgccctggcgcaaaagaggtgtaaggccccgcagcagcgcaattttatttaccggcaccaggctatgcagggcgaaattgcagacgatcgtatcgaatgcctcgtccgtgaatggaagctccgcgttcgcgggcacttcaataaggttgacattgttgaggtctcggcgccgcgcagagcgcgcgtaccgtcgactttcgtgcggctcgactgcaacaaagcagacatctgggtggcgccttgcgaaggacaatgccgccgcaaagctctgcggcccgacgatcagcacctgctcgccaaaatcggaatcaagcaaggggtataggcgagagcaccactcaacatcggtcaccatggacagaagtatgcggttgtatatcaagcgcgcggcgccgacgcgcacccgaaaaactgcgctcttcagccatcctgagatcgaggctccgattgtccgccttcctgcggcatgttccgtcattgtcgtcttgcgtcggcgctggaaggatccggacctgaagggttccgcgaatccttgggcgaccatgatctcagccaggcgactgcaatgagaatcgcgataccgccgatgctcacagcgagctgcataggcaaagaatcggagatcagttcgagcaggaaatggccgacgaacgacaggaagataccgacacagaagacctcgagcgaatggcgcccgcagagcagcatgggacgcaggactggactgccaagccagcggctgcggcgaggtacgaggtgaacagtcaggatggccaaggccataaaatgcagaagacgtgagggagcaagattggttttgtcgtctatggccaagccattcgacaccgaggcgagcgcggatgattgcatccccaaattttgcggcagcgccacgatcagtgcgaagaccaggtaaaggatacagacgcccagcgccgccggagaggttaacaaccagcccgcttgcgtcgctcccccaagagcgctccacgcgccaagcacgaacaggagctgccaggcgaaaggattgaaataccagacgccctcgggccaagcgggcagattccagccaagcaagggtgcaagaaaatacaggccaagcgagcagaggagcgtggcgttgggcaacgccaatatcgcgcgcagcactacgggaaaaaatgccatcaagacgatatagagcggcaacacgtccatgttcaacggcttgaacttgagcagcagccccgcggtgagatacccaatcgggttggcgatgagcccggcaacattgaattcgtccaaaaggtgcgagtgacgataggtttgcgcgacccagccgatcgccgcgacgtagacaacgaacaggagaatgtgcgccacatagatttgccagacgcgccgcattaacttgactgcacctgcccaaaagccatcgcggcgcatgggtttggagtaagccagggctgccgtgtagccggagatgaagacaaacaggtcggcagcatcgctaaagccgtaattcctggtcgtcagccatgccactgcattgttcgggatgtgatcgagaaagatcgcccagttggcaagccctcgaaaaaggtcgagcctcaagtcacggccgtccctcgcgggcgtcttggtagcaggcccatggtcctccggtgtcgtgatcttcgtcatgtaattcatcgtggcgcgtggaatccggaccaggtcccggggcgacgtccgcagcaggcgttcatgacttcggtcgcattgccgtgagcggattgatcgttggctccccgcattggatcgcgatcacctgacagcgtcctgagcaaaaccgaccagcttcgacgcattcctccattttgctggcgcattgcaattcctttccgctgctcggagcaaagtcgcagcgcactcttcgggaacgcgcgcggggataaggcgatctatggcgcatgagcgtgcggcgatgcggcacatctgcgcgcaagccatcaagaggtgaacttgcgtcgccttgcctgcgctcacctttggagccaggccaggctgcgatactgttcgggtacctccgataacagcgcaggccatcgccgatgcacgtcggcatgtcctgttccgtcgacttgatttgacggttagtcattggcctatcgcacgtcgagaaccagcgtcgatccgccgccgccatgctgttccacattgttgttggcggtatgatgcgggatatgacaatgaacgagccatttgcccggccgccttgccgtccagaccacgtcgtaacgttgacccggaccaacattcaccgtgtcggcctgatagcgagcgctatctttgaggttgacgccgtcgaccgccacgacttcgaacggtccgccgtggacatgcatcggatgcacgaagttgttgttcgtaccgatgaagcgaagcttgatcgtctcacccactttcatggtgatcgtgtcagtggagggataagccttgccgttgatcgtgaagtaattcggtagcgctccctccatcagcatggccggataggtcagccattcccgcttcagccattcttgcagctgtatggtgtaatcttggtcagcttccacttccatcgaaggatcttttggcgagatgagtagcgcaccgtagaggcccaacgcctgttgccggtccggatgatcgtggctatggtagaaatatgtaccgctctgcccaacctcgaactcgtaggtgaacgagcagccaggcggcaccggatcttgagtgatttttgccggcccgtccatttcgttcgggacgatcagcccgtgacaatggatcgtcgtgccctccggaagcaagttgcggacattgatccgcacgtggtcgccctcagtcaactgcaggcgcggtcccgggacctgccggttatacgcgtaggcctcagccgcaacctcgggaagaatattccagcgaatgacggatgcttcgatgtcgaagaccttgatgccattttccacacgcggctgaaggagttgatctcctttggcgtccttcgaggcgacgtaggtcacttgcgaaggcttgacggcagccatttctctcattgcttccccggaaagatcgaacgtgtcgatcataccgggaggcatgatggagccgttgacgtcgcgcgcgctgagccgaagattgaccgagaaaccggggataaccattcctgaaataagaacgctgtgacgcctgcgagcgctgccagttgaggtgtcgtggcctcgctggccatctggtgtccagcgccttgctgcccatgtccggccgatggcgccgctgcccctccgtgcccttcatgacgctgaccgctgccctgccggccgtcatcccgctcggtcatcaggccgtgcttgatctttttctttaccatccagacgttgaaaggataggccgtcgcaaatccgaccatgacgccaagcgacatcacggcccagaagatcaattcgagggggtccatcgcgcgcatgtcccggcccatcatcagcaggctcatcgtcggcgccatgccggccatcatggcgttcatgctgatgaatnnnnnnnnnngggcatgaaactcttgcggacgttgtcccagtaggtgccccccatcattttcttcatgaagagcgattggaaaatgaacaggccgaaggagaagccggcgaggtactcgacgatcaggtcgatccacatcggcagtcccatagatgccgtgatggcggccgccagaatgataccggtcgcatcgccagctacgcagtggatcgtactgccgacgccttgcttccacagcggcgaagtgaagtgctcgtgctcgcccggacgcggctccttgtccgcaagcacgtagagcaccagtccaaacggacccatatagagcgtgaccaggatgaaaccccacttcatcaccgtcggctcgggattgccgttgaattgatcgaaggcgacgaacgcggtggacgcaaacgagagcgcgaaccaagcgatcaggaagtagtcgtagggaagagcgatcacgcgtgatcctcgttttggaaaaagggcacattagggagagcgcgtagcggtagcttcatgagcaaacttccgccctcgtggggcaaatcgacatgccacggaatcggcgcgcggccacgttggcgaaagccaaacctgcggtagaatgcgacggcaccttcgttgtccgcccagacgtgaagcgtcaaagaggcgtgcttctcacgtctcgcatcgcgaacgaccgcgttcagcaaggcggttcccacgcccgctcgtcgacaatccctcagaacgctgatgttgttgaggagatagctcgaccaatcgttcagttcgaaccggggttggagcagcaagtcgcggctggtcggattaggaacggggtattcgttacgaagcagactcgccggaaacgcgttcgccattcccacaacggtgcttccggagagtgcgaccacgcatcgttcgaacgagaagatgccgccgggctcgcacaccatctggcggtaaacattcagcgcggccgatctctgacccaagcctcccagaatgaattcaatcacgtccccgctggccgcatgagccagctgcgcgatggctgaacagtcagaaatatgcgccctccgcacgaaaatagcgctgcctggccctgcaataccggcgcattgtggctgcgaacgggtgtcgtccggcttggtcatttggatgtccacctcgccgatagcagcctttcgcgccagcgtttgctggccgtggcgaagacgttgtatccgacccaaggatgcttcttgattcgtgcgagaccgtcgagctcttcaagctgcatgaaaacgccattctcctcatcgaatatgtagcgcttgagcgaggtctcttctgcgagatagcgcgaaaccgcatgcgtccgatcggagccatgctcttcgcaaatcacgacacaatcagttttgagcagaccttgcccgccgcgcaaagcctcgatctcgacgccttcgacgtccagcttgatgacaagcggccctgaggcatcgatcagccctgcctcggctaacccatcgagcgacacagtctcaacgcaccctggctctgattgcgtgagcggaacggttgcaaacttttcgtgcttggcgcccgcgacacgcacaatctcgccgcttcggccgccgagggcggcatgcagatagcgaaagcgattcccattgagctcggcgttgcgtttcaaacgctcggcattcgagctggatgcctcgatggcaatcgcctgctgagcgccgaacgggcggctcgtggcaagaacggaccagtaaccaaaattggcgccgcaatccagcaaggtgtagtgatcctgacaagcggcactcagaaacgcctcgatctctcgttcataatcgtagctgcaattgagcagtctgctccagtatgcgtcgcagaaaggcattgcaaaaagcgcatcctcgttcaatcgcacgaggagttcgcggggtgccatgaccgatccgacaactcggcacccgacgccatacccgcggtgccccatcgccttcgtcgcagccgatccggcctgcaacgcgctgaccgcagcacgaacaagcgggcttgcgcccgtcagttggccgctggcacgatcaaatacgagtggcggcgcctgttgcgcaagctttgctaaaccgttggacggaggcggcacagttgctccttgcgagagggagatagtcgcgcatgcgtgcaaccgataccggtgccgcatccgtttaggcgcggcaccggcagacgttcatttagctttctgcatcttggtgatggtaatgccacctgacgcccgttcagcttcaaactggaccttgtcaccgaccttcacctgcttgagcatcgatgaatccttgacacggaagaccatcgtcatcccgtcatcgtccatatcgaggttcttgattggaccatgcttgagagtgatcttccccgcggcctcatcaatcttcttgacttcgccgttgaccatcgcggtctgcgcaagcgcgccagttgacgaccatgcgagtgacagtgcaagggcggtgattgcgaacttgtttggcttcattttcaactccttcgttcggtttgctctgcattcacgtttgacgcgtccggtcgtttcacgtctcctcagcgccagagttgcctatttcgacttgtgcatcttcgtgatcgtcactccctgctggccacgttcggcttcgaatttgactttgtcgccaatcttcaaattcttcaacatgccgggatcgctgacgcgcagcaccatcgtcattgcgtccatttcgaggttcttgatcgccccgtgcttgagcgtgatctttcccgcggcttcatcgatatttttcacctcgcccttgaccatcgcgttctgggcgaatgcagccttggacgcgacaatcgaggcgaagatgacggcgatttgcaaaagtttcattttttcgactttgatgaggtccattacttcacggtcacagtgccgaccatgccggactcccgatgcccaggaatcaggcaggaatattcgaactcgcccgatttggtgaacttccaaaccatctcgtcggccttcttcggcgcgagccgcttcgcgttcggatcgtcgtgctccatgtcgggagtctttttcatggcttcggcgtgcttgaggttttcggccgtcgtcgcaagcacgagttcgtggtccagctctccgttattgcgcaggacgaacttgagttgttcgcctttcttgacttcgatcttcatcggcatgaacatcattttcccgtccgtttcacccatcgtgatctgcacgacgcgcgccggcttctgggggtcgcccggttcgccggccgaaaacgaatcgtcgtggctgtggcccttggggcctgcgccggcccaagcgatggtggagatggatgtcaatgcagcaaaagcgatcagagagagcgtggtgtgtttcatgatcttgttcctctagtgtgggtcgaagcggccgtcgtttcctgaagactacatgcctttcattcccttcatgcctttcattgccttcatgtcgccctccttcgcagcccccgccggtttgtccctgcgcacaggttgctgcgatggtgcgtcgacctcataggaaacggtgcccgcaggatatttgtaggggcccgggtcggcgtaatcatctcgcgccaggtcttcgcggatcttcatgacagtgaacatgccgcccatctcgatcgggccgaattggccagagccggtcatcatcatcagggtattatcgggcataggcatctccatttcgcccattgccatgccgnnnnnnnnnngttcatggtgtgatgcgatttgtggcagtgaaatgcccagtcgccaggattgtcagcgacaacatcgaacgcgcggatggcaccgaccggtacatcgatggtggtttcaggccactgcgcgctttcgggcacccagccgccatccgtgcagctcacggagaaactatgcccgtgaaggtgaatgggatggttcgtcatggtgaggttgccgattcgaacccgcaccttgtcgttgagccgcacggccagcggatcgatgcccggaaacacccgactgttccatgtccacatattgaagtcggtcatttccgtgatcttcggcaggtaggtgccgggatcgacgagataggtgctcatgatgaacacaaagtcgcggtcgacgggacggaagctgagatcgcgcggatgcaccacgatcattcccatcatgcccatcgccatctggaccatttcgtccgaatgcggatgatacatgaacgtcccgctgtgcttcatctggaactcgtacacgaaggtcttgcccgggggaatgtggggctgattgagtccaccaacgccgtccatgccgttgggcagaagcacaccgtgccaatggatggtcgtctgttccggcagtttgttcgtgacgaaaatgcgcagcttgtcgccttcgacggcctcaatggtggggcccggcgattgaccgttatagccccataagtggaccttcattccctcggcaaattcacggacgaccggctcggcgaccagatgaaattccttccagtcgccgttcatgcgccaaggcaaagtccagccgttgagagtgacgacgggattatagtcgggcccagtcgagggacgcagcggcggctgcatcaccgccttgtccatgatcggcgcctcggggatgctcgcggcttgaactcgcccgctgatagcgctggcgctgatcgcggcgctcgccgtcaaaagacctcttcgggatagcatgacctgtgtctccactcagttggtagctgcgttcgcttgcgtgatggaaggacgagtctgccgacgcgcctctccaccgcccccaccattgacgaccgtctgtagttcggcctttgccagccaaaactcgcgtttggcttcgatcgcggcccgcattgcgaccaggcgctggcgcgcctcttgcagaaccgtgaaaatatcgacttgcatgctcgagaagcggagctgcatctcatctgagatgatgttccggagcggcaagacctcgcgctgataatggccggcgatatcgtagctcgaccggtagatacgataggcttctcgtgcttcggagcggacattgacggctctttccgtcaacagattgaacgcttcattgtacgtcgcgagcgcacgtcgaacacgcacctcgccgccgtcgaagatcggaatttggaactgaacgtcaaagccacgttcccggaacggagttccgtcgggatcacgcgtcttgcggtcgatgcctgcagcatcaagaaccgtgatgaaacgtgacgcattcgtcagcgcaagagattttgccaaagccgccagttcaatccgtgcaatctgaagatcgaggcgatgcgtgacggcatcaacttcgataaacggcagggagaagggtcgcgctggtaagataggcagcttacccggcaagtgaaagcccagatcgccgttccacaatcctaatagccgcgccaagcgttcgcgcgatgatatcgcctcttggcgaagggttgccagctctgccgcagtttcggcatagaacgcctgttcgcgggcctggtcgagcttgttcatcgcccctgtctcgccaagcttaagcgcgagctgtgcggttgcttcagccgtggattttgcatcggtgaacaaaccgacaagctcgtttgcagcgagcgcccgataataggcccgtctgacttccgccgcgagccgcagcgtttcttcggcggctcgcagttgtgcagcctgaaaacgttggcgtgcgatttcggagcggaacggcaatgtcgcaagcgctaaaatgtcgccgacgatttgtcgctcgatttcgactgctccatcgccagcgatccggctaatcgagaacgtgggattaggaggcaggctgtcctgaacaagatccgcctctgcgatcgcgagctcattataggccgcctgcaatccacgattgttcaacaaggcgatttgaacggcgctgtccacggtgaggccgcgccgcaacagccggcggacggcgttatttgcccattctgcgtcttccgccgagcggatcgcaacgacgtctttcttgatggtctgctgcgccacatctgcgacgacggacatgccggcatccggcgaaaaggcggcacatccggaaagcagcagcgcgccggcaaccgcggaaaggatcggcatcgcacgacgaacatgcatcggatttgatcgggtcaacatcgcttctcctattgagcccgcttcggcgttggcgcgacttgttggttctgctcctgccagccctttggagcggccggccgaaggtgcgtgtaaggcgcgaccgtcgagcggtagcccgtcccagccactggaacagcaggatcggccgggtcagaaccggcgagcaaataaggcggtggcgtacatccccccagaacagcaaggcttagaaccaggcttgcggccgcgattcgattgcccgtcactttgctcgcgctcctgcttggccaggcggcgcggcctatccccccattacgcatctttttccctcgttgcctcgcttgaattccaccatgcatgttgtgctctggctttgcctttgaacggctgcgtcctgtgctgaagccagcatggctcggtgatcgggcgatatcagcccctcctgcgaaccaaacccttcgcgcaacggaacggcgcacccggaaaggccagcaccgatcagcatcatttgcgcagacatgagcacgaatttacgtaagcgagccgcattcgccattccggcgaacggcgcacctgatccggcggccatatgattctcctgaactgatgatgcgcgactgcggcgcgagccctatgggctcgcttcgcgagtttcggaccttcagttcaggcgattggcgggcggtagagcggcttggaagccgcagttcccaaaacttgcacaagcagagattgatgctgcgcagggggaatagcgggctgaccgatttcggccaaggccgcaggcagggcactcacgcatgacacgccacagcactgattgctgtgatgtttgtgggtatcacccgagccgtgcgcggcccccgatgcttcgcccgccacctccgacgaagcagctttcaacccaacgccggcccgctgcgcaatatcgctctccgcatcaacgtgatgcacacttgcggattgaacggaatggatgtgagaggcgccagaatgctgatcttcgtcgacgaggcaagcgatgtttcgtcctgcgtccatagcgaccgcaagagctggcgacaggacgcaaatcacatagaaaatcgcgagcagccaagctgctcttgcgcgaaaagatttggtcacaagcgtcagcattaaggccgattcgtctgcaagacggttctctgagactacccagcggggatatttgcaccaaattatagttcatgccaagccggacgaattggaaaacgcgaagtttagcctcggtgtggcttattggtttaaaccgcctggcggcacgtctgcggacggcttctctcaattgttccgggcgcgaggcgtcctgccagtcaaggcttttgaggtttttgcgtatctacaaccgttgaggggaccaattgtccgcaaaacgtcttctgctcctcgcctcgacggcgcttgatcgtgatccctcccaaccgtggccttttaggagcgtgcgcctctcgttcgcatcgggaagctcttgaagagagggggcaaggattatacccttctggggtacaggggggcaaagctgagcgcctcgaaaggcgttcaagctgggaaaaggtgagatggtcggttcggcgaacttcagcagaaacgcctcctgctgaagcgggggtcccaaccccggatcatggtgggtgacggcacaggaccgcccgaagtcgtggccgcgcccaccatgatcgagttcgagaatccttcttgctgattggatgccgcgtggtcgcactgaaagaagagcaagatcgagcgcttggtgatgatcactgcaatgcaaggcggagatttcacgtaacggcgatgtcttcgtatgtctgcgctgatcggccgcgatacttcggcctggcgcggccgagattgtcacggacagtctcaaaaagtcctcgcgcaatatgacgggccccgtgcttgattgcatcatcatcggtggtggtcctgcggggctgactgctgcactctatctggcccgatttcggcgtaaggtctgcgtgattgacgccggcgaaagccgagctgcctggataccggtttcgcacaaccaaccgcttttccccgccggcataaccggcacagagatcctggggcgcatgcgacagcacctcaccaagttggccactgaaattctcaccgaaaaggcgatcgctgttgcgcggatccacgagggatttctggtcgacttcgccgaagaaacggcagccgcgcgaacgcttcttctggcgacgggcgttgtcaatcaccggcccgacatgagtgcacaggtccaccgtgatgccgtcgcagccggccttatccgctattgtcccgtttgcgacggctttgaagccaaaggccaaaagattgtcgtcttgggcaagggtcctcatggcgtacgcgaggctgtgtttctgcgcacgtacagccaggatgtgacccttatatctgcttcagcgatgaatgaatgcagttcaagacagcttgcagccgcgggcgtctcgctgatcgaacagccgatcgcccgcttgacaatcgaccaaggaaaattttgatcgaaaccgcctcagctgcgcgcctttcattcgacactctctatccggccttgggctccagcagcaacacggatttgctgcgatctttgggagcttcgctctccagtcagggatgcatcctcgtcgattcgcatcaaatgactgatgtgagcggcctctatgcggctggagacgtcgtacaggggcttgatcagatcagcgtcgcttgcgggcaggctgcgatcgccgcgaccgccatccataataggctgcgcaaacttgatggcttgggcgatccttaggatcttggagatttgtggttcttcgcgcttctaatttagggtccatcactccggtccagaacgaaagcgaacgccgatgcgctttgctttacgccagatcaagcggcaatgataatgctcttcctcccgatccaggatcagcttgaactcgtcgggtatgtcgagcgaactttcgacgtcaagcgcagcccctcgcggggacaagttgcgaatgacacaactgatgaccccgccgttgccaaaactgatggttgcggccttcaaaacgcgggatctgaattcgtcgcgcttttcgtccatctgttgacgcctgtcttgattgaaagtcgtttcctggactagctagaagcaaacttcatgttgcggtgcaaaatctatgaggccagcttcctgatcgatgtttctttcctgtagcaaaggaacccggggcggcctccattgcttacagttcaatcgtcgtcgttgaggagatcctgatcatgtccgtgtttcgcaaatcatcgcagcttatggttattgccggccttttcgccacgacgatggctacctcggcatcagcagctcctttagtggcgaatccactggccgctcatcctgtaagtcctgccgcgaacgaatataagcagactgtccatcttgtctgcgacaattacggcagatgctatcgctcacgccgcgttgttcgtgccccctattatgacaacggttactatcctggtagctatggttatggacctagcgtcgtcttcggtttcggaggacaccattatgacggtgggcacgggttcggtgggcatggatttggcgggcatggtttcggcgggcatgggtttggaggacacggcggcggtcaccacgaatgatgatacaagcgaggtgaactcacccggagtgcagcgcagagaaagtgaaggaacaagcgcggtagcacgatcagggatctcaaggccgcaaggtgctgctcactccggcacgttcccgagcttgttcagatcgttagcgtcctgggaatctttcaacagtcttcccaccatctcataggaacgggtaatttcagccaatcggatcatttcccgcgtggtttctacgttagacttctcaaggtatccgctggcgaggctaacctgaccacggccaagatcgatgggcggttggtcagtctcaagcaaactttcgccggcgggtcgcaggcgcgctcgatctgaaaatccaaccaaacggagctgtccgagaatggcgcgtttggtgctcacagttccgtcgctcgcgacactgatatcgcgatcgtcagcaggaacctggagaggaccattcctgcccaaaatcggttcgccagaaagggtcacgatctggcctgaagcgctaatcgtcaatgcgccggctcgggtgtagcgatctccctggccggttcgaacaacaaaatatccttcgccctgaatggccaaatcgagcggattgccggtcgattggagcgccccctgactttcgttactgaattggaatcgcggatcgaccagggagagggggcgctccttcttccccgcttcatccaaccctttctctggcttgagatattcctggaaagacaggtcgcgcgcacgaaatcctgtgctgcttgaattggcgacgttgtgggccacgacgtcaagcttgcgttcgagcgcgatcagacgtgaaaggtgaattagcgtagtttcgcccatgttcatcgccccactacgaatcaccgcaagcgctcgatcctacaacagtgtgacgcctcgcggatcgaaattgccccgcgcagcggtcgctgcagcttgcaggaccgtgtcacgagctcagctctcatacaggttcaagagcctgatcagccttcaaaatggaagacattaacatttcgttaaccatttcatacgaaactggcgcagcttaacccttttttgggagttcgaatgacgggcccggaagtgatggcctcggccgaggaagccctcttcaccgtcgtcctggtatctgcgcccctgatggttgtgggaaccatcaccggtgtcctcgtgtcgctgctccaagccttgacacagatacaggagcagacgctcatttacgtcccgaagattgttgcaacctttctcacgctggtcgtcgcgctgccgtttatggccgatctgtcgcatcagcactttctgcgcatgacagcccgcatcttggctccgtaacatctgaccgggtccctcgagcgaaactcgggagacgagccatcctgaccgcttctgtccctcctttttccgcgacagaacgaggagcgaaggacacaaggggcgcgcaacctcaagtgtccttctcaaggtccgtcgataccccgacgtaaaccgccacggcttaatggcgagtgtccggccgatctggattgtggtcggagcggtgatcgctgccccggccgccgtggtcgccttggattacaacagccgcgccgtcatgaccttgaccatgggtttgaacgccgtggtcgttatccccatggacaacggccgcgccatgtccatgcccgtcgttgtcgtggtgaggacccaccgtgattccgccaggccccacctctacctgggcaaaggaacttgtaggagaaaatgacaatagcgctgcgaaagcaagaggcgtcaggaagcggtttgttttagccataggtcatccttatacgttcaggttgcgcgagatgcgggccgacacagcaggaacactgaagaagaagatcgatcggtcttctaaccgggattacatccccttcatgcccttcatcttgccatggtcgccgctcatcccgggcatcttgtcgttatcacccataccgctcatgccgctcttgtgctctgacatcccggacatcttatgtcccgtcatcttatgtcccttcattccggacatgtgatgcattttcttttttttttgatctgcgtgacctctgctccgcttttgagaactcgggcgggcgccggcgtcatcgcttgcgtcgagacgacggaggccaagaacatagccgcggtcgcgattgctactcgcttcattgtcaaactccgatttgttgaccttttattccaagaggcaaacatccctgaaaaattttggttccacagcgttgctcgtttaggccgccgcgccgacagatctcctctaggacgacggccgggagtggacacccaagctcaacgcgcatcggtttttgaacgcctgttgcgaaggcaaaaagcatctggcggtgcacaaaacaaataacagccatctcgctgcatcgcacggagagcatctttactgcgcaaagcctcctgacgcgcgcttctgcccttcaggacgcaaaggaagcgccaagcagggcccatgagcaggctcggaatcggctgatgcgttgcgacgatggcgtagaaattgcgcgcgaacctgctcgcaaaaagaacatatgcgccttgagatgtcagagggcgcgagatcaaaccaagaccgtcttcgctccgcatcgcgttggctctatcagcagtttgcctgtcggacgcggcaattgctttcgtggcccgacgagaatcagccgcctcatcataaggctgccaaatcagcggctccagcccgccatccggcggcatggaccatgaggcgctccttacgtgagcaatggtgctgatagatggcgcgttcaggagggaaaggaggttgaatgccataaatcagctgggccggtcatcgcgaacacaggaatttggaaaggaattcggtatgatcggcgcgctcgcccgcaagtttgtttcggctccgctaatgaccggtggatcaaggcgtacccagtcccgcgtcgatgccgtcaatgcgacggagagataaccctccgacgtagtcaatcccctaagaggcctcctgtggcgaaatctgcagccgagacagcccatgttttccgaaccagtcaccataccacggaagaacgccctgtagtcagacaggctcctgcgcaaagcgattcagcgcgagctttcattgacaaccgtgcatttttgaccgtctttgcctgtcagtagcgcgctgaaacaacgagataagccgcgcgccctggagcttgcagcgcgaaaggtgcagcgctttggtacagggcgtcgtagtagcgcttatcgaagatgttgttcacgaacagcttcacggtccagttcttgttcaccttggcttccgcgaaggcgtcgaaccgccaatagctcggcagcgacgtgccctggttcgcggcgaggaatgtgccgccgtagatcttggagcggtacaccgcctgcccgccgagctcccatacatccgtcagctggtatttggtcagcaggctgaaggactgatgcgcgacattggccagcggcaacccgacattgctcgcgtagagaatcgtgttgcctggcgggatcaatgatttcgtcacctccgactgcatcagcacgagaccaccgaacacgctccatttgtccgtgatcttgccgcctgcttccagatcgatgccgcggatgcggtaggccgcgccggcgctgatgcacgacacggcgccggtcgaaccggttgggtacggacagcttgtagtcgcagtcgcaggcgtgatgttgcgcgactcgcgcgcgttttccttctcggtctggaacaccgcagcggtcagcagcaggtggcggtcgaacagctcccacttcgtgccgatctcgatcgccctgtttttctcgggtccgaagatctggttggcgttgccgttcagggtcggcgccaggccaccatactgagcgctcgtcccatcgaactctgagccgaccgggttcgacgaggtcgcataggcggcgtagacgctcgcgatcggcatgggtttgagcaccatgccaaggttgaagttcggcagaccgtagcgctgctcctgttgcccgaagacgttggcaacgccgttgacagtgccgtagccgttcaccttgatattgtaatcatcgtagcgaacgccgccgttgagaatgacaaggtcgttgaagttcgcggtgtcgagcagatacgcgctcgtcgtgtcgattcccagcctggttgggaatccggccaatgacggcgtaccaaacggcaagaaggtgtattgcggattgaagacgctgacacccgggaccgaaccgctcgcgggcgcaccgcccagcgcttcagagctcaatcctgtatacttgtcgatcttggctgtttcctgcgacacctccacacccgccagcgccgtgtgatgccagccctcggttgcaaacttgtaggtggcctcggtctgattgaccagaacgttggtgacctgatagcggctctgcggatttgccgtcagcgtcgaggctgacagcggattcgcgatcaccggggcctccggcagggtgccgatgtaattgagcagcgactgcgacgccctcgtcttgttgctgaccagcagatccggcgcgacctgcacctccgtgttgatgctggcgatgtcctgcttgacctggaagaagtcgcggttgacgaacccgtaccagttgttgcgattggagccaaaatcagggaacggtccgccggcggtactcgccgtgctcggccgataatagggcacgccgaagtcgggcaacccgtgcaggtcggtgtggatatagccggcagtgaccttcacggcatcagtcggcgtccatttggcggcgacaaagccgccgcccctgtcatcactgacgaaatcgcgccccgcaacgcccgcgtcctggaacaagccgcctgcgcgcaccgcaaagctcgggctgattacctggttgacgtcgagcaccacacgcttggtcttgtcggtgccaaacgtggtgtccatgttgtagaagctcttctcggtggtggcctgcttggtcacgatgttgatggcgccgcccgtggtgccgcggccggcaaaggacgagccgggaccacgcaggatctcgacctgctcggtgaagaaattctcgcgcacgctcacgccgggatcgcgcacgccgtcgatgaagatgtcgttgcgcgcatcaaaaccgcggatgaagaagcgatcgccgaaggcattgccgccctcgcccgtaccgagggtcacgccagccgtgctcaggattgcctgcttcaaggtggtcgcgttcttgtcctcgagcacctccttgctgagcacggtgacggtcttcggcgtattgagcagcggctctggaaacttgccggacgcctgcagccgatcgaccttgtagggtgcgatcgggtcggcataggggttgcggtccggtgccaaaccgccggcgttcgggaagggcagcggagcggccgcgggctggttgcgctgcgcggcgcgccgtaaggcattgcgggcgcggacctgctcgggcgagggcttggacgcgagcgctcgtggccgctcgacaggtgcgtccaccgtgactggcggaaggctggtttgctgcgcttccgcgctgcctgagaaggaggccactgcgatcaaaccggcgactgcggagacccttttgccggaattgttgtcgcttggcccatcgatcggatgcaccgccgcgatcgcgcgcaatgacctcggtgcctttgtcccgcccatacttcgtcccccacagatcgctcatgcgcatcaattgcgatgaacgatgccggcgttggtatcggcgacaaaattgcgggtcaatgcgaatagcgcgaagcgatttttgaatcggtctagatcaaaacaattctaaactttttggtgcggagtgatcaaatcctggctctggcctatttcaattcaacaaaaaagctcaacggctttgctaatcgcgtcatcttccctcgccgggtcgcctcatcttggcgagccggacgatactgcgtgccgcaaatgtgaactcagtgagcacacatctgcgccggccaaaacggtttactcataaacgtgcaggatccgccggctgcgtgggtcaacgatgacgcgtcgatcgttgacaataccatactgataagcgtgcgcgcctggtacttgggtcacaaatcgatccggcagcgggtggagactaaccgagcccggcaagtgtccccccgcctcggcgtggaagcccggctcatgcacggaatcaaagtgctggctgctggcgtgctcgtgcagaatggccccgtgctcaggggcaaagctcaaggtcccgtgtgtggcgcggtcgtgcgatggcgccccatgtacgtcttgggccgcaacgctcccggccaagctcagcgagagcagtccggcagccgctgccaagagtttaggtttcaaagattgcatgccaactctcagtcaatgtgtcttttatcaagcgcgtcccaagctttgcgcaccgagcgctacatcagcagcggctcaatgatcccgcggcgcaggattgtcgcgatgatcaccgtggcccgcttgatcgtggggcgctgcagcgtgggtatcgaccccggcaccgtggttgtcaacatgggctccgacagttgagtggtcggtgttgacgtggatgtctggcccgttcgcgtgcgtaccgtggccgtcatcatgatgttcatctatacgcacgggatgatcctctgcatatgcaacggacccgagcgccagaacggcggcgcacagaatggctgtcatagttttcatatttgtcctccttaacaagcataccgccctcaacgaggtacatcgccgcttgttccgcggagccgcccgcagcgtcgttcctgcccgctttactggagttccgcggcctctcggccaggtaggaccagatagtagcttcaataaggcatcaaatatttgcaggcgccagtcagcgatcccagagcaaatcgataggagagaactaactcgtagactgcgcacatccgatacggcttctctctgtatcagaagtgcaattgtcgtccaaatcatctgattgagcgtcaagccacggctccatttttccggactggctttcacagcaaggttaccggagcgcttacctaggggcgtgctcgtggacgcactcgctggttagaagaggacatgcgggcttcggcaagcgcgcgcttgcacgccgtggcgtcgccccttgtatccgccgaccgagcgcgcgcgagtgccaagcggtcatggcgctcgtccgccctcgcctgccgccatccccttgacacggaacgtggtgtaggttggcgatgtcgctgggccgcaatgctctggtgcgcggtcttctcagggctgctggcggcgagggcgtcaagagcggcttgcatcttcaggatttctctcgtgcacgggcctgccggggcagcgtctacgacggccaacaaaagaaacaagctgacaatagctgtgacaacaggctgcaaacctccgcggggtcgatcagaggccgatgcgattgcgtgacggatcaggctgtgagggtccatcttttgtctccgtttgccgctcgtcaggcacacacgttatccgtttcagagctcgtgcgaccgcgacatgccaagtccttcgggctaaccggcgcctggttcccgaagctcagacgatatacctgtcccaagatgcgtaatgctcgcggctcctcactccacgcggcaggcttgtcattatcagcgcaataccaaaagccacgtccacgatagcgctgtgccatgtcgcgccgcgaagcagccaaggcgcagcgatcagccaacagccgaacaggatgttgacgaagcgcagcggacgcgccacttcggccgttgcaatgatcgctatggtcaaaacaagagcgccgatcagatggtcgctgttggccgccgagccgctggcgccaaacaacaacctgctcagcatcaacaggcctcctattcccattgcgcaaaccagattccagggcgctgttgtgcctttgatggtatcgctccagaatgctctcacgctggacaaagtgtcgtggtcatcctcggcgccgcgctcgatcgcgtcgccctgaagaaacgtacgcaagaccggtttgccctggcagaacgcccagtagaggaactggcccatcgcgatcacttcatcgagcgcgaacgggatcatgatgagcatggccaaagcagcaatcagggccggcgtgctccaggttccgatgacgattggctggatgatgatgaagtagatactgatgacgcccagcgggatcaccaggattccaaagaacgtcaccatccatggcatggtgcgccagcggtcgcggccacccatgacggccatcacaatctccaaggtgtagcttacagccccaagtcccgcatcgggtatcggccaggcctttgagacagaagatgtgatgatctcctcagtcccgttccgcggatcggccaagtcgccgctaaagaacggctcccagacgtggtcaacatgaccaagctggtaggcggtgagcatacgcgcaatcaagaggccagtcaggcccatcgcggcaatcggcaggcgctgtgcgccggtcgacgggcagtaagtccagccgggcggcacgaccttgcgatccatcatcgctgccatgctcatcccgggcatcataggcaccagcactgcaaacgcgatgaccagggtgcccacgagcatatcgttgttatattgcgccgcgctagggctccagaacaacagcggagcaaacagaagccagatgccaacgagcgtgttggcccattgcgcaaaccaggccgttttccgcgaaagcgacagcgcgccgaagattgcaatcagaagtccgctcacgacgtcgcttgtcatgagcatgtctgcgcgccattcgaccggcggcaagcgacgctccaatgtgacctcaaacacccttggaccgacggagttgttggcgagggcatcatagatcgcggggctcgcagccaaccaaaagccaagaccgacattggcgaagtgcgcccagcgcgtgcgtctggcgtcttcttccatcatctgcatatgatcagcatggtgcccacgggaggcctcagtcgtccgcgagccgttttgtgtgcaatgaccaacgtggccctggcgccgtgatggtgacgaagtctgctgcggctcggcggggccggagatgtcctcagcaggcgagccggtcccactaccgtaccaggcaacccgcgcagcatcgagcttgttgctcttgtaccaggaagtcggattgctcttgagtgaagcgacgatttttggcagcgtacgccgcaaagaatggtgtggctcccattcgagcaatttgcgagctcgcgtggtatcgagcggataatgcgcgtttgcctgcgcaatcatccaaggtcttataaactctttttcgccgaggacgttgtccgcaagccatgcgccgatgctggccatttcctggggcattcgcaacgtggtccagtgttccttgtgcaacacctgccccacgatgttctgcacctcggcatagcctaacgcctcggtctcgccgacgaggagcggtagctctcgtggcaatcggttgcgatgggcaatcagccgcgccacggcttctgtcaaatcatcgacgtgcacgaacgattggccggcgcacaacattccggggtagacatgcgcgctcagcctgtgctcgtagatgcgcgaaatctgttcggcaaggaaaggattatgggccaagtcgtcatagacaccggcaatcctgagcagcacgactgggatctttccatgctcttttcggagcagatcctcggtgcgcaccttcgattccgggtaagcccatgacggcttaattggcgaatcctcgttgatcgttttctcaggactatcggtcgcctcgtgcacgagcatcgagctcgcaaaaatgaattgcccaacttcgaactcctgcagggcctcgatcagccgtcgcgtgccctcaaccgtgattcggtcatacaatgggctcggctcgcccgacaggtcgaaataggcagccaggtgcagaacggaagcgatctgtctaccgaagcgagaccttacacttgcaagcgcggttttgacctgttcgctcgagctaacatcaaaatcgatggcgtgagccgggcacggcggatcgggcggtccagcccggtcgagaccgatcaggcgatagtcgtccgcaaggcggcggaccaccgcctttccaatgaagccgcttgctcctgtgatcaggacgagcggcttcgactgtcctttttcgcgctggggggcagatggcatctcaatctcgcatgcttaaaaatcttgagcccttcttctcgggtcaggcgccgctaaaccgcgaagttgcgcgcttaacctcgccggcacggaccccgtggttggcaaggaaggcttcagccgcgggcgcaaggatctcgatcttggcatcgtttaacgcgccacaggcttgctgcacgaggcgaacggcctccgcctgatcgctcacattggcgtaccagatctcctggtcatggtggccctcgcggaaatccggccaggttacgaggatttcgtagccgtcggccggtctctcaaatcggggcgtgatcgcatctgaatttttgcgctgcatttatcctcgcattcgttcacctaagtcctgccaacggaccaatgcacccgggctaatccctggctagttgaccagttccttggtggccccaggggcccggccgacattggaacgtcctacgtgagcccaagttctccgcactccagataaggagagcacctatgaacaagcgcgcaatcgcggcagttcttgccgcaactatggtggttggcaatatgagct

SEQ ID NO: 319 - DNA, 2438 bp, Bradyrhizobium colbertium
accagaccggcggatgatcgggcaacaatgccatcgtttcgacgggctctggccgcgacagcagccgtggcggtcgcggccagtcgccctgccaggtcgcgcccgtttccggtgaaagcggcgggatagacgcgacagaccgttccggcacgtcgctctggaccggcgtgaagcggcagagctgcttttcgccgacgcggttcgacagcacatcgatcaggtcggagatatcggcttcaggctcttcgacaagcgaggaaatcgcctgcttgtcgcgcagcggctccgcaacaatcgcagccagctccatgacttcgatgccaaaaccgggatcaacggtttcgatcttgtccgccagcaatcgcgtcaggcgcttcgcgtcgcgaactggctcagccgtgccgacacggattgcctgacgcgtattgtcgacgcggtggaacagaaggtccaaccggcgtgcccccagtcccctgccctccaactcaacgcataagaccgcgacgagcttgccgatatagcggccgatggtttccgccgcgcctataggctcgccgaagacgcgacggaccgcaacgatctcgggagggcgcaagggctcgatcggctccgccgcgaggccgaacgcctggtccaggcgacggccgatctcgggaccgaagcgcagcgtcagcggcgcgcgcggctgatccatcaagtcgccgacatgatcgaagccgagcgtgcgcaggcccgcgacagtatcgggtggaagccggagtgcgacgatcggcaggcggcgcaggaacgatccagtttctcccggaggaatgacgagggtggggcgcgtggcgtggcgggccgcggcatgggctgcgccccatgtatcggcgaccgccgcacgcgcttcgacgccggaggccgcgaaacgctcgacaatcttcgtcagcatcatggcttcgccaccatggagatggtccgcgccggaactgtcgatcaccagaccgtcaggtgcatccgccatgacgacgggcgagatccgctgcaaggcccagagcgcgagtttttccagaccctccgcgtcggcgcggatgtcggcatccaggacgaccaggcccggggcgagcgcctgcgccttggcaacgggcatgccgatgcgcaggccgagaccttcggcgccggcgtcgagcgcggtgacgacacgacggcgacctgttcggccgataagaaccagcggtgcctcatgcagaggcgatgcgccgcccaatttccttctgaggcgatccgttggccacctcggaaggaagagcgatacgacccttgtcatcgcaagcttccacttcaaaatccgcactttcgcccgcgcgacaacgaatgagttcaaggagccatcgcgcgcgagcgaggcctgggacaggcagcggcgcggacggcaaaaccgagacgcgccaacgggtgatgctcgctgtcggcaatccgaaatctgcggcttcggtctgtcgccgccagcggcgtaacgcgatgccgagtgtcccggacccttcagcggcaagctgcaggcgacgcgacgccgtcatcgaaagccgcgcggtctctcccacgacggcaccaagccctccatggcgaagcccttcctccatgcaggccagcagcgccttctcatcaccggcctcgacatgaatgagccggtcgggatgcaatccggcctgcgcgattgccggcatgaaaagatcacgccgcgtcaccacccagagcaccttgcctttggtccttgcggtgacgcccgccgcaaacagcgcggccgccgcgccatcgacagcaccattgcccccgccggccacctcatgcaggctgccgagtgccagcccacctcccggaagccgtctgtcgatgtccgatacgccgaagggaagcacctttcgcgcgcgtcctgtcgtgccctcgagacgcgcgatgcgctctcgaagttccgcgatcacaggactggcgacggcttccggcatattgaaaaaggctgctccttgtggctttgcaaagggtctctccgctgctatgttctttatttgttctcaatcgcggcatgagtcaatcggactcgcaaaagagtcttcggggaagacgctcatagattagtttgagaacaaccgtgtgcttgcggacggccgttgattctcaagcgaaaaccgagcggaccgtgatgaatgcagcgcatctggaaaaatttgacgacaggcaacgcgaagctgtcgagcacggcaccgctctgaccggcccgattgatagcccacggttgatcatcgccggcgcggatgcgcgtgcgcggcatccggcgatagggagatcggccagtgtgcaacctttataatctcaccacgacccgcgacgcggtgatgcaattcaccaaagcgttccgagacaaggctggctggaacgagccctccgtcgacatttatcccaac

SEQ ID NO: 320 - DNA, 3133 bp, Bradyrhizobium colbertium
actctgtgctgtctgaaaatccggatcagacacggcttcgcgccatttttcatcgccctgcttcacaagcgacgccagctgctcccaacgcggtcgtccgatctttggggccgcgcctatagcgacgatcaggtcctcgggaagctctctgacgagcgaaatcatcgtcgatagatttcccttcgggactgagagcgctgacatgatagccgtgcgcgagaaaccacgatcttcaaggcggcctgcgaacagcgctcgctcgatgaatgagagatccttgcgatccgtattctcttttccttgagcgacgatcagttcctcgtcgctgagctcgcgcacgatcgcctttacagggcgcccgatggcacggagcgcggcgactcggcgatgcccatacgccgcttgataacgtccgggagcgtctgcgcgaggccgaacgaggattggaacctgttgcccatcttccgatagccccgctttgaaggcctcgaactcggcgccgtcgctcacgttgagacgatcgcgtatgaaagctggatcgacgaggttggggtcaagctcgacgacttgtgcccccgaggccagctgcgcacggagcgcatgtgcctcgtcggcatcgtcggaaaggctctgcagagagagacccatcgctttgagcgaaccagatgacacaggcgagcgtgtcggccgatcttcgctcggggcgggaggcgcggttataggcgccatcatgactttgagctgatcgcggcgcttgttcatgtcgccctcccccaagactcgagaacaagattctcgatttcaacatggaccgtgtcgagtgcctcgatcgcccggtcataggtgctgcgcgtgaaattctcacggccgatttcgtaaagggtctgcttcgtcaacccagcgtcagcgatcgccgtcgacttgagtataggtgttgtcaggacgcgttcgccgaacaggcttcgcatcaagccgacgatctgtccctgtggcccgtcggaaggctcgtaacgcgtgatcgcgtaccgaaagaagtcgtagtctgcgtcgccacctgcctgctcgacgacgtcaagaaggcttgaggtcatgtgcagaaactgcgacatcgacgcgacatccagcatttgaggatgaatcgtgacaagaacgctcctcgcggcgcaaagcgccgagagcgttaggaaaccgagcgacggggggcagtcgagaatgacgacgtcgtatcggtcttcaactgaagccaacgccgtcgcgatgcgcgaaaaaaacattcggtcagagccgcggcggcgctcggcgagtacgcgcggtgtgtcgtgctcaaactcctggagctcgagattgcctgggacgatatcgagccctgcgaagtacgtcgttcgaataatatcgctcaacgggcgctgttggtcgtcgtagcggatagcaccgtagagagtgtcgttgtcctgtaggtcgaattcgggctgcagtccgaagagagctgacaacgacgcttgcgggtcgagatcgatcgcgagcgtccgaaatccgcgcatcgcaaaatattgcgcgacgtgcgcggccgttgtcgtcttgcccgatccgcccttgaaattcgtgactgcgattacctggagatgatcgcccgcacgacgagttggcaaataattcggcttggtgcgcgcgagcgtccgacgcacttcgtggatttgctcaagcgtaaacagacgccggccgcgggcattcttttcggtctctggcacgtctcccgcgatcgatagctggcggatataggcatccgtgacgccgatcagcttcgcagcctcgcctgaggtgaatttacgtagctccttctccgccgccggagggaaggcacgagtgcggagttccttcagctgtgcgctgagcagatcagcatcggactcgatcagacgcgtcagtgaacgcaccttctttccggtgcgatgactggggtcgatttgtgttaggtctgtcatctacgctcgatgtcgctatttttcgtgttgagcgtaaattctcttgttcttccgagtcggtcaagcgatttagagttaatgcgcgttaaccattgtggcgaggccggcgtaccgtcagaaatgctcggggactcggatcgctatgcatcacgaggggaaacagttttggggcgtcgtatatgattcgcgccgcctggttgatgcctcggtttgctattggtgtcggagaactccacgaaaagttctcagctgagaactttgcagtggcatgaaatccaaccgcgttcgctcattaggggagcatcctagcaaagccggctgcaaagcgcaggaactgaaacttggctcttccgatcagggagttctcagctgagaacttccgacaccgcgtaccattgcaaaggaacggcctagtctggatggcgagcggcttttagcgcggcgggcgtgggctcgtcggatgcgttcttgatgataacgtttataccccgagccgcgcggctctgccccgcgcgcgctgcgcctcgttataatagctcgacgcctgctggaccgaccgatgttgggactgctgcatcgcttccggcagcccgatcccctgtcgcgccgcctcggtcagaaatccagatctcaatccgtgcgcggtgaactccctggggtcgagctcggccatcgcgcagcgccgcttgacgatcaggttgatcgattgcggtgtcagcgcgcgctcctcgatcgcctcccaacggtcgatcgcacggaagacagggcccgtctgaatatcagctcgaaacagccactcccgcaatgcttcgaccggcggcccgaccacgaacaccctgccctcatcgtcggcgtctgcagtcttggtgcggccgagctggacggagatgcacggcaaggtcggagaattcggatcgcgcggatcgagtggcacgtcctgctcctcacccagctgctcgacgcgaagtcgcgccacctcgctccggcgccgcccgccggaggcaaacgccacaagcaagatcgcgagatcgcgggtgtcggccagccggtcggtcgcgcaggttgcagcgagcttgtcgaggatgtcacgcgtcaccgcgcgcttgctcttgcgccggcgtggccgcggcgaagcccgcaccgagaggcgc

SEQ ID NO: 321 - DNA, 1596 bp, Bradyrhizobium colbertium
atcgatcgcttggcctgcgtctccatgattatttcattgcacgcgcgatcgatctcttgaagcccggcgcgctcgcagcctttgtgactagtgcgggcaccatggacaaggcggacggctcggctcgcgaacacatcgcgaagtcggccgatctgatcgccgcgatccgtttgcccgaaggcagcttccgcgtcagcgcaggtacggatgtggtggtcgatattctctttttccggaagcggaagatcggcgatcgtgagcatgatctcgcttggctcgacctagacgagatccgtccgacaactgacgacgaaggcgccatccacgtcaatcgatggttcgcaagacatccggaactcgtactcggcgcccatgcgaccgtccccggtccgttcggcgaaacctacacatgtcgctcccgcgacggcgaggacctcggcgccgcactcgccgctgcagtcaatctccttccggaggccatctacgacggcgagccggacgtgatcgaagcggatcgggaagatgacgccgatcaggccgaggcgggtctgccggcggagcgtcacgttcgcgagggcagctatttcttcgacccgtcgcgtggcctgatgcaggtcctcggcggcgtggccgccgcgatcaaggtccgcaagggccgcagcgcagacggcatccccgagaagcatgtccggatcatccggaagctgatcccgatccgggacgccgtgcgtgagctgttgaaagcgcaggagctcgaccggccgtggaaggaggcgcaggtcaggctgcgcatcgcctggtcgaatttcgtccgcgacttcggtccgatcaacttcaccacggtctccatgacggaggacgaggaaaccggcgagatgcgcgagacgcatcgccgcccgaacatccagcctttcctggacgaccccgattgctggctcgtcgcttccatcgaggactatgatctcgagaccaacaccgcgaagccgggtccgatcttcacagagcgcgtgatctcgccgccggcgcctccggtgatcacctgcgccgccgatgcgctcgctgtcgttctcaacgcgcgcggtcgcgtcgacgtcgaccacatcgcggagcttctgcatagggatagcgacgatgtcgttgccgaactcggcagcgcgatcttccgtgatccggccgatgggtcctggcagaccgctgacgcttatctgtcgggtcccgtccgcgaccggctgaagacggcccaggctgccgccgcactcgatcccgactatgagcgcaacgccactgcgttgcagggcgtgcagccggcggatctgcgtccctccgacattaccgcgcggctcggcgcgccctggataccggccgccgatatcgtcgccttcgtgaaggagacgatggatacggacatcaagatccgccacatgccggaattggcgtcgtggactgtggaggctcggcagctcgcctggatggccgtcggcacctcggaatggggcacggatcgccgccacgccggcgaactgctcttcgatgcgctgaatagccgcgtcccgcaaatcttcgacaccatcaaggacggcgacagcgagcggcggg

SEQ ID NO: 322 - DNA, 1099 bp, Bradyrhizobium colbertium
acggcgctttaagccaccgataacgcatcaaaccgccgcacttgtcggcaaataaaaacgaacggtaatcttgcattatcgatcgtttttccctttatatagcgagatgagctctgacgccgcgcgcagccgtggaatcgaccctcagcatgggctccgcgcagcctgagagcccggcgagccccggccgtcgcccgtcgatcgcggccacagagacgtcggccgagatctgcagcgaccttccctcccctcccagcaaagtcgtggcgcctctttgggaatggagggcggggcgtggtccttcgatattccgggcgcgtgcggaatgttgccaagaaaatccgccgtcgtgagatctgtatggattgtatcgtattgatgtattgattatagtatcagtacaaagggaaggtgtttccgatgaccctgcaaatccgggattcccgtgctcgcgagctggcgaaaaaactcgcggagaagcggaaggttaccatgacggatgctgtgatccaggcgcttgagggtgaatggcgtcgggaggctgagaaggagccactggcggcccgcgtgaggcggatcgccgacgatctcgccgcccatgctggcccaaaccgacggacgatgtccaaatacgagatcgacgccatgtggggccattcctgatgttcatcgatacttcggtgatcgtcgccctgctcgccggcgaaccggaggctgaccgcttcgcgcacgcgatcgcgagctccaaggcgcgttttacgtccggtctggtggttctggaggcttcaatgcggctctcaaccatgctggacttggacccggtcctcgtcgagacccgcattcaggccttgttcgaggaagccgggatttcgatcgtgccgatcaacggcagcatcgccactaaggccgtggccgccttcgccagctttggcaaagggcgcggccatccggcacagctcaacctggccgattgcatgtcttacgcttgtgcacaggcctatcgcgtgccgttgctgttcaagggctctgatttcgcccggaccgatatcccggtggcatagccatggttcatacgccggacgcctccatccctgacaac

SEQ ID NO: 323 - DNA, 4280 bp, Bradyrhizobium colbertium
  misc_feature (174)..(229): n is a, c, g, or t
gcttggcggcaggggaagaagatcgcgaacaagccattgcgggcaaaggtcggcgagcgcagtgagcgtattgtggcgcgtgatccgccagcaaaaggccggtatggacgtgggccaaacagcccgacaggagagtaacggctcaaaggcctcaccaccgtcgcgacggcgacnnnnnnnnnnnnnnnnnnnnnnnnnnnnnnnnnnnnnnnnnnnnnnnnnnnnnnnngcggcttgcttcgccgatcccaacccaaatggagaagcgctcgattgctcgtgcgggacggcgcggtgatgccgcgacgtcacagggcatcaaaggtatttcgtcgcaacaatcggctgcccgacgtctctcaccctgaaggcagaggggctttctccaacagcgaggcaatcagcgcgtctggtgccttgaaccgtccacggcgcggcgccggcggaacgaccgcttccaccgcctccagcttttcagagggatccatgcggagataactctccgtggtgcggatatcggcgtggccaagccagagcgcgaccttgcggatgtcgcgagcggcctgcaacatcaggaccgcacaactgtgccgcagaagctgtggcgacagcgtgcggccgctcagcgtcgggcatcgagccgcggcggcctttgcgtgcttttcgaggatatactcaaagccggcgcgggtcatcgccaacccttgggcgttgatgaacagctccgtcgccggcggctttcctcgcaccgcaagccacgcgcgcaggtcgcgtgcggtttctttccagagcggaaggctgcgtttcgcgccggcccttgccgaacaccaggatgcttggcgtcggctgcagagtgacgttctccagggtgaggccgacccactcggagacgcgcaggccgccagcgaagcacaggtgcaacatcgcccgatcccgtagccctaagcgtcgtcgtgtcgggcgcatcgagcacggcgcggacctcgtccatggtcagatggcggatgagcttctggtcatgacgcttgcccgggacaagcgggaccttcttcccttcggacgaaaactcgcaaccggcaaggacgcggggcatatgtgctgcaagcgttgcgggatgcgctatcgcggggcaaggggttcgatattagagggggagcgcacaacgtccccctctgcacgctcagacgaggaaatgtcaagcagcctcatgcgtatgatcggcctgcggctgcaagccatgcagatacgtaaccgcccgctgcgcatgctccgcggcggaaacgattgctcgccaggtcgttcgacagttcgacagaacggttagccaacttgcgaggtacgcggcatgatccggtctcggctcgagctcagggacgatctcgaggtcggcgcagaccagtgcagatcctatttccgcgacttatcttgattgatggctggcgcggaccaatcgcttgttcaggcacccaaggcgcgcgcgagcccgacaaagctatcgacatacagatcgaaccaactctcgggtgcggtatccggattagcgctcggaccgaactccaacgagcgtgccacgaacgcggtacgcatcccgaacgctcgcgcggctcttaggtcgtacttgtgacacgccaccatcagaatctcgtcgggccgacagccgaggtaatcgaccgcgagctggtaaacagctgatgcaggcttatagctgtgcgcgagctcggctgtgagcacaacgtcgaacggcaggccggcatgcttaaccactgcgacaaccgccgccatgcccgcattggaaagggtggacgtgacaaaacaccgccgtaaccgtgtgagtccttcgatgctatccggccaaggatcgagtcgagtccagatttgattcagctcatctcgctcaccggtcgtaaagactcccgataggccccgccgctccagcagcgtgtccagcgcttcgcgatagatgcggtcgacccggagccatggtcgttgacctgcaataacctggtcaagcgccatgcggtagagatcgcgccaatcagaggacagagcagtccagtcgatatccaagcccttggcacggttcacagcttcgcccatgcgcagtataggttggtagaaatccacgcacgtgccctgcacgtcgaaggcaagcgcccgaaccgtctccagggctcgcgtgtctttcgcagaggtctgctccatcacgtgcacccccaattatcttctccaggtccgtcttgattgctatctttcgcgacgcccgcgcgccgcaacatctaatcgagatcgattgttagagatgaaattcttcaataggaactatggatgtgtacagaaaatgttgcaatgtaaaactgtgactacgacctccgttgacttgtaatcccacgtccgaaaagcggtacgaccacgcaagaccgtcccatttcaatcatcatccgataaagctcggaaaacctacctataactacaatggataccctctgagacagcttgactgttcagataaatcgctgatggcggcacgcgccttcccgtctttcctgctcatattcggaacctccgtttcggaggccgcgcctatcgcggctcctggcggcggtccggcgacgggcacgaagtccgcgcacccgacgagaccccactgcgcgcaatggggtcgagaacgggccgtagcaaagcgaaggacggcaaggccgttgcgctgactgctggcccggcgcaggagcaacgccgcaaggaagccgcgagcgcgaccgcctccctcccctcgtcaatatctcgttcttcgagcgatcatcgcgagtggaaggccggtctggtggtgcgtcccttgcgattcgccggatcacgcaagccattctttcggccccgtcgaatattcagagatcggatccaggtgcgaagcgcggcggcccgcgctagccttcgggaagcggcgtcccgattcggttgtgccgcacacttgaaccggcacggcggcaatgacccaagcggcacacaggctggaactggcggagattgagcagcatcggatgatgccgcacaatatcgagtccgaacaggcgctgcttggggcaatcctgatcaacaatgccgccttttttcatgtctccgattttctgaagccaaaccactttttcgaacccctccatggcatgatctacgagatcgcaagtggattgatcagtgcgaacaagacggtcactccgatcacgatcaagacatttcttcccgccgatctcgatattgctgggttatcaccatcgcagtatcttgctcgccttgccgcggaagcgaccacgatcatcaacgcagccgactacggccgaacgatctatgatctcgcccttcgccgcgagctcatcaacatcgcagacgagatccgcaacgcggctttcgatgcttccattgactccgcgccggcagaacagatcgagttggcggaacagcgtctttatgaggtcgccgagaccggtcggtttgggggagggtttgagacgttcgactcagcgctgtcccttgccattgatagggcggcccaagcctatcacagcgacggtaagctctccggcttaccgtccggcctcaacgacctcgatacgaggatgggtggcttgcagccatctgatctcgtcatcattgccggccggccgggtatgggcaaaacgtcactcgcgacgaacatcgccttcaatgtcgctcggtcctatcagccgacagtggcagacgatgcgtcgcgaaggggtgcggccggcggaatcgtggcgttcttttccctcgagatgtcctctgagcagctcgccacgcgcgtcgtgtccgaacaagctgaagtctcgtcatcgagcatccgccgcggggcaatcgatgagcgggagttcgagcggctcgtcgagcatcgcaacacgatgcgccgcattccgctttatgtcgatcagaccggcggtttgactgttggccagttggcggcccgcgctcggcgtttgaagaggcagcgcgggctcgatctgatcgtgatcgactatcttcagctgatgcagggacgcacgcagcgcgccgcgcagaaccgagttcaggagctcaccgagatcactacggggctgaaggcgctggccaaggagctcaacgtccccatcatcgcgctctcccagctctcacgcctggtcgagaaccgggaagagaaacggccgcaattgtcggacctgcgggaatccggttcgatcgagcaggacgcagacgtggtgttgtttgtgtttcgggaggaatattacctcaagaac

SEQ ID NO: 324 - DNA, 1880 bp, Bradyrhizobium colbertium
ccgtacattaccggatgcctgcggcgaagaagctgaaaggcaacaccgcctccaactcgcatgctggcacagaggatgtcatcgtggcatcgaagggtcggcccgatgtgacccgcaagggtgtggaaatgatcggcgactaccgcaccgacgcgttgcgggaagcacttggccgcgcgccgatcgaggacgacaccctcatggcgctgctgatcctcgcctttgctggtcagaatgtttcggtcacgaccggaagcggcggcacctattatggccacagccgtctggccaagcacgcggcggcgctgttcgacgcagacggcaaacttgtcttcgacatggatgggctgcgcgttgcagcgcgcgccatgctgatcgacgtgttctcgtgtcgggagaatgccacaaacagcggcatcgtcgcccgcgtcgccggcgccacgatcggcgcggacgagttcctgccgacgatgggcaccgaagagttcctctcgtgcttgtcgcggccggcgcttgagagcgcgtgcaaggatacgccggtcctgccgcgccagcgcgtcaaggatacgcgcgctgcgcttgttgagcacttcaaggatggacgtttcgtgcatcccgccgcgctcttcgcgcccgatgcggcgaagctcgccgaatggcagacgtccagcaagcgcgagcctgaggacgccgacgacgtggaggacgagcgcgacggtatggccgacgggccgtctgacgaggacaccgaggcgttcagggaagcggccgaataggcctgcgctcccttcaatcttccgaacgacctgccgccgccggctcagccggcagcggttttctttccatacatgcaataactcggaggtctcgatgtccgcgcatacgatcatcgacgatgcacagctcggctcgatcatcccccggtctgatcgggacgccgtggaggaacgccgctttttcgttcccttcgatgaatccaagtgcggccggctcggcttcgttattgtttcggaccgccgtgccgtcgatggcgcctccgtgcggggaggcacatcatgagcgcctcgcctgatctattgattgacctctctcgcatggaggaagcgaggcggcagattcagcgccagctcgacatgatcgatcggcttatcacgcgccgcatgacggcgatgatcccgcagttgaagccgaagcatacatgctatcggcgcggcaagccgcccaaccggaacgcgttcctcgaacgttatcgcgcaaagcttgcggcaatcaccgccgagcaccagccggaggtcgacgccctttaccgcaagcttgcccgccaggatagggccatcgccgcgttctgtcatcgccatggtcttgatcagggtaacctccacagcatcgcagcggccggtgaatctacgcacgattgcactggcgccgaggtgccgtcgcgtggccaaaaagagtgtgatcgcggatgacaccgcgcgcgccacaatcgaacggttgctcgcgatcggggggagtgacacgggccaggccaaccggatcgcgaacttcatcttggcgtggcggaatgtcgccggcctccgcggagtcgacccggctgatatgttcgccgtggatcgcgacatctctcgtcacatgccgaccgtcgtcgcccgtcttgcgcaagcccctgctggcagagaatcgcggtgcctaccatgccgagatcgagaaacctcatcaggctacggcggccggaggatctgggcgcgtaaaatccaaacctgacacgcgccagtgccgtcccggctggccgaccgggaaggctgtatggaaacgcgtcgcgaggttcatcgcgatcattccagatcggttttctcttcatcggtccggcgcgccggacc

SEQ ID NO: 325 - DNA, 3334 bp, Bradyrhizobium colbertium
  misc_feature (786)..(795): n is a, c, g, or t
catccccaccaagccgcgccatcatatatcgtttgctcagtactgccgatgcgcgagaggcgacagcctggagtgcagcgtcgccggcggcgtggccgaacagatcattgacttctttgaaccgatcaaggtcgatacaaagtactgcaatcctctcaccctttgcgcgagcggcatcaatttctcgatccacttgggcattgaagtgattacggttaggcagcgacgtaagggaatcatgatgcgcgagatatcgaatgtggcgctcggcttctctgcgcgtacgtagatcgcgcgcagcaatgacctgatgcggccgccccgcgaaatcgactgatctccggaacaattcaacgggaataatcgatccatcgaagctccgcagatttgtttctgctggcatgttcgacgtgatctcgattttggccaggatcgacgcatccggaaagcagatcgacagctcgcaccccacgagccgttcggccgacaatccggtcatgcgagcgaagctgtcgttgacggtcgcgacgatatcgccgtcgcaaacgacaagtccctcgatcgctgcattggcgaggctacggcatcctgtctgcctcaatctctatgcgtcgacggtcgcgcaggtcgagcgcaatgccggccagcgcgagaatgacaacaacgaagctggcgaacccgacggctccggccagccaataggctggtagggcagactgcgagacctcaatcgtcggatcgggaatgatggaaaccgcgcccatcgcagtgaagtggtggctaacnnnnnnnnnntggctgcaatcccgcctgcgactatcgcgccacctagccacggcccgagacgccaattcttgcgcgtcgagacggcaaggcctgcgccggtcaggaataccgcggcgatcagtgatagaagtgtcagtccgatgttgtagccgctcggaattcccggtgagaaggcgagcatggcgatgaaatgcgtcgcccagattccgaagccggtggatatggcagacacagcaagccagacgctacgcagatctccggttgatccacgcgaatggcggagcaaggttatcgcggcataggaggcgagcatgcaaacgaatgccgcaagcaccacgagccaaggatcgtgagcgccggtgatgcaattgtaaaccttcaacatctgggtgccgcgccaaggccgaggaacatgaataataattcaagctagcgccaatttcataacgagccgtaaaaaccggaactcgcttgggagcgcgaggtgccagagtctcggcggtttgccctaaccctaggctcgccacagcattgctagtgatgtacagggacgatgagttgtccgattgggctcgagattgtgcaggctgcaggtggaggcaccggtatcaattggtacgatcgttggagacgccatcgcagccagctcaggcgctattcgcgggactaaaccgaacgggatgcaattcgacctgaaaatcgctgggtgttgtcaagttgcaattcctgtctccggtgtaggggcgacggtagcgatcactttgtcggggtcgcggagatgaagtgatcatggcgccctggagctaagctgcttggtcaaatccgatgaaaacgcttgtgttgtccctttataattgccaccttgaagggggcagagagaaccaacgtgcccttcctcgcttaccccattcagaggcgcgctgctcgaaaggcgtgtcaaacgccatccggaactgccccctccgtcatgaagaactgcccccgccatctggcttatgatctcgattgaaggttgtttccgctagtgacgggccggagggaggcggagccgactggagagccaacaccggcggtcgtcggcttgatgaggccgctctaggcttagcgccgagccggtagctgtcgccgcggatcgtcagcacgtggctgtggtggcaacagcggtcgaggatcgtggtggcgaccacgagcgtttcgcggaagatccgcttggcgatcttgccgatatgatcatgataggaattccaggcgacgagcagcccttcgccgggactcaaccgcgcgatatgtggcttctcgcaccgacgacatggacggcctggcgccgtccatgtcgatgcccggccgctattcaaatccagcccgatcgtcccaaattttttgagcaaccctctcgtctgtgcgcggccgctcgaccgtcgcgcatatgtgagacaccgcccaactcatcatcggtcaagctctcgatgctcggaagttgaataacaacatctagcccgtcttcctcgcccatgttcaaagctctctatccttaggaatcgggcccaccgctccatcgtcatcgagatcgtcttcgttgacctccccgatcggatcgggaagctctcccgccagcagcttatccttgctgaggaggccagcctcctcgagcatttccatgtccggaagatcgcgcagggtttccaggccgaagtgcgacaggaatgccttggtcgttacgtaggtatagggcgcacccggttgcgggctacgcggcccagcagcaatgaactctaagccgcgtaggcgcgcgatagtatcgcggctgacctccttgccgaagaattgcgacagctcgctgcgggtgatcggctgataataggcgatgcaggcgaggatcaggttttcggcctgcgacagggacttatcctcgctgctgccgatcgccgtccggatcgcgtcgccgaaattctttcgggtgcggtgctgccagccgccagcgacggagacgagctcatagggccgatcgcagagctctcggcggatgtcgtcgatgatgagctcgaggttgcaatcgcggccgatgactcgcgccagcacctcgcgcgcgaccggctctggcgaggcaaaaatcaccgcctcgacccgccccatccattcgcgccagcgcagttccggtggcaggtccgccaattcgaggtcgagatactctttcgttcgcgcgcgccgccccatgtcacaacccgtataagcggaaggtcggtcggccggtcagctcgcgcacggcgccgagcgccacgagccgctcgaacagccggcgcgcgctgcgatcgctcgcgatcttgccggcgccggcgggctgagcgtcttccatcaacaggagcgccaccatcatgtcggcatccttgccgcgcagttttggcgcggccgccaacaagcgagcggcgcggcgcactaagtcggaatagagatcggcagcccctgcgcacgcacgtgtataagcgagcgcacagacctttaaccaagtatcatcgggtccgccggatttgcccgccgcgcgcagatcgcc

SEQ ID NO: 326 - DNA, 6231 bp, Bradyrhizobium colbertium
  misc_feature (514)..(538): n is a, c, g, or t
  misc_feature (1537)..(1546): n is a, c, g, or t
  misc_feature (2771)..(2784): n is a, c, g, or t
  misc_feature (3083)..(3127): n is a, c, g, or t
  misc_feature (3723)..(3788): n is a, c, g, or t
tgccttctgcccgttgtcagacctgtcgacagatatcgatcgggcctgggcggcggaatgggttgaaacgctagtggcggtacaaggcgtaacgatcacgcctgatcatcgcaacgccatctcgcggcagatcggcttgatggcggcggcccgaggacggtccctgtccgacttcgtgtcaggcgtccagatgcgcgagatcaaggacgcgctacatcactacacggtcgacggcccaatgggccagctgctcgatgcagagaaggacgggctgatgctcggcgccttccagacatttgaaatcgagcaactcatgaacatgggcgaccgcaatctcgttccggtcctgacttacctgtttcggcggatcgaaaaacggctgaccggcgcaccaagcctcatcatccttgacgaggcttggctgatgctcggtcatccggtttttcgcgacaagattcgcgaatggctgaaagtgctccgcaaagccaattgcgcggtattgctcgcaacgcannnnnnnnnnnnnnnnnnnnnnnnngctcgggcccgttgcgctttcctttgtcggcgcgtccgggaaggacgacctgaagcgcatcatggcgctgaaaaagaccgaggccaactggcccgttcactggctcaaggaaagggggatcggccatgccgacacgcttctcgcggacgagtagcgcattcgcgctcgctatcgccattgcgacgccatcgggcgattcggcattcgccggctcttccgtcggaggcgtcggtggcgcaacggagttcacccagcttctcaacaacggccagttgatccagctcgctggtcaatccgcgcaacagatcaacaatcagatcacgcagattacgcagctagcccaacagcttgagaaccaactgaagatctataccaacatgttgcagaacacggcgcagttgccgtcgcatgtctgggggcaggtcgagaacgatctcaagcagttgcagaatatcgtcaaccagggccaggccatgtcgttctcgatgggtaacatcgacgacgtgctcaagcagcgcttccaaagctattcgcagttcaagaccaatctcccgaacggttcgagtttcgcgtcgacctatcagacttggtcgacgacgaaccgcgacaccatctctggcaccctgcaggccgcgggtctcacctcgcaacagtttgcgacggaaaactccacgatgtcgcaactcaagaccgcttcggagagtgcagacggccagatgaaggcgctgcaggttggtcatgagatcgcggcacaggaggtcgcgcagattcagaagctgcgggggttgatcgcgcagcaaacgacgatgatggcgacctggtatcaatcctcgcaagcgagcaaagaccttgcgcaagcccgtcgcgaacagtttttcaacacgactccaccggcaacatccggcggtcagaccatggagccgcggtggtgaggccatccacagttattgttgtcatcctcgtgctcctggtctgcggcgcaggcgcctggctcgttannnnnnnnnnggacacatcccgaggcagcgacttcttcaagccgccgcaggattacaagacaacgggcggccagcagatgaagccacgctggtaggggaggtaaaggtgcgggggacaaaaccggagcttgttctggtggttatggtcggcatcgcgattgctgcacatccggcgctcgcggcacagcaggatggcagtgttctgaccacgctcgaaaattcagtgacgacggctgccaaaggctggcagacgacagttacacaagcggcgaagtcgttgttctggattctcgccggcatcgaggtcggcatcgccgccgtctggcttgctcttcagactgcgacccttgatgcctggttcgcggagatggtgcgccggatcatgtttatcggcttcttcgctttcgtgctcgatcaggggttctcgttcgcgaaggccgtcgtcgacagcctttatcaaattggcgccggcggtggctcggcgtcgccggcagacgtcttcaacgcgggcctgaaggttgcgtctgcgatgtcacagaatgcgcaattcggtctctttcaggacaatgccctcgcgatcgcctcggtcttcgcaatggtgatcgtggtgatctcgttttcgctggttgcggcgatctttgtcgcggtcatggtcgagatgtatgtcggtctcctcgccggcatgatcatgctcggtctcggcgggtcgtctttcaccaaggatttcgccatccgatacctcgtatatgccttttcggttggcatgaaattgatggcgctggtgatgatcgccaagatcggctccgacgtcttgcttaatcttgccaaccagacgggaaccggtagcgacgcattcgtcggtacgctggcgatcgccggcatttctgtcgtcgtcttcatcatctcaatctacgtgcccaacatcgtgcagggagtggtgcagggcgtttccgtcggcagtggtatggaagtggtcaagcatgcgggacaagcggcaagcttcgcggccggcggtgcagcgttcgctttgggtggcgcaagggcgggcgccgcgggattcagtgcagcccgcgccgatggtgcttcctttggcgcggctgctcttaaggctatgacagccggcattggaacggcgggcggcgcactggcttctgccgcgcgcgaccaggcgatcggtgcaccgggctcctttggcacgtcgacgctcggccttgccaatgccaagctcgatcagnnnnnnnnnnnnnnaagacgccttgaggcgcgcgcatccgcgaaaccccatacatgacgatcagaaagtcttttcgaatggctgcgcccaacctacccgacaacccctatcttgccgcgcgtctggaatggagcgagcgatatggatcctacgtaaaggcggcgaacacttggcgcactgttggcatcattgccatggtgatggccgtgatcggcttcgcctatgcgttgttccagagcacgcaggtcaagctcgttccctacatcgtggaagtcgacaagctcggcaccgccgcgagcggcggctacccccnnnnnnnnnnnnnnnnnnnnnnnnnnnnnnnnnnnnnnnnnnnnncagatcgaatatgccgatccgcgtgtcgtccgcgcaactcttggaagcttcatctctaacttccgctcggtgacgccagacgccgtcgtgcagaagaaatacattgatcgaacctacgcgttgttgcgtacctcagatcccgccacgcagaagatcaacgattggtttcgcagcaactcgccgttcgagacggcgaaaacaacgacgatcgccatcgaggtgaacaacatcgtcgcgctgtcgaaccaatcgtatcagatcgactggaccgaattcgagcgcgatcggaaggggaaggaaaccggcgagcaccgttttcgcggcatcgccacagtgacgctcactccgccccaggacgagcagaccatcaggctcaatccgatcggcctttatctgcgcgatttggactggacggcgcaactttaataagggggcgggacaatcatgcacttcgataagattagacctcacgtaagcgttcttctgacggcgtcagcggcctgcgttttgctttcggctaccggcgccgacgcgcagacgatgagcgcgaaggaaagaaagggaaccagcatctcaaaccaatggcggggagcgannnnnnnnnnnnnnnnnnnnnnnnnnnnnnnnnnnnnnnnnnnnnnnnnnnnnnnnnnnnnnnnnngtgtgttcaccactcgaggtctgcgatatcgaactccaggctggcgaggtcgtgcgcgacgttttggttggcgataccgttcgctggaaggtcgagcctgccacctcaggggcggtcggaggccaggccattcatctgatcgtcaagccgtcagaaccagcgctcgtcacctcgatggtggtgacgacttcgcgcaggacctatcacatccagctcaaatcttcgcctactcaatacatggcgcgcgttggcttcgaatacccggaagaggtcgggagcaagctggcagatatcaacgcacgccttggctcggaccggaactcaggctcaggcgtcccggccgagcaattgaattttggttacagcataagcggcagcgcctcctggcgcccgacgcgagtctatagcgatggagtcaagacatacatccagttcccatcgtctctcgctggtcaggacgcgccagtcctcttcgtcgtgtctggaggccaaaaccgcatcgtcaattataggctcaaggacgacatgatggtggtcgactatcagatcgagaccgccatcctggtctcaggcgttggcttttggaatcaggacaaggtgacgatccggaggggaagctgaccatgggcttctcgatcaatcgcattattttctcgtgcctgcttggcttgtcgctggccggatgcgcatcgattgggggtgggggcgtggtcgcgagttcagcaccccctgatttgtcaggcgcagcggcggccgcgattgccggcgacttggttacaaagttcgccgagcaggtcaaacctagctctggcacgatcatcctaaagcccgacggaacgccattcggccaggcgcttgagacgtcgttgaagagttggggttacgcggtagcaaccgaccaaaaaacgggtgctgagaaggcgatcccgctcgcgtacgtgattcagacgtatgaaggtcaagtcctcgcacggttgtcgaccgcgagcgtcgatctcggccgcacctacacgacaacggccgctggcgcatcgccagcaagtccactttcagtgatgcaacgcagttaggggaggagaagcagcatggcgcaatccctgaagcttggaagcggtcctgcgggagaggagggcacaaggatccgccgcctcaaccgactgcctatcatcgtcgccatcgcgctggtgatcgtattcttcgcggttatcttctacggtttaacttcgcggggactatatttccgccgcgacgcaggcattgacactgcgtcggcgaacccagcttctaactacgccgatcaactgaagaagggcatttccaacggcattatcggtgaccagcgggacgcgcagacgtttcagcccgagcctcaacaggtggagaaggcggcgaccaatccctttgccggtcgacagcaaacagacgctcgctcgggcgcgcacctcgagccggaggagctttggcgagcgcgtctcgaccgcgaggcgcatgaacaatatctacgcgaacgacaacgtcagcgcatggcgcgggtgcaggcgagcgatgccgcctacgactctccgctctccgtcagtcttggcaaactgcaatcagcgggtgcgacgacaaatgatgctgttgcgacgtcgaagagcgcctcccaggttgggcttggaggtggtacgcaggacctttatgcgaccgccttgcgcgcaggcctcggcttgcagaatatcgatccgaacggtcagagagcgaaggaggacttcttcaacgcggacctgaaaaagatcggctaccttcccaataaggtcgtgtcgccgacatcagcttacgagttgaaacgtggatcggttgttccggcgacactgattaccggcatcaactccgatctccccggccgcatcactgcgcaggtaagccagaacgtttacgacagtgcgacgggccatcttcttctgatcccgcagggtgcgaagctgttagggcggtatgactccaaggtttcgttcggccagagtcgcgtgctcgtggtctggaccgacatcatcttcccgaacggatcgacccttcagatcggcaccatggcgggcaccgacgccgaaggctatggcggcttcacagatcaagtagacaatcattatttccaggtgtttggctcagcgatcatgatagccgcgattggtgctggcatcgacatggcgatgcctgccagttcaccgtacggctatcggcaaactccgacagatgcggcacgaaacagctttgtcgagtcctttggacgcgtcgccgagcagacgatcagcaagaacctgaacgtccagccgaccttggaaattcggccgggttacgtgttcaacgtcctggtcgaccaagacatggtgtttccgggcgcctaccgcggctgacgtgtccacaccaggtgcaaaaggtcgatttatttgagtgaatcgtaagcgaa

SEQ ID NO: 327 - DNA, 6256 bp, Bradyrhizobium colbertium
  misc_feature (3567)..(3588): n is a, c, g, or t
  misc_feature (5375)..(5390): n is a, c, g, or t
ctggtgcacgcctgcccgctgcgcggaccgctgcagggcacgacagcctggaccatgacgcgcgccttcaccgcggagggcccggcttacacacaattgctggcagggctgctcgtgctcgcactgaccattttcggttcggcgatatggctcgcgcgcgtgctgttctcatggtcgcggaagattgcggttctggaggaagcgctgggcaagagcgaaaacagctcggtcgaccttccaaggcttccgcgtaccggcgagcgggagctcgatcggctggtcgacgcgctgaaccagaccggcgatcggcttgcgctggagcggcgccgggcaggtacagccgagcgcatggcggccgtcggacggctgtcggcaggacttgcgcacgagatacgcaacccgatcgcggcgatgcgactcaaggcggaaaatgcgcttgccgccagcgacgacgcccgcaagaagaccgcgctggaagcgattctcaagcaggtcgcgcggctggacacgctgctccgcaatctgctgcagatgacccaggccggcgagcccaagtggatggatgtcgagcttgcgtcatttctgcaaggcacgatcgagccgcaccaggaactggcggcggccaacggcttgtcgctggagacggggactctcgcaccgaacaatccattacctcgctttgatccttcccagttgcagcgggccctcgacaatctgattctcaacgctatccagaacacgcccgcaggcgggcgcatcgtcgtggacgcgctgcggcaacaggacaaattgctgctgaccgtgaccgacagcggcgcaggggtgagcgaggagatgcgcgagcgcctgttcgagcccttcgcaaccgcgcgctccgagggaaccgggcttgggcttgccatcgtgcgcgaaatcgcgcgtgctcacggcggagaagcccgccttgcgccaactgaacgcggcgcgcggtttgagatcgaggtgccatggcaaacgtcctgattgtcgatgacgacccagccctgcgcgagggtctcgcggaggcattgagcgacctcggccacacgccgcaaacggcctcatcgggacgcgaaggtctcgccgcgctgtccgagacggtggacgcagtgctgctcgacctcaatatgcctggtatggacggcatcgaggtgctgcgccgcatcagatcgcaggagagctcgcctgccgtggtggtgctgaccgcctttgcgagcgccgagaataccatcgaagccatgcggctcggcgccttcgaccacctcaccaagccgatcggacgcgacgagctgagaaccctcatggaacggctgccgtcgcgcctgcggccggtcactaccgcgggcaaaggcagcctcgataccctgatcggacctcctcgtccatctccggcctgcgtttcgtgacatgaagagaatggatctcggaaatgaacgagttgctgcgccggcagtctgacgagcaaatgagcccgcattccgacatttctgatcttggatcagctcttagcgaattcgccaggctcggcgaaagggtatgctacgttgatcagaccctctcgcctgagcttgagatcgccgcgcattacgcacagcaagcgggttctcctgcctcttcgcgcagtcaggacgaaggtatcttcgtctacacgggcacggcaattccagcctggctttccgatggatccaagtcagaccgctgcctatcgcggcgccagactgagtggcttgtctcccgaagtgccgctgacaagccgcagcgtattcgactgcacaggcccttatgtcatgaagcatgtcggccggtcgtccttttctccgttcccgttatcagaggtgcgtcgtggatgaacctgtaacaacgttgcgtcaagtacgtgccgaaattgatgcgatcgacgatgaattggtcgccctcttggcccgccgtcttcgactcgcgcagcaagctcgccaatacaaggaacctgacaaaacaagcatccaggcgagcgatcgtgtcgcggcggtgatcgcgcgcgcgcgtgcgcgcgcggtcgcgtcgagcggcgatcccgatatcacccagcgaatctatgaacttatcattagcgaattcacggccgtccagttgagggaagccgcacgacaggctgacgaaccgcaatcggcagagaaggccggaggaacccatgcgaattgagagtgtcatcgcttacgatgctgacttgataaggcggttcgatggatttcgtgccggtcttctgctgatcaacgagctcgacctcggcgaggttgaatccgccgttccgcagatagtcctttcggacgatcaagatgtcgcggagatggccagcatcaaggcgtggcgtaacgtctataggcagatgggcgctaacccgaccaaaacacgtaacgcggcggaagcgttgatacgacggttcaagaaggatggcagcttgccaacgatcaatcccgtggtagatgcctgcaatcacgcggccgttctgcacggcgttccgattgcggcggtcgacatatcgacgatgccgctgccccttctggtgaagcaagccgcgggcaccgaggtgtttttcgacatatctggcaatgaaagcacgctgagcagcgaggaagttacctacctcgatgagcgtggcgagccacatgcgcgctattggaatcataagcaaagcggtgcatccgccgtcaaccgaacatcgaggcgcgttcttattacgatcgaagcgatgcacgaggaagcagatacgtcggtgagaatggcgatggatgacgtcgtccgcttgctgaaggctcacggtgtccgccttacagctagcaattttcacacctggctttacgacggaaactccgggacgttcgacatgctcccggtcgtcgacggctcagagggcgtcgaacggctccaacaaggagcaggtcttgccgaataaggctggtcgtccatcggacgccacaaccaaacacggcggatgacggcgatcggtcctcgtgcggcagatctccgatatgcgggatggacacaatcagacatagccgcgccataaaacgcagccgaacgttgtcatacttgcgtcgtagtaccctgctatcgggcggcgcagaaattgtgatctagaaactttactgcggaggtgactgtgacggacaagacatcagtgcactctgacatgagtgcgctcaagcaatccacggtgcggatcaacctcccggaaatgtcctgggataaatgggtcaagccgggtgccgatggcagggtcaagctcgcgcgtgcgttcggcaagcgggtgcgaatcctcgaactacccgaaggattcgacgagcagaattggtgcgacaagggacatcagggtttcgtgctcgagggcgaattcacgatcagcttcgagaccggagacgaattcacctgcaagcagaacgacgcgttcgtcattcccgataactcgcgaccctcatctccggcacgggccgcctcgatggtcgcattcaacgccagcggattcatctgaccggctatgcccccaatcaagtctgacacctcggcaatctnnnnnnnnnnnnnnnnnnnnnnagcgaatgaatggcgctgctggcgttttgtcgccgcccaatcgtgattcgggtaatcgtgctggcttgtgccacctggaccgggcgccgcactatctggacatggcagccagccggcgaacaggccaggcgtaggcgaaatcgccgcgacagacgtcgcaaggcgcgagaaagatagagcgcgaatgcttctcagatgcgaaagctatgccccggacgaccctgtcggtgagatccaacaggcttttcagcttcttgatcggccgcaatctgatccttccgtgtgctggtcgacggagtgatcatccatgagaccagaaaccagatccaggcggcggtctgcacgacaagattgaggacaaaggccgtttgataagcgatctcgggataatgcccggcagtaggcatccattgctcaagcacaatcccggtcgcagattgcaggacaaatgctccgccgatatggaacacgttcaacgcagcgttcgcgcgtccggcaagctctttcggaaagtaagtagcgaggattgcatagctcagcactgtcgctgcgccgacacaggccacggcggcccacaaaacgtatgacgatattgggcatcgcaagatgatcgccgattgggttgcaataaacaggaggccgacagccccaagtaccacctcggtgccaattccataacgacgcagtcgatcggccagaacacctaataaaagcgcgccgaggctcagcgcgacggccatgacgaccagatgctgcaccatcgctgctcgatcaaggccgtcgacgtctgtaagccactgcgacgcccaaagtccttgcaacgcccacgccgtcccgacagaggtcgccgataatggcgccagacgccagaagtgcggattggtataaatctctttcaaactgaccacgacttttcctccgccggccggcgttgtcgatgccgtggggggcaccaagaggtagatcagggtcgaacagccagccgtgacaacggctaacaatgcaaagagttgtctccaccccatccaatccagcaagaaatgcgccggggaactcgccgtaaccgctcctaaaccaccaagcataaccattaggccgtttaagaatgggagacgttctttgggaaaccacagaacgagggctttcagtccggcagtgaggcttgctgctacgccgagcccgagcaacgccctcccgacaagcagcactggcaaattgtctgcgacggcaaacaatgccgcacccaccgcagcagcaatcaacagagcactctggatttgccgcggcccataacggtccaaaaggatgccgatgggtatctgagccgccgcaaaggtaagaaagtagaccgaagtcaacaagccgagttcaccggcgtccagccctatctccaacgttagaggtgcggcaattagagcgttgatcgttctaaagagataagagaggtagtacccaatagcaaaaggcagaaaaacccgcatgacaagtgcgggacctccaatcgaacttgcaacagctccttgcagcattgaagggtcgattgcggtcagcctcaaatgggatgttgtttctgcgccgacaaatctctcggtgttgcgagacggtgatctggtccggaaaggttcgattgttgccgcggcgctccgtgcggtagcatttggtgctgacgtatgaatgatcttatcggaggggtgtcgggttggttctaaagactcatccaatcttcgagcgcttcgcgcaaacccgctcgtcaagctgtccttatttgctgcggcgcgccgcagcannnnnnnnnnnnnnnncctcgaaacgttctgatccgaccagggatactgcttgctgttccgactttgtcatcggaggcgtaatagccaagtgaaagcgcgcgtggtgcgccacaacttcgttcacgatcctcaaatcggcgctgaggcgatcaatctgatcggtcagtctagagaacccatctgccaccgtcccgagctgggcgccctccgattcgaggaagcgatcgagcgcaacctcaaccagctccgacggagtcgctcccgtgcgtgtagcctcggctgtcaagcgcattgccattggttcgctgagatgaacgccagtccgcaatttcataaaagttctcgctggcaagcggtattggacgtgagattaatgagccgcgtcagcattcgcgcgcctatggcgcgccgtctcaattctcaaattggattgggtctcgacagccggataccctcggcgccagcttctgcgctccacggctgcgagaaagctgtcgacctgaatattaaatgccgtcggttcttccagattaatcgtatggccggtattagggcagatccaaagaccggcgttcgggagaactgtcttcagcatcaggtttgtctcgaggcaaggcaggtcttcatcgcccaaagccagcaagaccggcagctgcatcgaagcgagctgatcacttagatcatgcaacggcggccgcaacgcctggcagcgcgtcatcgtattcgatattcctcgcgaggattgatgacgcaactggtgaaggaactcctgccagctccgcgcatccttgtatttgagctgtacgcgggtctgaccgtgagcgattttgcgagccatcgtgtccatcccgcggtcaacgaacgcgcgcgcaagaacggag

SEQ ID NO: 328 - DNA, 4132 bp, Bradyrhizobium colbertium
  misc_feature (2305)..(2314): n is a, c, g, or t
ggatagacatgtatccggaaatctgtccgccctggaaaatcggcgtcgcgctggcgagcacccagtagaaatcaccgttctttcgacggttcttcactgcgccggcccatggcttcccggccttgatcgtatcccagagattctcgaaagccgccggcggcatgtccggatggcgaacgatattgtgcggctgtcccatcagctcttcgtcagaaaagcccgatgcatcgacgaacgacttgttgaagtaggtcagcttgcccttgagatcggttttcgaaacgatcagcgtgtcgtcgcctatgggatactcgttgtgagtgactgggaggttctttcgcatatcggtcctcaaaatgacgtttcaattatgggattttcgaagtttcacgcgtcttgcgatcaaagcgttcggcacaatttccgagcggactgaagcgcgtgttcaatatggcggagctcatcttcgaacgccttgcgggcgcggacatcgcgtacgcgcgcaacgatcaaccgggcgtgctggaccatcagatcgatcgaaaagatggcgcggcctacttcttctttggtcgtggccatgagctggaacgcccagcgagcggcatccttggcttccggggggatacctacgtcggtcgacagaccatctcgcaatcttacgatgttcgacattgaggcatcggtgctctcgagtgaggtgtcgaacagatttagcctgtcaggattaccagcacgttagtcccgcgaatgccatccattgatatcgattctgccacatgcggcgtctttgcttacgtccgatgcgaaattgaagagaagcaaactggcggcggacaacccctgcgtgacgatcttgccctatcttgccttcgacttccgaagggtgacagatggcaactcgccaaaggtaacttggtagtcccgggcaaattgcccaagattggaaaagccgcatgcgaacgcgatgcccgtcactgacgtctggtgatcgggcccgctcaagaggaggcgtgcacgctcgagacggatcatctttacatgggccatcggggagcgcccccgcgcccgctcgaatgttctgaaaagcgttcttgcacttacccctgccaccgcaaccaggtcttcgatcgtgacctgtgaattccagtttgcctcgatatagtcttccacacggcgaaccgccgcagagtcggtgtcgcgaaactcccgctccagcgcggcgctgaaattgtgcctggcggcatagatcaattgcacgatgattgcttcctcgagctcccgcaaggcaggcggagacatcatcgaattctgatcgtcgagttgctggacaaccactccgatcaggcgctgcagcgcggagaacattgcgacgcccgcaagcgaagcgatctcgaattcaagctttcccgggaccacgctgccggtgagcaaggcaacttttttttccaaaacccccgatttgatgcgaaggaaaaggttctcaaggtccgcgccataggttgcattggatgaatgtccttcggaaacaatgcagggccgatccggctcaactatgacggattgggaaccgctcgtcgtgaccccgttgccgcgcagcggcatctgaagacgggtgtagtcaatttccgggaaatgcgccgttacggaggtaccgcagcatgcgaagccgagcgcgatgtccgtcagttggacgaagttggcgtgaacctccaggaccgatggatttcgcagctccaacaagcttccgccatagaccttggtgagcgcacgctcgaactcggcgggttgccgcgtgcgaattcttggatggcggtccaacggatgctttcgcggtcccgcagcgacggcttcgcgatcggaaagaaggggcaaggctttcagcactaatgagctcttcgattatcgttcttgttgacgctgcccacctggccacctccccgaaacggggattcccttcttctgcaaggattgccaccaccaactgcggccatacctcttaggccgctcggaaggccggcgtcattcatcatattgagtgtcgtcgccgccgcaagctccgaatttgatccatcagcgatcgagatcggccgctgctgccttcggttcgttgaagcctgaacgaatccaactcttttatgatgaacggcatgtcatttgtcgacaacaggccgccctcaaaaaattgggggcaagcatagtgatgaggatgcctgcctcgctgctgccctgaggccttcgtgcaatcgcacatatcggaatccagcaaagtacttgaaacaatcttatcaccatagaaacgccnnnnnnnnnngacagaatggtaatgctcgttcggcgagtaacgtcgggctcgcgccgacgtttggtagacgaagactaggggacgagtgcattgggcgggcggctacaggcgttgatcgacgcagtcgatttggcgcgtgacgaacgatcgattcgtaacgcaatcaaaaactttactgcttcatctggattcgatcgctatgcctacattcacgtccacgcagatgatgttactgcgttcaccgattatccggtgggatggcagaacctctattttgaaagacattacgcaaccatcgaccccgttgtcacgacggcaaaacggggcatgcggatgttcgcctggtcggcagaggatcacaatgtccgtaagagttcgcgcgaaatcaagcaattctactcggaggcaatcgactttggcattcgctccggtatttccattccgatccggacaagctatgggcggacggcgatgattacactcgcatcggaccgtcagaagatagaggccccagcatgggatccgatgcaagccgcactagcgcttagttacgtccatactcacctgagcttggcgtccgtttcgttaaagactggtgatgtaacattgtcgacgcaagaagcgacgtcgctcagttggtcctctcacggcaagtccatgaacgtgattgcggagctactcggcatcagaccgcgaaccgttcagttctacctggataatgcgcgcgacaaactcggcgcgagtacgcttcaacaagccgtccgcattgcaatggagaagaagctcatatagcaaatagcaaaagaaactcgattgggtgagttgattgcccatcccaaattcgggcattgcctcgtctatgtggtgcagcaactacccggccggaaccttgggcacgtaacccagacgatcgaccattttgttcaagacaagcagacgcgcgcggtgttctgtatcggcatgttgatggacacgttgaagctctgcccggcgctccggacaacagttgttatcgacctccgcggcgactagctccaatcgggctttctcagccagcgtgacactcgcgcgatactcacgaatggcatctaccgtcgcgcgttcgagctctgcatggcccattctgccgaaaaggtgttcgatatctcgatcgagcttggttccgggcgtttcatcgtcgttgttcgatgccacgattttcacatgcgtttggtccgcggtacgcccccgctgacgataatcccttgaacccaagccgggggttagaaaaccgcgattagacggttcctgagacctttagcgccgaggcacctggacatacgtcacaggcccccggccattaggccagaggatcccggtgccgtcccggccggcaccaaccgctaatcgaggggtttctaaagccccgaggcagcgcgtactgccctacgatccactatagatcgaagagggttcggccgctaggccgtggcgcgccaacgaaagtgagacacgccctcaaatatctcactggcgttaacgatggcggccaaggggggcggccaagggtctgacgagatctatgaccgcctcgcgccgccggtccggggccggcccctatttcggcttgccgacgccgatgcccgtcagatcgatgcggatgccggccttgttgggatcgtcgggtggcttgcccggtagctcagcgctgtccgcggcgctcgcaggcttctgcgcgtcgtccgctttgacaggctggttgcggccgtctgacgcacctttttgtggtgggagggcaccggggtcgggctgatcgaacacgtatttcccgtcgaagtaaccagtttt

SEQ ID NO: 329 - DNA, 2275 bp, Bradyrhizobium colbertium
  misc_feature (1366)..(1398): n is a, c, g, or t
cagcggcgtccaatgacttctttgaatcgaacaggcggattgattcatttaatgaatgcctcaattgcaccagggatgccgcgccccgtcccaccgccgcgccaggccttcggaaacgagcgtttcccgatcgagcggcccattgcgtgtcacctcctcaacttgcggccataccgatcttcgtccctgactccgctgacgagggagaacgcccccgaattcagaagttcctgcagccggtattttgcactttcgcctctcgcccgctctgtttcacagcacggtgggcgcagttccggcgcgtcgatatctgcaaccctgatcttcacactatccagccagaacgtgtcgccatcgaccacgcacgtcacgcggcgtgcgctgccgcagatggggaatgtggcggtcagcgtgtcggtgcggggcgcggcaacggccggtctcgcccaatcgattccaaagtgctcgacggcgagaatccaggccatgagcactccaaacacgaatgccagagcgactctcgtggccctgagacgatgatcgttcactggtctaccgacgcgccttgcagaatgagcctcgacgcggccgacggggcccggccggggtcgccatcgcgggtaacatgcctcgccgggtggccaattttgctctcccaattctgcctgcattctggcaatttcagcctgaccagaggacgcaatgccaaaccgcatcccgcttgaccctaaactgccgaaaaccttcgacacgacgccgaacgaggcgcgaagcaaagcgcaactcgatcaatggtgggatcgtccctatggcatcaccttgcctgacggccgcattgaagtgcggtgcctgaatggcggcgcatgggatcgttcgacccatctcggggtggcggagaattacgacgcagcttgtgctttggccgaggagaaacaagccgaatggctgaagttccgtgaacgaccttgcacctgtctcgacgtcggtcagatcctggtgatccggcagccccagcgaccagacgaagcgccgcagcaattggcggctttccctacggtggaggaagcaacagaatatctgcgcgttaattttcccggcgcatagcctgatggacggaaatccttccggaagaggagtaccgtttccgaattggttccgatcttgccaactcgctatgtccaccatcttgaaatcgatcttgtagctccgcagtgttttgggcgagccccctgcgggggacggctctactcgcggccccaaggggccactcccggagcccgcaagcggtctccgcgctgacgcgtgacgatcctctcgcgacgcctcatcgtcgacgcgtgcccatcgaagcgtcccgtcccatgcnnnnnnnnnnnnnnnnnnnnnnnnnnnnnnnnngaaccagatcgcgcggccgcagcgcagcggcgggttgcccgccgtgaagatgatctgttcgtcggtccgcatgcgcaggacctcgtgcggcaggatcagcgcgcgacgcgcgagctgcttcgaacgcgtccgggacgagcccgacatctgggaggatcgggtcaattggtctacctcgaccgtggtgtcgccgcagcgcttcgaaatgtagtccgcggtttcgggatcattgatcgccgcgaaggagatccaggacgcgctctcgaaccatttgctggttgcgtcgcggccaccataagcctcccgcatctggccgatcgactggtagagcatcagaagcgtgatgccgtatttccggcccgcgtcgcgcgccgtttcgaggatgcgcagataaccgagcctggcgacctcatcgagcaggaacaaggtacggcctttgacctcgccattccggttgtagatcgcattcagcagcgagccgatgatgacgcgggcaaggcccgaatggttctccagcgtcttcaggtcgagattgataaagatgtcggtcgccccatccgcgatctcggtcgtggtgaagctcgatcccgacaccagtgccgcataattcgcataggagagccagtgggtttccttcgccgcgttggcgtagacgccactgaaggtctcgggcgtcatggcgatgaacggcgcaacgttctccttcacgaagttggacgccgaattgtcgtagatcgcctgaagccgctgccgcagcttcggctcaggctcggataggttggctcggacctggcgcagatgctgatccttcttttccgtatgaccggacaggcagacatcggcgaccagcgcggtcaggagttgcagcgccgagccc

SEQ ID NO: 330 - DNA, 7016 bp, Bradyrhizobium colbertium
  misc_feature (1661)..(1670): n is a, c, g, or t
  misc_feature (2823)..(2836): n is a, c, g, or t
  misc_feature (4320)..(4329): n is a, c, g, or t
  misc_feature (5742)..(5758): n is a, c, g, or t
acccgggggattttgaccgacccacggggtccccggcggctccatcgaaaacggcgttctgaaaatagaccggctaacctcagcggtgccagaggcggccgaggctctggttctcgatctctatgaccgtctgcccgctgtgcgcatcaccgatctgctgctggaggtcgacgatgcaaccggcttcacggacgccttcacaaacgtgcgcaccggttcaccatgcaaggatcgcatcgggttgttgaacgtgttgttggccgagggcctgaaccttggactgagcaagatggccgaggccaccaacacccacgactacttgcagctgtcgcgcttgtctcgctggcacatcgaaagcgacgccatcaaccgggcgcttgccatggtgattgaagcgcaatcgcgtttacccatggccaggttctggggtgccggcgtcactgcgtccagtgacgggcaatttttccccgccgcgcggcagggcgaggcgatgaatcttatcaacgccaaatacggttctgagccgggcttaaaggcctatacgcatatctccgatcagtttggacccttcgcaacgcaaaacatccccgccaccgtgagtgaggcgccttacatcctcgacgggctcttgatgaatgaaacaggccgcaacatcaaagagcagtatgccgacaccggcggcttcaccgaccatgtctttgccgtcacctccctgctggcctttaggttcattccacgcatccgcgacttgccctcgaagcggctctatctcttcgaacccgccgcagcgtccaaagagctgcgcggcctgatcggcggcaaaataagggagggcctcatcgtccaaaactggccggatatcctgcgggccgtggccacgatggcggcgggcatcatgccgcccagtcagttgctcaagaaatttgcggcctatggcagggctgaacctgctggccgccatcatcatctactggaacaccaagcacctcgggcaggctgtcacacggcgccaacacgtcggattagacagtccatccgatctcctggggcacatctcgcctctcggatgggcacacatcctcctcacaggcgagtataagtggaaaaaacgatgaagggctggcttagggtgtcattctgccccctaccggaatccacccccacttgaattcggtctaaagcgccactgtatcgcggctggggccgtgcccacccgccgcgcttatggtgatatcgagacgctgcttaattccgggaatgcggagcgaatggccgagccgctggcaggctaggatagcaagatcaccactttgaccgactggcacaaaaccgcgccttaagtcacccgggaaacactcccgcgaacagccccatcagcgccgtgaccaacgcggtcgcacctagcacaaccaacaacggcagcgcgacctctgcccgaaccgcttcgccatcgcgcgcctgatacatcggcaccacgatgcgcagatagaccgccagcgccagcacgctgttaaggatcccgatcaccgccagccaaagatagcccgcctcgatcgcggctccgaacagcagcaccttgccgacaaagccgaagagcggcggaataccggtcagcgacagcaggaacacgaccatcgccacaccgatcaatgggcgcgcgnnnnnnnnnngcgatcactatgactgcaaaggctccaaggttcatcgccacataggccgcgccgaacacgatcaccgaaggcagggccaacggactggtgccaagcgccacaatccccagcatgaaatagcccgcctgcgccaccgaggaataggccagcagccgcacgacattgctctgcaccagggcggccagatagccgaatgacatcgtcaccgccgcgatcagcgcgacgacgacgggccagccggtagcgacaggcagatcgcgcagcacctgcgcaaaggcaaaaatcgccgccaccttggtgatcaccgacagaaaagccgcgaccgataccggcgcgccgtcataggcgtcgggtgcccagaactggaacggcaccagcgccgccttgtagcccagtccgatcagcaccgcgaccagccccgccagcgcgatcagcggcttgctttgaagcgcaccaagctcggaaaaaagcgtcgatccggcaccaccgaaccagaaggtcagcccgtagatcatcaccgatccggtgacggcgccgaacaccagatatttcatcgccgcctcggtcgccgcatcgtcgcgcggccaggctaccatcgcgaaggagcccagacccgtcagcaccacgcccagcaccagcagcatcatgtcgccaccgcccgccagcatcagcgccccaagcgtcacaagacaaagcagcgtatagacacttccctcgcggtccttcccggcaatctcggcccgcgtcatcagaagcgccagcgcggtgcctggcagcaggatcagcttggcccagcccgacagcagatcgactcggtaggtgccgccaaagacgctggtgtcggcctccagcagcggcaacgtcagcgcggtggacaggcccagcccgatcagcccgaatgtcagtgccagacgcggcgcacgcagcatctcggccaccagcatcagcacgaccgtcgaggccaacatcagttcgggaaacagaaaggacaggtcgcgcgccatcagagttgcagcgcccgcatcgtcacgtcgatcatgttcagcaaccaagacggcgccaccccgatcaggatgatgaggacaagcagcggcacgatggccagcatctcgccccggtccagatcgggcatcgccgcccatttctcgtttcnnnnnnnnnnnnnngcgatcatcttcttcagatctgactgcgccagcgccacgaaggcaccgtaaagggcgctgaatacgccaaaggccagcaccacctgaccggcctgcgcaaaggcgtcgggcgtcatctgtaaggcgaaacgcacaaggccgtatgtgccgaatttcagcatcaccccggcgaggatcacgctgcccacggtcggggcctgcacgtgggccgcgggcagccaagtatgcactggaaaggacgggatcttgaccgcgaaggtgaacagcatcgcgatcagcgccagcatcgccgccagcccagtcagtggcggcgcctcgatccacagccgcatgtcaaaacttcccgtggccagatacagcccgatgatcgccagcaacagcggcagcgagcctagcagcgtgtagatgaagaacatcagcccggcgcgctggcgttcttcatagccccagccgacgatcatgaagtacatgccgaccagcgacacttcaaagaagacgtagaacaggagcgcgtccagcgccgcgaaggtgccgatcgacgcggtctccagcatcagcatcagcgcgacaaagaccgccgggcggtcggtgatccgcgccgcatagattgccgacaggaaaaacagcagcgaggtcagcaggatcagcggcaggctcagcccgtcgacgccaacccggaaggcggcaccaatggccgggatccaggcgatttcctcgacctgcgcgaaaccgtccggcagcgtgccccgcgcccagatcgccagcgtcacaacgaaggtcagcccggtggtggcgatggaaacgccatgggcgatgcgcgccgacttgtttggcagggccatcagcagcacgccaccaagaagcggtagaaagacggagatcgagagaaggggcatggcggggtcgtctttcttcaggaggacatcggtaagatcagcagcaccgccgcgatgacggcaatgcccatgactgtcagggcgagttcgcggtggatcagcccgctttgcagcaggcgcaggcggcggccggcggcgattgtccgggcgacaaggccgaagatcagcccgtcgatgccatgggtgtcggtgttttcggcgccgtcgccaaggcgcaggttcatccggcccacctgaagggtcgcggcataaagccgtttgtctgaacgctcggcactggatgcggtgccaaggctcaagatccgcacaaggccaagttgcgacgccagcagacgccgttcgaatccttcacaggcggcggcaaaagccagcgacgggcgcagcaccagcccgtccataccgcccgcgacggcaaagccgcgctgcgccatcggcagaaccggccccatcaggcgggcaggttggatgaaccagcccagcaccaggccgctcagcgcggcggcaagcccgaggatcatcgcggccccttccgtcggcagctcggactccagcagatgttccagcggcgcgaaggcgaacccaagcccnnnnnnnnnnccccctaaccttccgtcggcagctcggcccccagaagatttcccagcggcgcgaaggcaacccaaacccccgccgccagcgccgtcagcaccgccatgcccgcagacatccagcccatgcccttgccggaaaccggctgtgcctcgccgccccacaacacccgcagtgcgcgcgccatataggcgccggtcaaaactgtacccgccagcgctaggggcgccagccagatcgcacccggagcggccagagcggcggcgatgatcgcgtccttggaaaagaacccggccagcggcggaatacccgccagcgccagtgcggcaatgccgaaggcagcaaggatcagcgggcgcgtccggcccgcgcccgcgaccgcctccatatcggtgccgtcgcgatcatgctggaacacgcccgcgcccagaaacagcgtgctcttgatcgccgcgtgggcaatcaggtgcagcagcgccgccgccggcacacccgcgccaatggccaacaacatcagcccgtactggctggaggtcgaggccgccagcagccgcttcaggtcccgctcggccagcgcgatcagcccggtgacaaccgccgttatgccgcccaccaggccaacggccagaagcgcacccgacggcagcatcggcgccacgcggatcagcaggatcgcccccgccgccaccagagtcgcggaatgcagcaaagcggagaccggcgtcgggccggccatggcgcgctgcaaccagtcctgcaacggcacctgcgccgacttgcccatcgcgccgatcagcaacagcaacccggcgaccagtgcgggcgtgccgctaatcgccaatgtagccgagatttccgaggtgccggcccagccgatcagcacaaaaatccccagataaaggcccagatcggcgctgcgggtgtacagaaacgcccgtatcgcggcattgggcacgccgtcgcggccatgccagaagccgatcagcagatagctggaaaagccgatcagttcccacgcggccagcacggtgatccagtcgcccgccagcaccagcgcctgcatcgccgcgacaaacagcagcaggatgccgaaaaagcgcggcctttcggggtcgctgcgcatgtaacccacggcatagaccaccacaaaagccgccaccgtcgccaccatggccgaaacgatcgccgtcagcggcgtcgcgaccagccgcagcggcatttgcggcaggcccggcaggaccatctgcaccgcattgcccgcaatcgcacccgctagaaccgccatcgccgcgaggaacccgaggccgacgcccgcaagcgcaatcgcttcgggtgcgcggcgcagcgccagcgccacaagccccgccagaagcggcgcgaggagggtgagtgccagcatcgtcatcccttcaactcccgcgnnnnnnnnnnnnnnnnncgaccgccatttcgaccgccatcaccgccatcacgatcagcacgaacatctgaccggcaggttcatcggggtgcagatagcgccagaaggccaccagattgaccagtgctgcggccaaaatcagctcgacccccatgatgatcatcaccaggttggtctggctgagcgcgccgtagagcccgacaccaaacagccccgcgccgacgccgagcgcgatcatcagctccaggatcatttgcgctgctccgcgttggggacaatggccaccatcgtggccgcgatcatcgccgtgaggatggtcagccccgccgactggaaaatgaacatcgaccggcccagcaattcgcgccccagatcggcggcctgttcatgcgcgccgggcaccgacagggcgaccggaccccaatctggcagccagaccagcagcaaggcggccagcagcccaatgcccccggcccagagcgacaggcgtttctggtgggtcatgtccatcttgcccaggccacccggatccatcatgaacatcaccatgaaaatcgccatcacgctcatttccgtggccatcatcatgatctgcaacacgcccagaaactcggcctgcatgaccaggaacatcgccccgatcgcggtctgcgagaacagcagagccaacgccgagcgcaccatcgaatgggtgcgaaagaccacgacgccgaaccacatcgccgcgccgccgaagaacgccagaaagatcatctgaaccgtcatatcggcaccaccagggcgatcacgcccacgacaaagacattggccagcgccagcgagatccctagcttccagctcagcgccagatagcgcgcctcgcggatgcgcggcatgtagcgtccgacactcagcatagccgcagccacggccaggatcttgatcgcgctccaggcccaggcgggcagccacgggcccagccagccgcccaaatagaaggtcaccgtcgcccccgccagcgccaggataatgaccatccgcgccagccgcagcaccgccagccgcacgccggtatattctgcctcgaccccgccggccaattcgccggtagcatcgggcaggtccagcggcggcagccaggccagccccatcgccgccacgacgaacaggacaaaccccatcggctggtacagcacgttccagagctgcgcctgcgaggcgacgatctcaaccgtcgagagcgactccgcccgcatggcgacggcggtgatcggcatcacgatcagcatggcatagg

SEQ ID NO: 331 - DNA, 1584 bp, Bradyrhizobium colbertium
agcacgacgatcctcgatcgcctgatgcatcattgccatctgcttgagttcgacggacgcagctatcggctcaaagaggccgctgaagctcttgcccgtgaaacaaaggcaaactaacaatcaccttgtcctgcctcgcgggtggaggaatttgactgaccgcacccggaggaatttgaagtgacccgcggggcttctccgcccgtcgaacttccagcatgtcgcgcgcgagcttctgatttgagctggagatcctgcgggcctgctcggcgtttgcgcgtgagacttcctgggaggcgctaccgaagaggtagatgccgccgaacgcgatgaggctcagcaggccaatcaggccgatggcaagaatcttatgtgtaagacggatcgaaaatctcttcatgagaaagtcccaacgctgaaagcctaattgtggtcgagcaattttgtcgcacgcaaggaattagcggttccctgtcaataaatcggaaacctcgatatcggaatccggcaacggccaggattctgcgatctcgtgtgccgacctgcagcccatccaaacacagtccgacaccaggtggagcaatctagcggcgacataccaaggggcaaatggcggctgtcagccgtatgtcctattgggtcaacgcgggagtatcgcctgatcagcgggccatcggcgagcaggcaacttcggagaggatcggattctagtttacttgccgttcgcatgcgcgatcgtttctcgcgccgtctcgccaaacgcgtctttgtacagttgcgaaaactctcccatgtgccagaagccgttactctgagccacggtcttcaccgacaggccggaaaacccgcttgtcagctgacaacgaaccagccaaagccttttgagccgaaggtattgatgcaagctcataccatgcacggtgttcacagccgtctgtagggttcgcaccgaaacaccaacaccaccagcaagatcatcgctgtagagaggctggcttggaagcgcgcgcaccaggtcttcaagccgtgcaacaacttttcgatgctgctcaaaggatcttgggcgcgcgcgcaccatctcctcctgaacaagtacgctgtccagcgcagcgaggagcgtctcctgtaccgtgtcgccgagcgcagcgaacgccctgggatcgaggctgttcgaggcgaactgcatcaggctcgagatcgtagactgcacatgcctcatgcgttgctgttccgctctgaatacgccgaaaccactttcgagatccggccaccccctgttgtgcattgccgactggaaacggatcaatgcgaaggtattaggatgcggatcgaggacgcgcgtcggcaccctgccgcggaacagcgctactccggaggcatccaccccttgtccattgataacggcgtgaaatgcagaggagatcgggatcgtgaggccaataccgggggcgcccgcctcagcctcaacttgcctggcaaagcagcggtgcagaagcaggcggctaccaggaagcacaagggtggcgcgttcggctgaagcatttcctggggtctaatggaacgcaacttccatcccccatcatc

SEQ ID NO: 332 - DNA, 4161 bp, Bradyrhizobium colbertium
  misc_feature (3361)..(3370): n is a, c, g, or t
atccttctgcgcttcgcgatcgaatccgagcttggcctgcatcgcctggacgctccgtaacgccacgccgatttcgtcgtcgcgctcgaccacgacgcgattgttgaacagaccttgcgccaccttccccatgatctcattgaggttttgcaacggtctactgatggcgcggatcgtcatgaagccgatccagccgcacagcagcaggcctgcgaacaacaggccaacggagagcaccaacagcattatgtattggcgatcggcattttcataccggctcttgccttccttgagctgaatagcgacgagcttgtccatctcggtcttggccgccccgtatagcccgtgggcggtgcttgccagcaaggcgtcaagttgttcaaacttgcgatcggcgagcatcacgagccccggcttcagcgccttttcgacgtattccttgcgcttcggcgcaaaagtctctgccgcgatgcgttcttcggacgtgtgctcggactccagatatttggcccaggtcttcgagatcatctccatgttcgcctcgaccctcgccgcaataccgtccggcgacctcccggcacgcgcatcggagagcccatcataaagcgcgatcgtgttgtccttcatccggtcgttgatgtcgaacagataggagagcggaatggtgcggtcctcgtagatggacttcatctggagattgccgtcgcgggttgtccagataccggcgagcccgaccgcgatcaggagcacggtctggaacacgccgagcgtcgcgatccgcgccctgagcgtgcgggtgaacacggcgaaacgatcgaccatcgaacggcggcggatagtgccggcagcgaccgcatatttctgcgccttcttttcgcgcagcagcttgtagacatgctcggcttcggcccgctgatcggccggcagcctcgtccggatggacatatagccggtgacgtggccattttcccagaccggcgtggcactggccagcacccagtagaaatcgccgttcttgcgccggttcttcaccgcgcccgcccagggctttcctgccttgagagtgtcccaaagatccacgaatgcctcaggcggcatgtccggatgacgaacgatgttatgtggctgccccatcagttcggcgtcggtgaaaccggacacgcgcacaaactgctcgttgaaatatgtcagttttcctttggtatcggtctttgagacgatcagcacgtcctcgccgatcggatattcgacatcggtgacgggaaggtttttgcgcatgaaaggtcggtcccgggaaatttcggagatcgccgtctgctaagcagtccgaatgcttcgttgctttcgaatgagatcggccgattggccgtgcaatgctcagacgttgtacgagaaatggtcatacattccaaagattttgagattgcttcttttcctatcgaattccggcaaatgcccgtaattcttcggcctgggagatcaagctcgcgctctgaggcgccgaaagcctgatcgcggcgagcattcggagagcccgtaccgaacggtgctgtcgtgaagattgcttgcgatggtgtgtgaattccggcaacgaaaccccaagaccgctatcgaattcggtaagctgagcaatgcctctactcaagaccgaatagcaagcccgacggcacaagcgtcgtcccgagcggctattggtatcatgtcgttactgcctcgatttgcgagagaacggcattctcgctctgtggtgcgccagaagaactgacttgttcccaacaggtgtaagaaccgacgttggaagcggcgaaatcgtctcgcgtcgccgaatatttcaacgcgccgcgaccggtgccgaactacctttgttcttggaattgctagtgagaaaacgcacgccgatctgttcgccgttaacccatactaactcacagcgccggtaggccgcacctcgtgtcgcaagaacgaggaagaactctcgcgcgaccaggcttccaattgtgccttcaacgtgaagtcggcagcctgtctgcgacgcatcgtgcatcgtgcagggacggcaccatgtaccatcgatcgccacgatctgaacgtcgatgcctcgtgagaattcgacccgggtggattttcgattgtcacctataggagccataatactggtcagcgcatttagaaaatgacgttcttctactgcaaaggggttcacatataactaatcggcgctctgaaggcctcgctgggcgatgggaaaaatgggcttggactaagccccgtccggaataataattccgataagtctattcacggcgtagcggactgatgccgatctcaaaagccatatgagcggtccgcccagcgcagcaagacgcgcgcatcacgatcgggtaagacgacgcgatgttcacgcaagccctgcgcaattgcttcgccaacctccggcgtgacccagtttccgtgcgtcatgaggaagaaccagccgaacggaacgccgatctcgcggtcgatggcatcgatgcggtccatgagaatatggaccgactcctcgccagcacagagcttctccgcgggagtgcgaagcgggcgtgtgacgaatccaatctcgcgggtgcccttatggtcgtaatcgtagatgtcgagcgcccaatgcgcgtatacccgctcgctggcggcgctcgactcgtcccagtcctggaaaaaccgattctcgcgcggcacatgatcgaaccagccgggcacgagctgaaggaatggcgtctcgatcgttcggtctcgtgtgacctcgcgtactaaccgtcgctccatttcctggcgcttcgcttcacggttttcccgttcgaggcgcgcgcgccgcgccaggaagctgcgaagatggacgacactgctccccgcacgtttgagtaagcgataggtcggaccggtcaccacgttactttccgtcagaccttcgtgagcaatccatgacggatcgaacaactcttcctttccccacggccggtatgacggattgacgatcggcccggcacaccattcgacctcgcgacctagagcaatctgcacgtagtcagccacgccagggccggtaggtgcaacagcgaaaacgctgttgccgcaccattcggtgatccgataatcggtctcgcgcaaccgcttccagagcgctgcgatattaccgttgtccttcgcgagctcggcctccatccacggccggtagttcgcaacgcgcgtcccatcgccgtccatcacagagcgtgtgtcgcgccagtaatgatcgtcgacgcttgccaccgagaaggtaaagccggggaaggtctgcgtcagcgcggccaccagcgccaggtcatcagcgccagtcggcaaacgcgcnnnnnnnnnncgctcttgtgccgcatgtctctatggagcgaacttgttggcgatccgctcgatctccgcgatcgacttaaggatgtcatcgaaccccggcgcttcgccgaagatcatcgccttggtattggcatagtcacgttgaagcgcttcgaccatcgccaccgtcggcacgagcgcgaatgatcccgtcagagccgaagcaagatcataatcgcgacggtcgaaaaacatccgcgcatgacgcacgcagtcttctcctagtgcgccatctgcgagagcccgctttcccacattcgaaccgaacaggcagtgcaggtcatagaaatgccgggacacgcgctgcccctcctgccgcagctcgccgcgacgctcgaaccaacgacgcaacccatgcgcaataacgactttgtcccagaaggttcgttcagcgtcgatcgtcgtgacgccggtaaagacgagatcgaggttatcaacgtcgtcggagacatatggccggattgtcgcgggatggttggggtcgagcgcagattttgcgccagattcgatccggacggctggtcgcacatagctgccgtcgcgcggttcgacttccgggtaccatatcagcaacgtctgtccttcgggatcggtttcgtcgatctcgactcttccggcccctctcgtgacgtccgccagctgagcggtcagaaagtcccggagcggaccggtgacatatgcgcggcaggcgtcgcggatcgcatcgagcctggcgcggcgcttcttcgtcgacagcgcctcgagatcttcgactgaaactgg

SEQ ID NO: 333 - DNA, 12765 bp, Bradyrhizobium colbertium
  misc_feature (1972)..(2021): n is a, c, g, or t
  misc_feature (5063)..(5082): n is a, c, g, or t
  misc_feature (5682)..(5691): n is a, c, g, or t
  misc_feature (6353)..(6362): n is a, c, g, or t
  misc_feature (10135)..(10148): n is a, c, g, or t
  misc_feature (11205)..(11214): n is a, c, g, or t
gccctgccccgctcccgcctccaccgtccgcaccgccgccggcgatcggggccgatttcccagccgggggcgtcgaagcaccccctcctccgccgccgcccgatgcggtcggcaggaatcgcaaccgctcctcatcccggccgccggtgatcgtcgtgccgcgaatgatttcatgagcggtcggacccttcggaagcggcgccaccttgccgcggcgcgcacgcacctcttcgtcgaaaccggatgccggccgacgacgtgtgtggctcgcatcgtcgatagcgcgtcgggccgcctcgacctgttcgacccaccaggcgatctgcgtggcgcggctcatgcgggctcgctctctgcaaggtcggccggcagcgtcagcttcgcttcgcgccgtagtttcgatccataggcgaccgtcatctcggtgagctcgtcgttgatcgccgagacgatatcatggaggccgcgccacaccggctcggtgtcctcgatcctgaccgcctggccgcgatggatcgccttgaggacctgcgcgaggttgcgtccgaccatgcggacctggctcgccagtgcgacgacggcgcgcgtgttctcggccgacagtgcaggacctgcctgcacggaggcgcggatcaggcgccggaccacctcggccttcggcaatccgaacaacgcgacggcctcctgaagccgccgctcatcgagctcggacagttcggtccgaagcctgggcttgcgtcgcggtgtcttcacggagcgagccatcaacgctcccccttcccttgccgtttgcgaggctcatcggccgtcaggccggagccaaggcgtgggcatcgtcgcgatgaccacgatggcgcgtcagcgcccttcggctgcgtccagcagccgtcccccggtttggcccacaaaccggtatcttgtcaaccaatatctattatattgtacttatcacaaccatacggaacggaccgcaacaccccctcacgagagacttcagaccgggcacactcgacaccggcaaaaccgcattgcgcctttcacgcattaccgtaatgcgtcaattttgcatgccgataatgccgcagtctcaacttatcgccatgccgcaataacgaacaaccgcactgcatgattgccacatgtcagcaatgccggaattgcgcattgacgagattcggctatgacgagctaccggaaggaggcaatgatgtattgtctaatatctattatattgtattttcggcggtgatacgattcaggaggggccatgccgagcatcttcgcagttgccaatccgaaaggcgggagcggaaagaccactgtcgcgatcatcctcgccggggagtttgccaagcacggctactcggccgcgatcatcgacgccgatccgcaagggtcgtcctatcaatggcacgcatcgagcgtcgccaggggattgagcccgcagggcgtcgacctcgtccgggcgcctgacgaaaaggctctcatcgcggctgtcgacaagttgcaatcatacgatgtcgtcgtgatcgacaccccgggctactatggcgaggtgctggtgcaatcggcgctgcgcgccgatctcgtcgtcctgccgtgcaaggttcacacgtttgacgcctcgcaggtggtgcgcacgatccggagccttgagcagcatgcgacggcgtcgagcctgccaatgagccatcaccgggtcctgttcaatgaatatgacagcctcgatcgcaacacccggccgctgcgcgaggttgtcgcctatctcgatgccgagaaggtgccggtctgctcgaacgcgctctatcggcgcgtgacctaccggaccatgaccagcgggcatggcacgctctaccagatgagcgacaaggacgaatcggtccgcaaggcgcggtacaacgccgaccaggtggtgcgcgagttgctggccgcgagccagaatcaggcgcagaaccaggcggccgctgaagcnnnnnnnnnnnnnnnnnnnnnnnnnnnnnnnnnnnnnnnnnnnnnnnnnnacgccagtcgtcgtcacacccaactacgatgacacacccgccgtgccggcggtgccggccgcgatacgcagcaagaaagaggcttccggggaaagacaacgcgaagcgaagtcgcgcgggcgtgaccagaatccattcgaaccctatggcgagcgctcgtcctcgcgcccgtatgccctgcggctgcccgatgccatcgatctcgtcgttcggcagatggcggccgagcagcgcacgcatcccctgcgtatcgtcgacaagatcctctacgacggcctgaagcggctcggccgattgccaccaccggctggcgattgatcacgtcgcctttttcagccgggtcgcggacagcgccagaagcatcggccagatggaaaactcgccggcggctgcacggcgcgtgagattgcgcaaatagcctccgggattcttgatcgcgacgccgcgctgcagaatcgccgcgacgacgatcgacgcctgcatctcgcccataacctgtccggcttcctcccaggcactcgggctgatgccgagcaaaggccggacgagcgcggccgtggtcaggagctcgcgataagaccggatctcgccgcgcgcatagtcgatgatgtccgggcaggcgtcgaggacgacccgcagcgggatagtctccggccggtctgtccggcggttgtgatcagggtcggtcgacgccgtcgggtgaaaagtgagcaatcgaggcgatgcgttcccatcggcctccgcatcgctcggcgccggcggtggcgcggccgcgggctcacaaaggtgcgcgttcagaacggcgaggatgtcattggcgagctcctggagttcgttgataatcggctcgagcgcctctgccgctggcgtgcgcggaacgcgcgagacgatcgcttggtactttccatgcgtgcctggccaatcgatcgcgatgccggcctcgacgccggcggcgatcattttcacgacgtcacggcgcagaacggtgaatcgttggcgaagattgcgcgcaaggcgcgcctcttcctcgatgcggcgcgccaaccgatcgaactcggccgcccgcgcgacaatcggcgcgaggtcgaagccgtaggcgatctcgacgtcgccatcggctgatttccgcgcgaagcgcttcccgttcggactgtcccggcgcaggatcaaaccgtgatcgaccagcgcggcgagatgccggcgaagtgtcgacgccgccatgccatgcgagcgcagcgacagatggcggttcgacgggaagaccacgaggtcggctgaccccgccgtcagaaccgcgtacgggtgaaaactcaacagcgcattcagcacgatgagcgcacgatcggggacaccgagcgcggctctcgcggcgctgatgtcgcggaagaccttccatttctgcgccggcgtgcccgccgcgcacgcgcgcaccatggaattgatcttcagcacgccgggcgagagcgcgcggctcccgaacgggcttaacggaatttggccaagctcctgcattcgcatcctctccttccggagagcgcgggcaaagaaaatccgtggcgcaaaagcgcacgtctcttgaactgtcgggtgctgcgatctaagatgccggtctgagatgttggcttcgcaggcgattgccgtcgcctgatcgcataccctcttgagagacccggctttgccgggtttttctttgtctgggcgctcttctcctcgttgaatcgaatccgtacattatattgaatgttgacgagtcgtccatgcagggcgcttgttccgatccatgcttattgcggctgctttcgcagcttggagatgacggatgttgagcaattcgcgtacgcgcaaagccgaacgaaattcaaatgagcactcgctgttgcgagcgtttcaagcacgcctggaaagcttgcgcagcgaaaccggactgagccggcgagccttcgccgaccggctcggtattcctcggtcgagctactttcatttgatgagcgacgccggaaatcccagcctcgacacggtcgagctcattgcggctcgcgtgggggtccatccgtcggagctattcccagcgcctgcaccaagttcgttctcagagacgccaatgtctgatccagaaggcgaaacgaaacgagtccgctcaaccacttaggcgtggccaacacccgcaaacgtccaatatactagacgttggaagcgtgctacaatcacgcaattgttacggtctagtttaggacaatatggccccggttcgcaaacctctgcctgtcgatcactcgatgctgaacgagatgctcgctatccgactccagcaactcgaaatcgaaaatggcggcatggaagccttcttgcccaagaccgggcttgcgcgcgggacgtattacacgatcctgcgcggcatcgggaatccgaccttgaggacgatggagcgtattgcctcgagcctgaacatgacggtgttcgagctgctggggttcgaggtctccgacgccaagcgggcgctacagaagagcggcgtcgactacgacgagctcgcgtcggcaatcgcgaagaaaaaccgcgcagatcgaaccctcgcgcgccagacgcgctcgaagaagctgccgatctgactcgttcgaccggagaaaatcgccgagcacaagtcatgcccggcgtttctggtcgcgcagcttcgaattgatctgggccatcaggatcgggccgagcgaaaattcgccggccgccgccctggtggtcaaaccgcgcagatagcccccggccgaattgattgcagcgcttcgctcgaggatgcaggccacgacgacggccgcttggacctcgcccatcacgatttgcgcctcctcccaggcgcttggactaatcccgagcattggccggaccaccgcggcggtcgccaaaaagtcacgccagttcgaaatcccgcccttggcgtattcggcaatctccgtgcacgcctgcatcacaaatccaagggtataggtcccttccggcatcctcggcgtttgttgttttggctccgccctcgcccccccgccttctcgnnnnnnnnnnnnnnnnnnnnttctctgctttgatatgatttttcaacaggctgaggatgtcatcggcgagttgagagagtgtctcggcgatcggttccagctcggcgcacgttgcggtccgcggaatcgcttccacgatcgcgcggaagcccttgtgaacctcatgccagtcggtcggcccctgccctgccctgcgggtcggcacgccctcctctatccccgtagagatcatcttggcaatgtcgcgccggcagatcgtgatccgctcgcgcacgagcttcagcgcgcgcgcctctgcctcgatcgctgaggccaggctctcgaactctccggcgcggacaacgagcggagaaagttcgaacccgaaggcgagttcgatctctccgctacggcccttgcgggcgtagcgtttgccattcgggctatcgcgccgaatgatcaaccccgcgtccacaagggccgccaggtgccggcgcaacgtcgatgccggcatgccgtgcgcgcgaagcgcgagctggtggtttgacggaaagacgacgagatcgtcctcaccgctcagcgcggtctcgggatgaaacgtcagaagtgcgttgagcaccgagagcgcacgttccgacacnnnnnnnnnntcgagtcgtccatggagcgcgctcgttccgatccatggcctgttgcggcttctttcgcagcttggagatgagggatgttgagcaatacgcggccgccgaaggctgctcgggtatcgaatgaaaattcgcttctgcgcgcgttccaggcgcgactggaggcactacgcagcgaatctggcctgagccggcgcgccttcgcggatcgattggggattccgcgatcgagttattttcatctgatgagcgacgccggaaatcccagcctcgatacggtcgagttcattgccgagcgcgttggcgtccacccgtctgcactatttccgttgccgggcgagtgttcgtctcagggcgacgagcccatacccccaaagggctaaggaaaacgagtcggttcaacccgttaggtgtagcgaaaaatgccgacgtccaatatactagacgttggaggcgtgatatgatcacgcaaacgttacccttttgtcgggaaaacatggccccggttcgtaaacctcagaccgtcgatcactcgatgttaaacgagatgctcgccattcggctgcaacagctcgaagtcgagaatggcgggatggagtcgttcctgccaaagacgggactggcgcgcggaacctactacacgatcctgcgcggcatcgggaatccgnnnnnnnnnnctgagaacgatggagcggatcgccgccgggctgaacatgaccgtgttcgagctgctgggattcgaggtctccgacgccaagcgcgcgctgcagaagagcggcgtcgattacgacgagctcgcctccgcaatcgcgaagaagaaccgcgctgatcgagcagtcgcccgccaggcacgatcgaaaaagctgccgatttgatcggatcgaccggaaggaaacgccgcgcgcgcatcatgctcggcgcttcatgtcgcgcagcttcgaattgatctgcgccatcaggatcggtccgagcgaaaattcgccggccgccgccctggtggtcaaaccgcgcagatatccacccgcggaattgatcgtggcgcttcgctcgaggatgcaagccacaacaatcgcggcctggacctcacccatgacgcgctgcgcctcctcccaggcgctgggactgatccctagcatcggccgaaccaccgcggcggtcgccaaaaagtcgcgccagttcgaaataccgccggtggcgtactccgaaatctcggtgcatgcctgcatcaccatcccaaggggataggacccttccggcatcctcggcgtttgttgctctggctccgccctcgcccccccgccttctcgaaggctaggttcaagatcaataagggagtctggatttgaattctgtatgtgacgcccggaatgggactcattggcgcttagaatctctgctttgatgtgagttctcaacagattgaggatgtcatcggcgagttgcgagagggtctcagcgatcggctcgagctcggcacaggtcgcggtcctcgggatggcatcgatgattgcgcggaagcccttgtggatctcctgccagtcggcaggcccctgccccgctctgcgggtcggcacgccctcctcaatgcccgtcgcgatcatcttggcgatgtcgcgccggcaaatcgtgatgcgctcgcggacgagcttcagggcacgggcatcagcttcgatttcagccgcgaggatttcgaactcttcggcgcgcacgacgagcggcgaaagctcgaatccgaatgcgagctcgatttcgcctcccctgcccttgcgggcgtatcgcttgccgttcgggctatcgcggcgaatgatcaggcccgcgtcgaccagggccgccaggtgacgccttaacgtcgacgccggcatgccgtgggcgcggagcgcgagctgctggttcgacggaaagacgacgaggtcgtcctcgccactgagggcggtttcgggatgaaacgtcagaagggcgttaagcacggacagcgatcgctctgacacgccgatccgtgcccgcgcagtgcagatcgtcttgaaaattttccacttgtgcacgaccttttcaggtggccgtgacgaggcgacgatctgcgttgccacatgggcaagcgacagcgatcgccgcccaaagggcgtcgttgattgatacggttccatagccttgcctcagctaggcaaaggaaatctgctcgccaaaatgacgccgtctcgcacgagagaccttgactgcgattcgcggaagtgattctctatcagtcgccaaactaagacagaggcttccgggacggtgacgtttcgggggccttttcttttgccgggttctcctggttggtcagtcttccttggtccagccggctcattccggctgggcaagctcattcagcgatcgaggtccgccttcttgtactcgtcgtaaaggctctggagcctctcgcgcacgaagtctccgaattggggtgtgacgcgatcgtcgaaggtcagagttgttttctttccgcttcgcatcacttttgcagcgtgcgttccatcgtgggccgaccatgtttcggcgcgcgctctggaggcgacttcacgcaaggcggcagctattgactcgaagcgcttatcgctttcgaggtccgaaaagccgggtgtctttacgtgggcgaccgcgcggcgccgattgtcgtcgccgtcgaggaggtcggtgagctcctgccacctcacgcggccgaagctcggtgcagcgccgatcgcatcgatcacctcggccgggacccgcgttgctatcgcgatcaggcgggaaagcgcggccttatctacgttgagggcagccatgatggtctcgcgcgaaaacttccgttcttcaagccgtgctgcaaaccgcgcgcgctcgataaacgtcagatcggttcggccgctgttttcctgtccctgcgcaacgacgagttcttcgtctgagagtgcacgcacgaccgcgcgcacgttgatgccgagagcccgcgcagcacgcagccggcgatgtccgaacgcgacctggaagcgatctggattgtctgggtggggccgcaccaggatcggcgagttctgaccatgctcgcggatgagctctcgaaatgccgcctcgtcggcggggctcgcctccatgcgatcgggaacgaaggagtcatcgacgagcgatggctcgaggtcgacgatggtctgcccctcaaccaggcgcttctcgagttcatcggcgcgtttgaccttctcagacatcccgccaagcgtctgcgagatagcgccgagcgcgccgggctgtttcagtgggcggtcgagtccaaggaggggcctgactttgctcgcgtttgaagaagctggcgcttcctgtgggatgcgctcctcattctctggcaagtcgaagctgatttttcgtgccatcctcaagccctcttccagacctgcttgatcagggcttctatctcgccgttgaccaaatcgagggattcaactgcgcggtcataggtctgccgcgtgaactgctggcggtcgacttcgtagagcgtgtgcttcgtcaggccagcgtcggcgatcgccgtgcttttcaccatcggatgcgtcaaaacccgccccccgaggatcgagcgcatccacccgacgagttttgtctgtggcccgtcgcttggttcgtatcgggtgacgaggtagcgcatccaatcgtattcggtggccgcgccggcatttgcgacaacgtcaagcagcccggcggtcatgttgaggaactgcgacatggacatcacgtcgagcatctgcgggtggaccgtgataagcacggccgttgcggcgcatagcgccgacagcgtcagaaatccaagctgaggcgggcagtcgatcacgaccacgtcgtaggcgtcacttacctgtgccagcgcttcgcctatacgcgagaaaaacatcgagtcgcgaccctcgcgcgtcatcaatgccttcggcgtctcatgctcgaactccatgagttcgagctggccaggaatgagatgcagcgtgggaatgtatgtcgcgcggacgatctcagccatctcgcggcgctggtcgtcgtaccggatggccccgtagatcgtgtcgttgtccgcgacatcgagttcgggttgcaggccaaacagcgcggagagactggcttgcggatcgaggtcgatggcgaggacccggtagcctcgaaaggcgaggtattcggcgagatgcgcggccgtcgtggtcttgccgctgccgcccttgaaattcatgactgagatgacctgaagagcttcgccctcgcgccggtggggaacatagcggcgcccacccttgcccgatccgtcaaggaattggcgcagctgctcgatgtcttcgatcgagtacaggcggcggccgtttgagaggggctctggtcccctgccctctgcggcgagctggcggagatatccttccgcaatcccgatgaacctcgccgcttcggccggcgaaannnnnnnnnnnnnnaagtcggcgagctggcgagcgcgaaggcgcatcgatagctcggccgcatcggcgttgatcagcgatcggagatcgcggaaactttcactctcgggattcgtagcgggcatcgttaactctgcatctgcggttttttgagcagaacggcccaaaatgcgttgaatgagatttatgcccgattcttttgatgtcgcaagcgattttcggttaacgagaagttaacgcgcctagcgaacgcctgcgtctctcgccggttttgaggttgttgcgcctcatcgcccagttgtacgcgtacaactcaacagcggctgacgcgctctacaatccgcccgcttggcgaatcacggctccgttcccgatcatgagcgaggagttgtacgctgacaacttaagccgatgcagcctttagaggccgagcctcgccgccctgccctgcgcgcgctcggcctcattgtaatatcccgccgcctgctggacggagcggtgctgcgactgctgcattgcctcctgcagggcgatgccctgtcgcgaggcttccgtgagatagcccgcccgcaaaccgtgcgctgcgaactcccgtggatcgagctcagccaggccacagcgccgcttgacgatgagattgatggactggggcgtgagcgccctttcctccaatgcttcccagcggtcgatcgcgcgaaagatcggccccttatgaatatcggctcgcgtgagccattccctgagggcgtcgaccggcggccctacgaggaacaccctgccctcatcatcggcgtcgcccgttttggttcgcccgagctgaatcgagacgcagggcaagagcggcgagttacggtcgttcgggtcgagcggcacgcctggctcatcgctcagctgctcgacccggagccgtgcgacctcgctcctgcggcgaccgccggaggcgaatgccagcagcaggatcgcgagatcacgggtgtcggcgagccggtcggtctggcaggtcgcgagaagacgatcgaggatgtccctcgtcacagcccgcctgctcttgcgtcggcgcggccgcggcgannnnnnnnnnccggacggcgaggcgcacagccgagcgcaccgtcggcgcgccgaacggtccttccatgcccttccagcggtgcaacgtgctccagctcgcaagacgccgcctgactgtactcggcgcgtgcgggccatccgtccggagcaacccttcgccgcggagacgcgcatcgacgtcgaccggcatcccgtgccgagagtcgttctcgcgctgcgccggatcccacagatgatgcgcgacgaatttcagtacgagcgcttccgtcaccggccagggcaacgggccgccggtcgaggcggccgaccaggcttcgagataagcgagatctgacgcgagcgcccggagagtgttttcccccatgccttcgcgcgcgaggtgcctgagcgtcgcgacgtcctcgtcggtgagaagctgcgcgaggcggtcgcgccgatccatgggaaggatcgcggagagcgtgtcgagctgcagcgcgcggcgggactcggcgtcgagagagcggcctttgacgatgtcgtccatctcgcgcctcagaaaccgtaggttcgttcggaccagcgcagcagcaccgctgcgtccgggtcgggcagtcgcacgcgctgggccttgaggccgtccgcgatcgcgaggccgacatcgggctcgacccagtgtccgtgggtcatcaggaagaaccagccgaagggcagggcgagctcccgatcgatcgcctcgatccggtccatcagctggtggacagacgtctcgggcgtcatctgcaagcgctcgcggggaatcttgagcggccgcgggatgaaaccaacctcgcgctcacccttgtgggtgtagtcgcggacatcgagtgcccagtgtgcgaagacgagctgcgaccgggcgctcgaggcctcccaatcccggaagaacctaagttcgcgcggcacgaagtcgaaccagtccggaacggcctggaggaagggcgtctcgcgggtgccgtccgggccgacttcgcggatgacgcggcgctccagctcgggccgcttcgcctcgcgcttgtcgcgttcgatacgcccgcagcgatcaaggaaactgcggacatggacgaaggcaccgccggcgcgatcgaggaggcggtagatcggacccgccaggcgatccgtatcgggcaggccctcatgccggggccacgaggggtccaacagctcttcctcaccccagggacgataatcgggattgacgacaggaccggcgcgccattcgatctcgcggccgagggcgatctggatgtagtcggccacacctgtcccggtcggcgcgaagacgaaggcgctgttgccgcgccactcggtgatctgcaggtcggtctctttcaggcgcgtccacagcgcgcgaatatcgccaccgtccttggcaagctcggccatcatccagggccggagctcgccgacgcgcgtgccgtccgaccggatcacactacgggcgtcgcgccagtactcgtcgtcgacctgggcgagactgaagtcgaagcctcgaaacgcggcggcgagggcagggacgaggtcggcgtcgactgatgccggg

SEQ ID NO: 334 - DNA, 1722 bp, Bradyrhizobium colbertium
  misc_feature (1366)..(1375): n is a, c, g, or t
cagcgaaccgtcgccgtgcccataggatcggcagcggttaagccggtcgtcgttacacccgactatgatgacacacccgccacgcccggtgcgccggccgcaccgcgcagcaagaaagaagcttccacggaaaggcaacgcgaaccgaagctgcggcgtcgcgatgataatccattcgaaccatacggcgaacgttcgtcttcgcggccgtacgcgttaaggctgcccgacgcgatcgacctggttgttcggcaaatggcggccgagcagcgaacccatccgctgcgcattgtcgacaagatactgtacgacggtctgaagcgcctcggccgactaccggcgccacccgaggcttgagacagcgatccctcaatggccctgtcaggctgttgccttcttcaaccgtccggcggacaaggccatcagcatcggccacatcgaaaactgcccggcggccgcgcgtcgggtgagattgcgtagataccctccgggattcttgatcgcgacgccgcgctgcaggatcgccgagacgacgatcgctgcctgtgtttcgcccatcgtaatgcccgcctcctcccaggcgctgggactgatcccgagcatcggccgaacgatcgcagccgtggtgaggaggtcgcgataggaacggatctcaccgcgcgcgtagtcgacgatgtcggggcaggcctcgagcaccatgcgcagcgggacattatcgggcctaaccgtgtggtggtcgggttccggttcgaccgagagcaccgcgctaacctcagccggaggaggaagcgcacccgtagcggcctcagaaacagtcgacgccggcgcggtccgagcctcgccaagatgcgattccaggatattgaggacgcgatcggcaagctcctggagctcgatgacgattggatcgaggacttctgccgtcggcgtgcgcggaacgcgcgcgacgatggtctgatattccccgtgcaatgcgagccagtcgatcgggagattcgcctcgattccggctgctatcattttcacgacgtcgcgccgcaggaccgtgaaacgttgccgacgattgcgcaggagccgcgcctcttcctcgatctggcgcgctatccggtcaaactcactcgcgcgcgcgatgatcggcccaagatcgaagccgtaagcgagttcgatgccgccatcgacggattttcgcgcgaagcgtttaccgttcgggctatcgcggcgcaggatcagaccatgatcgacaagggcggccaggtggcgccgaagcgtcgaggccgccatcccatgcgaacgcagcgaaagatatcggtttgaaggatagaccacgagatcgggcgaaccggctgtgaggacgacgtcggagtgnnnnnnnnnngcgcgatcggggacgccgagcgcggaccgtgcggcgctgatgtcgcggaagaccttccacttgtgcgctggcgtgcctcgcgggcattctcgcacgagcgcactgatcctgagcatcccccgagaaagcccccggttcccaaacggactgcatggtgtttggccaagctcctgcattcgcaacctctccttccgaagagcgcgggcaaagaaaatccgtggcgcgaaagcgcacgtctcttgaactgtcaggtgctgcgatctaagatgccattgtgagttattggcgtcgcaggcgattgccgtcgcccgaccgcttaccctcttgagagacccggctttgccggg

SEQ ID NO: 335 - DNA, 17433 bp, Bradyrhizobium colbertium
  misc_feature (8366)..(8375): n is a, c, g, or t
  misc_feature (16109)..(16118): n is a, c, g, or t
aggacaccttctcgcgcgtaacctaagccattgcccgtggaggtgaaggtgccgatggtagccattgtctcattccttggttttctcgggccgcgcccatcgcgacctcgatggcggtcgtgagaccggaggcgatcgacccgcacctgaagggccgaaacgaagtggagggcggccggcagcgactttcttgtctcgcgaggaatggcgcgcagcgccaggggaagaaagtcgaggacggccgttgcggggacaagatcgagggcccgcgcagcgggaccgtccttcggtcagaccagccgtaatcgaggacgcagatgggctgcccgtcgtgaaaactgttggaatgaagacaggcccctcggcaacatcacatcatgcggtcaagagcacgggcgacaagatccgcttgtcctgaccaggccggctgaagaccgcatatcccgtcgcaaagggtccggggagcagcagatgcgagtcgaagttcgccgccgccgcaaggtcgacaaacacctgccgacgaacttggcatgcctggacattccgcgtctgctgcatcgatgctgcgatcttcgatgagggcaacagcgtccacgatccggccggagcatcgcggacgatggctccggggcttgcgccgcgagggtgagcgcgcccggttcgcacctgcggacggagtgcgtgactcaaactgaccaaaacggactcgaagcgccgtgccatcgaatgtggcgatcacgctacgcccggggagcagaccccacactgctgtcgcactcgttcggccataggtcgaggcgcccgacggtcagcagccctcgggcggatccggcctcgtccagcggcgcgcaggagccatgccgaaagacctggccgctgacaccgcagcgcccgagcgaagcgcacgatcggcatcaacagcgtcggtcccggcgtcgggatgttgatcgcagattgacgctggcgcgctgaaacgtgcaatcgatggacgcactcttcagcggataaggcaacatcgcctctcgggccgaacgacatcgctgcgcggccggaagcccatccagccaggtccacccatggctcacgctcgtcgcttttcgtggcgctgggagttgatctgcgacatcaggatcggaccaagagaaaactctccgacctccgctttccgcgtcagcccgcgcaagtagccgccagctgatctgatcgtggtgccacgctgcaggatgcaggcgacgacgaccgccgcttgcatttcacccaggacggtttgcgcctcctcccaggcgctcgggctgatccccagcattgatcgaacaacggccgcggtggcgaggaaatcgcgccagttcgaaatcccacccttcgcataatcgacgatgtccgggcatgcaccgaggatcattcccaatggatacgaaccctcggcgactcgcgatggttgaggtttaggctcagctcccgccgtccagccttcttgaaggctaggttcaagatcaattaaggcatcggtatttgaattctgtatgtggcgctcagaatgggactcattggcgctcggattcttggatttgatgtgcgcttccaaaagattgagcacgtcgtcagcgagttgcgacagctcgtcggcgatcggctcgagctcctggcgcgtcgcggtgcgcggaatctgagcgaccattgcgcggaaggcggcatgcacctcctgccaatccgcaggcccctgccctgcccttcgcgttggaacgccttcctcgatgccagttgcaatcatcttcgcgatgtcgcgccggcacagtgtgatccgctcacgcacgagcttgagcgcgcgggcttcggcttcgatgtcggccgccaggctctcgaactcttccgagcgcacgacgagcggcgacagatcgaagccgaaggcgagctcgatttcgccggcatcgtccttccgcgcataacgcttgccatttgggctgtcgcgccgaacgatcagtcccgcgtcgaccaggacagcgagatgacgccgcagcgtcgacgccggcatgccgtgcgcccggcgactgagctgattgtttgacgggaagacgatcaggtcatcctctcctgtgagcgcggtctcaggatggaaggtcaggagcgcgtttagcaccgacagcgcccgctccgacacgccaaggcgcggccgggccgtgcagatggcgtggaagatcttccatttgtggacgatcttttcgggagggcgttctgttgcgatcatttggcttgccacatgggcaagcgtcaacgatcgccgcccaaaaggcgtcgttggagagtgtgactgcatgtctttgcctcagctgggcaaaggaaacctgctcgccgaaacgacgataaaatcgcgtagaaactcttgactgcgattcgcgaaagtgattctctgtcagtcgccaaacttgaagagaagggcttccggaactccgtttcgggggcctttttcttttgccttgtctgctcctggttcgtgtttacgggacgaggccttcaggcctcgctagcttcctgaccgccgctcgttttggaaaaggcgtcgaacagcgtcgggagttggtcgacaagaaatgcagcgaatgtcgccgagacattcttgtcgagggtaagcttcaattcgcgctcggcgtgacgcacgtgcgcgatcttgtcgccggatgcggaaaagactggcttctcttccgatggcttcgacgtccccgcggaggatgcacggctcgccgctgtatatgctgcaagaaaccgggcgtcggtttctcgttctgcaaatttcggttcagcgatcgccgctctgacacgtttgagcgcggcggcatccttaaccaggtcggcgaatgactgccagcggccgcggccaactttcggagccttcccgattgcttgaacaacatcggttggaactgaccgggccacggcaagaagtttcgaggcctccgctcgatcgatcgacaacgcatcttgcacgattgaccggctatgcccggcatcttcgatatgcatcgcgaaggtggcgcgctcaatgaaactcagatcttcgcgtggtgcgttctcgagcccttgcgccacgacgagcgcttcatctgacagcgctcgcaggatcgctttgaccgagatgcctagttcgcgcgtagcgcggacgcggcggtgaccatatgcactctggtagcgccctttcgcttcaggatgctcccgaacgagaatgggcacctcttgaccacgctgtgcgatcgactgcttgagcgcctcgaacgaactatcatcctggtcgcgaaaccggtcggctagcggcgacggatcgataagcgaggggtcgatttcaaggatcatcgctccggaggcaatcctttcgcgaagctcctcgttctctttctcgactccagaaaaggtgtctttcaacgagcggaccgagcccgacgagacccgcggcaaggcaccgggcatgttgtcagctgacaacgcaggtgattgcggggcggtgaaaagacccctgatggtatctgtacgtttgctcatcgaccccacaccttcttaagaagttgcgcgatttcggcattgaccgcgtcgaccgattccaatgcccggtcgtaggcgccccgccctacggcgccacgctccagttcgtacagtgattgcttggtgagacctgcattggcgatcgcggtcgatttccacactgtggcctggagcacatccgatccgaaaagggtgcgaaggagggccacgatttgagcttcgggcacgtcattaggatcgtgacgcgtgatgacataccggatgaaatcgtgatcgaggcgcccacccgcttcctcgatgacggacatgaggtccgacgtcatgaggagaaattggctcatggatgcgacatcgaccatctgaggatggatggtgacgagcatcgcggtcgccgcgttcagcgcgcccatggtcaagtaaccaagctggggtgggcagtcgatgacgacgacgtcgtagtcgtctgcaacttggtcgatggcgctggcgacgcggcgaaagaataggtcgtgtccgcgttcacgccgctcgaccattgctcgaggcgtagtgtgctcgaactccataagctcgagattgcctggaacgagacctatcccgtcaaaataggtcggccggatgatctcgcgcaggggccggcggtgttcgtcatatcggatggcaccgtacagcgtttcattcgccccaatgtcaaactcgggttggtacccgaacattgctgacagcgaagcttgcggatcgagatcgatcgccaggacccgaaagccggcaagggcgaggtattgcgacagatacagcgctgtcgtcgtcttggcggagccacctttgaagttcgcgacggtgatgatctggagcttgtcgcctgggcgccggcgcgggagaaattccaatgcttcccgcggacgcgctgtggccagatacccgcgcaactcatggatctgagccagagtataagatcggcggccaccgattcccgtcgtcggggtcggtccaagtccgtcgagagaaagttgtcgaaggtacccgtcggatacgcctgcaattcgcgcaacctcccctgaggtgaacgaccggagcgatttgctcgctgaaggcgggaaaagcgtcgtcgcgagcgatcgcagctgaccggaaagaatgccggcatgccgagagatccgcgcagacgcagtctcgctcatcgtcaccgaatcttccgctaagatcgccatttgccttctcaagacggtttctgcgcgtcagacgcttaatctccgtcttgagagatggccacgattctatgatttgagcaagaaataaagggttaacgagttcttaacgctcgatggcgtgcgtaacggcgagcagcggctttttggccgcgtcgccctgttttgttgtcagctgacaacaatggccccagccagcggagcgaatttctactatagcgcgattcggcgaggctgtgtccccaggcgtcattcggtacgatgccagccgctgctccgatcagtgttgctatcgcgcggatgcgccggggtctctttccatgcgcgtcacccctcgcttctggggtcgagtcagcgtgcaccggtgcttgacgagcagttaatccatgccgcgcgcggggatctctactccccgtttcccagcaagccgttgcccaggaggatcgcttccctcttaagatggaggtggtctcgcacccgatacccaggagcggcggctcctcgaaaagcgccctccccgtcttgttgaagcgccggagccggtggcgagcgaaggggttttgtggtgttggttcgctaggtccagcagcgcgccgggcgttcgcagtgtggaccgaggcgcccactgcggcacttcgctgggccgccgctcgccaggggaacaagcaagcccgcacggtagcacgtctccgccaattcgaacgaacaagcgtagagtaatcgaccgagtgcattccgggtcaatcgcgctcgctgttcccgggccaccagccgcaagaccgcctaccacctagctcgggacgcctcctcatcggctgcacatgcgatctgtttcggcaagggaagccaatgcgcagtcaggctagcaccttaaccggcacggtcgtgagcggttcgacctcgccctggggccggatccaatctcgacgcctggcgaccagatgccccagataccatcgcgaaccttcgagttcgaggcgagcgcgccgcagcgaatcgcttcctggacgaggcgtttcgatcgcaggggaagtaatcccataggggacgccgcacagactgttgtcagctgacaacaagagcctgggcctaccaagtaaatggatgttgtcagctgacaacaatctgtgccgtccagccgccgacgcgcgccttccagcccttgtcgatccgcgcgctgatgaattcaggagcctggacgaggttgtccttcggccggagccccgtccagatgatggcatggtcttgatgggaaaatgcgcccggaaggccggaggatggcattcacagaatgctaaccatagaaatctacagcctccgtgcgcatttacgagcttctccatcagatttcgcgagaacgaccagccttcacggggtgtatccggaatgttatatagggatacacgatgcgcgctagaggagcgccggatggccttccatatcaagaatcccgagaccgacgcgctggcccgcagggtcgcggcgttaaagaaaatcggactgaccgaggccgtacatacggcgctcgcccatgaactcgaacgcgagcagggcaggccgtccttggtcgacctgggcgtccagttttgtcgcgatttgagggcgaagggcaacccgcagagcggcaagcctgctgacaaggcgttccgcgacggcctgtacgaggattcctgatgttcatcgacgcttcggcgctcgccgcgatgctgacaaacgaagacgaggcgcgcgagttgctggcgcgcgtgcagcaaagcacaacccggttgacctcgccgctggccgtatgggaggcggcgattgccatcgcctgcgtgctcgatctgccgatcgccgcggcggccgaagcggtcgagagctatctcgcgctgatggaaatcaaaacggtgaacgtggcgcccgaaacagcccgcatcgcgctcgaagcatacgaccgctacggcaagggccgacacccggcacggctcaatttcggggactgtttcgcctacgcctgcgcccgaaatcttggcgaaccgttgatgttcaagggcgccgattttccgcagaccgacatcgaggcggcctgacaagcgctactatcggagccagcccgagcgtggcagaagtaatgaacgctgattcgcggtgaagccacccaaccgacgccggggaagccggcccgatagccttgaccgcgcggccgtgcggacagtcgacctgaccgacgaggacatctgagcgcgggcggcggccgaaggcgtccggaagagggcagggagctgaccagcagcgcatcttctcggcggtttggcgccgaccggcggctagcccggcttgagttcgccagagctcgttgatttgcgaggcattcaatcctggacggttcggaaccgacatcgctatgacggaagcgaaagccgtgttagcttccgtttcgctggttcccattaaggttatcaggaccttgctgcccacctacaaaatccccgatccgctgccctgggcccagctcgccgggccgctcgccgccgccgaggatgccgtggcccgcttcgacgagcggctggccaaaagcccaatccgcgacggcgcaatcagccggacacacttcaccgatgcctgcgccagtttgtggctggacggcgaacttgtccacctcgatgaccttgtgctccacgacgccggcatggacgttcgcactcccacccatgagctgactcgcgcccacgccgtgctgcgcgcccgtcggcgcatcgccgaggcgaagcccgaatgggcgctgtcggctccggggctctccagcctccgcgggcggggcgagcgagagcaggagacgagcaaccggaaggaaggtgagggaggttttgagatcgacgaggcccccgagcgggaggaggtaggtctcgaattgcccctcggtgtccgcgagaccgatccccatctggccgccgctttcgacgcggtcgacgcagcgaacgccagggcggagcgcaggcttgccgccgagactcggtttcggccggagcgggattctctcatctacgatcccgactgggatgaggaggaacgcctcgatcactggcgcgatgtggtcgaccagactcgcggtttgccgccgaccctggcgggggcgattgccgccgacgcctggggtgagatcgaaccactcgagcacacgccttggctcggccgcctgctcgccgcggcattgttgagggaccgcggcaaaacgcgatcgcatctgccgtgcctgcatgctgggctgaaaagcattccgcgtgagcgccggcggccacgcgacgccgcagcgcgtttggtcgtgcaactcgaggccatgacggccgccgccgagtctggccgcaaggatcacgaccgttggctgatgaccagaaacctgctcgcccgaaaactcgccggccgtcgcaccacttcaaaactgccggctctcctcgactacgtgctgacgaggccgatcgtctcggcgggcatgatcgcggcggaactcgggatcactccccgtgccgcccaaaacctggtcgccgagctcggcctgcgcgaggcgaccgggcggggacgctaccgggcgtggggcgtcctctagaggcgaaagtccgttgttggttttacttagcgatttcaattgannnnnnnnnntccgttcgtggctgctggtcttaacgttatcaatccttgggacccgacgcgatgatggcgctcggaccaggccggcgcgtagcacatcggtcgatcgacgctgattggccagcatctcgggcgaatgtgggtgcctgtgtcgggcttttgcgctgatccattggccggagttccgcatttttccttcccggaagccggtctgtttgttggttttacttagcgatttcaattgaagcgcttaggtaaaaaacgacctctcgattttcacctaagcacttcaaaccgccgcaggcgcgggaccatcacagcccggctgctttggtcaaattgacgcggaaacgatcccgccggcgctgataacgccgagtcatttcggccgacgcgtgccctagctgtttctgcacataacgctcctcaacctcggccgaggaggccaggcccgcacggagcgaatggccagcaaatttctgctcccgctcgccttccggcaaatcgccgcgaacgccggcggcgagcgcggcccgcttgaccagacgcgccacctcttggtcgttgagccgatccggtcccacatccttgccttcgccccgaacgcggcggaacagcggcccatggccaatgcgggcaaatttgagccacgtcgccaaggcgacgactggacaggttgcgtcggccgagccgcggccgatctcaacctggcgccagccggtcttgccgcgcagggtgacgagcacgcccttgtcgagaatctcgacccagccgcggccgtcctcggtctggtcgcggccgcaatccaggccaacgatctcggagcggcgcaagccgccggtaaagcccaggagcagcatggcgcggtcacgcaagccccgcaacgcgccgcggtcgagcgtctccagcatcgcgatcagatcctcaggcaagaccgcctccttctgccggggcggcgcggcgtgggtgttgcggatgccggccataacggacgcgatatgccggtcctggcggtcgagcggctgaccgcgctgggcatagttccaggcgagcgaggacagccggcgctcgatcgtcgacaccgagttcggcctcttatcgccggtcgccgtgcccgaggcgcaggccgtgatgtaaagcccgacaacctgcgcgtcaggcggaaacagttcgaccgcctgccggcggcaccaggtggaaaaatgccgccaatcggaggcgtaggcgcggcgggtgttggcagagcttgccgcctcgacatagtcccgggcccggtcggcgagccgctcgagatggaccggcaggccggattctgcggccggaagaggggaggggaggccgccctgaatctcggccgacgtgtcggcggccgaaagatcgacggctgctgccgggctcccatgcggcgcggagctttccgaagtacgaatttccgaggtctgggcggcactatggggcattctctctataatgagcaaaacgaacgataaagcaaggttctcattcattttaaattgtcgacaggcgcggcgttttatagcagttgtactggtataaagcgccgcgtgacttatgcttgaatatggccgcgcgcgcgcgaatcacacacgatccaccgcctgtctttccggtctttccaggctgggcgcggttgccggcatccacgcaagccgttcaagatccggactttctcgccggggcggcgctcgccgccctgcatccaatcgcctgtcacgaacatctgctccgcatgctgtggcgtcagcgcctcgcacttagctgcgccgcggttctggcgcgccaggaggggcggacggaagacgaggcggcgctgcgcgatcattggtatcttcggcgcgaaaccgacgatcccggtccggccggccggatcctcaaagcatggcgctggctcggcgagagcagtgctatgccgccggacaactgggcggtcagtcttggcgcgctgctggcgcatcgcttcgacgacggcctactcgataccgtcgcttttgcgagggatcagatcaaagggcagggcagcgcggttgcagccgcggcagcggtggcagccaccagcctgcgctttcggccggactgccggccgctggcgctgtggctcgccgacgctgtccttgcccacaagctcggatggcgcgcgcccgtgccgctgctcgcggcccatctccagcgcggcgacctccgcctggcgacggcgcacgttgatggcgacagtccttggcgcacggcctgcgatctcgcctatgcacgtggtggcgccgtcgcggccgacctatacagcgatctctcgcggcgcgctgaaaagctcttgaaggtggcgccgcaactgcgcggcaaggacgccgatatgacggtggcgatcctgctcggcgaggatgcgcaggcggccaggaccggcaaggcggcaagcgaccggtcgagccggcggctgttcgagcgcctcatcgcccttggtggcgtgcgcgagctgaccggccggccgacgtttcgcctgtacggactttaggtcatgggatggcggccgcgatcaccggaggctcttgacgtcgagttggcggacctgccgccggacctgcgctggcgcacatgggtggggcgcgtcgaggcggtcatttttgcttcgccggagccggtgacccgtgaggtcctcgcccgcgtcgtcggccgcgactgcaatatcgatctcctgatcgacgacatccgcgacgaactgcgcggccgaccctatgagctggtctgcgtcgccggcggcttccagcaccgcacccgaaagaacttcgccgacgccatccgctttgcaacggggctcggcgccgagacgaaaccgctctcggactccgagaacctcatcctgatgtgcatcgcctacttccagccgatcacgcgcggcgaactcgggcagttgttcggcaaagaggtcagccgcgacaccatcggccacctgcgggcgctcggattcatcgccgccggtccccgcagcccgcaacccggcgcgccctacagctacgtcacgacgaagggttttctgtcgcactacggcttcgacaccttgcgcgacctgcccgacatggaggcgctcgaagacgccggtctgctcagcaaggacaagctgctggctggcaccatccccgtgcttgccgcagacgagaacgaggacatcgccggcgacgagggtggctcgggcgatgaagctgagatcatggacgatgggtaggtcgccgccctgagcgacctgccaaagacacctgttatggcacgatgccacattcatcgcggccggaagttgaggcgccatgcggagaataaaatgcgaaggctgcggccgtctggtcccgggcttcgcggttgtcgaatacggctcgatggaagtcggatacaaacggctttgccaccgctgcttcaatagcgaggccgccacggccgccggtctcaccgacttcgagcatgtggaatttgatccgatccgtctgaaagataccgacgggaaattccacgaattccacttcacgagattcctgttcggcacgggcgtcgctttgaacgcgttcgaactccgcaagggcgtcccggcgggctaccggttccaggtgattgcaggccccgaggaagaccctctcgccatgctcggccgactgatcgaaaaaatgcagcgcggccttgccgtaaaacatcttgaggacagcgaatacggtttgcagatcggacaagccggggtcgtccgaggctgcatcacgtgggacgacgggcaacacggacgtctgcctctccttgtcattgatggccgggagatttcctgggatgaattcggccgctgcctgatgaccttcgaaggattccaattcaaattcgaaattcgcgacaagagtgatgagctctgacgtcctcatcgaggtcagactcaccaagatcaaaggtcacgatgaagctttgatgaactccgatcgccagccacacgtcgataggccgccagcaaatcggcaagaccaatgccgccggcgccgcgccgtatcaaacgccgtgatctcggcctggcctgacacttgtccaggaagtcagcgaagcaggcgaccaatcgatcctggccgccggccgccaggatcgaccaacgtcgatgtgtgacggcagcgtccttgtcggcgaccagccaatcgagaggctccccggcaagttgctcaaaccagcgaatgcgcgccatcgacgccaggctcgtcaaactcattgccaagctatcgtcggtcgcagccgatgcgcgcagcacgcgcgaaacgacatcgcggacggccgttgaactctcggtcgtcgggctcctggccagttccacccgaaagatatccgcgatcgcccgttccagccgccgcgccccgcctttgaccgagactttccgagcggtccgcagatcgaaaccacaacgcacgcagaaatgctgcgggacaagatccctttgatcgaagacggcaattgcgctgcggcaggcagggcatcgatcccgaagaccgcaaccatgcacgaaacaggaaatgcgcgacgcgagccgccactgccgacgaaaatacggcgattcgtcctcgccaaggcacagcggacaatattgcagccaggtcgaacggttcctgttcgcgttctcgcgcagcggcagcaggagtggcgccaacacccaatccgacatcgccatcgtcgttagcgcttccggcgaaatctccgtccggtcactgagcagaacggcgatggcacgcggaatccgaagatcgaagcgggccgaccacattgcgccaccaacccccaagaccccggcgaacgatcgcggcgagatcccgttggcctgcccaacacgatgcagccaactcgacagcagttcgtcaggtttcggatcaatggatatgggccaccgatcccgcgcaatatcaaggtatcgttcgcggatctcgacggcaaacctcgcgcaggtcgccgcggcgctcacaacaggtagtcgcgcaccggcgcccggcggcgctgcgaaagcggaacgtagcacaattgcccgaggtccgatttcgtgatccgctccgcgccagacctgaccgcagcgattgccgctgccgtgacaaccgccacgatctcgccgatcagtccctccgaaagccgaaagatctcgcgcgccagtttctcgtcggaaagatcggaactgcgggccagcggcaaggccgcttcgagactgtcgagcaacgtgaggaattcctcgtcatattgccagcgcggcgccgcgtgcagatcgaaccggcttgccatctcactggtctggttgatgacgtcgtagacggcgacctcgccgatcagaaccggtgagatgtcaaactggcgaccgatccgtctgagaaacgcaagaaccgcctcgacgtcacgggtccggccgcgcaggacattgtggaattcgtcgaagatcaggattctgggtttgagcctgtcgaacagataatcgatctgttcggccttgcggccgacatcccgcctgttgctggtcggggcgcgcaacgcctgcaggatgcttccatagaaatgggcaaggccggcgccctcacgggtctgcacgacccagactcgctgttgttcggccgccctcagatgctcgaccgcgaaccgttccgccatcatggtcttgccgttggcataaggaccgaccagcatcagtcctcgggttcgcaacgcagccggtcgagccaacagttcggcaagtcgctcatgcgcttgcatcgccacccgatgcccaatccatcgcggcgcctggatataggcgatccgttcgtccaagctgcggtcgagataggagcgaacgtgctccagcagatgatccaccgcctcaccaatcctcgaccggcaggcggcgcttatgacgcacaggatgctcagcaggcgccggtgtcgccgggcgcatggcatcatagggcttgggcgcctctgccgcgtggattctgcgcgcggcattgcgcagttcggctttcgacggcttcggcccgttggcgattcccgcgatccgtcggcggagcgccaccttgtcgacgttcgaccgcgcatttgttgcgcggcggtgcatgcggtcgacttcgtgctcccaccgcgtcatcggcgcaagcattccgtcacgccgctccaccgaccgaaactccctcgtctccgaatccctgatgtagacgtggctgatgtcgcgtggttcgtagcggacctcgagcttgccaagccggtcacgctgcggcaccagcgcgcccagccacggcgaatagtaatcgagcgcaaacatgctgacaccctgcggcgaaatgcgtctctccgtccggggcatgaacgccagcaggatccgcatcggatcatcgttgaagcggggaagatcgcgagcctgccgctcccattcagtggccggcaccttcaccctctttgcgttctcctgcaggttatggtcgatcactgcgagcgtgatacatcgctcaagatcagcaaagctgagacgcgcgcgccgctctgcgggatattcgtcgcgatccgccacggatcgtcctgtcgatcccggctgtgtcgcaagaacggcgttgagctttccgagcaacctctcgacgactccgccctggtgcacgcgaccgcggtcgcgatagcggatatcaatgccatagtcctcgcatccacgctggaaggcatgtcctttgaactctttggcggaatcggtgacaagcaaccgcgggcgaccgaacatcggccagccatccgggataccgcgtgcggcgagccatccttccttcggacacatcgcttgcgccaggcatagcgcgaccgacagcgccgacggtttctcaagggtgaggcaaaatccgagaatgcaccgcgtcgccacatcggtgacaatcgtcagataggcgcggccgacaaaggttccgctgccctcaatgacctccacgaaattgatgtcggtcggcgtgtggtcgatctggcaggcgtcgagcggccgcgccgcatggatgtagcccggtctaggtttcagccgatgcagatgcttcgggttggccgagcgtttccttgcgatttcctcgggactgaataaccccggtacccggcgggcgacactgacataggacggcgcagccagccccgcctcttcacagcgcgcgcggatctcggccacgacgggagcaagcggcggagcctccagcacgagccattgctcgcgcagcgtcgttgcgatgatctcctcaatgtcctgccgaaggcgcctcttccgagtccgttccccatcgggtaggagcgacgtcaccctccgatcagcccggtaccgcgccagcagattgtagacctgccgggtcgagaggcgcagttcggccgccgcccgatcaatgaccacctgtcgtggcccggaaccgtccagcacgcggtccagctcgcgcgcggtccggcgcgccgccgaccatgtttcgtcggcgtccaagggggtggaggctactttttgcagtcggcttggcatatgacgcggccattgaaatccttagcggaaaatcgggccgcttctaacgcctaaacctaaacaatatctcactttttcctgtttgaaatcgggaggtaaaagcgacacagattgccgggccgctggcggcggccgaggatgcgctggcccggctcgacgaacggctggccaaaagcccgatccgcgacggctgggttgcgcggactcacttcaatgacgcctgtgccagtttgtggctggagggnnnnnnnnnntccgtgctgtgaacgctcggcagaaaggccgtctcgtccagatgaaaaagacaccaacaaaaatgccgcgcggttgaaatccagcgcagcggccgtttccagcgaccgagggtgtacgaaaactccggtcacgctcgagtcgctgaccaaggcctttattcgtccggcacgcacgcagacgaaggcttgaagatttagtttgatcgtacttatcgtagccaacctacgatataggcaataaatcgaaacttgcccgcccagctggtcgcacgatacagagccgcctcaatcgtcgttggtaagttcgtcgggccacatctgcgcgccatggagcacgcgcaagatgcgaacggtatcgccgtcgaccaggtacgccgcgacataagatgtacgcggaatgaccaactcgcgcgtcccagcgacacgccccggccgaccgctatccggaaagtcgagcagacgccgcgcggcattggcaatctgttcgtcgacatgaaccgcggcacgaggattctcggcctcgatgtagctgaaaatgccgtcgcgatcggacaacgcgaagcgcgaccagacgagtttcaccgttcctgctccggtgcctttcgaagcgcagcggtacggcgttgtgcgaaatgcgcttcgacctcggaatcatcgatatcaggccgcgtgtcggccaacgcctggcgcaccttctcccgaaaccagctatcgtaagcttggctgttgctcacgagctccagcggaagcatcccttcattggccgtgcgtgtcagcaggatccgcacggcgtcggataccgtgagacccatattttccagaaccgcagtggccttttccttcacgtccgcatcgatgcgggtttggaccaaggcattcgaagccatagcgacctccatattcgtagctagatgtaatacatttgaatgacatgcaccagagactatcacggctccgtgagctgaggccgtgacagcgggcaaatggccccgcctttcggcggggccgttgccgtaggccctcaatcccgattcgggcgggaccagatgagctgtaggccgtcctggccctccacctcgatcagggtggcatagatcggagccgggaagctcggatcgtccagcttgaccgagaggtaatcgcgctcggtgtccctggcggtcttctgccaagccgctcccagctcgacattgccggcgaagatgcggaagtgcggtcccttgtcggagggattctcgacccgaactagcttggctttggcattgagagcgagggtgcgaaccgtgccggagaagccgttttaggtcagttggca

SEQ ID NO: 336 - DNA, 1907 bp, Bradyrhizobium colbertium
  misc_feature (936)..(945): n is a, c, g, or t
gatcgaagcgcttgcgatcacatcatccgcgctgcgcgacgccctgggcttcgatcgcgcgggggtcgtcgaggcgatcagagggatcgagcggcggatgttctacaagtcgatgacgaccttcgccgatcatcgcctctggcaggacgtcgatcacgtccccgcccgcggcatgacgctctatgtaaagttccaggcggacatcgtcaccgagttcacggtcatgtcgttcaaggagaaatagccatggcggtatcgaagacggacttgccccaaacgatgatttctccggagaccggcgaaacgctgcgccgaggcgttcgtcccttcgtcgtcacctacaaaggcaagagcatcacggtcgagctaccgggctactatccggaggatggcgccgagggcgtgcatgtcggtgacgacatggctgtcaccgacgcagctctgcgcgggttgaaggaagaaattgatggcattccgtcccccggcacgatcaggcgggtgcgcgagaagctgaagctatcgcagcgcgaggcgggtggcttgctcaaagttggggagaacgccttcgacaaatatgagcgtggactggtcgagccgagcggtccgacgagccaattgttgcggctcctcgaccaacatccagagctgatcgaggaattgcgcgagcgtgcctaagcagcgagcgccttgggctcgcctgcgccctcgatgtccgccgcaagcgccttctcgatctccgaaagttgccggcgcttctccgcgagttcgccaccgaaagcgaagtcgccgccgtcgcgggactggtatgaggcaagccgccgccgcgcatcggcaagacgctggcgaaagcggtcgcgctcgccctcgaaatcatcaagcgcgtgctcgagccgggagattgcgccgagcggcgtgaccgtcacggaaagctcgatnnnnnnnnnncgccaatcgagccgatgacagtctcgccctcctgctgaagctggaccagagtgaggatttctttcagcagcgcacggcccgcctccttgcgctcgacatagcgcttatccatcacgctcatcgcgaaggcctcgccggccgtcggcacaagacgctcgatatcctcgccgatctccacgatgcgccgggccgagaattcgatgtcccgctcggcgtcgcgcatctggcgacggactgcatgctgatcgtcgatatgagcggcacggagacgttcaagccgtgcgacgtccgcttccagtccggcctttcgcatgagccgcgcgtcacccgacgcgatcgccttggccatcgcgaactggttggcttggctctcccccatatcctctagccgacggatcgaggtgtcgcctgagagcgcggccgcgatgaagcgagccttgcgctcattgttttgccacatctgcgcatccaagctgccttcggtcgcgtaggcaaagatatcgacctcatcatgctggttgccctgccgcacgatgcggccttcgcgctgctcgatctgcgagggcagccaggggacatcgagatgatgcagcgccttcaggcgcaattgcgcattgacgccgattcccatcgtgtcggacgagccgatcaggaagcggaccttgccggcgcgcacgtcgccgaacaggcgctgcttcgcttccgacttcttgtagtcctgcatgaaggcgatttcggacgcgggcacccccatgcggacgagctcgtcgcgaatccagcgataggccgagaagccgcgcgttttctcgacgctgatcgtgccgagatcggagaagatcatctgcgccgcgcctggcagttcgaacagcttgccgtcggagcggacgtaggtggtctcggcggtctcgttccagatgcggaaggcgttgccaacgagctggttcagcttgttgtcggcctcg

SEQ ID NO: 337 - DNA, 3729 bp, Bradyrhizobium colbertium
  misc_feature (492)..(502): n is a, c, g, or t
  misc_feature (1415)..(1424): n is a, c, g, or t
cgtatgggccttcgcggagctgatcttccgagatcgcagcgcggatgatggaatcgggaattttgcgttcgtcgcagagataacgccacgtcggagatccttgccggggtttgcgccgggcgcgccagcggtcggcaatgcagaggtcaggatttctcgtgcgagatggtttcgtccagacaggctcggtcggcttgaagccgacgagatcagagacgcgttgcagcacttcggcgaaaccaacgcgctcgagatacccgaccaatgaaaatacatcgcccttggcgtcggaaagagcgtcgaaccagcccttgccgtcgtggatgacgatgatgacgtcgttggcgcggcgatatttgaccgccttacgggtgctctcttttggatcgatagcaaatccggccgtctccaggacggcggcacaaggcacgcgacgtttcagctcctcgatatctctcttttccatctccatattccagcgccaaacgcgcnnnnnnnnnnntggcgggacccgcacgcgaccgccgcgaagagcgaagggggcaagggcgcggctggcaattggcaaatcaacggggcgccgaacgtcatcgcctcgccagccgcggcgcagcctcccttgccgccgctcgctcgcaagcggcaaaggagcaaacccggctcaatgagccgagccggccaagtaggggtcgtattcgtaaacgacgaggacatccgcatcgtcgagctcatcgctgggcatcacgccgtattcgccgtcgacctgaaaaagcgtgaccgggaccatcagggtgcgggccagttcgaatgcgttggattgggcgagggcaagatcgtgcgacatctgagcggctccatcggtgagcgaggccgatccccgctcgatggcgtccgttggtctcctcaaccggccgcgatcaccgcgaagccgaaggcgcagcggcggcatgctcgcatagccgaccctttatgggttgaacgtggaaggccgggcggaggagcaggaaagccatccaaggagagcggagatcggacttgcgtcgagatggtcggtcctctctcgcacgctcgatcgtaagcctagagctcatcgcgccgtcccggagcctgcagcgtccccgccgcgaccaattcgatcggagaacatgcacgaccctgatgggcctctccgtgcgaggagaccttttagatccgcggctgatatcgccgaatagagatattcgccaggactgaatcgacgtcgcgatactgcgccctgtcattcgaatcagcttcgttattcacgacggcgcgggcggtggtttgcctacctcaggccgcaagactacggcgtatcgaaattactgcatcatgctggtaggccggcagagtgatcgtgacccgcatgggccgaaaccgctctcggcgggttcggnnnnnnnnnngcacggtcgcgcagagcgcgactgccccgaacatcgctcaatgcgacctgacgggggattagttgcctgttcgctgacgcaaaaatctgataactaccatgcacgcgatgacccaagcgacgtagatcacaagattggtaacaatcgttgctaacgcttcgtcgtcgtctcgatcgcttcgcgcacttttctggagagctcatcgatggtgaagggtttggccaggaagtgaacgccgctgtccagcacgccattatgcacgacggcgttcttggtgaagcccgtcatgaacaatattttcaagtctggcatgagttgcaacgcttgatccgcgagcttgcgaccattgaggtcgggcatcacgatgtccgtcaccataagtgcgatgtcttgatgtgcggccaagacattcagcccgtctttggcgttgcgcccctgcaagacctcataaccaagttctcgtagactggcgaccgtgaggtcgagaacggcgggatcatcctcaacaacaaggatggtttccgtccctctgaactcttgcgtctccacggtctctttcgctgcctcggcctgtcccaagaaccgaggcagatagattttgattgtcgtaccctcacctggctcggaatagatcttcacatggccgccagattgcttgacgaagccaaagacctgagagagtccaagtccggtgcccttgccaacctcttttgtcgtataaaaaggatcgaacgccttggcagcgacctccgggggcattcccgtgccggtgtctgttacggcaatcaaaacatactggcccggcggcacgccggggtgtaatcgcgagtagcggtcgtcgaggtggcagttggcggtttccagcgtcagccgcccgccttccggcatagcgtctcttgcattcacggagagattgagaatcgcggtctccaactgcgaatgatcggcataggtggtccataatccgccgcccaagatcgtttccattcgaatcgattcgcccaaggcgcgcgagatcaattcggacatgcctgccacgaaacggttggcgtcgatcggccggggagaaagggtttgttggcgcgagaaagccaagagccgggccaccagcgcagctgctttttgggcaccctcgaccgaactcgcgagaaatccgtcgacgccgtcgcggcccgccgccaaccggcgacgggccagagaaattccgctgatgataaccgccaacatgttgttgaaatcatgcgcgatgccgccggtcagttgtccgatagcctccatcttctgcatttgccgtatctgctgctcggcggcttcgcgttctgcgatcgtcttccggaggatctgattggcttgcgccagtttgcgtgcgttgcgccgtgccgtcgtgatccacgcggtcaggacgtacacggttgttagaatgcccaaagcgatagccgcgagcaaccagttgatggtggaatggagcgccgctgttcgagcagcgagcaggccagtttcctcgtcctgcatgccatcgaaacgtttgcgcaagtcctccatcagctgcaggccgcgcccctcagatacaagcttgcgagcgccctcgacgtcacctcgctggcggacctgtacagtgttctgggcaaatgcgatgcgatcggttaccaacggtcgaatcgcattgatggcggatacctggatgggattatccgcaacaaattgcgcgagatcgtcgatctgccgcgtgatgcgtttgtcggcctccacgaacggggtcaagtcctgatcctcgccggtcaggacaaagttgcgctgccggatttcgatatcttggaggctcgaccaaatcctgaagatctgggactgcacctcaagcgtgtgccgaatccagtcggcctgttcggcatagcgagacgcaagccagatcgagagcgctactgttatcgccaggatgacggcggctccttccggagtgcggccttgggcatagcggagcgcgtcaagaaaggaagacgtgcctgtctgatcttgaacctcggacgtcatccgttttcccacgccgacaaaagccgcgtctccttgaaacgaagcggacgtaatcttggatcagtcgatgtttctgcttcgccccttgacgagaagtctaaagcacctccttgccgatgaaaacgctcccctgcttccgctccggctttacggcttgtcgcgttaggctggagacgcgtcggtcgcggcggaagtcattccggtcgctcgcacttgaagcaacgccaaatcggtgcccccttaccatttcgcggcagggctaacgtcatgatctgct

SEQ ID NO: 338 - DNA, 5930 bp, Bradyrhizobium colbertium
  misc_feature (5442)..(5451): n is a, c, g, or t
ctcgaactgcatcaaaagtgagtcagagccccttttcggcgccgatctggggtcccggttcaatgctgattgacatgctgcgggtctccgttcgccgaccagcgagcgcgcagcagtccagcgagctcgaaaggcggtgccatggattacgtcaagttcggatcgaccggcctggaggtctcgcgcctcgtgctcggctgcatgagcttcggcgatgcgacgcgaggcacacacgcctggacgctcgacgaagaggggagtcgcgcgctgatccgccaggcgctcgaggcggggattaacttcctcgacaccgccaacagctattcaggcggcacgtccgaagagattgttggccgtgccatccgcgatttcgcgcgacgcgacgagatcgtgttggcgacaaaggtcttcaatcggatgcgtccggggcccaacggttccgggctttcgcgcagagcgatcttcaacgaaatcgacgccagcctgacgcggctcggcacggattatgtcgacctctatcaaatacaccgctgggacgatcgcacgccgatcgaggaaacgatggaggcgctccacgacgtggtgaaggctggcaaagcccgctacatcggtgcttcctcgatggcgagctggcagttcgcaaaggcgatctacactgcgcgcctccacggctggaccccgttcgtcagcatgcagaaccatttgaacctgctctaccgggaggaggagcgggagatgctgcccttctgccgcgatcaaggcgtggccgtgatcccgtggagtccgctcgcgcgcggccgcctggcgcgggcgtgggacgagagttcggcgcgtcaggaaacggatgtcttcggccgctcgctttattccgacgccgacccgcaaatcgtcgatgctgtcggcgcgatcgcggcggctcgcaatgtctcgcgtgcgctggtggcgctcgcctgggtgctgcaaaagcctggcgtcacggcgccgatcgtcggcgccaccaagccgcaacatctgacggacgcactagatgcacttccgctgcgcctgaccgaggaagaggtaaagacgctcgaggggccgtattcgccccgtcaagtcgtcggcttctcgttaccgcgctgagcgcttcttgaggtggcgtttccaaatggctcccgccttcagatcccttcacggtcagctcatcgaacgaggccgttggttgacgcgtaagcctgcggcggccgaggtctcggcagcggcgagcgacgtcgacgtcggcacacctgtggcaatgctctcggtgctgcgtttcgtcacgagctattggggcaggcgagccggcctgtttgtcaccggtgtctgcgcctcgttgctcgggacagcattcgatctggccttgccttgggcatcggccgcgcttgttgacgacatcgcggccgggcggagctcgggagacaatgtctggcgatcatgggcgattttcatcgcaatgttcctcggcttcgccctgtctcgcaatgtcggtcatcgtctatggattcccgttgccgcccgcaacatggaggaaatggccaacgagacctttgccaaggtccaggcgcttccatcctcgtggcacgcctcggccttcgctggaggcgtcgttcgtcgcattagtcgggcaatgtggggctatgacaatgtaaccgatgcgttgactattcgcgtcggcccggcgttgctggtgctcggcggtctggccgtcatgctcatgctgcgcagttttctggctggcatgatcgcgctcgctgcagtcgtccttttcaccgtgctgaatctgattctgaccgcgcgctacgttcgcccggccaaccagttctcgaacgaactcgacgcggcgatgaacgcaacgctggcggacgcattgtccgggaacgccgtcgtgaagagttttgcgtgcgaggctggcgagctggagagatttgctgccgacacggcgcgctggcgtgcatcggcgatgcgcacctggactcgatttgttgacctcggcatcatccagaatcttgtcctgcttgtcctgcaggccggaatgacgggaatgatggtggaagcctggcttgcgggcgcagcctctccgggggacgtcgccttcgccattacagccttcatcctgatgagcggatatttgcgcaatctcggcgacaatgtccgggagctgctgaaggggctggatgacacggccgacgcgctgcggtttgcgtgggcgagcggagagccgacgaatgacaccgctcctgacctcttggtcacgagaggcggcatcgaattccagggcgttggcttcgcctacgccgagacaggcagccctgtgttcacggatctcgacgtgtcgatcaagccgggagagagcgtggcgatcactggcgaaagtggctctggcaaatcgacgctcatcaagctcctgcaccgcctctatcccgtcggcgcggggcgcattctcattgacgggcaggatatcgccgaggtttccctgtcctcattacggcgcgctgtggcggtggcaccgcaagagccgatgctgttccatcgatcagttcgcgataacatcgcctatggtcgaccgggggcgacgctggaagagatccggcacgtcgcccgtatcgcctgcgccgacggcttcattgcgcgactgccggcgggatacgatacggtcgttggagagcgcggcgtcgcgctgtccggcggcgagaggcagcgggtggcgctcgcgcgcgccctccttgcgcaggcgcccattctcgtactcgacgaggcaacctcggcgctcgatagagataccgaggctgaggtcttgacgaaccttgcgtccgtcgccgatcgccagacacgcatcatcatcgctcaccgtccagcatcgatcgcaagcgctggccgcgtcctgaagatcatcgacggccggtcgacgacggacatggaccccgatacgtcaggccgacgcccgatcgcgctgagcggccgggtgtagcaaagcgctcgagccaccctggatccgcatcgaccgcaggaagtcgataaagaccctgagcttggcgggaacgcgtcgccggtcagggtagtagaggtgaagatcgtcgaagcgagggctccagtccgccagcacgcggacgagttcacctctctccaggaaccgttcgatgtagccgttgatcatgtatgcgatcccgaggccatcaagcgcgctctgaaccagtgcctcggaatcgttgatgatgagatggccgttcggcaccatctctacggtctccccgtccttggcgaatgcccagcgctcgatctggcccgtggtgacgtgtcggaattggatgcagtcgtggttctgaagatcacgaggatgatccggcatgccgcgcttattgagataggcgggcgaggcgatcatatgggcgctgatcggggggcctatccgcagtgcgatcatgtccttttccagcagatcgccaaaccggatgccggcgtcgaagcccttgccgacaatgtcgaccagcgcgttctcgatgacgatctcgacggagatcttcggatagcgctcgtggaacgccggaagcgctggctgcaagatgatcatgtaggcggcgcggggtacattcagccgcaagagaccggacggctgatcggcattctcatccagctcctcggtggctgccgacagctcctcgatgcaaggcaagatgcgatcgaagtaacgctggccagcctcggtcaggctgacactccgggttgtccgattgaagagcgggaagccaagtcgttcctcaagattgcgcacggcctggcttaccgcagatggcgaaattccaagacggaccgccgcagccgaaaaacctgacgcctgtgcgacagccacgaaaacggctaacccttcgaactgatcctgacgaagcatcgccgctccattgtattgtcagacttacgaatactcagacattacggggaaattgaggaaaatggaacgcgcgacgcgcacgtccccgtctccggtcgactgacttctggcagcagcttggcattcgtcgaagcggcgcgcctgtccgaaaattcgggccggcgcggcgtaagtgctcgcagccaatcaacgagtgcgcacaggtcttcagtctctgctatcctcttggcagaaggcgggcgaggacgttccggccgaaaacatcacggtgccgcttgccaaccattcaactttccgtggagcagaagggtaacggcttccaggcgaccgtaacgtttcccgacggcgtttcgatgagttcggcggagacatatccgtcgattgccgaagcgatggctgcggctgcccgaaaggttctggagacgcccgagcgcctcgcggcgctcgatcagtcaacggaagctggaaacagctaaatcaacaagcggagttgctcgtctgaaactgtctgctcttcatcgaaagacgagacggttacccctatcaaacgaattcctttctccgatggaaaaaggggttcgagcaggctctgcgcgatgttctcgatatccgaggccgaagcggctgcggtgctgacggtgcgactgcgggtgatctgctgaaagtcggagaacttgaccttcaacgttacggttctgccgcgcaggttcttcgcttcgcaatgtctccagacctttgcggcgagcggagggacctccgcgcgcgccgcggcgaggtcgaaaatgtcatccgtgaaggtgtcctctgcgcctatcgattttcgcggccggtctggctggacaggtcgctcatcgatcccgcgggcaatcgcgtagtaccatgtgccagccttgccgaagtgctgccgcaggaacggcagtgattgcgctttgagatcggctccggtcagaatgccgagccgttccatcttcgccgccgtcgcaggaccgacgccatggaatttcttcacggcgagcgcttcgacaaatgccggccccatacgcggcgtgatgacggcctggccattgggtttgttcagatcgctcgccatcttcgccaggaatttgcaataggaaacgccggcggaggcgttgaggcccgtaacctccttgatgcgagcgcggatttgcatcgcgatctccgtagcgatcggaatcgcctgcttgttctcgctgacatcgagataggcctcatcgagcgagagcggctcgatcagatccgtgtgttcggcaaagatctccctgatctgcgcggagacggcgcgataaacgtcgaagcgcggcggcacgaaaatcaggtctggacagcggcgcttcgcggttatggaaggcagcgctgatctgacgccaaaggcgcgggcctcgtaacttgcagcggcgaccacgccgcgcgcggccgatcctcccacggcaacgggctttcccctgagttcgggattgtcgcgctgttcgaccgaggcatagaacgcatccatgtcgacatggatgatctttcgtccnnnnnnnnnnccgtctcgatcgagtttcgccggcggctcgaccacgacgagcatgtttccgggaagcggccgctgcagatgtttgacctcatcccactcgccggtcagccatagatcgacttcttcgggcgtcgtcaggatcgctggcatcgccttgaaatggatcggcttgacgatctcgttcggcgaggtcgtcaggaacccgtagagctcgaattcccgctcgccgtcgcgcaccttcttcacgcccttccagggcgtccagaagccggcgaagaacatcagcggccgctccggattttgagcaaaccacgcgtttggaacacgcgcaccttgtgcttggctcttcgggtcaggctcggcgaatgacgtgaaaggtacgacgcaccggctcgtcggcccaagccagcgtcgccaccaggatgaatccacgtcacggatattcgtgacgcccggatcgtagttcttgttcttgagatagacgggagg

SEQ ID NO: 339 - DNA, 1192 bp, Bradyrhizobium colbertium
atgtttccgtataaacacatcatgctctagcgtcattgctcacgctcgcggtaggggtcagtttgacccttcgagagtaccccatctacccccgcggctcgtcaagcttaacttgctgccggctgcgatcaagcgtggacgggcttggctcccgtaccatcgcaagacagaaaccgaagaagatgaacacgccacgcaggccggcaaacaccgctgccaaaaagcacagaagcgtgagcgacgaaccttaagagagataggcgggtcttttttgcagggtttggaaggcggaagacgaatcaaccactaatgcctcaacatcgccgtgagtaatgttgtgaaaagcatcgatagcggtaggccgtcccaacaggtagccttggacttcatcgcaaagcgcttccttcaggaactgcagttcgctggtcgtctcgacgccttcggcgagcacgggcaggccgagcccgcgaccgattcccagcaccgcgcgcactatggtcgcggcttgatcattggcatcgaccgacctgataaaagaacggtcaatcttgatcttgtcgaacggaaacgcccgcaaatttgaaagggaagagtaaccggtcccaaagtcgtccattgcaatgcgaactccgagcgcctttagacgccgcaacgtggacagcgcgagattgagatcccgaatgagggcagtctcggtgatttcgatctctagccgtcgcggcgaaaggcctgtctctagcaggactctgtgcacgtcctgcgcgaactctgggttgtaaagctgaaccggggagacgttgacagcgatcgaaagcggacgtgcccaaccggccgcttcagcacaggcggttcgcagcacccagtcgccgatcgggagaattacgccggtgtcttcggcgatggggatgaacgttgcgggactaatctcgcctcgagttgggtgcttccagcgaagcaacgcttcgaatcccgtaatgttgccgctttgaatatcctgctgcggttgataaaccaacgacatcatgttgttcgcgaccgcattccgcaggtcatgctcgatcagacgtcgctcacggacctcaacgcccatttgggtttcaaagaagcggaaggttgaacgaccttccgcctttgctcgatagagggccatatcagcgttcgtgaggagcgtctcgcgatcaagtccatcgtc

SEQ ID NO: 340 - DNA, 2392 bp, Bradyrhizobium colbertium
  misc_feature (1167)..(1196): n is a, c, g, or t
tcatttcaggcgagttgccgatcggcggtcatcgctttgaaggcattttgccgccgatcgtgggcgcgccaacctttacgattcgtaaacgggcgtcacgcttgttcaatctcgaggattacgtctcgcaaggcgtcatgaccgccagccaattgggcgtcattcgcaatgccatatcctcccggctgaacatcgtcgtgtctggaggcaccgggtctggcaaaaccaccctcgcgaatgcggtaatcgcggcgatcgtccaggatgcccccgaacatcgtcttatcattctcgaagacaccgccgagatccagtgcgcagccgagaacgccgtcgcgctgcatacgagcgacactgtcgacatggcgcgcctgctcaagagcaccatgaggttgcggcccgatcgcatcatcgtcggagaggtacgcgacggcgctgcgctgacgctcctcaaagcctggaacacgggccaccccggcggcatcaccaccatccacgccaacagcgcggcatcggcgctgcgccgtcttgaacagctcacggccgaagtcagccagcagccgatgcgtgaagtcattggcgaggcggtcgacgtgattgtctcgatcgaacgaaccgatcgcgggcgccgggtccgtgacgttctgcatgtcgagagcttctcggccggccaataccagactcaatcctacacccggaaggaggcgcgccatgtcgcgtaatcgcatgctgatcgtgggcgctacgggcttggtgctcgcgctccttgtactcgaccctgcattcgcatcgagcagtggcggcaatctgccatgggagagcccgctgcaacagatccagcaatcgatcacaggccccgtggccggctttatcgcgctcgcggctgttgcggtcgccggcggcatgctgatcttcggcggcgaactcaacgatttcgcacggcggctgatgtatgtcgtgctggttgccggcattctgcttggcgcaacacagatcgtcgcactgttcggctcgagcggggcatcgatcggcgaggtcaccggcgcggcgccgaccgccggcagggcagaggacctcggcaatggctgaggtcggcgctaatcttcgacgcaaccggattcatcgcgcgctgtcgcggccgaacctgctgttcggcgctgatcgcgnnnnnnnnnnnnnnnnnnnnnnnnnnnnnngccaccagtaccgggcgacctcgacaccctggcgtcgttactgaggacgcaccatggttgcgctgcgctccttccgtcattcaggtccgtccttcgccgacctcgtgccctacgcgggactggtcgccaatggcatcgtgctcttgaaggacggctcgctgatggcgggctggtatttcgcgggtccagattccgagagctcgaccaacgccgagcgcaacgaggtctcgcgtcagatcaacacgatccttgcacgtctcggctccggctggatgatccaggtcgaggccgtgcgtgtgccgacgactgactatccggcgcggcaggactgccacttccctgatccggtgacacgcgcgattgacgacgaacggcgcagccgtttcgagcaggagaggggacattacgagagccgccatgcgatcattctgagctggcggccgccggaacggcggcgcgccggactcacacgctacatctattccgataccgaaagccgttcggcctcctatgccgacaccgcgatcgagagttttcggacctcgatccgcgaagtcgaacagtatcttgcgagcgtcctgtcgattcgccgtatggaaacgcgcgaggtcgaggaacgcgatggcacacggatggcgcgctacgatgaactgttccagttcatccgcttctccatcaccggcgagaatcacccgatccgcctgccagacattccgatgtatcttgactggctggccacggccgagctccagcatggcctgtccccgacagtcgagaaccgctttctcggcgtcgtggcgatcgacggcttcccggccgagagctggcccggcatcctcaactcgctggacttgatgccgctgacctatcgctggtcgtcgcgcttcatgttcctcgacgaccaggacgcgcgacaaaagctcgagcgcacgcgaaagaagtggcaacagaaggtccgccccttcatcgatcagctctttcagacgcagagccgctcgatcgatcaggacgcggccgctatggtcgcggagaccgaagatgcgatcgcggaggcgtcctcgcagctcgtcgcctacggctactatacgccggtcatcgtgctgttcgatgacgacaatgcgcgcctacaggagaagaccgaagccgtgcgacgcctgattcaggcggagggatttggcgcgcgcatcgagacgctg

SEQ ID NO: 341 - DNA, 1817 bp, Bradyrhizobium colbertium
cctcgggcgctttgcgcagcgtctcggagatcacattggtgtcgagaaagatcaaagctcaggtcccgcgtgcgggcgtcgcccttcgcgaatgaccgcctcgaggtcgatgtcggcatcagcatctgccttcagccgggcgtaaaaagccgtcggcggctcacgtccggcgacgcgctccgcgtacgcctccaacgcgcgctcgaccacgtccgcgatcgaccggttttcccgacgcgccaggcgatgagcgagatcgcgtgccctagcactgcgaacggagagttgcggctcggccatatcatctaactcctcttccttaggatataggcgccggccgcctgctggcaagatggcatctgctggccagccagctcacggttttggccgtttggcaaggattgctcgcaactggtcgctgggctgcaacccacgctgcggcttttgcggctcaaaatccgcggaatcaccctcgctttgggcgaccgacggcttcgcggcgtccagttttgcacgcaacagagccatgatcattggccaaaccgagaactttccgtccctggcccgatcagtcaggctgcgaagatagccgccggcgctgctgatctggtcggatttttggtggatcgccgccagcgttatcgcagcctgctgatcccccaggacctcacgtgcctcgcgccacgcgcttggactgatccccagcatcggccgcgcaatttccgcggcggcgatcaaatcccgccagtgccggatttcgccccctttcaccaaccagcgcatgtttggacaggcatcgaggacaataccgagaggaagctcgcgcttcggtaggctccggaggttgtcgacggtcgaggtcttgccgcccgcttcgtcctttttcgctgagctactttcagattcagatggaaggtctgggtttgaattctgtatgtggcgtccgaaatgggactcattggcgtccggattctgtgtttttgcgaaagtttccaacagctcccggatctcccgccaaagctcctccaaccttccaacgatgctttcgagaagctgccgggcggcggtccgaggaatctgacctacgatctcctggtagtttcgctggaaccgcttccagtccgcgggcacgtcctcctgcaggcccgcctcgatcatcttgacgatgtccctccgcagaagcgtgaggcgttccttgaccacccggaaggccttcttctcggcctgaacagcctcggcgagcgatttgtattcctctgcgcgagcgaccatcggcgctagatcgaagccgtaggcctgctcgatctctccgccccgtcctttacgagcgtaacgcttcccgttcgggctgtcccggcgaatgataagaccacagtcgaccaggacggcgagatgccttcgcaaggtcgtcggtggcatgccgttggcccgggccattagctgctcgttggatggccacacaatcagttcgctgtcaggctcaagcgcgatctcaggatgaaatgacagcaaagcatgcaggatcgtgagcgcgcgatcggtagcgccgagcgcctggcgcgcttccttgatgtgctggaagacgtgccatttgtgaacaatccctgcattggttcggtcgttcgcggccagttggcttgaaatcatggcaagcgtcatcggccgccgcccaaagggcgtcgttgatagatattccgtcatggtcgtgcccttcagctttcaggcaaagcgaaagcgctcaccaaaacggtgtccaatgcctcaacgaggctcttgactgtgattcgcggaagtgagattctcgatgtcgccaaaca

SEQ ID NO: 342 - DNA, 1813 bp, Bradyrhizobium colbertium
  misc_feature (399)..(408): n is a, c, g, or t
gctcccgacacgaccagcatgatccaaagtgccagcagtcgcgaccgaagagatcgcatcgacgttccctcgaaataaaactgctcttcagcttatacgtaaacgcatgcagcggcctccgcctccgcccgtcttgcaacgacctctgaagagtagttcgcaagtcaggaaacgggagcatcgcgcgcatgaatgagaaatgccgcggggtcgtgtggggcactgatgacggtggcattaaacgagcaatgagcctgagaatatccagttcaccggatcgcaaggatcggccgtgccgcaccgcgcgggctagttaaattagatcgcaatgtcaatcacataagagttcgttgttttgttgccgccgcgcccgaggcgtttgcgcaatcgcacatatcnnnnnnnnnntttgtgccgatgctcggtacagaggtaagtatcccccggcaaagccgggggctttaggaattgggccgctcaaagcggccaggaaagagacgaagttcccaacaaagcaccttggcgccgcctatgcctcgcctattcccaactcacgaacttctccaaggcagtggtaggtgcgcaaaacaaccctgttctcttctgaagtaagcaggctcacaaagtaccggcccatcgcgaagctatgctgctctcaccgaattcaggaagcggctaacttcgagcttgaggcgattgctgtctccagacatggattgcgccgcggaaagcacctgcgatgacgcggagccggtttcgctagcgccgcgctgaacgtcggtgatgttggaggacacctcctgagtgccatgcgccgcctgctgcacgttgcgggaaatttccttcgttgctgcaccttgctcctccacggccgccgcgatagtcgacgagatttccgacagccgcgctatggtgtcggtgatttccttgatcgcgcgaaccgattcttcggttgccgtctgaatgccatcgatttgatggccaatctcgccggtcgcctttgccgtctgttccgcaagcgctttcacttccgcggctacgacggcaaagccgcggcctgcctcgccggcgcgtgccgcctcgatcgtggcgttcaaggccaacaggttggtttgaccggcgatgttgttgatcaattccaccacatcgccgatccggcccgctgactgagacagcgcactgacccgctcgtttgtcttgttggcctgagcgacagcctcctgcgcaacacgcgcggattcctgcacctggcggcttatctcgttcacggaagacgacagttcctcggtcgcagaagcgaccgactgaacgttggtcgaagcctcctcggaggccgctgccacggaaacggagagttgttgggtggaatccgcggtgtgggtcagcgttccggcagcggcctccagctcggtcgcggcagacgccacggtatcgatgatatcgccgacggcggcctcgaagtcgccggcaagcttgtgcatgtcggcttttcgctgcacggcggcacgctcctccatgtctcgcttggactccaggtcgaaccccagcttcgcttgaagtgcctggatattgcgtagcgccgttccgacttcatcatctcgctcgacgaacacccggctgtcgaacttcccctgtgcgatcgcaccgagaacctcgttggcatgagcgagcggtcggtcgattgcccggatcgtcgtaaaggcaagcagaccgccgagcagcaggccgaacaacgaggccatgccgatcgcaaggctggcaatcgggttggcactcatcgtggtgtagccgacgctgccgacgaaggcttagg

SEQ ID NO: 343 - DNA, 37169 bp, Bradyrhizobium colbertium
  misc_feature (666)..(675): n is a, c, g, or t
  misc_feature (3615)..(3648): n is a, c, g, or t
  misc_feature (5179)..(5188): n is a, c, g, or t
  misc_feature (8803)..(8812): n is a, c, g, or t
caggagcaggcgcagctgatccgcttcaccggttttggcgcgtccgatctcgccaacggcgtctttcgccggccgggcgaagccgatttccgcgaaggctggcaagagctcggcgcctcgctcgaggatgcggtcggcgaactcgattatgcctcgctcgcccgctgcacgcagtatgcccatttcacgcccgagcctatcgttcgggcgatctggacggcgttgcagcgtctcggctggcgtggtggtcgcgttctcgaacccggcatcggcacgggcctcttcccggcactgatgccgcagggattgtccgacatcgcgcatgtcaccggaattgagctcgatccggtcaccgcgcggatcgcccggctgctccagccgcgggcgcggatcctcaccggcgatttcgcgcgcaccgaactgccggcggccttcgacctcgcaatcggcaacccgcccttttccgaccgcacggtgcgatcggaccgcgcctatcgctccaagggctttcgcctgcacgactacttcattgcgcgtgcgatcgatctcctcaaacccggcgcgctcgccgcattcgtgacctctcacgggacgatggacaaggcggatgtcgccgcgcgcgagcacatcgccggatcggccgatctcgtcgcggccattcgcctnnnnnnnnnntctcttcttccgcaagcgcaagatcggcgaagccgcaggcgattcatcctggctcgacaccgaggaggtacgcccggcaggcgaggacgagagcgcgatccgcgtgaaccgctggttcgcgcagcaccccgcgttcgtgctaggcacgcatgcgctgacgtccggtcccttcggcgagacctatacctgcgtgccgcgtgccggcgaggcgctcgagtctctccttcccgatacgatcgctcttctcccggacgcgatctacgacggcgagcccgacgtcatcgacgccgatcgcgacgaagatgacgagtccgtcgatctcgtttctccggccgatcgccatgtgcgcgaaggcagctacgtcgccgacaaggccaatgggatcatgcaggtcctcgacggcaggccggtcgcggtcaaggttcgcaagggccgcagcgccgagggcgtgcccgaaaggcatatccgaatcatcggcaagctgatcccgatccgcgatgcggttcgcgaggtcctcaaatgccaggaagccgaccggccgtggaaggatgcgcaggttcgtctacgcatcgcctggtcgaacttcgtgcgcgatttcggcccgatcaatttcacgacggtctcgatgaccgaggacgacgagaccggcgaagtgcgcgagacgcatcgccggccgaacctgcagcccttccttgatgaccccgattgctggctggtcgcctcgatcgaggactacgatctcgacacgaacaccgccaaacccgggccgatcttcacagagcgcgtgattgcgccgccggcgccgccagtcatcaccagcgcagcggacgcgctcgccgtggtgttgaacgagcgtggccgggtcgatctcgaccacatcgccgaactgctgcatcgcgaatacgaagatgtcgtcgccgagctcggcagcgcgatcttccgcgatccggctgacggttcatggcagacggcggacgcctatctgtcaggccccgtgcgcgacaagctcaaaacggcagaagcggcggccgcactcgacgcagagtacgagcgcaatgtcactgcgctgcaaggcgtccagcccgccgatctcagcccgtccgacatcacggcgcggctcggcgcgccatggatcccggccgccgatatcgtcgctttcgtcaaggagacgatgggcgccgacatcaaaatccaccacatgcccgagctcgcttcgtggacggtggaggcacgccagctcggctggatggcggccggcacgtccgaatggggcaccgatcggcggcatgcgggcgagctcctcgccgacgcgctgaacagccgcgtgccgcagatcttcgacaccgtgaaggatggcgacagcgagcgccgcgtcctcaatgtcgtcgacaccgaggcggcgaagacgaagctgcagaagatcaaggacgaattccagcgctggatctggtccgaccccgatcgcaccgaccgcctggcgcgcgtctacaacgaccgcttcaacaacatcgccccacgcgccttcgatggatcgcatctgaagctacccggcgcctctggcgcctttgttctttatgggcatcagaaacgtggcatctggcgcatcatctcggcgggttcgacctatctcgcgcacgctgtcggcgccggcaagaccatgacgatggcggccgcggtgatggagcagcgccggctcggcctgatcgccaaggcgatgatcgtcgttcccggccactgcctggcgcaggcggcgcgcgaatttctcgcgctctatccgaacgcgcggatcctggtcgcggacgagaccaatttcagcaaggacaagcggcatcgcttcctgtcgcgcgcggcgaccgcgacttgggatgcgatcatcatcacccattcagctttccgcttcatctcggtgccctcggcgttcgagcaacagatgatccaggacgagctggagctctacgagacgctgctgaccaaagtcgaaagcgacgatcgcgtctcgcgcaagcggctcgaaaggctcaaggagggcctgaaagagcggctcgaagcgctgtcgactcgcaaggatgacctgctcaccatctccgagatgggcatcgaccagatcatcgtcgacgaggcgcaggagttccgcaaactctcctttgcgaccaatatgtcgacgttgaagggcgtcgatccgaacggctcgcagcgcgcgtgggatctgttcgtcaagtcgcgctacgtcgacatgaagaacccgggccgtgcgctcgtgctcgcctccggcaccccgatcaccaacaccctcggcgagatgttctcggtccaacgctatctcggatatgtggcattgctcgagcgtggcctgcacgaattcgacgcctgggcgtcgaccttcggtgacgtctcgaccgagctcgaactgcagccatcgggtaaatacaagcccgtctcccgcttcgcgaccttcgtcaacgttcccgagctgatcgcgatgttccgctccatcgccgacgtcgtgatgcccgaggatttgcgccagtacgtgaaggtgccggcgatctcgaccggcagacggcagatcctcacagcaaagccgtccgctgcattcaagcgttaccagacgctgctcggcgagcgcatcaaggcgatcgaggagcgcgaccgtgcgcccgagcccggcgacgacatcctcttgtcggtcatcaccgatggccgccacgcggcgatcgacctgcgcctggtcgatcccgacaatgacaacgaggccgacaacaagctgaaccagctcgtcggcaacgccttccgcatctggggcgatactgccgagcgcacctatgttcgcaccgacggcaagccgttcgaactgcccggcgcggcgcagatgatcttctcggacctcggcaccatcagcgtcgagaagtcgcgcggcttctcggcctatcgctggattcnnnnnnnnnnnnnnnnnnnnnnnnnnnnnnnnnngagctcggacacgatggggaccggcgtcaacgcgcagctgcgcctcaaggccttgcatcacctcgacgtgccgtggctgccgtcgcagatcgagcagcgcgagggccgcatcgtgcgccagggcaaccagcacgacgaggtcgatatcttcgcctatgcgaccgagggctcgctcgatgcgcagatgtggcagaacaacgagcgcaaggcccgcttcatcgccgcggctctttccggcgacacttcgatccgcaggctcgaggacatgggcgagagccaggccaaccagttcgcgatggccaaggcgatcgcgtcgggtgacccgcggctgatgcagaaggccgggctcgaggccgacatcgcgcggctcgaacgcctgcgcgccgcccatatcgatgatcagcacgcggtgaggcgccagattcgcgacgccgaacgcgacattgaatattcgacgcgccgcatcggcgaaattgcgcaggatatcgcgcgccgccgtccgaccgccggcgacgccttcaccatgacggtgacgggtgacacacacggcgagcgcaagctcgcaggccgcgcgctcctgaaggaaatcctgacgctggtccagctccagcaagaaggcgaaagcgcgatcgcatcgatcggcggcttcgacgtcgaatattgcggcgaacgcttcgggcgcgacggctaccgctacaccacgatgttgcagcgaaccggcgctgactacgagatcgagcttcccgtgacggtgacgccgctcggcgccatcgctcgcctcgagaacgcgctcgacgatttcgagggcgaacgcgaacgcatgtcgcagcgccttgccgatgcccggcggcggttggcgtcctatgcatcgcgcgacggcggtgaattcgccttcgcaagcgagctcgccgacaagcgccggcagctcgcagaggtcgagaaggctctggcggaggacgacggacgcggcggcgagatggcggcggccgcctgaaataaaaaatggagaggaaagatggggaaatgcccgctcgcagatcgggcgggccatcgacgctaacgctcaaccgacggcctgcgtcatcccggcccgtcgtcctgcgcagggctgcggccctgctggtcctgccgggcagggatgctcggccgcagttgcgccggcccgcccgctccgcgggccggggggtgtcttcgggaagaagacgagaaagggccggcagagctggtccgcaacccccaaaaggagcattcccatgcatctcatcaaggtcgatccgcgtgcgctgaaggaaaatcccgaccgcctgcgccagacgaaatcgacgccgcaggccgacgcgctgctgcttgccacgatcaaggcggtcggcatcgtccagccgcccgtcatcacgcccgaaatcggcggcggcaacggctacgtcatcaatgccggacatcgccgcgtgaagcaggcgattgcggcggggctcgaggaaatcgacgtgcttgtcgacgaggcggcgaacgacaacggcgccatgcgatcgannnnnnnnnntcccgtcgaccaatggcgggctatcgagcgtctggtcgcgctcggctggaccgaggaggcgatcggcgtggcgcttgcgcttcccgtgcgccagatcaagaagctgcgtctgctcgccaacgtcctgccggccatgctcgatcacatggccaagggagacatgccgaacgagcagcagctgcgcacgatcgcggcggcctcgctcgacgagcagaaggaggtctggaagaagcacaagccgtcgaagggcgatccgcaggtctcctggtggagcgtggcgcaggggctgcagaagacccgcatgtttgcgcgtcatgcgagcttcggcgacgatctcgcccaggcttacggcatccagtgggtcgaggacctattcgcaccggccgacgaggacagccgctacaccacgaatgtcgagggcttcctcggcgcgcagcaggaatggatgacggcgaacctgcccaagaagggcgtcatcgccgaaaccacgaattggggcgaggtgaagctgccgccgaaggccgagcgcgtctacggcaagccgaccaagtccgattgcaccgcgatgtacctcgaccgcgagggtcgcgtgcagagcgtgcattaccgcatgcccgaagccaagaagccgaaaggcggcaaggacgccggcggcgccgacaacgctccggacgacgtcggtgacgtgtcgaagccgcgtcccgacgtgacgcgcaagggcgtcgagatgatcggcgactaccgaaccgacgcgctacgcgaagcgctcggccgcgcgccgatcgaggacgatgcgctgatggcgctgctgatcctcgccttcgccggccagaacgtctcggtgacgacgggcagcggcggtgtctattacggacaccgccggctggcgaagaatgcggcggtgctgttcgacgccgacggcaagctcgccttcgacatggacacgctgcgcgttgcggcccgcaccatgctggtcgacgttttctcgtgccgggaaaacgccaccaacagcggcatcgtcgcgcgcatcgccggcgagatgatcggcgccgacgcattcctgccgaacatgggcacggaggatttcctctcgtgcctgtcgcggccggcgctcgaaggctcgtgcaacgacacgccggtcctgccgcgccagcgcgtgaaggacacgcgcgccgcactcgtcgagcactacaaggaggggcatttcgtccatccctccgcactcttcgcccccgatccggcgaagctctccgactggctgtcctcgcgcgcggcgacggctgacgaagacgaggccgatgaggatatcgccgacatcggcgagggtggtttcgaggaggacgccgaggccttccgcgaagcggccgagtagcgccgcatccccaccctttcgaatggttcgccgccgccggtctccggcggcggtgtcgtttccgcacccgcgcaatccaaggaggacaccatgtccgcgcacacaatcttcgacaacgcaccgatcgggtccatcgtcgcctggtccgacggaacgccgcagccgccggcgcgcttcaacaagaagctggccgcctggcagaccagcaacagtcgtggtcggctgatccgcaagcagcgagcacgcggcgtcggcaacctctcgctctcggcatgcttcaccttgcacgaggccgatcatggcgccggcggggtcattgcgatccgcatccatcggacgttctcgctcgactcctcgttgacgttcaccatcgtcgaacgcccggcgatcggattggtccgcgtcttcgatcgtgctggcgacgacgccgaactggtctatctcgcaacacatgagaccgacgcccgcgagtggctgacgcggcacggctatccgcgcgccgtgctccatgaggtgacggccgacgaggtcggcgccgacatcgtcgaagggaggaccgcggcatgaacgccccctctcctgcccatcctcaaacccagacccccggatttccgggggtttctttcggtcgcagcgccgacggtatgcctgtcgcgctcgtcggcgacacggcgttcgccatggcgatggcacgcgacgatcggcactatctcgtcaccgcgtggcggctctcgcgagcgatggacgaatggacgcgcgccgatttctacggacactccggcgagctcgccgatgaggcggcgtttcgcgcgcgcgtgctcgaaaacgccgaacatcagcgcgagcgcaagatgctcggccgtgtcgaggaatattcgcgtgcccatacgccgtggggcacctcgcagggtgcaacaatctacgccgagggtgtcacgtcgcattcgactgccgggcatggcggcttcaaactctcggccgagcgaaaccgcaaggtccatcgcatgctgcgctctgccggcggatggtacgaagaagatgccgagtgggcgatcgtcgcgatcacctttccgcatctcttcaccgccttcgagcgacgctgcgccgagcgcacgatcaaggacagctggcccgacgcctgggagacgatcttcggcacgatcctcatgccgggcgaatcgcacgagaaggatcgccgggccttcgaagcggcccatgtccacgactggatcgtgatctcggcgatcacgtcgaagcacgttgtgggcttcgccgaggttatcgcaacgccgggcggcaagcgcggcgttgggaccgaggaacgccgcttcctcgtcccctcggatgaatatcgggtcggccgcttcggcttcgtgatcgatcccgctcgccacgacgtctatggcggcgagtccgactttatcggctggcagccagggagggcggcatgaccccttccgatcttctccaccgcatggaggaggcgcagcgacagacgcagcgccagctcgacataatcgatcggcagatcacgcggaggatgaccgcgctgatcccgtcgctagggcgcaagcagtccggttatcgtcgcggcaagccgccggatccgggtgcctttctcgagcgatatcgcgcgacgctggcagcgctcacggcggaacgccaaccggaaatcgacgccttggctcgaaagttcgcgcggcaggtccatgcgatcgaggcgctgcgtcagcgccttggtatcgaagacgggcgatcctctgcccgccacgagcgcatcgacacgacgatgcaccatcatgatgccgggccggcatcggcgctgtggccggaaacgagctcgtcgatctcacgatgatcaccatccgacggcgtgcgggtcgagcagagagcccacgccgccggcacggcgcaccgactattgtcagcggcgcgtgggggagcgcaggccgtcgcccctgaagctacccggttcggcgccttcgcaacgttggaatcgtagtggcctgcgacggcgtcgggtgcgcgcctgagaacgtccattgtcgtcggctccgataacggcggcgaccttgccgctgatggatgcatccgcctcatggaaacctccgctggggctgtcggcgagacgattggcgctggtgccgcgcgggcaggcgcggccgagagagagtgccggctgtctgcgatgaggtgccaggacgttgcgaaagcggcggacggtccagcgggtgtcatgcatnnnnnnnnnnggcggcctggcgtcggggtgcggcggggcatgaggcccttccccttcggtttcgcttgttgatgggcgttccggcccagcgggcctcccctcgggttttgttgcgctcttaaaccggcggccggtcgcttcaaggccgcgtgccgcgccgcgttgcggccggagctgccgatctcggcacggcgggcccgcgcgccgcgcgagggctgaaggccctgcttgcgcgcaaacccgctctgctcgatccagccgccccggaccctgaagcgcccgtcattccgccggtttcggtcgatcgcacccgaagggaggaccggcaggagccgatccgggccttcaggcgaaccgaaggaaaggaagttctcatgaccaaggccgctcgcacccaacgtcagcccgcgaaggtcgtccagctccgcaagagcaccacgctcgaaatggtcaggctcgcctgccccgacgccgcccaggcgacgctcatctccgagagcttcggtctccccgttctcgacagcgacgggatccgcgaacttcatcagcgcatgatcgtcgagacggccgacagcctcagcgaaggcctcggcgagagagcgatgcagattcatctgcagcggatcgtcggcgcctatgtcggctccgcgcacggcgccggtcagttctacagccgcgcggtgaccgaagcccgcgacgcgacggccaaggcatccaacgacctgcgtgacgaagacctcgacggtcccgttggtttcgacagcacagcgcaacgcaaacgcgagttcgccgctgacatggccttgcagtcgcacgccctgcgcatggcggccgagggcgccgtcgctgcttacgagcacgtcgtcggcgagcgctggaagccgttcgagcgccaggtcgaaaatccaggccacacgctcgatcgcaaggccgccgcgatgcagctggccgcctttggctgatcgcacagggcgaggctcggcctcgcccgtcttcgatatcacgacgctgggctggccccgatgggtccggccccttttccgtgtcgatgtcgcggccgcagaccatgacgcctgcaacgacggccatgcggccgctcctcaagaggttggaatggaaaaatgtggaggtgcgcatcgcgacgcccgtccggcttttggtcctgccagggccggggctcggcacagcggcttcgccgccctccacttcgttgcggcccaagggtgcgccgctcccctgaattccctggcgatggaccgccgtaacggggtcgcgatgggcgcgacctccaaacggaggttcaggaaaatgactgagaaaatggaaggctcacgcgccgacgtgtacgcgcgcatcaccgatcgcatcgtcgcggatctcgaaaagggtgtccggccctggatccagccatggagcgccggccacgcgggacggcgcatcacgcggccgctgcgccacaacggcgaaccctacagcggcatgaacgtgctgctgctctggtcggaagcgctcgcgcggggtttcacctcgccaacctggatgacgttcaaacaggcgatcgagcttgatgctcacgtccgcaagggcgagtcaggtgcgaccgtcatctatgcgagccggttcacccggactgagaccgacggcaatggcggcgaggtcgaacgcgacatcccgtttctgaagacctattcggtcttcaatgtcgagcagatcgccggattgcctgaccacttctatcggcagccggcgccgacgatcgatccgatccagcggatcgatcatgccgatcgcttcttcgccaataccggctcggtgatccggcatggcggcgcgcgggccttttacgcgccgtcgaccgatcacatccagatgccgccgttcgagtcgtttcgcgacgccgcgtcgtacgtggcggtgctgagccacgagcacgtccattggacggcggattcgcgtcgcgtcgggcgcgaccttagccgctatgcgaaggatcgcagcgaacgcgcgcgcgaagagctcgtcgccgaaatcgggtcggcgctgatgtgcgccgacctcggcatcgtccccgagctcgaaccgaggcccgaccacgcgagctacgtggaatcgtggctgaccttatgacgaggtgagcataattcgagttatccgcagcagcccataatgtgaaggaacgcgaccagcttgccggaagttcggcgtttctggctgcattcctccgcattatttcagagcatgtcgagccaggcgagaacgctggtatcgcgtttccatgagggctggcggctgggtgcttcgggcgcgccgaccttttccaatgccttgcgctttgtttcgaggttggccctggcgtagtggttcgtcgtatcgaggctcacgtgaccgagccagctacggatgaccgtgacgtcgacgcccgccgatatgagatgcacggcggttgcgtgccggaaggcgtgaggagtcacatgcttgtcgcgtagcgttggcgtggtctcggctgccgccttaacataggcggcaagtttgaaccggacccccgacgcgctgagcggttgaccatatcggttgacgaacagccgctggtctggcgcccgcggctgccgttcgagcaatttcctcaacaacatcatggtttccggccagagcgggcagatacgttcttttcgacccttgccggtcaggcgcacgcagctcggactgtcgaacctgattgcatcggggcacagatcgagcgcttcctgtattcgcgcgccgctgttgtagaggaacgagagcaaggcgtgatcgcgcatgccttcgagtgtcgaacgatcaggctgcgccaggatcgccgtcacttccatcgggtccagataacagggttccgataccggtgctcgttttatcgggatattgaggatttcgacgcattgggcgatcgaaccgggatccctggtcgcaacgaagttgaagaagctgcgtatcgctgcaagccggcagttgcgcgtgccgatcgtgccgccgcgctcgtgttcggcgtgaccgaggaacgcgatgacctctctggcggtcagatcggccagtgtgatcatcgccaccttcttccctgcgcgttttgcaacgaaccggaggaagagccgccaggcatcgcgatacgaccgcaccgtatggatggaggcattgcgctgctcgaccagccattcgtagaagaacgcgcgcatcaggtgtgggaagtgattgttcctggtcatgcccgcccctccggtccgatgttgaggcatggcactcccagcacgcggaaccgttcattggcgtgatgcagcaggtcctgcgtaaccgtgatgtagaccagggtcgagttgatgtcgcgatgaccgagataggttgcgaggaatggcaggcgatcctgcggattgatgcccgcctcgtaccattcgaggatccggttcacgaccatggagtgccgcaggtcgtgcaggcgaggtcctgttcgccctctgggcggcttcagcccggcacggcggatgacgtcaacaagaagccaggcgacagcctccttcgtatagcggtcaccacgctgttcgtgccagaacaggccagagcgcggatcaagggatccgccggcgcggcggcgcgcttgggtgtatgatcgaagctcgtccaacacgctgtcgggaagcggcagtatcctggtcttgtggaacttggtctggcggatcgtgatcgtgccgccctggaagtccacgtcaccaagatccaggcgggccagttcgcttcgccgcagacccgcgcaataggaaagcaacagcatggtgtagatgctcgacgggcgaagcggcgctcgaggtgaagggtaagagcgggcgatgtcgagcatgcgccgcacatcggcgggtgtgtagatgtgcggttttcgccaatgcctcgccacttccttttccgggctggggtcaggtcggcggggcgggagtgatggatccttatggcgcaggattttcgcgaggacccgcttcagtttttcgcactcgttcggatgattgcgcgtggttttagctgcggaccagtgttcgagcatcacctcaagtggctgatcctgaagctccgggttcaactgaaggaagcggtcgagcctccacagccgcaccgcttgtgcagtgtatttgtaaccccggttgcgcatcagcgtgacgtgctcggccatcattttgcccagcacgctgccgaacggcctgggctggtatagttcggcaagtgcgctgtccggatcgctggaagccagcgcccgccacaccggcatgcattgtttgatattgcaagcttcacgcagcgcggcgacgggattgcgttcgatcgctccgatctcctcaaggtgatcgaggaaccggtcgataatccgggttcgatgcagccgtgtcgtcgtggcccaccgcccgggagacacatgcagccaggccaccagcatgtccttgtcgagcttggcgtggcgttcggcgacatcctggaagatattgagcgcctgcctgtagtagatggggctgttcttggtgcgcaggtcgaggcctgcgatgtaccgcgcgatcagcttgcgctccggatcaggccagatcgtcatgacggcatctcccgtcccggcacttcgagcgcgatggcccggaggtcctcggtagcaagcttcagatagggggccgtggattcggtagagcgatgcccgagcagatcgccgatcactttccggggcacggcggcgcgcagcatttcgaccgcacgtgcgtggcggaagatatgggagccgttcttgccactcggagtgaccccggcggccgcaagccgctgccgcaccatgctggccagcaaaccaagcttgcgataaggcgcgcgtgtgcggacgaagatttcgcgggcgtcagtcaccggccgccccgcctgcagataggcgagcaccgcttcacccaccggcgccatcaatggcaagaacgagcatgcttgggtcttagtatgcctgatgcggatcgattccgcccgccagtcgatatcctcgatccgaagattgcagatttcgcccgatctcagaccataggtcgcaagcaattgcaggatggcatgatcccgcaaacccactggcgtcttgtcctcccccgaggcctgcaaaaccgcggcgacctgatcgggcgtaaggatcgacggcacaccttcataggcatagagcaaaggggcgatgacatgcggcgataaatcgatggcgacgcgccctgtccgatggagatagcgcagcatcgagcgaaggcgctccgccacatccttcacggaccggcgcgtctgatgagggctgcgcgtgtccatgtaacggtcgatgtcgctcacggtcatcgtcatcaggctgtcgggaccgtgccgatcgaactgccagaccagaaagttccggccctcccacatcagcgcgtcgatgctggccgcagcaagacctcgttcttcgcgcagccaggtctcgtacccgtcgcagatggcaaagcgcagtgtgtcggccgcgcaggtcgctttcggcgcggatggccattgaccctgtgcgagccgcagcaatgcatggatcccagagcgcggaatggagtgccaatcccgcgccggcgtccgaccgtggcgttggccgaacatcgcaatcgcgtgttgcaggtactgagccacctgcgcctcggtcacatccgtgacctcaatgttctgctgcgcaaggtattcgacgaaccctcgcgcataggcgcagtagttcccgatcaccacagggctgtatcgttgcttggtgagtacaattcggagctcggcgatgagctcgttatcgacattcaacatcattggttcctctgcttgtcaaaacgacagcaaaggtccggcagaaaataatgctgagcaaatcccgtccgcaaaagctgatttctgcggttttcaggcggtgcagccgctttccttctcattatgggctgctgcggataactgcaggtcctgcagggcgacaagcgagcggttttccaggccgccgcacatgcgcagcgcgccgccgcgtttctgcacggtctccagccggctgagaccgcagagcgggaggcagcgtgatccgccactcgcgtaggtcgggctgaccccaaacggggcggtccttttttgtggcgcggtctcgccggtcagcgcaccgcgtcaacaaaaattgtcagccagccgcccccaaaaatggaatgggaagaaggagcacgcgctgtttcttctcctccaaggccgggcgcaacgacttcgcttcccgtcgtagcagcccaagactgcttttctgatttccgttgcggtggacagtcgtgacaacggcgaaatcggcgcgacgtcccgagcggacgttcatgaagacgattgagaaagaaggctcacgcctaggtgcctacgcccgcatcaccgatcgcttcttagtcttgctcatcccgcgcaaatatattatatgcatgactcatacattgattttcgaggagggcttcgtctccaatggcactgaacgcaacagatcggatggtgaacctcttgggtgcattagcactaggcgtgtccgaccggatgcgtcgggctgtcgctgaggccgtgccgtttgggggagagacggcagcggcggtgaacgtgatcggccacgctccaactatgtctatcgatcaacttagccgcgttctacgtctgtcgcacgccggcacggttcgcctcgtagatcgtcttgtcgagagcggcttcgtcgagaagcgaccgtcggccgtcgaccgcagggttatgtgcctggcgttgacgacggacggtatgcaccaacgtcacaagctgctggctttgcgaagcgccgcgttggcaactctgtttgatcaagtgacggcagaagatctagctgcattcgaacgcgttgctgaaacgattgccggctcgctgcccgagaacgcgctcactgcgctgacaacatgccgattctgcgacgagcgtcactgcaccgattgcccaatggaggtcttcgggacgctcgaacctgccggtggcccggtcaccggcctccgaagctgatttttcaacagggttgcacaatacagacaggaagcagcaaatggccattcaaacaaaccggtttcgcctgcaaattgccgaaagaggagttggttcgctctctcttctggcactgctcagatgggctttggtcgtcatctttctatggttcgggggaatgaaattcaccgcctatgaagcagaaggcattgcaccgttcatcgcgcacagccctttgatgagttggctacacattctgtttggcatccggggggcgagctacgtcatcggcgtccttgagctatcaaccgccgccgccctcatcgccggtgccatcaacccggtcttttctgccctgggggcagcgatgtctacgataacctatctcattacgataaccttcttcataagcacgcccggagtagcagagccaacggccgggggatttccagcgatctcagctgcgcccggccagtttctactgaaggatctcgtcctgcttgctgcatcgttgtgcctcctcagcgcatcggtgcaaggtccgtggctcaaagccgaaaactctcaaaacggaaacttgtgacgtctaaccgactgttgcggcgtttgtcgctgcaacagccggtgtagccggcaacgaggtgtaaccgcaggttttcgtgccaatggagggcttcggactccgtcatgatgctcgactgacaggttctctagtcttaattcgaccccataacgccctgatcgtcgaccacatcaggctggaaatcgcccgtgcggctacagtgccacaaacccgtagtgaattccgcccactccccaccttgccggtcgaaaactccgtcgagacgttcccgtcgcagagaggccgggacgcaaaagtggcgccggattaaccgcacccagaggggcttcaaactcgctgacccttgatatcagtgaggataggtcactccgaaacggcgcttgcctctttctcaggttgccggtggtcgccgtccaactcgtgggctcaacgggaacatcttcatgtcgtcgttccacggatcgtagacggttgcccccgtcggcttcgtatccttcacattccgcgtgacgagataaagatcgtgttcaatggcgctcgcggcgagcagggcgtcgatcaccggcggcggatgtccgctcgtccgcttcacttcgccggatagacgtccccagcgcctgacgctgtcatcgtcgagggaaagcactcttggtccgaaccgttccgcaagggcatctctcgatgcgatataacgtgggcgatcttcatgatccgccggaagattatgaatgcccttgtcatattcggcgagcgtcaggacgctgatatagaatgtttcctcgtcctgcgccgatgcccaggtcttcaccgagggggcaccacgggggttgatcagggcagagacgacgttggtgtcgagcagccagcctttcaaagctcgacgtcccggccccgatcggcctcacggtcgagatcgagcccgccaagatgcaggctctccatgaactcgacgaacggtgcgcgcggtttgccgggcgtcaggcgctcaaattcttccacgctcatcacgacaaccgcgtcatgcccgcgcacgctcacgcgctgcggcccttcctcgcgagcgtgccgcaccacctcgctgaagcgggccttggcatcctccagcttccatcgtcctgcaagccttcgccttacaggtcgtttcgttttcgtcacttctgcgcgtttggccattggcttttacctagtcagctagtcagatatagcatgggccacacacgatttccagaccgggccgtcgggcaaaacgccagatgaaaagctggctgaagcgagaaaaaagccggaaaatccaccccgcggcgggcggaggccagccccggcgcaccctccgccaacggctaccagcgaaccagcctcgccagtatcaacctgccaataaccgtcacgatcgcgcaaccgacagaataccaaaccgcgatataaaggacgtcatccgagggacaggcaaagacgaaaataaaggcgccccacccggccgatcccagtgccgccgccaacgatgtcccgaaccgatccgtgggcgcgccgcgctgaatgagaacacccaacgcgacaaccaacggtacggagagggtcaccatcttccaggtgcattgaaggcccatctgccagtcgagtcgcctcacaagctcagaaaaaccgccttccagggcatctatcaaccatccggaggcgaagattagcgcgaccgcgatcgcaagccatcgaaggccggctttcggtgatttcgtggggtcagacgagaacaatgcaacggctgcgcctgaaatcgcgattgcccccatgctcgccaacttccaccaaaaggacggcatatgcatcgcgtgcgagagatccgggcgcatgaagcctgccccggcaaaggccgcgaactccaggattgccacgacgcccaggatgacagcatcgcgcctgaaacttcggggacgcaccggcttcaaatcttccgacagcgtcttgacaagagcttctgttcgcatcgcccaactttccggccctgacgtcactgcgccacaggccgcgttccggaaattggcggcgcctcaggttcggtgtccgtttcatcggtaaacggaccgcctgcaacgcaagaatcaccgcctcatcagccaacccaagggctacatatcggccccggtcggatatccggccgccctgacgcccttgggcatgggagcgtaacggctacaataacgagttcgttgccgaacgccgctttgttacagagttatgatgcgaaagttagttcggcagcgcggccgagagtctgctgggccacaacgctctctgccaaaatgcaacttctcaccaggcgcagcttccgccgctcgtctctcctgtccctgccgccgcctcacagctcaatgaccagcggtcgacgatcgtcggccggacgctcggccggaaaagcgcaacataagagagcttcctgatcccgtgtctcatagcccgggcggttctcgtaggtcacctcaccttggctgaccattgccctgcatgtgccgcaagatccggaccgacaactgaaatcgggcgtcaaaccggcgcgctctgcgagctccaacaacgtgcccgattccggctcccaaagtgcttctgtcccgcttttggagaataccacgctcaccggcttcgtcgaagcgctcggaagcggcggaagcgcttccgtaccatgtcgacggaacgcggccggtccaaaggcctcagcgaacaattgatcgtccgacacgccgaatgcacgcagcccgtcatacatgtcctgcataaagcctggcggtccacacaggtaaaagtcacagttcaacgacggcaaagcgtcttttatcacctccgccgtcagtcgtcctcccaactcatagtctcgagccgccatggcgccttgggtgttggaaagaagccgaacaacgcgcagccagtcagtcgagttcgtcgcgatcgcgtgaagctcgcgatcgaaaggctgctcgcttaccgaacgagacgaataaaaaagccacgtctgtttcgcagatctcgtcctctgtcgctcaaacaggcgatggcgcagcatggcgatcatcggcgtaattccgataccggccgctaccaacaccgatggtctctttcccgccggacgcagaccgaaactaccttccggggcgcgtgcctcgataatcgtgccgacgtcacaacggtcatgcaggaaagacgagatcgcaccctcgcgcttcacgctgatccgataacagccatcagacggcgcagccgaaatggtatagttgcgaatggcgggggcatcctggtcgccgatgtgtaccctaatcggcaaatactgacctgccttgtgacgaagcagaacctcgccatcggcaggctccaggaaaaacgagctaacggtcgtgctctcccgaacccgacgagcaacgcggaaccgcctccaagaggaagcttccttcgatgctgcctgctggtctcgcacctcatcccagctccccgtcatcaagctattgggagattcgccgccctctaccttcgtccaccgcaacgccagcgcgccggcgcgatagacgacgcgctcgggatagacgcgccacaaccgttcggccccctggaacagcgcgatctcaggggagtccagcaacacttccgcttttccggtgatctgcaggagtgatccggactcgaagtctgggaaacacaagccggcgcgaccactcaccaggatattgccaagcgtgttgaagtacagattcccggcgaaatcggggattgtgagcgagccgtctttgttgacgcgcacaaagcccggtttgccgccccggtgagagacatcaacgtgccgggagccatcgcgatcgacataggaggcgacaaagaatgtatcggcggcggcgatcatcgcacggtgaacgtcgctgagctcggctgactcctggcgcgaaggacggctcgcaggcgcaggttcgaacgaatagttgcgcaactggatatactgcggacagtttccgtagctttctcgcacaccgacgctaaagccatttgcgccacgaccgcgtacgacgccgttcagcctgttgcgccggcgtgtccccagctgaatacccaacagaccgacggaacatccatccgaaagtcccgcttcggcgggatccgaaacgtctaccgtcgcggcgatctcaagggtcttgttgtcggccacggacaggaagcctgccgggccttctctcatcgtcgaccagacatcaccgttttcatcgacggctccgatgatgatcgacggcagcagcggaaaaaaaagtcgatgctgatcgatcagatggtcgcgaataacctgggcgccctgacgttccatggcgcgtcgaacgccgaccgtctcctgaagcgccatctcgcccgcatgccatatagagggcgtgtcgatcggccggctcttctcagccggtgcggcttgaggccggtcgaccacgtcagccattggccgcactcgctctaaggccgaccggcgtttccgcaaacggaaggaagccggggagcgcctcaactcgggccagccatgaccggatattcgagtaatccgacagatccacattcccctcgggggcatgcgatgtgtagctgtacagcgcgatgtccgcgatcgtcggtcctttcgcggcgatccaatcccgcccagctaacgcctgctcaacaagccgcagcaccttgtgcgctttggcgatcgtgtcctccgggtcgaacgatgccttgaacacggtgatcaaacgcgccgcacaaggcccgttcgcaatctcgttggccgcaacagaaagccatttctgaacggccgcggcttccacagcgctctccggcaaccagtccttcctgtcgaacttcttggcgagatacaccaggattgcgttggaatccgcaatgacggcatcgccatcgacaagcacgggcacctgtccgaatggattcatgcgcagaaactcggccgtgcgcagatctccgccaccaagctcgatctgctcgacatcggcgccaaggatcgaaaggaacaagcgggcgcgatgcgaatgaccggataacgacaggtagtaaagcttcacgtcaacctcctgagaaaaccgcggaccatcgaaaaacgcgatgcgtccaaccggcaccggagaccgagtccagcacctacgagccgggccaaactaggcgcttccgtatccctcaggaattacgtgagtttggaagccaatcttccaaagaatggaaggaagcgcgatttcttcgctttacggccccgacaaatcgggcgtttcgccgggccctttttgccattcgacctaaaaacggcggcgccaccttccgatttccccatgtaagtgtattgttcccgccgcgcgcttccaaaatgtgagagttagatggatcgaatcgaggcaatgacactgctagtcgccaccgtggaaaaaggcagcctgtctgccgccggaagggcgctcggcgttccactggcgaccgtcagcaggaaggtgtcggacctcgaagcccacctaagaacaaaacttctcaaccgttcaaaccggcgcctgacactcacggacgccggcgaagcgtacgtcgccgcgagcaaacgtattctccagcagatcaatgaagcagagcgcgccgcggccggcgaatacatcgcgccacggggagacctcgtcgtcacggcgcccattgtgtttggacggctgcacatggtgccaccaatcgcggcatttctcgaagcctatccagaggtcgacgtgcgcttggcacttgccgaccgggtcacaaatcttatggaagagcacatcgatgcggccctgcgcatcagtctcctccccgacagcacgcttctggcgacaaaggttggtgaaatacggcgcgtcgtatgcggcagcccagcctatttcgataagcacgggactcccgcaaagcccgccgacctaagtgagctttcatgcatcactttcgagggacaatccaacccgcaatcatggaatttcgggactgcaaaggcgcccgtagtggtgcccgtccattccaggcttattgcgacgacggcggaagcttcgatcgacgcagctaaactcggagccggcgtaacgcgagtgctgtcttatcaagtcgaagatgccgttcgtaaaggcgagctcgtcactattctggaagatttcgaaccacccccaattcctgtcagtctcgtctaccgcggcggagggatgattcctctcaagcttcgcgcgttccttgactttatgaccccacgattgcgggcgagtctctctcaggccaaatcacggagtgcaaagccacaggggcgcccggaggagaacgaagctgacacagcaccggcggccagcactgggccgcgcaaatcacgaaaggcggccgaccagtcggcttaatggtgggcggcgcgtccggtctgtcgtgggggcaaactacgtccttccaagaaatggaagataacgttccaactctacagtattttaccaatacggctggccatctacgtttgtctctccaatcaacgagaagacgagtgccatgacccgacccccacttcccccgttttccagagagagcgctgtcgaaaaagtccgccttgccgaagacggctggaacgggaggaatcccgaaaaggtctcgctcgcctacacgcaggacacggtttggcgaaaccgcgcggaattcgtgaatggacgaagcgaggtcgttgccttcctcacacgcaagtgggcaaaagagctcgattaccggctgatcaaagagctctgggcgttttccgagaaccgcatcgccgttcgctacgcctatgaatggcatgacgacagcggaaactggtttcgcagctatggaaacgagaactgggagttcgcgccggatggtttgatgcatcggcgtttcgcatgcatcaatgacttgccgatcgccgaagccgatcgcaagtttcactggccgttgggtcgccggccggacgatcatccctcccttagcgaactgggactgtagcccccgctcatttcgtggcgaggccacgacgatgcttggcgcaccgccgtgcagccaagggtaagtcctgctcggagtttagttatgccgttagtccgcaatgccgacgccgtcctgcactatgacgtcgttggagaaggtgaacccctcctcatcctgcctgggctggccatggatatcggtccgtggcggccgctggcgtcaatgctggtcggcttcaagatcgtgcttatcgacaatcgagatgccggcggaagctctacgaccgcacagcaatacgctctgtcggatatgtcggcagacgttcgtgccgttctcgacgatcttggtctcgagcaagtcagcatccttggtcattcgctcggcgggcagattgcgcaagagttcgcgctgcgcgacccgaaccgcgtgcgcaagctgatcctcgcgaacagctgggcgcggacagatcaatatctggcgaacaaattcgaaacctggcggatattgaagaggcatctccctgatgcccacttccgtgaggtcatgacctttaatctgagccatcccgacgtgctcgcgagtgctccgcttcacgcgatcacggcgcttacgaacccgctctttcacgatcaatccgcagatgcattctgtagaggcgcgaacgctgcaagtcaggctgacacgctcgatcgccttaccggtctggtgagcccgaccttggtgatttcaggcgagcgtgacgtcgtcttgcctgccccctattccgacgaactgaccaatgcaattcccaaagccacgagaattcgtcttgagacggctggccacgcggccccttgggaagcatcggagatcttcgtgaatgaggttcggagctttctgaaacgacctgcttgacgacaaggctaacgctgcgcggcgcagaatatgtacccggagttccgaaatgctgtgttcggctggttagaatttctcgacccaggggcgtacctcgacttcgaatgaccaggcactgcgatgctggcgaaggatgtcgatgtaggtttgcgcgatcgcgtcggccgacagtgtactatcgggattgtcctgcggatccgaacgcgacgcggatcgaacagctccatcgatgacaaaatgcgcaacgtggatgcccatcggccccagttcacgcgcggcgctctgggccaatccgcgtagagcaaacttgcccatcgcaaatgccgaggagcgtggaaagcccttcacgctggcggatgcccctgtgagaagaatggctcccttgccatgcttcaccatgcgtcgcgccgcatggtggaccgcgagaaacccgccgtaagcgctgatagcaagcgccttctccactgcgacaggatcgatttctgcgactggcccaggcgcccgcgcgctggcattgaacacaaccacgtcgggctctccgatcgtggcgtccacgtcgcgaaacaatgcctcgacagaggctcggtcagaagcgtccgccgagaagacctttgcgccaatctcatcatccagctgttttaatttcgcagtgctgcgggcggccagtgcgaccttgacgccgagtcccgccaactggcgggcaaccgatgcactgatccccgtgccagctccgataatgagtgctgtgcggtatggaaactctgacattgaaatctccggacgttatttacgacgggtcaaatggtctgcgggcgcagttgatttcggcgttgccacgttgctcatcgatggtacgagcgcggtcgcgacaacgaatgccggcatgatcattcgaaaggcatctgcttatgccatcgttgatgtctccggttaagccagtagccacaattacttcagagctgcggtctgtccctgtcggtgccaccaggcagagcatcgtggcgtgtgatgattttactgacgtgacatcgcgcgatgttccggcgtcgcttttcatacgatcgcgggaaatcgatttcggtgcgcgtcgagcgaaacagcgccgccattaaatccgagtgtccagactgatttaaatccgagtgtccagactgatttgctgcagggattgcgcgagcgcttccaccacaagcgctgtttttgtcctctcaattcctggaagataaagttccaaggaagcacgatattcggcaaatgcggaagcgaatacaaaacgtgtcaggcaatgacgcctgaccgaaacaaggaattgcaccaatgtcccgcatcgccatccccgcctccgtcgacgccgctcccgccgcttctcggcccttcctcgacgccgtgaacaagcagctcggcagcgtccccaacctgttccgccttgtggcgaccagcccggcctcgctcgagggttacctcggcctgttcggcgcgctcggaaagggccagctgccggctccgactcgcgaacggatcgcccttgccgtcgcccagatcaacggttgcgactactgcctgtcggctcacacctacctcggcaagaatctcgccaagctcgacgacgccgagatcaccgccaaccgcaatggcgcctccaacgatcccaaggctgacgctgcggtgaagttcgcggcaaccgtgacgcgcgagcgtggccacgtgaacgacgcagcgctgcagagcgttcgtgcggccggatacgacgacgctcagatccttgagatcgtgcttcacgtcgctctcaacacgctgacgaactacgtcaacgaagtcgcaaagaccgacgtcgacttcccggtcgttcacgcacgcgacgccgcctgatcgccttcacgaatccgtgagcggttcgcgttgtaacgaatagcctcaaaaccacgaacacctctcgtgccgcccaaaacaggcacaacccaacaaggagtattttgatgtccgcaaagtccacaatcagttcgctgattatcgccggcgccgtttcgagcgcgctggcctcgatcgccatggcagcgccgctgaccaaggccgaagagcaggccgccgtctctgcccacaaggtgaagtgctacggcgtcgccctgaagggtcagaacgactgcgccgctggtcccggcaccacctgccagggaacgtccaacgtcgatttccagggcaacgcctggaagttcgtgcagggcggcacctgcgagtcgatcgccgtcccgggtggcaagcacggttcgctgaagccgatctgatcgcgacagcaaccaggcacggaaagcggagaaacgctatgacctcgaataataatcagaacgccgaaaacgtggcgagcgctctccgctttccaaaccattcaatcgccggacaggctgggacgagcttcaagcacgagcaccttccggcgatcatggccgacggaaagcccaagggcttttttgaagtccatgccgaaaactacatgggagccggtgggccgccgcaccgggcgcttgaagcgatccgacaggataatcctgtatcgcttcatggcgtgtgcatgtcgatcggtgggccgcagccgctcgatcgcgaacatctgggacgattcagatcgctcgtggaacgctatcaaccggcgctcgtgtctgagcatttggcctggtcgacgcatgaaaatacattcttcaacgacttgctccccttgccgtacaccaacgaaacgctttcgagggtttgcgagcatatcgatgaagtgcagcaggcaatcgggcggccgatccttcttgagaatccatcgacctacgtaacgttccgcgaatccacgatgagcgaaactgatttcatccgcaccatagcgcggagaaccggttgtgggcttctcctcgacgtcaacaacgtcttcgtgtcggcgaccaatcacgggttctccgcgctcgactacctctcggactttccgcttgccaaagtcggcgagatccacctcgccggccacgcggagcaagcggacgacgagggcgagcgtcttctcatcgacagccacgacggccccgtcgccgatgcagtgtggaagctctacgaaatcgtcattcaaaaatgcgggccggttccgacgctcatcgagtgggacagcaacattcccgattggccagtgctcaaggcggaggcgacagccgcccagcagatcctggatcggtacatcggattctcttctctggataagagccatgcagcttagccatcttccccggcaggacatgcggcagcgtcaaacctacgccgacgccttctcccctgccctcatcgatccggatcaccaaacgcctgatgtcgtcgcgggtcccaacggcaaggcggcggtcaagcgctacaacgtttatcgcaacaacgtcaccgtcagtctgatcgactcgcttgccgcgatctatcctgccgtgcagcgtatcaccggtatcgagttctttcgggccatggcccggtttcatgttcgcgcgacgccgccgacttcgcctctcctgttcgaatacgggcgcgactttccggccttcatagagagctatgaatacgcgcaggcaatgccctggcttgccgacacggcgcgcatcgaacgagcgtggctagatgcctatcacgccgctgacgcggtcccgcttgctcccgagcgcctggcggctgtgcctcctgagcgccttgcggatctgacatttgtctcgcacccggccacacaggtcgtgagatctcgctacgcggcgctgacgatattctcggcaaaccgcggcacagaatcgaccggccagatcgatccgacgcaatcggaagacgctctgatcacgcgcgcggaaaacgatgtcgaagtcagacaccttcccgaaggcggcgcggtgtttctgactgcgctgctggccgggcagtcactcggccacgctgcagccgctgcgctcgaagaggtccccgacttcgaccttggtgcgagcatctctggcgtgttggccgccggcgcatttatcgctgcagaattcggagaagaatcatgactgtcttagatcaatccgccgcctctcgcggcaagttaagaggcgtggcggacatcgtcgatcgcgccagtatgctagtgcaaaccgttgcgcagccgtccttggcgcagttgttgttgcgcgttgccatcgccgtgccgttttggaaatccggcatccttaagtgggacggcttcctgcagctgagcgacacggccgttaccttgttcagcgatgagttcatgctgcatcttccgggtgggccctacccgttcccggcaccaacgctgatggcgttcctgtcgggctgcggcgagatcaccttcccggtcttgctggtcctcggattcggcacccgatttgcggcgctgggtctgctcttcatgaccgtgatcgttgaactgacagtgccggatgggtggccgatccatatcacctgggctgctatggcgctcgccattatggcttggggaccgggccgcatttcagtcgactatgcgatccggcgtttcctcggcttgccgacgacctttcggcgagactcaaggcccgcttgaagaccccggcttcgccgaggtcgatctgcatgccggtccaacgtctcccaccgaaaggggaccttccgaaggacgccgccgccgctgttggctgccgactgatataccggacctgctcagcgacggaagcgctttgatgtcggagttacgcgaaatgggcccggttcttctcgacgaatgtctcgacagtcattggcgcgacacccgtcacttcccgaatgattccgtcctcgccttcgaatatcccgttctgatagtcgagagtcacctctcgcagatgctggacgacgtgaggatttgcacgaattgatgcgagccggccctcagcgaattcatcaaatgtgatgggttcataatgcagatcgcggccaagggccttccccatcgccgctgcaatctcataatgattcatctggacggggccgtgcagggtataggtcttacccgcgtgtggcgcgggattctgcaaaatggcggcgatcaaacgtccctgatcctccgccgcaatcggcgcgtggcgaccatcacccatcggcattttgacggctcccgttgaccgaagcacggtaggatccagcatgatcgtcagccactccgcaaaaaatgtcggtctgagatgagtggtcggcgttccggaccaatcgaagattcgctccgccacccaatgctcctgagcagcgtggctgttcgcgtctcgtcgcgctgaaatttgggacatgttcacaatcgccttcacgcccttctcggctgcagcaacggcaaaaaagctcgtcgcgtcgatcaggcgcggcacgatcggatagcagaagtatgcgctctggattccatcgagggcgctcgtgacgtcgttgaggctgaggagatcgccgatcaccacttccgcaccgagcgccctgagctgatcggccttcggaccatcgtgatgggccaaggcccgcacatgcgcgccgtcctttctcaagaattccacggcgaaacgccctgtccggccggtcgcgccggtgatcagaattgttggtgtcgtcatcagttctctccggttttccagatcacgcggctcgccgccggcgggcgccgatcttgaggtttaattttgcaaccctggacaacatgcgctggatggtttaattttgcaaccctgacactgaggtcaccggaggccacgttttgaagggaaagaagaccgagctcgcgccggcacagtgcgcggtggcgcgcgctctcgatgttgtcggcgactggtggtcccttctgatcgtccgggaggcgctattcggacgaaaccggttttccgaatttcaaaagaacatcggattggcgaagaacattctgtcagtccgcctcaagaagctggtccagtacgatgtattggtgatggagccggacactgaagcggcgacgtcacatcgctatatcctgaccgagcgaggacatcggcttgcattggttatcgctgcgctgtggcagtggggcgaggagaactgctttcagtccgaagggtttgacctcggactggcggacagggaaaccggcgagcttctggcgaagctggagctgaagaccttgagcggacgctcgctcgatggtggccggcttgagctcgcagtgaggacacgcaccgacgcagagaagctcaaagtgatggctttgaaagactcagcgcccgcttagtgattattttcgaaaataaacgaccggggtgcggaaggatcgagccgccgagtgctgctgctcaatcgccaaagttggcgttcttcacgcaacccgtcgacaacgcggctcaccataaaaatagcatcaaagggggtatcaaatgccggcaccacttcaatttgcgtttcgcgccggtccttccgggacgtggaggatcgatagcatcaaagcagtaactggcgagtcgctggccgcaccagccgctctcgaagtcatcggaccgctgaccgttccgcccgaggccggcggcgactggactctcaggggcgtcacaagcaacacccgatacacaaaccggtccgaggtggagcagcttgaggctacccaagaagggcttggccgcccccaggcaactcgcgcggccctcattcccatccggaaaagcgaggcttggtggtctctggcgcaggacgagcggcgggcggtgcttgaggagacatcgcaccatatcgcaatcgggctcgaatacctgccggccatcgctcgccgtctctatcactcgcgcgaactcggtgaaccgtttgatttcctgacctggtttgaatttgcaccagagcatgcagcttctttcgagcggctggtgtcacggctgcgcgaatcggcggaatggcgatatgtcgatcgtgaagtcgacattcggctgagccgatgatcgccgtccattcgtaaaccgatcgccaatcgatgtaggcgcgtcgcggtcggatacgctcatagtcatcgcaccgctaccgccatgttaaagaggcgccaagacgaaggtgatcgttggggcgtggaatagcgttcgccgggagaaggccccaacttttcaaggtggagaatttatcacctctgatcgcacgttcattcgaagatcatttccagattgtcgacggaaacggcagcccgttttcgaacaaatgctctaaaacactcacagtacttatccatcctgccgacaacggaaccgtttcgtttgtcgaacgggtatatgcctcggcgcatatttaaatcctcgtgagagtcaaagaacaatgtcatttcgatcaactcggcgttcgctacttggattcgcattgaccgggatcgccgcaactaccgcctttcggcacgcacgtgctgctgatcagaagctgattaagatcggttatcctaaggctggtcctctcataattctttccaaacttggacgcctggaaaaagcgctggcgccgctgggcgtcaacgttgaatggcgcgaattcacctcgggggtacagatactggaggcgatggcatcccggtcgattgattttgcaatgacaggagattcacccatcatcttcgcgcaagcgaatggcactgccgtacgttatgtcgcctacgagccctcagcgccaaaatcccaaggcatccttgtcctaaaggaatcgccgattgcacgactggaggatctgaagggaaagcgcatcgcggttcaacgcggttcaaattgtcacttcctgacggtcgccgcgctgaagcgcgcgcaactcaaactgtccgatgtcaagttcgaatacatgattgctccagacggcagggtggcgctggaggggcgcaatgtggatgcttatgcggtttgggatcccctgatgaccgcgacaatcgccgggggagctagacagctgatcgacggcactgatcttagcaataatcgcttttattatagtgccaccccagagcttggcgagaatagagcccttctcacagccttagtggaggagattggagcggccggacaatggatcaacaacaatcggagagaagctgccagcatcctttcgcccgcgacgggtctatcgacagcgatatgggtgcaggcgctcgaacactcaacgttcggtgccaaatggatcgagcaggaaccgctggtggagcaacagcggatagctgattccttcgtggaaataggtctgctaccgaagcctgtgcgtgtttcagatatagcgctgctaagctgaggggctcggcctaggctggcgggaaacgaatatgaacatcatgtggtttctcccgactcagggagacggacactatctcggcactgctatcggaggccgtgaaactactttctcatacattaagcagatagctatcgcagtggatgagttgggctattcaggagtgctgatcccaactggcctgttttgcgaagatccatggaccgttgcggcagcagtcgctccccttacgaacaggcttcggtttctcgtagcggttcgtcccggcataatgcaaccgactgtcgcggctagaatggcagccacagtcgaccgcatttcggggggccggctcgacgtcaatgtcgtatctggagggagcccgcccgaacttgctgctgacggcgtttttgccacgcacgacgagcgataccaactgaccggagaattcatcgatatttggtgccgtctgctcgcgggtgagacggtcacaatgaaaggcaagcatctcgaggtacgtgatgcacggctgctcttccccgctgttcaacgtcctcatccacgtctcttcaacggagggtcgtcagcggcgtcacacagctttaccgcggagaagtgcgacgtctatatgacgtggggtgaaccgcctcggatggcagaggagaaaatccgggacgtccagcgccgcgctgccgcgtatggccgaaagctacaagttggaatgcgactccatgttgttgtgcgggaaactgaatccaaggcctgggaagcagccgatgatctgatcaaatatctggatgacgagactattgcgcgagcgcaggctgcgtttgcagcgcaagattccgttggacagcagcgcatgacttccctgcacgggggccggcgagatcagcttgtcgtgtcgccgaatctctgggcaggggttggcctagtacgtggaggagccggaacagcgattgtcggtgacccgaaaaccgttgctgccaggctcgtcgaatatcaacagatcggagtcgatacctttattctctcgggttacccccacctcgaagaggcgtatcggtttgcggagctcgtcttccctttgctgcctctgaagccacccgagtcgcaagtcgccattgggcgagacggcggcaattcgcttcgcgaaccggttggcgaggtgatcgcgcacgtcgcattcccgggtcgttaaacactcagcaaagctatgtggttttagcgccgggacaacaagatttgtaatcgattctcagagcgtcgcgatcggatactctcatagtcatcgcttccgactttgaggacgatccgcaatcttctcgatcaaccgatgtcggcaatgccgacgtcgatcctaccgaaaattgcgtgtcttcaccgtcaggtcactaaagtggccagggcgatgtgcgagattggctggctcgcgcggatcgggcgcgggtgagccgcgatgaaactcgtcgccgcgcccatgcgggagcgggaaacccgtgtcccgcgcgccgatgctggcaagctcggccgaaaggtcaaacagatcgcgcgccacgacatgcacgacctcgccttcgcgctgaatctgtcctctgatgccgatcatgccggcaccaagcacggtgcggcggaatttctcgaatatcttttcccaaatgaccacgttggcgacacctgtctcgtcctcgatcgtcataaacatgacgcccttggccgagcccggccgttggcgcacaagcacgaggcccgcgacgtcaacccatttccgatcgcgcgacgcaatggcctccgcgcaggttctgacgcgccgacgcgcgaggtcctcccggagaaaggagatcggatgctggcgcagcgtcagcccgacatggctatagtcctcgaccacctcgctgccggccgtcatgggccggagcgaaacgacgggctcgtcctgctcgggaacgggcgcggcctcgcgcgccgcagcggccgcgaacagaggcagaggctcgtcacgcagcgccctgatcgcccagagcgcctcgcggcgggcaagaccaatccacggccggaaggcgtcggcctccgccagctccacgagggcagcggcgggaatggcggcgcggcgccagagatcgtcgactgacgcatagggcagacccgcacggcatgcgaccaggcgagcagcctcggcgttgccgaggcccttgaccattctgagaccgagacggactgccagccggccatcgtcggcgtcgcgcggctcgagcgtgcaatcccatcgcgactcgttgacacaaacgggcaaaatttcgacgccatgcgcctgtgcatcccggacgatctgcgccggcgcataaaatcccatgggctgcgcattcaacagcgcgcagcagaaaacgtccggatgccagcatttcatccatgaggaagcataagcgatcagtgcaaagcttgcggcatggctttcggggaagccgtaggagccgaagccttcgagttgccggaatgtgcgttcggcaaagtcgcgctcatagccgttgtcgaccatgccctggatcagcttctggccgaattgcgagacgccgcccgtgtgcttgaacgtggccattgcgcggcgaagctggtcggcttcgcctgccgtgaagccggcgcattcgatcgcgacgcgcatcgcttgctcttgaaacagcggcaccccgagcgtcttgccgagcacagcctccagctcgggtttcggatagacgacatcctcctttccttcgcgccggcgcagataaggatgcaccatatcgccttgaatcggacccggtctcacgatggcgacctcgatgacaagatcgtagaaggtgcgcggtttgatccgcggcagcatcgccatctgggcgcgactctcaatctggaaagtaccgagggtgtcggcccttctgatcattgcataggttcgcggatcttcgggcgggatcgtcgcgagatcgagccggatgtccttgtgcccggcgagaagatcgaaggcacggcgcatgcaggagagcatgccgagcgccaagacgtcgactttcatcatcttgagcgcgtccacgtcatccttgtcccattcgatgacctgacgatcctccatcgccgccggctcgatcggcaccaactcgtccaggcggtcgcgggtcaagacgaatccgcccgggtgctgcgaaagatgtcgcggcgtgccgaccaactggtgtgcgagctccagcgccagccgcaggcggcggtctcccatgttgagattgacgctctcggcgtgcttcgcctcgacgccctctgaccagccccaaacctgcgaggatagcgtcttggtcaggtcctccggcaggcccatggccttgccgacgtcgcggatcgcgcccttggctcggtagcggatcacggtcgagcaaagcgccgcgcgctcgcgtccgtaggtctcatagacccactggataacctcctctctcctttcatgctcgaaatcgacgtcgatatccggcggctcgcgacgctcttcagagacgaagcgctcgaacagcaagtcgttacgatcaggatcgatcgacgtcacgccaagcacgtaacagaccgagctgttcgccgcggagcccctgccctgacagagaatcccttttgaccgcgcaaacctcacgatgctgttcaccgtgagaaagtaaggcgcatatttaagcttctcgatcagccgcaattcgtgctcgaggttgcgccggaccttcgatggcaggccttcgggatagcgttcggccgcaccctcccaggtcagcttctccagcgtctgttgcggtgacagcgacggatcggagcgttcctcgggatattggtaggcgagctcgtcaagccggaacgtggagcggtccatgatctcgaccgtgcgggcgagcgcttccggatagcgcccgaacagacggtgcatctccgccggaggtttgaggtagcgatcggcaaaacgctcgcggcgatggccgagctcgtcgatggtgacgttgtgacggatcgccgtgacgatatcctgcaggatctggcgcgaaggttggtcaaacagaacatcgttggtgacgacggtcgcgacgcgcgccgcagtcgccatgttcgcgagctcccaaaggcgaagctgatcattgggacgtctgcgcagggtcagcgccatataggcgcgatcgccaaagacgtcgcgcagccggcgaagttgcatggcgcaggtctcgtcggcgttgtccggcacgaggaccgcgatcagtccctgcgcgtatgccgcgagatctggccattcgatgtggcatttcgctttgcccgccctggcctttccaagcgaaaggagacggcagagacgggcataggcggggcggtcggtcggatagacaagcagcgacataccgtcagcaagatcgagccggcaaccgacgacgaggcggatgccggtcgtcttcgctgcctcgaaggcccgcaccaccccggcaagcgaattgcggtcgacaatcccgagcgcctcgattcccatgatcgcagcttgcgcgaacagctcctcgcaactgctcgcgccgcgcagaaacgaaaaatgcgacgtcacctgcaattcggcgtagcgcggtccgctcatccgaagatcccgtgcaaaaaccattgctggtttccg

SEQ ID NO: 344 - DNA, 12920 bp, Bradyrhizobium colbertium
  misc_feature (9624)..(9633): n is a, c, g, or t
  misc_feature (10029)..(10038): n is a, c, g, or t
  misc_feature (12553)..(12576): n is a, c, g, or t
acgcctgacgatcgtggtcaggcgttgcacctctgcatcgcagcgggactttgccgacactgcctccccgcgggtaaccttccaattctgcagcgtatccgggctcgggcaattcatggcgactaattcatcgccggtgccctgccagggacgaagtgcgacgagtcggtcattgagcgcatcaagggcagccgcacgatcgcgctccgccagccggcgacgaacatgatggtccgctgagcgaagtgcttcgatcacgacggccagctctgcaaaagcgcgctttcgctccgcctggaccgtagggtcagcaccgccctcgggcagcttcgccgcaacgtcatccagccggcgccgcgcctcggcaagctcgtcggatgcgttccggctggcggccttgatccccgaataagcttcgaccagatcgcgcagtctgccgatggtcgcggagctcaacacaagccgcttgggctcggtctcttcgggccgctcgatgcgctgaagaattccggcgatagccaagtcgagctcgcgcaactgcaggcgtcgctcaggaagatccttttcagcggtgacgtaccgtgcgcgcaggtcgacaagccgctctacgcggtcggcagtccgcaaggctgtctcgtccacgatgacggcccgaccctcgtcggcaagttggcctatctcgtcggcaaccgctctgattttgacaccaagctcgatctcctgcttttggagccgcggcacttcggctacccacccctgcggtgcctccggaatatccgccaagggtgcgacccgtgctcgaatgccccgtagagccgtgagacgcggtaatgcggtgagatagccccggatctcatcgacgcgccgctggacctcggctcgttccttgaccgcttcatcgtattgaacggttgcccggtcccgggtgtccaccagccgagcgtgatccgtggctagtgtgtcaaactgctcgcgctcagctttgagttcggcgaggcgcgacttcaaatccgcgagtgctccggacctagcccggtatttgtagaagctgtcagcatctgccgtcaggtcgaccaatctgtcgctgaggtgcgagaggcctgcactggccgagaacaacaattggccgagatcccccttgcttgcaaggatgctctcgccgcctttttcgagcgtttcatcatcgagcgagaacatggtccgataggcatcccgctcgatgccgccgagttcgccgcggatcgcggcttctggaacgctgcgatcatggccgtcgaccaggctgttctgcgagcgtttgagacgtgcgaactcccttgtctccgctccgatatccagagcggcgccgatgcgcatggtcggataggggtgaaggaagttgaatgggctctgcgaaccgatcccgaacaacaggtccaggaaggcagcaaacgcggttgattttcccgcttcgtttggtccgtagatgatatgcaggtccggctgtccattcacccgctcgccgaagtcgattctgcgatcggtgaatttgccatatcgggtcaggtcaaggcggcgaagtcgcatgcatcacgctccttcgcccggagcttcaagacgtgccatgacgccctctgcgccgtcgcgcgccagctgggcgaccgcctcccggaaagacgcctcgtccttgccgaaaatgtcgcgacattcctgcggcaactgagccctgatctcttcggcgatgcctgcaagttcattctgaaaggccgcggaatcgaggacgtcgtcttcgatcaagcgatgcagctccctgagcgggtcgcccgatgtctcgctccgctgttctccgggacggcatgcgatttcgagctgctcgacccagcagctgccgatcaccgaagcccggtcatcggcctcggttttcagcaagtcgccgtcgcgtcgaatgcgccatgccagcggcgtcgcaccagtcactcgcacgcgagcgacaaggtgctctgcccgggcagcagcccgttggttctcgagcgcgcgcgtcactgcggacaccagctcgcgccaatcgtccattcccgtggcatcgacggacacgcgttcgaactgcgcgacacttgtgacgcgctcctcaagatggatcgagcgatcgtccgagatggtgacgagcgtcacggatttcggcccggcttcgttgatgtcacgcccctgcggcatgccgggcatcacgatcgcgcaggtgccttcggtcgccgagcgcttgtgaacgtggccgagcgcccaataatgaaatcctgacgcctgtagatcggccgggctgcacggggcgtagaggtcatggccgggagcgccgccgaggctcgtgtgcatgatgccaatattgaccgccccatccacgaccggccgatagcgccccaggaggctttccggggcatgaggttgagcaaagctcaggccatggacgacgacggggacgcgtccgggcgcgcgatcgatcgcgatagcctcccctcgcccgccgaagatcttcacggaatccggcagcaccaattccttggtgatcttcgacagcgcgtcgtggttgccgcggatgatgaagacacgaatgccagcctggtccaggcgccggagctgctcggccaggaagcgggccgttttcatcgaggtctgatcgccatcgtagagatcgccggcgatcagcagcgcgtcgacctgctcgtccaggcacagatcgatcacccggacgaaggcgcgccgggtggcgttaccgatcagctcagccaactcggaatgccgcagcgcaagcgagcgcagcggtgaatcgagatgaatgtctgcggcatggacaaatcgatacgtcaccctcgcctacccctgcatttatggcttgctcgcattgggtggaccttacgcgccggtcaatcggcgtgatattgaaatcgccgaggaacgccgggataaccgcgaaattcacagaaacagggggagaatgataactttgtctacgcgataggcctctaaatttgaacccgtagccaggcgggaagtctttgagatcgcgttagatttcggggcaattgccgcaatccttctgtacctatactcgtgtgacgtcgtattgacatccagaacaaatcgagagcttggcatggcgcgcgacagatggtaccgcaatatcaagcttacaggcagatttgttatcgtgtttcgcgatatatgatccgatgtctcggacgctgctccctacacgctgctcgattgcagcatgatgtgacggcctatgcgacgcgtaggagtgcctgtaagccttctttcttcggtgcttcacgttgagcctcacggatcttcgcgccacgcgaaccagacacgaagtggcagcgctgctgcgctatcgcccaagcgccgtgtcgttcatcgtccacgcaacgccgccggcggcccgctacatcaccttcgatattgcgaagcgaagcggcggtgtccgcaccatcgatgcgccgaacgaccgtctgaaagggctgcaacgcagcctttcgaaactgctttatgaatgcctgcgcgagatcgaagcaaaagatcctcgccgcaacaaactctcccatgcgtttcgtcccggcgcttcgatcatcagcaacgctaagacgcatcaccggcgtcgctacgtgctgaaccttgacctgaaggacttttttccggctttcaacttcggccgcgttcgcggcttctttctgaagagcgaacactttcgtcttgcggagccggtagcaacgcttttggctcagatcgcatgcaaggacggaaagctgccgcagggcagcccgtgctcgccggtcatcactgagttgatgacgcactttctcgatatccggctggtgaagctggcggcgaggcataaatgcacttacacgcgctacgcggatgacatcacaatctccacgaaccagcgcgagttcccatcggcgctagccgaattggacggggccgagtggaagctcggcgaggagcttgtgtcgcgcatcaatgacgccggctttgaggtgaatgacgccaagacgcgcatgcagcttcgcggaagtcggcagatggtgacagggcttaccgtcaacgagaaggccaatgtagcgcagacatactacaagcgggttcgcgcgacagcgcatcgcttcctgacaacgggggcatatgaactcaacggggtggcttgcaactccgtgccgcgcctggaaggcatgatcaatcacatctatcatgtgcgcgagcggcagatcgacattgcgatcgcgaacgaaggcaacaaagagaagcagcataagctgcacgccgagcgcacgaagatgaagaatgagtggccctcggcgatccgcgtcgtctactacgaactcattttcttcaaaagcttcatcaacccgccgcggccgttgatcatctgcgaagggccaaccgatcctgtgtacctgaagagcgccatccggcggcttgctgccgcgcacccacttcttgcgtcagtcgtgggaggcaagcctgagctgagggtgaattttttcaagtattctgatcaggcgcgtgacttccttcagctgcgagggggctccggcgatttgctgcgctttctgatttcctggaaggacgcctttaaccgctacgagtttcgcccggccgagcatccggtcatcgttctcatcgacaacgatgatggggcgaaagagattttcagctacctcaacaacaaaaagaactatggcctagatatcgcgtgggacaagcatgacctgtttttccatctccacggacccctctatctggtgaagacgccggcgctcggcgcgaacctcatgtcttgccccgaggatttctttgaacctgccgttctggcggaaaagctcgacggcaaatccttcaacaaggaaaacaagatcaatcccgcgaccgagtatggaaaagctgtgttcgcaacgcgggtcgtgaggccaagggccgggtcgatcaatttcgccggtttcaccccattgctcgaacggatcgaggccgtgatccgggactatgcggcacgaaaggccgcggcggcggctccagtgccagcgatcgcagccgccgctcccacgccgtgacgttgcgatggtgggctttcgctgggtgtagaagcgatgggacgatttcggagtcgcgttagctgcatagctaggttctcgcgaccgatgagatcccagaatcagattgctggcacttggtagagtgaaaagcccgcgggcagcgaggccgatctccaatccatcgcaatagctacgctgtaacgcgcgcgggtgagcgcaacataaaactttgctcggctttgtgccgccagcttgctgtccggatcggcaagccattgcttcatcggatccgttggcaggatcacgacgtggtcgaatccacgtcccttggattctccaaagttcaccgcctgcgacgacgggtcgacgcccctgctggtgaccttgtcgcgcagctgcacgggtctgacggtcgccagataatgatcatagtctgcgatcctcaagatgaatacgccagcgctggccggcagagggcgacggcacgaggcacactcgcaagcctgagtggcagcaaacccggggaatagccgtgacgacaccgcacagatggcctcgctgttacggtgcgatcggttcaggcttacctcgtcaatctcgatcttcagctttttgggcagcgaccgtaaaaagtctgcgatgccgccgtcggcatattttgcgaagcggcgctcgttatgggtcaggtaggtcacctgccgaggatcgccaaccatcagcaggcggaccgggcttcgcgccagcgcttcgatgatgtcgagatcatagccagcgaggtcctggacttcgtcgatgaaaacgtgagggaacacccggctcagcctgtcgacgaccgcgccgccgctctgctcgttgcatcggatcaccaacttggacagcttgtccgagaagacctgtccacgccgatcaaaaaagtggtttgcgatgtctccttcgggccaggtcaccgcgatgccccggctgttggtgtagcgaatggccgactgggcttggaccaatgccatgcctttgaccagaaattcaaacacagcaccctgaaacggcttcacgccatgggtaatcaagagactgaaccaggtcatgatcaccacgttcgacggaacatggccaacgacgtcgaaaaatttctggcggatctccgcctcgttggattcggtgtaggtggtgatcaggacccgctggtccctaatcttaagtgcctcttcgacgaggtaggtggtcttgccggagccggctgccgcgatgaccagcctattctggccaatcacggcgcgatcgcccgggtaatgtagtcaggataggtaatcgccgttttcgaactgaagatggccagtgcgcaatcggttttgttggcgcgcatatgaaggtggagttcatcgtctgtcttggcagcggtcccgagcatcttgtttaaggcttctcgaccgttcgccttcaagatttttggctcaagcgtgttgtaattgaagggcttttctttgaccgtcagcccacccgtgtcgacgtcggggtcgaagcaaatcctgatcgacggttggccatcgaacgcggcgtacttcttctgcactgcagcggtgtcgccgtcgttgtcggtcaccacggccgccgggattttcaacgccagcgctagctcgaggaagcgcaggaaggccgtaccgaccgagatgacgtcaatcccgtcctgaataggcaagcgcccgccattggcgtccatgtaggcccgctggaccaccagttcgtcggagtcgccttccaccaggatcgccttcttggccaaagccaggcgcaaggtgtcgtaccctgcaagtttcttgaagaagtcgctggcctgcagctccgaaatccggactaccttgccctcgcgcagcacgatcagatggtcgaggccgagcttgttggccacgaagctgctgtgggtcgagatgatgatctgcttctcgccgtgctgggcagttaggtcagcgatcaattcgttgagccgagcgtgcgacagatggttttccggctcctccagcaggattgccgtggcctcggcgtttttcttggtgctgagggcgagcttagttttgatcacgcactgctcacccttgccgatgtactggaaagggatgaagtcgatgtaggtcatcagactgctttcccaggcggtctgggacgacagatcgacagagatggagacggacttctgactaattttggcggccttagtaatccgatcgttgatcagcttcaggttcttgtcctcgacgaaagcctccttcagctttcggtgcgcctgcgagatcgaagcgcgctcggtctcctccagcacgtcacggatgatccgcgagacatagacgtcggacccgttttgaagccgggcgctggatgaatcaatcagcgcggacttgatcggaatgttgcgcgaggtgatccccttgcgcgcgaacgaccgcatggtcgcagcatagtattctacgggaatggaggtcagctccccggccgccacgagcgcttcgtagggacccttgtaattctcctcgtcgaactcgacgcgatatatcacgccgcttgccttaatcttctcggaattcccgtcgccctcgagctcggccaactcgctcgagtctcccgagaagaacagctcaatggtgatcgccggcggcggtaagggtgacccggtcttcaggctggcgacgtacttctgctgcgcggccaaattaaagaggtagctggtcagatcgtttttgagcgggcggccgtttagcatcccggtcaagcccaagtggatcgcctccaggatcgtggtctttccggactcgttgccgccgacgatgacgttcagggcatcgttgagcgcgagagaaaacgtctcctcatagcacttgaagttggtgatctttaccttggcgatcttcatgcgccctcgatgctgagttcgtgaaacgccgcacccgcgaatcgcgacataggcgatattatcaccactggccaatccgacgggtcgttcaatctaggcgatcatcctcatcaacgagtccgccgggagcgatgggaatatcccccgccaacaacttttccttgctgagcaggccggcgtcctcaagcgcttccatgtccggcaggtcgcgtagcgtgttgaagccgaagtgcgacaggaagccgttggtcgtcacataggtgtagggcgcgcccggctgcgggctgcgaggtccggccgcgatgaagccgaggccgcgcaggtggccgatggtgtcgcgactgacctccttgccgaagaactgcgacagctcgctgcgggtgatcggctggtagtaggcgatgcaggcgaggatcaggttctcggcctgcgacagggacttgtcggcgccgccgccgatcgccgtccggatggtatcgccgaaattctttcgggtgcggtattgccagccgccggcgacggaaacgagctcgtagggccggccgcgcagctcgtcttggatgtcgtcaatgattaggtcgagattgcaatcgcggccgacgacgcgcgacagcacctcgcgcgtcaccggcgccggcgaggcgaagatcaccgcctcgacgcggcccatccattcgcgccaacgcagttcaggcggcaggtccgcgaggtcgaggtcgagatccgtctttgcgcgcgcccgccgtcccatgtcagagcccgtacaatcggaaggtcggccggccggtcagctcgcggacggcgccgagcgccaccaggcgctcgaacaggcggcgcatgctgcggtcgctcgcggtcttgccggcgcccgcgggctgcgcatcctccattatcaggatcgccaccatggtgtcggcgtccttgccgcgcagcttcggcgccgccgccagcaggcgatcggcgcgccgcgccagctcgacatagagatccgccgcgcttgcagccgcacgcgcataggcctgggcgcaggccctcggccaggcttcatccgccacgttggatttcacagccacgcgcagatcgccgcggcggatctggctcgcgatcagcggcaccgccatcggccatttcaggcgctgggcgagcatcatgtcggcgagccacagggcaagcggctcgctttgcggcacgaagcgcaggctggccgccgcaatctctgcggcggccgcgacggcattcccctgcccggtcatcagcttgtcggcctgggcgacgacatcctcgagcgcgtcgctgaagcgcacctcgaacagcgccgacaaccgcagggtccagtctttcgacgccatggcgctgcgctcgccgagatgccgccaggctttcaggatgcgcccgcccgggcccggatcgtcaccgtcgcggcgcagataccaggcgtcgcgcagcgccgcctcgtcctcggtgcgtccgccgtgccgggccagcaccgcggcgttcgacagcgacagccgatgccgccacaatgatcccaatggatgctcgctgcgcgcgatcggatggatcgcggcgagcgcggcgccggccgaaaacatcgcgtcatcaacgctctcggacgtcacgccctgccgcacccagcccggaaacggcgggaaggtcggnnnnnnnnnncgcttttcgccacccaaatcgcacaaaaccgccgcgcctgtcggaaaataaaaacgaccgataatgttgccttatcggtcgttttgctctttatataaagaatggcccaaaacgtcgagcagaagccgagaaattacgtcgatcgaccctccggaccgtcccacggcacggggccaacggctgacgtttcggcggcgcggccgtcggccgagctcaaggacgacctgccggatatcatcgacgtggtcatggagatgggaaagataccggaggagccgccggcggaagccgaagccctccgctatggctccgggcgttcgtcgttcggaaagccaaatcgttggctttccgccggcgatgccgaccactcctcaccccctccccttccggtcgtgnnnnnnnnnncatctcgacgcgctcgccgatcgggcgcgtggctatgtcgaggcggcgagttcagccaacacgcgccgcgcctacgcggcagactggaagcattttaccacctggtgccgccggcagggcgtcgagatgtttccgcccgatccgcaggtggtcggcctctacatcaccgcatgtgcgtccggaaaggcaacaggcgacaagaagccgaactccgtgtcgacgatcgagcgccggctctcctcgctgacgtggaattatgcgcaacgcggccaggcgctggacaggaaggatcgccacatcgccacggtcatggccggcatccgcaacacccacgcctcccctccccttcagaaggaagccatcctcccggaagacctgatcgcgatgctggagaccttcgaccgcggcacgctacgcggtctgcgcgatcgcgccatgctgctgctgggctttgctggcggtctgcgccgctcagaaatcgtcggtctcgacgttgccagggatcagaccgaggacggacgcggttgggtcgaggctttcgacaagggcgttctggtgacgctacgcggcaaaaccggctggcgcgaggttgaggtcggtcgcggctcgtctgatgccacctgcccggtcgttgctctgcagacttggctgaaactcgctcgcatcgcccatggccccctgttccggcgcgtcaccggccaaggcaaggcggtgggctctgagcggctgaacgaccaggaggtggcacggctggtcaaacgcgtcgcattggccgctggcgtccggggcgacctgtcggaaggcgaacgggagcaaaagttcgcggggcattcgctgcgcgctggcctcgcgtcctcggccgaggtcgacgaacgctacgtgcagaaacagctcggccacgcatccgccgagatgactcgcaaataccagcgccggcgagatcgcttccgggtcaatctcaccaaggcgagcgggctgtagggccaaaaccccctccccttctgtgccagctgcatctaggcatcacataggcacgacaggtagttacgaatgagttccatgccaaagtctgatacagtggggctgatggaatttctaggaaacgaagacgaatgaaacgggcgggcaacaatccgaaaaggcgagtggcacctcaagatctattgtccgacggcgcaaaggaggagctggctcttcgcgcgcgctatatcggcagcggtcaccacaaacgaaatcccgctgactacggccttgagcgtacaaatccacgccccacgaaatcactatgtgatcttcttcgaactgtgccactggcggaggcacagggactcttgcagcagggaattaacctcggaatggtaagcgagcttgcctttgacggcttcccgaagtttatctggtccgtggacatggaaggtgaagtttatgaggccaagacggatcctatgaccacaggagtctatcacggctatcgcctcgaagaggaggacgatatgcgtgacaacgtgaaagcgatttggaagcagagatgccagccagctggacgatagcggcggattgggagtcgctcgacgtaggctcgccggaggagcgggcctgctttgccgcgctcggcatcaaggcccaaggcatttggttgactgagggaaacgacgtcctggccaaccgtcttcgtcagtcgcccctgctttccgcctatcacctagccgaatggcttgcctggaactggtggcggctgcgttgggagcctcgttccaacgcctacgactggccgtacgctcaccgtatggcaactatcggatctgggtatatctggccaaatattacgatattctctgatggggagcggatcgcacttatttccaaacctacaaccgagcgtccgcaaactccgttccgatacatcgctgaccacgctgggatcttgcccgcgagcgaattcgagtccgaacttgatcttttcattggtcaagtgatcgaacggttggattgggcatcgatatctggaagcaatcttcagacgatttgggccagcgtttgtgaggaacgtcgggtgcccgagcttgctcgcgcccgcaaactcgaagccctactaggaagagatccagacgccgccgaaagcggggtcgtagaacaccttgtaaaggacatcgctgacctaggtgcgtcggccgtcgaggaactcgcagcggaacatggtcagagcggaaagatccttacgggcaatcatctccgcgatgttgccacgagctacggctttgacgctgctccgaaggacgtagcgcgcctgcctgctgaaattggcttacgtatcggtgggcagataccagcctaccgagttggtgcatcggcggctcgtgcgctgcgcgaacaggagcggttgggcgaaaagccaatttccagccgcaagcttgctgagatcgcaggcgttgatcaggccgtaattgacgatcgccgaggctcgcctgatatttcttttgcgctggatgaggttcacaaaaatgcgagccgagtnnnnnnnnnnnnnnnnnnnnnnnntgcgctccaaatggcgctccggccggcggtttgagctcgcgcggctccttggtgatcgtctagctcgcccccccattggacgcctgttgccagctacgaaggcatacacttatcgccagaagatgcagaggtcctttgctgctgagtttcttagcccattttcagcggtcgatgagatgctggctggcgactactccatggaaagccagcaggacgtagcggaacacttcgatgtatctcctttgacgatccaaactttgctgatgaatcatggccgcgttgaaagagacgctttcgatacggagctcgaatccgccgccgcggcgtagcgaagtgcttcaggc

SEQ ID NO: 345 - DNA, 2345 bp, Bradyrhizobium colbertium
  misc_feature (923)..(932): n is a, c, g, or t
  misc_feature (1334)..(1343): n is a, c, g, or t
cctggtcgttgaccgcatcgatggattcccgcgcgcgcttcgtggttgaggcggagatgttgcctggctccagctcatagagcgttcgcttcgccagaccggcggtctcgatcgcggagcttgcgatcgccgtcgcagtcagcacatcttccgcgaacaggtgtcggagcatcgtgacgacccggacctgcgactggtcaaaggggtcgtgccgagtaacgacataacgaaggaagtcctgtctcattgtagcgccagcatctcggatgaccgatatgagatcacccatcatcaacaagaactggctcatcgacatgacgtcgagcatcgcaggatgcaccgtcacgagaagcccggttgcggcatagatcgcacccaaggtcaagaagccaagcgaaggcggtgtatccaggatgacgacgtcgtagctatcttcgacctcggacaacacgaggcgcagccgctcgaaaaagatgctgtccgcacccgcctgtcgcttcgacaagtagcgcggcgtctcgtgctcgtattccatgacctcgatgtttccgggaatgaggtcaattcccgtgaagtaggtcggccggatgatgtcagtgatgggtcgacgctcgtcgtcgtagcgcagcgtcgcgtagatagtctcgttctgctgaacatcgatttcgggttgcgcgccgaacatcgccgacaatgacgcttggggatcgagatcaatcgccaggacgcgatagccgtggagcgccagatagtgggcgagatgcgcgctagtcgtcgtcttcgcgcttccgcccttgaaattcgcaactgcaagtatctgcaggtgttcgccggcccgacgatgtggcaagaacctcaaggcgtccgtgggacgttgtgcggcgaagagctcgcgaagctcattgatctgcgccaaggtgtannnnnnnnnnaggggaccttttccttcattggacatcaatttcagcgtcgattccgggatcgacgtcagtttcgacacctcatgcgtcatgaagtggcgaagacttttctgggcgtccgggggatacatttgctggcgacgggcctgcaaatgttcggaaagcattcctgcatgccggatgatcttatccgcggggtcctcggtgtggttactgttcacggcctgagcagtcattgccgattcattccttcgttggcggtcaatgggcgatttatcgcccgctgcccgccaaagctaggtcacgattctcggcgttcgtccagtcctttaaggttaataggtccttaacagccgcttccaacgaagcggtgaaacgcggcgcttcgttgagaatcgcgcaatagtttcttgnnnnnnnnnnttttcctacagccgcgccgcggagtttgagcggtcgatttccgtagccgccgcgcgttgcacgaccggcaagtggcgactcacccccaactcaatccgctcgttagggccccgttaattctacagaggatcgggatcgctcctctgtgttgatttgcctccgttcacgtgaaccaacggaggattcgacgaatgcgggcaattgcgattgatgccaacgagcaaggcggatcccagtctctgcttgacgagatgcatcagttgcgggctcgcgtgttcgccggccgccttggctggcaggtgaacatcgagcacgggcgagagcgggacgaatacgacgcgcttgacccgacctacattcttgcgctgacagaccgcggccaagtcgcgggctgtgcgcgcctgcttccgaccacgggtccgacaatgctggcccggacgttccctcagttgctcgctggcggaacgctcgcagcctcgcccagaacggtcgagagctcccggttttgcgtcgacacgagcggcgagggcaggggcagccgattcctgcacgaagccacactgacgatgttcgcagggatcatcgagtggtcaatgtcgaacggctatgacgagatcgccaccgcaacggacgtgcgcttcgagcgcattctgcagcgggctgggtggccgatgacgcggctcggcggcgttgagctcatcggcgagaccatgagcgtcgccggcacgctcccggccaaccaggtgagcttcgaccgggtctatcctccaagctaccgctcggatctgacgcgcgtcagacgcgtcgccgcgtgagcgatggcggttcacttccatggctgaacttcgctctcgtccgcgacttgttcgcaaactccaggatgcgcttggtcaatcgatctgcgcagccctcgatgaccccaccgtcgtcgaagtgatgctgaatccggacggccgactgttcattgaacgactcggtcagggaatggcgacggccgggcac

SEQ ID NO: 346 - DNA, 6552 bp, Bradyrhizobium colbertium
  misc_feature (285)..(294): n is a, c, g, or t
  misc_feature (358)..(367): n is a, c, g, or t
  misc_feature (6046)..(6055): n is a, c, g, or t
tccgaacgacctcggtgaagatgcggaagggtgcgacaggcagcggccgcaggtgcggcttctcttcctggaacatagcctcgacctgacggcgcgtgctgccgtggatacgtttggaagcccagttctcctcccagtgcctcaagaactcgttctgggcttccagtgtctcgaagcgccgtccggccagcgcggtgccctgggtatgttgaatcgcgttctcgacgctccccttccggttgggatcggccacgcgcgcgggatcggcgaccacggcgtaatgannnnnnnnnncgcgacccgttggtctacgacctcgattgggacgaagacgaacgcctcgatgcgtggtgtgccnnnnnnnnnngcgctgccgccgaccctggcggcggcggtcgcggccgacgcgtggagcgtgatcgagccattgcagcacgccctctggctcggtcggcttctggccgccgcgctgctgcgcgaacgcggcaagagccgcgcccaccttccctgcctgcacgatggcctgaaggcgatcccgcgcgagcggcgacggccgcgcgacgcggccggccgcctcggcgtccagctcgaggcgatcgcggccgcggcggacgccggcctcagagatcatgatcgctggctgaccgcccgcacgctgctcgcccgcaaactggctggccgccgatccacctcccggctgccggcgctgctcgactatgtgttgacccggccgatcgcctcggccggcatgattgccgctgaactgaagattacgccgcgagcggcgcaggacctggtcggcgagttggggctgcgaccggtcccacggctatacagatatatcggtccggggagcgaggcgatggcgttacttcacattccacttaatcaaattgaagaacaacatatccttgaactggtcgcgaccagggcgccggagacgaacatcattgagtacaagcgggagacatacggcaactccctgcgtgacgaccttgagttcttggcagacgtatcgtcactggcgaacacttccggtggcgacctcattattggtatcgccgcgacacaaggtatccccgaagcaccagtgccattcacaggcgacgttgacggcgagataaatcgtcttgaaagtcgcgcccgggccgggcttcaaccccgcatttctttagaatccagggccgttcccgttcagggcgggcatatcctcgttctgcgcgttgcccgcagctacaatccgccccatcgcatcatccgtgagaatagcaaccggttctgggctcgatcgacagccggcaaatacgaaccgaacgtcgaccaactgcgcgaactgttcacccttgcccctcggattgccgatcagacgagagagttcaggacgaaccgactcattcgcatcgcttcgggcgacgcgccggtcacactcatgctgtcgctttccatttaattatgcgaatcggacgtcaacgatttcagcatgttgcccgagcagttaatttgagaatgggcatttaatttgataatccaacttggactttgtcacttaatgtgagaatgaggtttgcgatggttttcctcgcgagcctgctatgagcgatccacttccagacgagattgaggacgtactttgggatgaagcgtgccgacggggggatgcgatccgcagctttctggagcgcaatcctgacggcgcaacggccggagatgtggcggaactcgcggctgcgctcaatcttagtcaggcgacagcataccggttgatcaagctgttccgcgccggcgggaccatcctgtctctggtcgatcgtaaacgtgggcgaccacaggggcaccgcgtactggacgataagcgggaagagataatcctcaccacgatcaaagcatattacctgaagcggacccggccgacggtttcgcagctggtccgcgatgtgcagacgaactgcatatcggcggggttcaagccaccgcatcgccggacgatagtggctcgccttgaggacatcgacctgcaacagcgtgccaggcgacgcggcgaacagaagatcgtcaaggcgacaacgcccgttcccgggacgttcggtgcctcccgccccctggagatggtccagatcgaccatacgaaggccgacgtcttcgttgttgacgaggagacccggcagccggtcggtcgaccgtggctgaccctggcgatggatgtgtgcagccggatggtcaccggtttctatctcaccatggacgcgccgtcccggctgtcgaccagtctgtgcctgttgcactccgtcttcgacaaatcggcatggttgagagaacgcgagatcactgagccttggcccgttgccgggctgccggacacggtgcatgtcgacaacggcgccgacttccgcagccgggcgttcaagcgcggatgccaagacgccggcatcgccattgagtggcggccaccgggtgagccccgcttcggcggtcacatcgagcgcctgatcggcacacagatgggaaggctgcacctgctcccagggaccacgttcagcaacgaacaggacctgggagactacgactcgaagcggcacgcggcactgacactgcatgaactcgagaggtatatcgcactcgacatcgtcggctcctatcatcattcgatccatggtggactgggccgcccgccgattgccgtctggcgagaccatgagggtgagattccacttcgactgccacaagatcgaatgcgcttctggctcaccttcctgcccgaacaggagcgaacactacggccgaccggcgttcatttgttcggcctgcgctactggtcggcggcactcagcgcagacgtcgggcgttccgaccggcgcctgcttgtcaaattcgatccacgcgacatggcgcgtatcttcgttcgacggccttcaggaaacttcgtggaagcccgctatgccgacttgacgttgccttcgatcaccctgcacgaggcggtgaccgcgcgacgcaccctgctggcgaaaggccgccgtgaagtcgacacccgcgcaattgtccgcaccgccatcgcacagcgggaattgctcgagacggccaccaggaagacggcagcggcacgacgcgggacaacttcttcaaaatcgaaggtggatgatcggggatggggctcgctccgcggtgtcgattccagcaaacctgtaccctttgttgaggatgcagattgagctggagtaaaaatgaacgacgaaatctcccatctcaccgctggagctgtcgcgctcctttccgaaagcgatgaacgccgtatcagagccatacggtcacgccgctgggtgctctacccacgcgccaagcaagcgctcgaccggctgagtgcgctccttgatcatccgcgaggcacgcgcatgccctcggtcgcgatctacggggacagtggcatgggcaagaccatgatcatgaagcggttccgagacaagcacccaccgagcttcaatcctctgacgggcacactgaagacaccggtcctggctatggagatgaccagccgcccgggcgagcgacgcttctacgccgaactgctcacccttctcggcgcgcctcaacggccgcgcgccgacattgcccagatggagcaggccgccttgcggattatggaagcgatcggcgtgcaggtgttggtgatcgacgaagtgcacaacatcctcgctggaacctaccgcgagcagcgtatcgtgctgaatacgctgcgcttcctcagcaaccgactccagatctcgctggtctgtttcggcgtcaacgaggcgcgcgaggctatcggtggcgacgttcagcttgcgcgccggttcgagcagttcacactgagccggtgggccgcgaacgaacagttcgagaacctggtggcgtcgatcctgcgcaatacgccgctgcgtcggccctcagttctcacggcgaaatcgctgcggcgaatgctgcagatcacagaaggcatcacagccaatatcttccacatgatcaacgttctcgccatcgaggctgtcgaaagcggccgcgagcacatcacagacgagatggtggagaactgggagcctgagttcgacgccgaggcggcattcgcatgatgaagcacacacggcagttgcctgtgcggttgccgccctaccccgacgaactcctgtcctcctggatcaaccggcatgcaaccttctacgcagttccaccgctggtcatgttgcggcattgcctgccggaggcctccacgatgcgagcagccgatctccatctgtgcaatgatcaggaaatccgcttagccaacatgtttgccaccgagccggccgtcgtgcatcggatgaccttcacaaatgtcgcgcaatcatcgcgtcggctcatctccacgcggccaacgcaggtctgcccaaactgcagcccggctcacacggaaccggcgtcaatcctgcgaagccaactgctcggatggcgcatcacgtgccctctgtgtggaaaccaaccccggggtgccggcgagcgcgaactcccctcccttttccagcgatatcgcgttgcggctcttcgtggtcaaaacctgctcgacgatgaagccgaacgcggcattcacacctgggcttcgccatcggaaatcgcccggcttctgctgatgcgccggataacgtggccaccgccgcgtgaaaaagacctttggcggttcagagttctcggcgcaatcatccccgatctcgatcatatcattgccgagtatcaggagcatcttcccacacctgcaaagccgatcctgccgcttcacctgcggccggctctgctggcaggggtagctatcatcgagcgtgccggaccggagatgctccgaatgctgcgtagtcacatgatgggtgacaacagggtgagattcaccgacgccgccgagaacattatagcccgagctcgaaggtcgagggcctcttctcaaatgcagttaatttgagaatccgaccgcctttattctcacaattaaatgccaagcatagatcaaaccgccgcattcttacaattaactgccaagcgacacatgcacaaggacgttctcgtcttgcatgtcgtgcccttctccgcatttgaccgtgacgctcctctcccgatggccgaactcgagcgggattacacgtcgtttcatccaattggctcaaggcaatcccaggggcttaagatcaacttcgacggctttcttgcgatgtcgaatggcgatcgcgccgcgaatgttgaacgtgcgtatgtgcaactgttccggggcgggatcgtcgaagccgtcgatggtctttacgtgcgggccagcggtcaaccgctgatacctgtcgtcgaggtcgagcggagcatcaccgcaaacgccatgcggttgatgcgagatctgtcagccattggcgcagcggcgccctacgctgtcctggcaagtttgctcacagtggaacagggccgctttaactttgctcatccgggtgatggtgcgtggtatgatcgaatgggttcctataccgaccgacctcaatatgccttcggcgaagtgatttttgattctgctcctgccagcattcaagcctgtgcggaaaggatgaggccgcttctgaaccaactcgctcaatctggcggtatggcagggtctgtcagtttccgagatgacgggactttcatgacgggacgataagggcgatccaacgttaggcgcgccatcgaaaacgcaagaaaagccccgcctcgcggcggggcccttcgtcgggacgatcagtcccggttcggccgggaccagatcagctgcaggccttcctcgccctccacctcaacgaggctcgcgtagatcgcggaggggaagctcggatcgtcgagcttgaccgagaggtagtcgcggtccgtctgttcggagcgcttctgccaggccgctcccagctcgacattgcccggagcgaggatgcggaagtgcgggcccttatccgaggggttctcgatgcggacgaagcgagccttgacgttcagggccagggtgcggatcgtgccggtgaagccattttaggtcagttggcannnnnnnnnncatgcatttcgcaacgaggctgcttgagcgaggcacgccgatgactgacatcgccgaccaagcgttcacgttcgacttggccatgaagctggcgcaggggcatatcctacacgatgaggagcgcagcgccttcatttttcccggcaacacgaccgtcaccaaggaccgaggccggctgagctgcacttgcgacgatttcttgaatcgtatcgcatgtcgacatatcgcggccgtggcgatcaaatttgatatgaacggtgcgggcaaggccgccgatctcgcgaaggttcatttggatggtcttcagcagcgactggcggcgttctggcaagccgtaccatattgagccgagatccaaacaactggcgcctcatctgtctcggcttcgaaccaagataggcgctcgaatttgcaactgaacgcccccgcacccgccgccccggcccgcgctcatccgcgcttacggagctagagcatgttgtttttgactggaatcg

SEQ ID NO: 347 - DNA, 1045 bp, Bradyrhizobium colbertium
caaggcgcgcttccttccggccgaaccctcggacaacgaaaaggctccgaacttgcgcgtgatgttccgcgatgtcgagataggtgccgcgtggcagcgaacctccaaggacaacaacaccgtctatcactcggtcaagctcgacgacccgtccttcccggcgccgatctacgccaacctcgtcgcagtcgatgacggctacgcgttggtctggtcgcgctgacccgcaggccttgcggcgcctcacctcaagcgaggcgccgcggcttctctctacgggattatgcggagcggcgcagccacaaaggcccgggaaagccgcggctaccagccaacgactccgcataatccgcgctacgcataatccacgtatgtggagcaccgcataaggccgagctgggtgcggcctggcagaagaccgccaaggacaccgagcgtgactacctctcggtcaagctggacgacccgagcttccccgctccgatctacgccaccctgattgaggtggagggcgaggacggcctgcagctgatctggtcccggccgaaccgcgactgaggctccagccagaggccccgccgcgaggcggggccttccgtctcaaaccgagcatgctcatgatcgtcgacgtcatcgaggaattgcgcgctgagctacgagcatgcctgttcacgcccgccgagcctaaagtgctcgaagccgaactggccgaactcatccgccagcgcaatgaacccttagcggaggacgatgaggggggcataagccgccccatcttcctgctcacggcgcaatcgttgccgcgggcctgctcacgcgttgagggcctccttgatggctttcgccggcgtgaatgtcagcttctttgaagccgcgatcgcaatcgtcgcgccggtcgatggattacggccctcgcgggctggtgtgtccttgaccttaaacttgccgaagccgacgatgcttgtttcggccccgctcgcggctgcatcggcgatggcctggaacacgccttccacgatggccttcgcctgtatctttgtcaggc

SEQ ID NO: 348 - DNA, 20114 bp, Bradyrhizobium colbertium
  misc_feature (9653)..(9662): n is a, c, g, or t
  misc_feature (10843)..(10852): n is a, c, g, or t
  misc_feature (14121)..(14130): n is a, c, g, or t
ctaagccgttgccggtcgaggtgaaggtgccgatggtcgccattgtcgtgtccattcagttttccgggccgcccatcgcggcctcgatggctggcgacagaccggaggcgatcgacccgcaccccgaaggggccggcacgcagtagagggcagccagggcacgactttcttggcttgcgcgaggaatggcgcgcagcggccaggggaagaaagttgtaaccggctgttgcggggataagagcgaggcggcgctcaagcgacggcgcccttcggtcagacatgccaatcgaggacgacgtgggtgtgccagaagaaacggccgaggaaaacgacaatggcgaccatcgaaaccttgaccgacgaaacaacccgatcaccgctcgcggcacacatctttcaactactcaggcttacgggtcgatgcccgaaatgagagggaaggcgtgctactctgccttcaagagagccacgcggcccgaaagtgaatcgggaggccgcgagcgagatttgctcggcacagcgaagacctgtgcaaagtcagaacgtcctcctcgaacgacggcacgcaaggccacaatcaggtggcgcagcacgagcaatgaacggactccggccctcgagcagccaacaaggccggatctctgcgctgaatcaccggatagctaagggccggcaagcgccggccccaatcacgttatgcgctcatcatgtatcatgctgcctcttcgacctcagcggccttcggctgctggtcgtgcagataggcgacggcgcgttgcgcatgcgcagcagccgagaagataaagcgcttctcactcgacaaaacttccaaccacgatgcgaggtagcttgcatgatcaggtcgcggttcgagttcgggagagatcccgagatccgcgcagaggaaacagctcccgagttccgcgacatatcctgacagtccagcccttttttgaaattttaccctgttggggatggtggtgatcatgccgccatctcctcggtccgaggctgctgggcatgcatccagtcagccgcctgctgggctttgctggcggcggtgaagatggcgcgagggtcgtccttgaggaggcgcaaccaggatgccacgtaggcggcgtgatcgggcctgggatgatgggcgacgcccaaatccgccaggatgaaggaagcggtcaattcggcggtggcttcttcgatcggcagccaatcgcgcttgaaccgttcctggaagttccggtcgagccggtgctttgcgccagtggcgtgagctgcttcatgtattaacgtgccggcatgggcggctgggctcgtgaatgccgcgtagtccggcatgaagatcgtgtcgatgtcgatgcggtagtgcgcattgtaattgccggtgatgatcgggatcttcagcgcatcgatgaactcgccgacgtgagtaaggcgatcgatctctggaagctcctcgatgacctgaggttcgtagccatcgacttgggcgacattgaacaccgtgaatgcacgtgcaaagacgcggcgacgaacgtcatcgtcaccatcatctgcatcgtcgttggcggccggctttgcctgcttccagagaacaaccgtcgttcctcgttcgcccttgcgtacctgcgcgccgatagccagccattgccgataggttccccagaggccgtcggcatagccatgagcttgcgcagcgatccagagtgcgagcacgttgacgccgcggtatcgattgcctgacgagacgttctgaggacgggtgatggcagtgccgtcgtgatgccagggcatgcgccattcgccggcgccagcttcgatcgcggcgacgatctcggcggtgatgcgggtatagacatcggcgcggtccgccgaactcgatgtataggacatgggagaatctccgcggccggcggagcaagcctctctcactccctcaaccggccgcccgattccggccctcctcgtcctctcccgccgcccgacagggcggccgtctttggttttgtgctgtctcatcatgatgggtgttcccgttcggccggggtccgtccccggcggcggagcagccacctgcgatgcctgaaagcgcgaccgcgcactcgcagagccgaagcgatagcggaggacggcgatcagccgttgcgcggccgtgcggggcatcgcgcgctccgacctggccggggcggacgccggcgagaaccagccggcgcggccgcaacctcaggtccggagctctgacgtcagttgctgcgatcgatatcgtcgaggacagcctcgatgcgtgcgagatcctgttgcagggcggagcgctgtagcgaagacaaccgcttctctttgaggacagctctcgcctcgtctgcggaacgtgcccatgctggccggtgcctggcggtgatgcaggcgtttggacaccgtgtcggttggcaaagcacggtcagcggcatcttgttgttgtcggcgttggttgcctgcttcaggcacagggcggtcccgggatcgaagaagcaatcggcgagcacgccgacgtgcaatgtgcgcgcgagactggcgagcatcgtgcgaagccgcgcgcgatctgcaattatgactggaagggggctaagttctaccgctgcagcatcaagcgccttcgatatgcgtggtgccgctggtccggaaagcgtcgaaccaacttgccgctcatcgaagtaaaccagcaggtcatcgagttgcccaagagcacgctggttctcgacctcggcgcggaagccagacttgctggagccggcatagccctcgaaggccgcgacggaggcatgcttatactggatcatgccggcgatcgtaccgaagggacggttggcgatatgccatgcaatcgttcggcgaaattgccgtgttgtgattcgccaaggcttgccttcggaactgttgggaataaccggctcgttgatcgtgccgaacagttcattgaggtgatcgcgataaagattgagctggcgtactatctcggcagagaggtgatccttgcacacggatttagcggccaggaccggccagagtgtcgtgaggccgcgggccgatgcggcctggaacgagaggcgttccagcacaccgatggccttggcgacaggctcgatcgtgacccaatcggctgcttcgccatggctcgatttgcctttgtaggcaactgaccggacgcgatggcgcatgatcaggccatcttcactgcgggatatagcaaggcatccacgctgcattgcctgaacttcgcagtcgcgcatgccggtcagatacgcacacagaatatatgctgctgattgcagcatccgttcttcctgggcgagcgtcttggcgtcgaatcgaggtcgccacggaaggcccgtctcgggcagaagagagatgcacgtatccatgccgccagtctcaacgccgagttggcgtatggctgcatcgatcagatcgggcgctccactcgcaagctgaatatgcatcctcgactctgcgcgggcatcgatcccgatatgaagatgaagcaggtgcgagttgacaggaggcgatacgtcccctgtatctggaagccgcatagtggcgccattgtgagcggtcccccagatcggcacaccgcgctcttcacgtcgtcgccgctcaaagtagtccatgagacgccggcgctgtcgggcacggcgctgtttgcggtcaagggcctgatctgattgaacaagcttggcgcaatgggtctccaatcgatcaagctcgtcgcgagcggcgaggatatcgggcgcaaactcggtgacgtagcggatcgaccaggccaacagtggggcgatgacttcttccggcattcgtggggtgcggttctcgcggacgtgacgataaccagcgacgcgggctggagcgcgtccgctccacggctggaaccgcagccctccggagggaagatgatcgcgaaaagcatagaggtcgaccggcacctcgagaaggtgaccgacgatgacaggccgtcggctgcaaccggtctggagatggcgcgcgtagcggtcgagcaattgctgatcgatccgcgagagatcgacggcgctgagttcgccgcggacgaactcgaagaagcgacgcgctcggttgaatatctgccgaacacagacaggcgggagcttcttgcgatgaccagggagatcgacgttgagccgggcatagagcagttcccggattgcttcgcgggtaccgatatcttcgaccgagccgaaatgtacggtgacatggcaacggcgggcgttctcgcgaaataccgccggcccgagatcccagcttgcatcgccatagcgggacaggcagctccgatcgaagccctgcttcagcgccgcggaagcaagaaccggacggtcatgcagatcctgtgggagcggagcgagggcaactttgctcatggccgcacctcgggcggaagatagagagattgttgggtggcctcgctgcgcgcttgggcgatcaaacgttcagagaagacgggcagaacctgttgtgtgatgcgcgcatgcgcgcgaccgaacttgatgctccagtcggccgcagagagcccggcgcgctcgccctcgataaagtcgagaaacgcgaggatcgctggcagcttgcgagccgtgatgaccgcgttgcggcattccaggcaaccccagaatggctgcggacagggtgagcctgcttcggcgaaggggctgttctgaaagcccgcgcacgccgcgagccagacgtcctgatctccatccaggagcgcgggaatgttattgttctgcacaggggcgtcaacaccctcgcgccaaagggactcgctgtcgggtgacagaacgatcggtcctgcggacgcgacaacatccgtgaacgcctcggcgacggtggcttcatgcaaagggcgcagtgacggaatatccgcatagtgacgagcggcgatctccggcgtgtggccgacggcaaagcgcgccatgtgcccttcggtcttgagataccagagtgccttatgtgttttgcgcagccgggagagaacaaggtgtagcggacggcgatcgtcgtcgacgatgccgtgtccagcgacccagttgtccaccaactgatgcgggtgatcgatgccggaccggagctgtcctcgccctttataatgatagacccagagagactcgaccggaagaaagcgccttgtaaagctcgtcacctcgatcagcttgcggatcaatccgccaggcgtgccgaggccgccatcacgaactcgcagacgcttctgctcggcaccacgcgcgcgacgctttatgtagctgatctcgatcgtcccggactctgggctctgcaaacaatcgatggtcagcgtcttgcagcattcgatctcgagccctgtctctaatgataggaacgtcagcagtggcggcagatcggttgcgagcaaatgatggcggttatggacatcttcggaaaagctcgaaaccggcaggccccgtcgcaggcgcatgaagtacaggcgtttgaaggcgaggtccgagtggtcgatcttgccttcagcggcaatcctggcttcaacatcggcgactgcgctgcggaggttggaatcaatggcttcgtcgagcggacggccgatacgtcggaatattttgccgatatcggcccgagccgcgtcacgtagctgacgagcgacgaacggactatatgcgtcgcggggttgcgaccgtcctgcggattgcgcgctggtgtagctcaggcgatggcggagcttatcgtcgagaaggccgggttgatcggcatcgatagagcgcagcgccagaatcgccttcgcgaggaccgtgtgccgatggatcggcgtcatgccgccggcctcaagggaggcttcgaatccgtcaatatcctgcgcgcgaagatcagccggcttcgtggcatgagaatgggctcgcaggtatgcgaaaaacttatgatatgctgtaatgtgctgcatgatggtgcagcgcgctcccaacgccccgccgagttcagcctgtcggcgaacagcgccggcaaaggctatcgcaagtgctcgcgggctcaggctggtgagatcgacctcgacgatcccgccatgacgcgcctcaatgttgaagcgcagtccgatcacctggtcaccggcatgagctggaacaacaccatctgcgggcacaaaacgaactgaagttcccttgcgcggccggcctctcataacgagcgctccgagggaagcagcgccagtaactcctcgacggcggcatcaacggtatcggcgcgcgaagcgatgtgatcgagatagatgtaggtcgttgcgaggctggcgtggccaagcagccgttgcacttgctggagtggatcgccgaggatctgccgatatccttcgatcgggccagcgggcaacgctgcatctcgaatccgctgctggatcagcatcgcgagcatatgcacggcaaaggtatggcggagctggtgcggcgtgatgttgacggaaaagctgagagacctgcaccgctcggatgcccgggcgaagatcacctcccaggagttcggttgaaccggcaatccgacttccgtgagccacagcacggcgggctcgcccgctgtaccgtcatcatcgcagacgatggtcctgctgcgctcttcggggctcagcagatcaagaacgacgtcactcccgtcgagcagtcgcaaccgggaagctgaccgctccctgtgaacgaagatcgggcgttcgtacgagcgccagccggagcgttgtcggaacttagtgacggcgtgagctcgttcaaccgcgatgtaggcccgcgcctgttcaagcagtcgaccggaaagaagaatctggcgaccacgatcgcccttcgtcagcgcgtccggcagatcgagccatacctgtcgagctgttcgccgatcgacggcagcaaggtcggatgcaaacagaaaggaggcttcctccagccgaaggcccgtcgtcacaacgaggtcggaaaacaacgcattgcgaatgccgttgcgatcacgcgctcccggccgcgctccgccatcaggcataagccctctgaggccgacgtcccaaaatacccggtagtcatcgagcgtgacaaagctgacatctgctcgacgagcagccggctcataggcgtcattgcgggctgtaatctgcgcacgccggccgccgtatccttgcctccaaaccgagcggtgcgtgaacggcgcttcagggagcaagccttcgcgaacgccccaacgatagagccgatcgagacaggcaacagctcgattccaggacgccgcggagatacgttggccggcctccgtccggcgacgaacgcgatgataggcaaggacgtcgcgacgatcaccttgccatacggacttgccgcaggcttccgaaagaaagcggacccagaccaggacgtcatagccatacgcacgaagggagtgccgtgagcggacgccattgaggggaaggtcgcggaagaaacgatccagatcaggatcgtagagtgccccgtcccgcaggatcatagggacgtgtgcatcaaggccgtcagccgatcggcgctcttgaatggtgatgttcgaagccggcgctacgttgtccacaagttgttcaaccttcccccggacccccatccggggagccagcatcaacgaaggagttcaacttgcccggcgctatccaggccggccgtcgccagctatgtgggaacgctacggccggcggtgagcaccgcaaagccgtccgcccgctacggcgctattggatggcgcgcgtgcggacggctttgctccaccgagctcaccacaagtggggacaagacctaccgcctccgtcagtcctgttgcatcgacgtaagcaagacgctgagagtcggtgcagactgtcaagataaggcaatcaactcttcgcgcgcgcgttcgctccgatccttgctgtaacggctgagatcgcgattaacgcggtgagcgggagcggtccagtgcacggtctcatgggctctgacggcgacataggaggcggtgtcgcgaaaactttcgatcgtcggcatctgaatgtgatcggacgagggcgcgtaaaacgccagcgagccaccatgccgaacaatcgcgccggtattggcaaagaaagcgtcggcgctcgcgttacgctcgatcgttgatgcgacagcggccggccgaccgtaataatgctcgggcaagccatcgatttgatcgacgcaaaacacggtataggccttcaggaaggggatatccctttcgacttcgtcgccgtgagcgtcggtctctgtcttggtgaagcggctcgcataacccacggtgctgccggtctcgcccttacggacgtgcgcgccgagttcgctggcttgcttgaacgtcatccagatcggagagctgaagccgcgcgcgacggcttctgaccaaagcagcacgacattgatgcccgtatagggctggccgttgtgtcgcagcggtcgcgtgatgtggcctgccatattcgcggtggcccaaggttgaacccaggggcgcacgccgcgttcgagctccgcgacaatgcggtccgtgatgcgggcgtacaggtcgcctcgcgtcttttctccgttcctgttcattttaatgactccgttcgggaggccgcgcccatcgcggctcctcacgggggccgccaacgccgggcccaaggtccgcgcacccgcagggccgaagcagcgcgaaggacggcaaagccgttgcgcgggcatagggtccggcgcaggaccacggaccgggaggagtcgacgatggcacgcagcgcgggcaggcgccctttgttgcagcggcggcacgaaaaaagggccggttcctccagaccggcccgcgaggtggctgcagtggaagaggcgcggggccgaggccccgcgctgacagttagtcgaacgccgacatctgagctttcgccgccttccggccgacggtgtcggtcgtgttgtcgacaggacgttcgaaaggcttccaggtctcgccgaccactttttcataggcagcgacggcgccctcggcggccatgcgaagggcgtgagactgaacgcccatgtcggcggcgaattcacgcttgcgctgtgcctggctatcgaagccgaccggaccatcgaggtcctcatcgcggccgtcgttggcgagcttggcggtcgcatctcgcgcttcggtaactgcgcgggtgtagaactggccggcgccgtgcgcggagccgacataagcgccgacgatcctttgaaggtgaatctgcattgcgcgttcactcaggccgtccttgagcgcgtccgcagtttcgatgatgagccgctcatgcagatcacggatgccgtcactgtccaggatcgcaaggccgaagctttcagagatgcgctgtgcctgtgccgagtcggggcaggcgagccggaccatttcgagagtcgtgcccttgcgaagcgggatgacgcgggcgctggcgcgagaggaacgagcaggtttggtcattggtgaattccttatctggtttcgccgtcggttcgagccggcccctgccggacctcccttcgggtgcggtcgccgagcgccgccgggatgagggccgcttcaaggtccggggaccgccaggcgagcgaggtccggctgcggacaagcagggtccagcttgctggggccctgcgccggacgcggcnnnnnnnnnnaggttcgagccagcagatcgccagcttcgcgccgtgctcgagttatccgcctgagcggaccgcaaggtcggcttcggctcggctaggccgcagcaccatggcgcttgcccggacgacagtcggcggagctgcgacattcgtccttgcgatgtgcgcgctccgggtcgtcatgagcgggtcgaaactccggcgcgcatcgggcccgcagcgtctcgatcgcgacatcctgccgggcgagcttgcgcgacagcgcgtcgatctccggctggcgctctgcggtgatcgccgcaaggttcgaacgatagcgttcgaggaaagcgctggggtcgggcggcttgccgccacggtatgcggaccgcttgcggccaagctgcggaatcagcgccgtcatgcggcggatgatctgccggtcgatcatgtcgagctggcgctgcgtctggcgccgtgcctcttccatgcgcgaaagctgggcgagacgttcggaggaagccttcatggcggcgtccttccctgccaaccgatgaagctcgacgggccggaatagaccgggtggcgggtctcatcgacgacaaagccgaagcggccaatccggtactcgtcggacgggatgaggaaacgtcgctcctccgtccccgcgccgcgtctgccgcccggtgtggcgacgacttcaacaaagcccggctgctgatcggacgtgatcgccgacacgacgatccaattatcggtgtgctccttctcgaaagcgcgccgatccttctcacgggattcgccgggctgcagcacgatcccgaagatcacctcccacgcatcgggccagctatccttgatcgtgcgctcggcgcagcgccgctcgtagccggtgaagagatgcgggaaggtgatcgccacgatcgcccaggcctcgtcttcctcgtaccagccgcccggcgcgcgcagtacagggtcgaccttgcggttgcgctcggccgagagatggaagccgccgtggcccgccgtcgaatggcagacaacgccttccgcatagacggttgcaccctgcgacggaccccatggcgtgttcgcattcgagccgatgtcgcgacggccgagcgcacgcttctcgcgctgatgctcggcgttctccgcgacctttgtccgaaaggccgcctcgtcggcgagctcgccggaatggccgtagaagnnnnnnnnnngacctcgggaaattcagaattcgaatccggctcggtggtgagcggtgagggcgtagtcatacggccgtcctcccctccatgacgtcggctgcccgcgaatcggcggtcacctcgtcgagaaccgcatccggatagccgtggctctgcagccagcattccgcgtcggcgcggctgctgccgagatagacgagttcggcgtcctcgccgggtcggttgagcacgcggaccgcaccgatcctcgggcgttcggttacgacgaacctcaggtcgctgtcgaccgagaagctccggtggacgcgaagcaccacaacgccgccgccgccacagtcgccggcgtgcagtgtgatagtggcggcgatgatggtgttgccgacgcggtgttctgcctgcttgcggatcagcctgccgccgctgttgcggtgttcccaggccgcgagcttcttgcggtgccgctccggcggccgcggcgtgccgtcggaaaaccggatgatcgctccgagcgggacgaggtcgtagatcaactgcgcggacatggacgttctcctgttcatgggtgttggaaacgaagccgccgccggctgggccggcggcgggggtgtcattcggattgtcgatggcgtgcgggctattcagccgcctcacggaacgcttcgtcacctaaggcttcgccgtcgtcctcgtcgccagcgtccggctcctcgacctcgtcgtcggcctcatcggcggccgcgacggcgttcttcgccagccaggccagcaagttgaccttgtccggagcgaacagcgctgccggatggacaaggcggccttccttgaagtgctcgaccaaagcggcgcgggtgtccttcaccttctggcgcgggagaaccgaggtgtccttgcacgagccttcgagcgcggcgcgcgacaggcacgacaggaagtcgtcggtgcccatgttcggcaagaagttgtccgcgccgaccacctcgccggcgacgcgcgcaacgatgccgctgtcggtgcggttttcccggcacgagagaacctcaatgaggaccgagcgcgcagcgacgcgcagcgtgtccatgtcgaggacgagcttgccatcctgatcgaacagcgttgcggcatggcgcgcaatgcgccggttgccgtaataggtgccgccgctaccggaatcgaccgagacgttctggcccgcgaacgcgaggatcagcagcgccatcagcgcatcgtcctcgacgggcgcgcgtgccagcgcctcatggagggcgtccgttcggaagtcgccgatgatctcgacgcccttgcgcgtcacgtcgggacgcggcttcgagaccgctgtgctctcatcggcagcgtcagtgccggccgccgcgcccttgtccttcgacttcttcgccgcaggcatgcggtaatgcacgctctgcacacggccgtcacggtcgagatacatcgccgtgcaatccgacttcgacggcttgccgtagacgcgctccgccttcggcggcagcttgacctcgccccagttcgtcgtctcggcgatgatgccgcgcttcggcaagttgttcgtcatccactcctgctgcgcgcccaggaacgcttcgacatctgtggtgtagcggctatcctcgtccgccggcgcgaacaggtcctcgatccactggatgccgtaggcctgggcgaggtcgtcaccgaagctggcgtgacgagcgtacatgcggaccttggtcagggcctgcgccacgctcccccacgacacctgcggatccgccttggagggcttgtgcttcttccaaacctccttctgctcatcgtgcgacgccgaggcaatggtgcggagctggcgctcgtcgggcatgtcgcccttggccatgtgatcgagcatgatcggcagcacgttggcgagcaggcggagcttcctgatctgccggacgggcagggtcaatgcgacgccgattgcctcttcggtccagccgagagcgacgagacgttcgatcgcacgccactggtcgacgggattgagtgcttcgcgcgcgatgttctcgatcatcgagcgcatggcaccgttgtcgttcgccgcctcatcgacgaggacgtcgatctcctcgaggccggcggcgatcgcctgcttcacgcggcgatgaccggcattgatgacatagccgttgccgccgccggtctggggcgtgatgacgggtggctggactatgccgacggccttgatcgtcgcgagcagtagggcgtcggcctgcggcgtcgacttcgtctggcgcatgcgatcgggattttcgttcagcgcacgcggatcaatcttgatgagttgcataggatttttcctgttcgggttcgcggaccgcgccttgccggcccttcctcgtcttcttcccgaagacaccccccggcccgcggagcggtcgggccggcacaatcgcggccgagcatccctgccaggccggacaagcagggctaacagctctgcgaaggacgacgggctgggatcgcgcaggcggcggttgagcgtcagcgttgccggcctgaccgctctgcgagagggttttcccttcctccctcatcatgctgcgattgcgctcccgcccgtgccctccacatccgtcgcaagggcttgctcgacatcagccaactgccggcgcttctcggcaagatcggctgcgaatgcgaattcgccgtcctcgcgcgaccggtacgaggcgagccggcgacgtgcgtcggcgagacgctggcgatagcgctcccgctcgccctcaaaatcgtcgagcgcgtgctcaaggcgcgagatcgcaccgagcggcgtcaccgtgaccggcaactcgatctcatgcccggcgccggtgcggatcagcgaggtgctgtagcgatagccgtcacggccgtaacgctcgccggagtacgcgagatcgaacccgccgatccaggcgatgatggtgtcgccctcctgctggagctggacgagggtcaggatttccttcatcagcgcgcggccggcctccttgcgctcgacatagcgcttgccggccacggtcgcggcgaaggcgtcgccggccgtcggaacaaggcgctcgatatccttgccgacctccgcgattcggctcgtgcagaacgcgatgtcgcgctccgcgtcgcggatctgccgacggacggcgtgctggtcgtcgatatgggccgcgcgcagacgctcgagccgggcgatgtcggcttcgagcccggcctttagcatcagccgctggtcgccgctcgcgatcgccttggccatcgcgaactggttnnnnnnnnnncttcgccaaggtcgtcgagccgacggatcgacgtgtcgccggagagcgccgcggcgatgaagcgagccttgcgctcgttattctgccacatgctcgcgtcgagcgagccctcggtcgcataggcgaagatgtcgatgacgtcgtgctggttgccctggcgctcgatccggccctcgcgctgcgcgatctgcgacggcagccacgggacgtcgaggtgatggagcgccttcagcctgagctgtgcgttgacaccggtgcccatcgtgtcggaggagccgatcaggaagcggaccttgccggcgcgcacatcgccgaacaggcgctgcttggcctcggacttcttgaagtcctgcatgaaggcgatctcggacgggggcacgcccatgcgaatgagctcgtctctgatccagcgataggccgagaagccgcgcgtcttctcgacgctgatcgttccgaggtcggagaagatcatctgcgcggcgcccggcagctcgtacggcttgccgtcggcgcgcacgtaagtgttgtcagacgtctccttccagatgcggaaggcgttgccgacgagaagattcagcttgttgttcggctcgttatcgctgtccggatcaaccagacgcaggtcgatcgccgcatgccgcccatcggtgatgaccgagagcaaaatgtcgtcacccggctccggcggccggtcgcgcgtctcgatcgccttgatccgcgcgtcgagcaggacctggtagcgcttgaacgccggtgtcggttttgccgtcaggatctggcgcttgcccgtcgagatcgccgggaccttcacgtactgccgcaggtcctccggcatcaccacgtcagcgaaggaccggaacatggcgatcaattcaggaacgttcacgaacgtggcgaagcgtgtgaccggcttgtatctgccggacggctggagctcgagctccgtcgagacgtcgccgaaagtcgaggcccaggcgtcgaactcgtggagtttgcgatccaggagtgcgccgtatccgagatagcgctgcaccgagaacatctcgccaagcgtgttggtgatcggcgtgccggaggcgagcaccagcgcccgcccagggttcttggtctcgacgaagcgcgatttcacatagaggtcccaggcgcgctgcgagccgttgggatcgactcccttcaacgtcgacatattggtcacgaaggatagtttgcggaactcctgcgcctcgtcgacgatgatctggtcgacgccgatctcggagatggtcaggagatcgtccttgcgggtggcgagggattcgagccgttcctgcaatccctccttcagccgctcaagccgcttgcgcgagacgcggtcgtcgctttcgaccttggtcaggagctgctcgtagagttcgagctcgtcgtggatcatccgctgctcgaacgcggacggcacgccgatgaagcggaaggccgaatgggtgatgatgatcgcgtcccacgtcgcggtcgcggcgcgcgacaggaagcggtgccgcttgtccttggtgaagttggtctcatcggcgacgaggatgcgggcaccgggatagagcgccaggaactcgcgcgccgcctgcgccaggcagtgccccggaacgacaagcatggccttggcgatcagcccgagccggcgctgctccatgatcgcggccgccatcgtcatcgtcttgccggcgccgacggcgtgggcaagataggccgttcccgaggcgatgatgcgccagatgccgcgcttctgatgttcgtagagcacgaaggcgcccgaggcgcccggcaatttcagatgcgatccgtcgaaggcgcgcggcacgatgttgttgaagcggtcattgtagacccgcgccagccggtcggtccgatccggatcggaccagatccaattctgaaaggcggtcttgatcttcgagagcttctccttcgccgcctcggtgtcgacgacgttgaggacccgacgttcgctgtcgccgtctttgatggtgtcgaagatctgcgggacggaggagttgagcgcatcagagagaagctggccggcgtgccgccgttccgtgccccattccgacgtgccagcagccatccagccgagctgccgggcctccacggtccacgacgccagttccggcatgtggtgaatcctgatctccgcgcccatcgtttccttaacgaaggccacgatatctgcggcgggaatccacggcgcgccaaggcgcgcggtgatgtccgagggtcggaggtcggcaggctgcacctcctgcagcgccctgacgttgcgctcataggccggatcgagcgctgccgcggcctccgccgccgcaagcttcgaccggaccgcgccggacagataggcgtccgccgtctgccacgagccgtcggccggatcgcggaagatggcgccgccgaggtcggcgatgacgtggtccgcgtcgcggtgcacgagctccgcgatatggccgggatcgacatggccgcgctcgttgagtacgacggctagcgcatcggcggcgctggtgatgacgggcggcgccggcggagcgatcacccgctcggtgaagatcggacccggcttcgccgtgtcggactcgaggtcgtaatcttcgatggaggccaccagccagcaatccggatcgtccaggaatggctggagattcggcctacggtgcgtttcgcggacctcaccggtctcgtcgtcctcggccgtcgacacgatggtcgtgttgatcggcccgaaggtgcgcacgaagttcgaccacacgatgcgcagcctgacctgcgcgtccttccacggccggtcgagctcctgacatttcagcacctcgcggaccgcgtcgcggatcgggatcagcttctggatgatccgagcgtgcttttccggaatgccatcggcgccgcggcccttgcgcactgagacagcaaccggcttcccgtcgaggatctgcatcaagccatgccggctatcgagcagatagctgccctcgcgcgccatgaggctcgccgggctctccgacttcgctgacgcgggctcgtgctcgccgtcagagacgatcacctccggttcgccgtcatagattgcgaccggaaggaggccaatcgcgtcgtccagcgcggtcgtgagatcctcgccgtcactcggcacacaggtgtaggtctcgccaaacgggccggaggtcagcgcgtgcgcgccgagcacaaggtggcgatggcacgcgaaccagcggttgacgcgaattgggccctcgtcctcggtcgccgggcgcacctcgtcgagctcgagccacgagaggtcgccttcgggctcaccctgcttgcgccgccggaagaacaggatgtcgaccacgacgtcggtgccggcatcggcgcggaagctaccttcaggcaggcgaatggcaccgaggagatcagcgtgcttcgcgatcagcgcgcgcgccgagccatccgccttgtccatcgtgccgtgcgatgtgacgaaggcggcgagcccgcccggcttcagaagcttgatcgccttgacgatgaaatagtcgtggagccgcagaccgagcgagcgcagcgcgcggtccgagcggacggtgcgatcggagaagggcggattgccgatcacgagatcgaatcgtgccggcagctcggtgcgcgcgaaatcgccggtgacgatccgcgcccggggctgcaacagccgcgcgatgcgcgctgtgacgggatcgagctcgacgccggtgacgtgggagacctcgcgcagatccggcggcatcagcgccggaaacagggcggtgccgatgccgggctcgagcacgcggccgccgcgccagccgaagcgcagcaaacccgcccacatcgcctggacgatgaactccggcgtgaaatgggcatactgcgtacagcgcgccagcgaagcgtagtcagcctcatcgaccgcatcctgcagattggccccgatctcgtcccagtccttcgcgaattcggcttcgcccggtcggcggaaaacgccattggcgagctctgaggcgccgaagccggtaaagcggatcagttgccgctgctcctcgttcgtcgcggggcgctcctcggcctcgatctgtgcggctagccgaactgcggcaatgctgtcgcgggcgcgctgtttccagccctttgcgaggccgcgttcgccggaaagatagaaactgtcgccgcacttgcggggaccgtcctcggagcgccgcgccgattcgatcgccggccttaccgaagccggcgtcgacggcggcggatcatccccatggtcgtcagcgccgccgaaaccggcggcgaaggctgtgacgccgaggccgaggctggaggaaagggcggtattgccgaagaggtcgagggtgaatggatcgtcatgcgccatgggaaatgtcctccagttgggcgcgcgccaccgtccgccggcgcgggctgcgacggacggcacggcgttgcgggagttgatgagcgggccggcgccaggccgggtgctgaaatgcgatgcccggcgcgaggccgggctgccgcggggcggggaggggaggtcaggctaagccgcgaccgtcgccggcagatggcggaactgcaccggcaacttggccgcgatctctgcctcggtgaggtcatcgagcagcttcaggaccgtgccgctctggccggtatagacgagtacggtgcggcggccgcgcatggcaagcggccagcgctcgccggcatagccgcgataatcgtcatgcgtgctcgaccagatgtgctcgagccgctcgtcgcgcgtcatcgcgcgcacgggccgtgactcgcgctcgatgatcgccgccttcatccgctctggcgacagccgatcggaaagatcgcaatagccatggaaccagcgccgccttccgtcgatggcaagcgcgaagaagatgctggtgacgctgcccgtcatgaattcgcgcatcgcgaacatgtcggcgcgcatgaacagcggtggcaggatctcgagcatgtagtcgtgctcgcgctcgttgacctcaaaccactctccagcgaagagatgctggcctacaccttcggccatcgcggggtcaccacgatggcggttgaataagcggtgcatctcgtggcgcgtcgcaacgccctcgaagactttgcggatgctgggggaggtgtgcatgggcggctcctcttggcctggccggactgacagcgcgagcgatccgcctgatctcttcgtcacttcagtccttcatcacacctcctcgccggccgcatcgaagatccggcgggtcaagggccgcggaacgcgggcgaagcttcacccttgacgcgccggtcgcgcatgcggcagcgctcattcccacttcatttcctctccctcattgttcgatctccttttcctttgctcaacaccaaggcgtcagagaaccactcatgcggaggccttggtgcggcgccgccacgcagcccgcgcgtcgctctcgcgcgctacatcaagagttagccgtcaggcccttaaatcctcattccagtcgcccgcgcacggccgcaatcggtcataccgcgcccttgcatccgccgcgacgacgcgaacacggtcggcgtagatgtcgccttgccgattgttgtcggttgctgccacgagccaagcgctggcgcgctcggcgaggccgcgaatggcgtcatcggtcgcgggcgaccaaccgccgccggtgctgacataaagggtgtcagggcgcagggcctcgatcgcggcgaggctcatggcatcgatggccgcctcggtgatacagatccgctcggactcccccggcccgaagcgaaaaagcttcttgccgccgttcgtggcgaagccccgccatgccggtccacgctcctcccagcctgtgagcgctccagcagaatcgatatgcgccgcccacatgctgccttggggaccctctcgcaaccggtcgctggcgaccgcctgcttcacgatgaacttcctccgaatgagtggacacctg

SEQ ID NO: 349 - DNA, 24436 bp, Bradyrhizobium colbertium
  misc_feature (107)..(116): n is a, c, g, or t
  misc_feature (1342)..(1351): n is a, c, g, or t
  misc_feature (1436)..(1445): n is a, c, g, or t
  misc_feature (1546)..(1555): n is a, c, g, or t
  misc_feature (2573)..(2582): n is a, c, g, or t
  misc_feature (3719)..(3728): n is a, c, g, or t
  misc_feature (5260)..(5269): n is a, c, g, or t
  misc_feature (5994)..(6003): n is a, c, g, or t
  misc_feature (6299)..(6319): n is a, c, g, or t
  misc_feature (7560)..(7569): n is a, c, g, or t
  misc_feature (9154)..(9163): n is a, c, g, or t
  misc_feature (10231)..(10240): n is a, c, g, or t
  misc_feature (11515)..(11524): n is a, c, g, or t
  misc_feature (11742)..(11751): n is a, c, g, or t
  misc_feature (13266)..(13275): n is a, c, g, or t
  misc_feature (14816)..(14838): n is a, c, g, or t
gccgttgcttcagcgccgggtcgatgccggtgcgtcgtcgcctgccgagaccggccgcgccgaggtcgcagcggctctggtgaaggccgatcgcgagcgcaccaagnnnnnnnnnncttcgcggtatccgtcgcagggcctccgcagcaggtcatgaccgtgatggaacccaagctggcggtcctcatccgggcgacggcccctctgaccgacaccgtgcgcggtctcgatccgcccccaccgaagttcctgacctgaaaatgaccgctgggcgcatcgcgctctgattccgtctttcgtcaggttttcatcatgttttcaaagtgcgtcacgcgtttcgcgtgcgcgacggcgttgctggtcagtccttggctgacggcggcgtcgcattcgcagaccctcaatctcggggcggcgctgcagcgcgcgctcgcgaccagcccccgtttgaccgccgccgaacgcgatatcgggatcgcgacgggccagcgcattcaggcgggggcgctcctcaatccggaactgagctacgaacaggataactcattcggttcgggcatctatcgcggaacgaagtcggccgagacgacgctgcagatcagccagcttttcgagctgttcggcaagcgcgaggcccgcatcgcggccggccaggccggcgtcaacggtgcgacgatcgagcgccaggcggtacgtctgcagattctgtcggaaacggccatcgcgtttctgaacgtgctcgggctgcagcggcggatccagatcctcgacgagcaggtcgccgcccttgagcggctgacgccgttgcttcagcgccgggtcgatgccggcgcgtcgtcccctgccgagaccggccgcgccgaggttgcggccgccctggtgaaggccgatcgcgagcgcaccaaggcgaacctggccagcgcgcgccgcgaattggcggtgctcatgggcgacacttccccgaaattcggcgccgtctccggacggctcgacgccaccacgcgcgcgccatcgttccagacggtgatcgccgccatcgacgccaacccgcaactggtccggtggaatgcggtctatgcgcaacgcaacgccgaactgctgctggcgcggctcaggccttatcctgacgttcgcctttccgccggatggcgacactacaacgagaccaacgacgacgcggtgcggctcagcctcacggttccgatcccgatcttcgatcagaaccagggcaacatcctctcggcccagcagaacctcgccaagacgcgggcggaacgcgaggcgaaccgcaacacgctgatcgtcgtcgctggacgggcctacgacaacgttcagggctcgnnnnnnnnnngttcggcgccgtctccggacggctcgatgcgaccacgcgcgcgccatctttccggacggtgatcgccgccatcgacgccaacccnnnnnnnnnntgcgatccttcgcgactccggcatcccgaaggcccaggccgccgccaacgagatcgagcagggttacggtgccgggcgcttctcgctgctcgaagtgttgnnnnnnnnnntcggtggaatgcgatctatgcgcaacgcaatgccgagctgctgctggcacggctcaggccctatccggacgtccgcctctcggccggatggcgtcacttcaacgagaccaacgatgacgctgttcggttcagcgtgtcggtcccgatcccaatcttcgatcagaaccagggcaatattctgtcggcgcagcagaaccttgccaagacgcgggcggaacgagaagcgaaccgcaacactctgatcgtcgtcgccggacgggcctacgacaacgttcagggctcgctgcgggaactcgcgatacttcgcgactccggaatcccgaaagcccaggccgcctccaacgagatcgaacagggttacggcgccgggcgcttctcgctgctcgaagtgttggacgcgcaggccaacgtcacccaggctcgtctacgggagcaggaggcgctgcagaactaccatgtcgccgttgccacgatcgaaggactcgtcggcaatcccttcgctctggcgcgggagagcgcacgatgaagacttcgagcgcaatcgtcctcgcactggtcgcggccgccgccggcgccttcggctatcgcatgctgacgcccaaggacgcgcccgccgcgacgcagcaggccgcgaagcaggacgcgaaggaggagaaggccggcaacgagcacgccgagaaggacgagcatggcgccgaccgcatcgtcatcagcgatgtcaagttggcggccgccggcgccaccttcgccgaagcgggtcctgcgaccctgaccgaaaccttgtcgttcaacggcgtgctacgcgccaatcaggagaccgtcgtccaggtcacgccgcgcttccccggtatcgcgcgtgcgatcaagcggcggatcggcgacgtgatcggcaaggacgacttgctggcgtccatcgaaagcaaccagagcctgacggtctacgatctcaaggcgccgatcgccggcacggtgatcgaccgtcagatatcgctcggcgaatacgtctccgagcagaagnnnnnnnnnnattcgtcgtggcggacctgtcgacgatctgggtcgacctctcgatctaccgtcaggatctcaggcgcgttcggatcggggacgaggtcctgatcgatccggacgacggcgcgggagacatcaagggcaagatctcttacctggcacccgtcggcgcaagcgagacccagacggcggtcgcgcgcgtagttctctcgaacccggacggacggctgcggcccggactgttcgtgactgctcgtctgatccttgctgagcggaaggtcgcggtcgccgtgcgcaccggcgcgatccagacgttcgagaacaagagcgtcgtgttcgtgcgcgagggtgacgacaagctcgaggcgcgtcccgtcgagctcggagattccgaccagaaattcgtggaggtccgcgccggcatatccgccggggaaaggtatgtcgcagagaattcgttcgtcgtgaaggcggagatgggcaaaggagaggccgagcatgattgagcgcctcatcgaattctccatccgccagcgctggctggtgatcctgttcgtgctcggactcttggccttcggtggctggaatttcacccgtctgccgatcgacgcggtgccggacatcaccaacgtgcaggtgcagatcaacacgcaggctccaggctattcgccgctggagaccgagcagcgcatcacgttcccggtggaaacggcaatgggcgggctgcccaagctcgaatacacccgctccttgtcgcgatatgggctgagccaggtgacggtcgtcttccaggacggcaccgacatctacttcgcgcgccagctcgtcaacgaacggatccagcaggtcaaggatcagcttcccgccggcgtggaagtcgccatgggccccgtcgcgacgggcctcggggaaatcttccactatacggtcgaagccaagccgggggcgaaggcgccgggcggcaaggagttcacgccgagcgatctgcggacgatccaggactggatcatcaagccgcagctccgcaacgtgccgggcgtcatcgaagtcaacacgatcggcgggttcgagcggcaattccacgtgctgcccgatccgggcaagctcatggcctacaagctcggtttccgcgacgtgatgacggcgctcgccnnnnnnnnnncaacgtcggcgccggctacatcgagaggaacggcgaacagtatctggtccggactccgggccaggtcgccaacatcgccgagatcgaggacatcgtgatcggctcgcgtggcggcgtcccggtacgggtcaaggacgtggcgcaggtcaccgaaggcaaggatctccgcaccggcgcagcgaccctcaacgggaaggagacggttctcggtaccgccatgctgctgatcggcgagaacagccgtgcggtggcccagcgggttcaagccaagctgaacgacatcgccaaatcgcttccggacggcgtcgtcgcccgcgcggtctatgaccggacccacctcgtcgacgcgacggtcaagacggtcgagaagaatctcgtcgagggcgcgatcctcgtcatcgtcgtgctgttcctcatcctcggcaacttccgggcagccctggtcacggcctgcgtcatcccgttgtcgatggcgatgacggtcaccggcatggtcgaaacgaaggtcagcgccaacctgatgagcctcggggccatcgacttcggcatcatcgtcgacggtgcagtcatcatcgtcgaaaactgtctccgattgctcgcggaggcgcagcatgagaagggccggctgctgagcctggaagagcggctggagacgattcgcaacggctcggcagaggtcatcaaaccgagcctattcggaacgctgatcatcgcggtcgtgtacctgccggtgctgaccctgacaggggtcgaaggcaagatgttcacgccgatggcgctgaccgtgctgatggcgcttgccgcagcggcgctgttctccgtcaccttcgtgcccgcagccgtcgcgatcgtggtcaccggcaaggtgtccgagaaggagaacttcttcatgcgcggcgccaagcgcgtctatctgccgcttctagaccgtgcgatcgccttccggggcgtcgtggcggtcttggcggctgtgatcgtcggcgcgagcttgttcgccgcgagccgcatgggtggcgagttcatcccgagcctcgatgagggcgacgtcgctttggccgcgatccggattcccggaacgagcctgacgcagtcgctagatctgcagatggcgctggaaaagaggatccagcaactgcccgaggtgaaggagttcttcacccggacaggcacggctgaggtcgctaccgatccgatggcgccgtcgatgtcggacgggtacatcatgctcaagccgcgcagcgagtggccggatccggagaaaccgaaggcggagctgatcgaggagatcgagaaggcggccaacgacatccccggcagcaactatgaggtctcccagccgatccagttgcgcgtgaacgaactgatttcaggcgttcgcagcgacgttggcatcaaaatcttcggcgacgatctcgacgtgctgcaaggagccgccagccaggtgcaggccgtgattcagggtatccggggggctaccgacgtgaagaccgaacaggtcgccggcctgccgatcctcaccgtcaagctcgacnnnnnnnnnncccggagaagccgaaggcggaattggtcgaagagatcgagaaggccgccaacgacattcccggcagcaactatgaggtctcgcagccgatccagttgcgcgtgaacgagctgatttcaggcgtccgcagcgacgtcggcatcaagatcttcggcgacgacctcgacgtgctgcaaggagcggccagtcaggtgcagtccgtaattcagggcatccgaggggctaccgacgtgaagaccgagcaggtcgcgggcctgccgatcctcaccgtcaagctcgaccggcgggctctgtcccgctacggcctcagtgtcggcgatgtgcagaacatcgtggagatcgccgtcggcggaaagagcgtcggcaagcttttcgagggcgatcggcgattcgacattgtcgtgaggcttccggagcgtctgcgcggcaatatcgaagcgatccgtgcgatcccgattccgttgcccgccgaagagccaggatcagctccgatcgccaagacggccttgtcgggagcgctcggagtacagcctcgctacgtgccgctgtcgtcggtagcgacggtcgattccgcgccaggcccgaaccagatcagccgcgagaacggcaagcggcgcatcgtggtgacagccaacgtacgcgagcgagaccttgggtcgttcgtgtccgaagcgcaggatgcggtcgcgcagaaagtcaagctcccggcgggctactggatcggcnnnnnnnnnncatcgaagcgattcgtgcgatcccgattccgttgcctgccgaggagccaggatcggctccgatcaccaagaccgctttgtcggcagggtccggagtacaacctcgctacgtgccgctatcgtcggtagcgacggtcgattccgcgccaggcccgaaccagatcagccgcgagaacggcaagcggcgcatcgtggtgacggccaacgtacgcgagagggatctcggttctttcgtgtccgaagcgcagagcgcggtcgcacagaaggtcaagctcccggcgggctactggatcggcnnnnnnnnnnnnnnnnnnnnngaccatcgttgttccagtggcgctgctgctggtgctgctgctgctcttcatgagcttcggatcgatcgccgatgcgcttctggtgttcagcggcgtgccactggcgctgaccggcggcgtgctggcgttgttgttgcggggcatcccgctgtcgatcagcgcgggggtcgggttcatcgcgctatcgggcgtcgcggtcctcaacggtctggttatcatcgcgttcatcgaacgactccggcacgaaggaaagtccgtgctcgaggccgtccatgaaggggcggtgacccggttgcgcccggtgctgatgacggcgctggtggcatcgttgggcttcgttcccatggccatcgcgaccggcgccggcgcggaggtgcagcggccgctggccaccgtcgtcattggcggcatcatctcctcgacgatcctgacgctgctggtgctaccggcgctttacgtgctgttccggaaggactctgcgccggcccctaagccggacaatgtcgacggcgctgcggtgggaagccacgcatgaccgaagctgcccagaagatgagacttcgggtcggcggaatggactgcgcggcctgcgccattaagatcgagaacgccgtttcgcggatgcccggggtgaggagcgtcgaagtctcggtgaccggcggcagcgtgtcgatcgatcatgagggggttgttccgcgcgaggcgatcagccggcaaatcgcagccttgggctacgtcgtcgaggacgaccggccccagggtaatgagcggccgacgtatcagcatgatgatggtgatgatcacaatggtcacggtcaccatcatgtcgccggcggccaggaaccatggtggcggtcgagcaagggcgatgcgacgattgcatgtggaaccgcattggcagtcgccttcgccttgggaaaggcggttccgagcatcgagaactgggcgttcctgctcgcgatgctgatcgggctggtgcccatcgcgaagcgggcattttcagcggcttttgccgaaacgccgttctcgatcgagatgctgatgactatcgcggccgttggcgcggtcttcatcggcgcgacggaagaggcagcgactgtcgtcttcttgttcctgatcggcgaacttctcgaagggttcgctgcggggcgggctcgggcgagtatccgggatttgaccaagctcgtcccgaagatcgcccggctagagcaatccgatggccaagtcagcgaggtggaagnnnnnnnnnntctgatccaggtccgtcctggcgatcgcatccccgccgacggcgtcatcgtctccggagacagcgcgatcgacgaggcgcccgtcaccggcgagagcacgcctgtccgcaagaaggccggggcggctgtgttcgccggaaccgtgaacggagaagctctgctccggatcaaggtcagcgcctccgcccaagacaacaccatcgcccgcgtcgtcaagctggttgaggaagcgcaggagtccaaggcgcccacggaacgcttcatcgatcgcttctcgcgctactacacgccgagcgtggtggtagtcgccaccatcgtggctatcctgccgccactcgtctggacaggcgcaagctggcgcgagtggatctacaagggattggccatccttctgatcggctgcccgtgcgcgctggtgatctcgacgccggcggcgatcgccgcgagcctcgcgtccggagcgcgccgcggcctgctcctgaagggaggagccgttctcgagcgcttgcgcgacgttaccgtcgcttgcttcgacaagacggggacgctcaccgcggggaagccaaaggtcacggacgtcgtcggattcggtcacggggaggtcgagatcttgtccgttgccgcatcgctcgagcgcggctccagccatcctctcgcgcttgcaatcctgcaggcggcctccgacaagagcgctcggccgcagcatgtcgaggacttcgtaaatctggcgggagagggcgtcagggcagttctcggggggcgtacggtctttcttggctcgcccgctgcggccgaacggattgccccgcttgccgaagaccagagaaagctcgtcgaggcgctcaacgaaggggggaagacggtatcggtgctcgtcgtcaatggcgagatcgccggttgcatcgccatgcgggacgagttgaggagcgatgccgtcgcggcgctgcggcgcctggccaacggcgggggccggtctgtgatgcttacgggcgacaatccacgcaccgccgccgcgctcgcgcgcgatctcggcatcgatcatcgtgcccagatgatgccggaggacaagcagcgcaccgtcgaggcctacaagaaccagggggaggtcgttctcaaggttggcgacggcatcaacgatgcgccggctctggccgccgccgacattggcgtcgcgatgggcggcggcaccgatgtggcgctcgagaccgcggatgccgcggttcttcacgggcgcgtcgccgatgtgccggccatgatcgaactgtccagacggacgatgggcgtcatccggcagaacatctcgatcgcactgggactgaaggcggtttttctggtcaccaccatcgccgggatcaccggactttggcccgccatcctcgccgacaccggcgcgaccgttttggtcaccatgaacgcgctgcggctgctttcgataccgggccgcggtagagcgggcgagggggcgtccacatgacggccaacagggtccaaaccagcgaccgtgacctccgcctcgacctgtttcggggactggccaactgggcgatcttcgtcgaccacgttccgaacaatgcggtcgcctggnnnnnnnnnnactgttcgtgttcgtgtccggatataccgtggcgttcgtttatgcgcgaacagcaagggcgaagggcttcctcgccgccgccttgggcattctcggcagagcatggcagctctatgtcgcctacatcctgctgttcgtcttctacgtcgtcacgatcggatacgtcgcccagcggtacggccacgcccacctgctcgacgagttcaacatccggcttctcattcgagatccggtcgagttcctcaagcacgggctcttgctcgaatacaagccgctgaacctcgacgtcctgccgctctacatcgccttgatgatcgcgtttccaccgctgctgtgggtcctcatgaggtggcccaacgtcgcgctggcgatctcggcgggcgtctacgtcgcggcacaggtgtgggggtggaatctaagggcgtatcccgccggccattggtacttcaacccgttcgcatggcagttcctgttcgtcatcggcgcgtgggttgcggtcgggggcgcgactgcggcgaggacgctcatctattcgaggacgacgcttgccgccgcctgtctctttctcctgtttgccgcgatcgtcacgctcgcagcgcggaccggccacgcggaaatggtccccgagcccgtccggtcgctgttcattccgaacaacaagacgcatctcgcgccgtaccgcgtcgtccattttctggcgctcgcgatcgtcgtctcgcgactgattccgaaggaggcgccgttcctgtcggctccttggcttcggccgctgcggctgtgcggagagcgatcgctcgaagtcttctgcgtaggcgtattcctcgccttcgtcgcctacttcgccatcgacctcgtctccgattcgctcgccttccagatcgtcgtcagtgtcaccggcatcggcatcatgatcgccttcgcctatttcaagacatggaccagggcctttcgcgcggcatccggccgaaaagcgccagagcgcgaaccgatccgtcagccacgactagcgcaaagggagcgataagatgggtttcgaccaataccacgaaccgccgcaggagctttcgnnnnnnnnnnggagatccgcaccttcgcgcggatgatggcttcgctgatcgaggaagccgaagcgatcaattggtacgaacagcggatgtcggtcgagaaggacaagaaggctaaggccatcatggcgaacgcgcagaaggaggagttcaagcatttcgggatgaacctcgaatttctgctgcggcggaagaaggagtggcgcgaggagctcaagggaatcctcttcacgcagggcgacatcgtcaagctcggcgagaaggccgagaaggcagtcgactgatcgcatgaccgccggagcagccggaatggaacgacgtggagaccagcgccggagggttctcaagaagggatcgatcgagttcggaagctccgcgatcgattgctccatccggaatctcagcgatcgcggcgcgatgttggaggttgaaagtccgctcggaatccctcgcgggttcacgcttgtggtgccggcggacggaacacggcgcgcgtgtcgtgtcgcgtgggtcaaggagaagcggttgggtgtggagttcgaagagtgagttcggctcggcagcggaggcgcaaatgaggaagtatggactctttttggcgctcggaagcatcttgagtctgatcgcggccataggcgccgccgagggtcgcggcagtatcgcgagcgaacgcccgtatgccgcggaacacatcgacttgcttccggtcgacatccgtcacggcctggcccgtctggagcgtccatgcggcgggaaagctgcagcgacgcactacttctctacgaccatcgacgccggcggcctgcacttcaggtcgttgcatttcgaaaacttcgcctgcgaacggcgagaagccatctgccgggcggagcgatgccttcatgaagtctacctggagcggggtggccgttcgcgccgtgtcttcagcgcctatgtcgacgacatgaagctgatcaacgccggcgggaccgtcgcattggagctcgagggaggccggccggcgatactacgttggaacggacgcacattcgcgcccgtccattcattcggaaagggccaagagcggtgacgtcatcgatcatctcgcatcttcatttcggtggcgccgacatctccctttggaagaagttccggctgttcttcaccgtgggcgtcgtcgtgctgcttctgagtgcggcgaaggtcgcggtccactacttcggattcgagttcctcgatctcaacggcctgctgaccagcggcatcggcggtgccgtgttcatcgtcggctttctgctgtcgagcatcnnnnnnnnnngcggaaggcgcggctgttgttgcttgccttgatcgacaggctccgcgagggcctcgggcacaaaaacggccacaagaacgttcctcccgccctcgatgagctggccaagctgacgccgatcctgggtcggctcgagggcatgggcatggccgcgaacttcgtcgtccgccttcggacgaaccaggatgtgatccggagagccttgctccggatctacnnnnnnnnnngcacgtgctggtgcagacgctggtgttctcgatcgtactgctgctcctgctgctgaagacggaaggcgacccggcatctgcactgctgttcggcttcatcaccttcatgttcgtctacgtcctctacctcgtccgcctcctagagcagccgttcgccaaggggcacggctcggtggacgacgtgagcttcttcctgctcgacgaactcgagcgaaacctgcgccggacgctcgaagatccggacggcggcgcccaaaatacgaccacgacgggagattgacacatgcacggaggaggatccgtcggaacggccggcgctagacacgcgaagaggctcgcttgggccctcgcgatgaccgcgacctacatgattgcggaggtcatcggaggacttgtgaccggcagcttggcgctgctcgcggacgccgcccacatgctaaccgacgtcggcggactcgcgctggcgttgctcgcgatccgcttcgccgcccgcgaagcgaccccgcagcggaccttcggctaccttaggatggaggttttgtcggcgctggccaatgcggtcgtgctgctgctgctgacggtctacatcctgtacgaagcctatcagcgcttcctgtcgccccccgaggtcttgagcggaccgatgctcatcgtcgccgccatcggcctggccgtcaatctggtcagcatgtggctgctctcgagcgggtcgtccgaaagcctgaacgtcaagggcgcgtacttcgaagtgctgagcgacatgctcggatcgatcggcgtgatcgttgccgctctgctcatgatgtggaaggggtgggcgcttgccgatcccatcatcggtgccggtatcggattgttcatcgtgccccggacgtggtcgctcctcagccaagtcacgcacatcctgatggaggggaccccgcccaacgtcgataccggtgccatcgagaagaagctgcttgccatcccgggaaccgtggccgtccacgatctgcacgtctggaccgtcacgtccggcttcgacgccatgagttgccacctcctcgtcaccgacatgtcggcgggccgggaggcgctgcgcgaggcccggaacctgatgaaggcggaatacggcatcgagcacacgacgatccaaatcgaggacgaggccatgagagctgaggaaaccgtgctccatgtctgagccgggtcaccgaagcgccgaccatgatcaccggcatcatcatggtgccgaccggcacgatcatgaccgcgatcacgatcatggcgggctcggtcacgtccacgctccggcgagcttcggcaaagcctttgccatcggcatcgggctgaacaccgctctggtcgtggccgaagccgtctatggctacctcggaaattcgacggcactgatggcagacgccgggcacaatctgagtgacgtactcggcctggtcgtggcgtgggccgcgtcagtcgcctcgaagcgagcgcccagcggccgtttcacctacggtctgaagggggcgtcgatcnnnnnnnnnntgcgaacgccgtgtttcttctcgtcgcgaccggcgccatcggatgggaatccatattgcggctgtacgaaccggagcccgtcgccggcctgaccgtgatggtggtcgccgccatcggcatcgtcgtcaacggcgccacggccatgctgttcgcgagcggccgcaagggcgacatcaacattcagggggcatttctgcacatggcaggcgacgccgccgtttcggccggcgtcgtggcgtcagcagcgctcatcctctggaccggttggctttggctggatcctggaatgagcctggtcatctgcgccgtcatcctgtggagcacatggagccttctgcgcggctcggtcgcgatgtcattgagcgcggcaccggccggaaccgacatggaagccgtccggtcgtttctgctgcagcggccgggcgtagccaagatccacgacctgcatatctggccgatctccacgacggaaacggcgatcacgtgtcatttggtcatgcctaccggacatcccggcgacgatttcctgatggaatcggcccggctgctcaggacagagcacaagatcggacacgcgaccctgcagatcgagaccgacgagaacaacgcgtgcgcgctggcgcccgacgacgtggtctagcgtggatgagggagaggacgacaagctcgagcgccttcaccgtctcaagtcggcgctcgaaatcgagatcgacgtgggaaacgaaagagggagggtagcatgcccgaactgtccgcacgatggcgactggcgaacggaggtcggcggctgggtgttttcctgcgaggaatgcggtgtgcgcgtagacggcagatttcctgccagacgcgtcgcgaattgagggcggtcgtgacaaaggaagctccgaagggcaggggatgggcaaaagggttcgacagccaaatattcgggagggggctgaggttacttttcgtggcctgtagcctgctgtgctggctggcatcgccgtcgtacgcccagagcgcccgcgagttcgcgcgggaagggtttgcggcaaaggacaggaagcagtttccgctggccatccaattgttcagcgaggcaatcaaacaagggcaattcactcccgagcaacgcggcttcatcctgtacgggcgaggggtatcgtatgacgcgctaggactgcgcgatctcgccctgggcgatttcgacgcggcgatagcgctgctgcccgagttcccgaattcctacgtgtatcgcgctctggcatggagcgatcgacgggaattcgacaaggcacgggacgatctcatgcaggcgctgcggctgaacccgaccagcgcgctcattcacaacaatctcggttcggtttacgaacgcaaaggcgaggtggacaaggcgatcgaaagctatggggaggcgatccggctcgatcccacggcggcacaagccttctacaaccgcgcccatgccttcatcgcgaagcaggactatcgggccgcgatatcggactacgaccgggcgatcgacctgcagcgcgacttcgcggacgcctacagcnnnnnnnnnnnnnnnnnnnnnnnccaccagggcaatccggaccgcgaggaacttgagcggaacgcggcgagagtggatcgctcccagtggccggctcaggtcctggacttctacttgggcaaactggacatggaccgggtgcgcgaagacgccggcagcggtgtgggcgccgaagccgaaaggcggctatgcgaggcggacttcttcgtcggtgagttcctaagccaccgccaacagaaagccgacggccgccggatgcttcggacggtcgtggatcggtgccgtcccgtggacatcatcttcgccgctgctcaagccgagctgcgcgacgacaaagaggcgaagtagcggaggcccgcgtcgtcgaccacggggtaccttcaaattcaatgcgaaaggatggacgtggttcgccgcgaaagtgagaaggaggatgcggaatcgcgccgcatgtccaaggttcagcgcgttttcttcgtcgttggactattgacgctgatagcattgtcatccggctcgatcggcatcgtgctgtatcgtgcgtttcccgacagcaattgggtcacgctagtcgctccgctgggcgcagcggccgccgtggtcgctctacggaagctattcgctgcctgagtttcggcgcactctcggcggcgtttgaggagccgttcggctgccgttgcgtcggcagccgaacggacgcgcggtttcgcgtctagcaggctcgtttacttgcggccttcatgctgccagtgagcggtgacttcgtcgcctgatttcgttagatggacgtgctggtccacatgatcgatccaggacacgggaatgaagtgatggtggtcgccgtcgggcgaactctgcttggtgagctttatcttatcgctaccctccagatggtcgacctttcccacggtcttcttgtccgaagaaatcacgtccatatgctctttgatctgcgatgtgtccggcatggggtatcctccagtgagtggaaaggatgcaacgcccccgtaccgggaaggttgctttcgcgcggctgaaggaggtcccacggggaatctgattaccggcgtaatatcaacagcgcgatgcaaagcagtgacggctttctcaagtcgctcattgagctttaatgagcacgtccatcatttcctgaatgaccgacatgattttggcattcgccgcataggcattctgaagctggatcaagttcgacatctccgagtccaggttgacgctggaggtcgaattgaacttggcctggagcgtcgagacgacgacgttctggccctgctgaagttggatcgcctgcgtcgcggcattaccctggacgctgaggaactgctggaggtagctcgagatgctgccggtaaagggctggcccgacgagccgaggccagtctgcggtgagtaggagtacaccgccgtcgtgagctgcgagtagagatagtccgagcgagtggtgtcgcccgcgggcgtcaccggcgaggtgttgtagaccgaaagcttgctcggatcggaggcgagctgcgtattgacggcgatgcgaccggcaaggccggtcatctgagagcccgatgccgatatcgcgccggtatagagggcctgtccgccatcggtgaacaacggaatctgcggattgccggaggtgagcgacgagatcgtcatggtgctggaggacgaactgaccttggtaaggccggtgctgtcgccggtaacccgcagcgtagtggccgtcgccggcgatggggctgcggcgaacgacaaattcgtgccggacagcgcggtgttgagtgccgaagcgatcgcgcccataccgcccgagaaattcaagccgatccgcaggggattggcgttggtcgcgttctggagcggcagtgccgccggatcggtgacgttgaccagcgtgatctggcgctgggtgttggtggccgtatccgtgtaggtgatgttaacggtgttgccaggctgcgcgccggcgagttcgaggtcgaaaccggcgggcgggccggagaccgtgctgccggccgtggtcttgtccgacagcgcgctcgacatcgcggcggcgagttggtcgatctgattctgcgcctgcaccagcgtctggtcgcgcagcttcagatcggccgccatctggcctgaggataccacgttgttggcgacgacgtcgatcatcgagccgttcggcagtttgacgttgagtgcgccgacgccggatctggtcggatcgatgttgtagagcgaggtcgccgagagggcaccggcagatgagaacgtgaattgcgaggcgagacccgcaccgaccagttggatacccgtcgttgtgtagatgttggcctggttcgagccgtcggtggtgacgcggaggtcgacatatttcgacagcgtgttgatggcctgatcgcgctgatccatcagcgtcgcggcggacggatcgttagccgacaggccctgcagcttggtgttgatgtcggcgaccttctgcatggccgcgttcgcctgctgcgccgaggtcccgagatcctgttcgacattggagcggagcgactggatacccttggtggtgacgttgagctgttgtgccaacgcctgcgccgcgccgagcgccaccctctgcgccgacgacgagccagcactggtcgagagcgcctgcagcgacgtggtgaagttgttgagcgcggtttcgagcgtgccgctgttaccgggcgtgccatacacattctgaagctgcttcaggatgctcgccatttggtcggcgtagccgcttccgccggtctcggtgcggagctggttcagcacataggtgtcgagctcccggctgacgcctgtcgtcatcgcggtcgagccgaagtcgccggtggtgacctcgatctggttcggtgtctgcgcgacgtagcccggcgtctgcgaattcgcgacgttcgacgagacgatcgaaagcgcggcctgattggcacgcagaccgctcatcgcgctggcaagggcggagtttaggctcatggtgaagctcgttctcgatcgaaacaagaggcggagtgacgtgttccgaaattcgcaagaactgtgccaacgatgaaaactgcagaaacgcgtttagatctgcagtattcggcgtcttccgcgtgctcgcgcgcggagcgcgggtaacaattgcctgagattctcatgcaaaaattgcttgagtgaatctcctttcggctctcgcaggccgggaacaaagcaacgttgctcggcgccctgcgcccacaaggcgatcgttagtcgtgtgtaaattggtcgcaaccgaactcttccgcagaagggaacgtcacgatgacgtgtgacttaggtaacgactgatgagagagggactcggaacatgaagaagcttggtcttttggtattcggcttggccatctcgttcgctctgccggctagggcggagacggtgatcgtcaagaagggcggacatcatggtggatacggcgcgcgggcagagatgcgcggccattatggcgccggcatgtaccgcggcatgagaacgcacggaaaccggaccgtcgtcattaagcgcgggcacggccaccgctattgaaaacttcgcggaacgccaggcgaggtgtcctccccagcaactcggcctggcagcgacgcgaagaaaaaggccgccctccggggcggtcttctggtttttggttttctctatcggagagggggggggcgcgtcggaatccgcatcaggaatccagaagcccgcctcgtcggagagaacggccgtcagggcgcttccaaggtagtttccagcgctgacagtgttgactgaaaacgctgttgccagccccgtttccgccgacgcgatccagtcgttggcgatgcacgctacgcgtggccgacgtggcggtcagaattgcgaacggacgcgtacgccgaagattgaggccggaccgcggtcgcggttgtaggcgggattgacgacgagctggtagtccagcgtcgcgcgccacgaccacaacggaaagctgtagtaggtttcgatgatcttctcggggccggcattcggcaggcgtccgtctccgacgagaatgccgagaccgcccgcatcgaggtaggtgcggcgcgcttgcgagatgccgttcactacgccggcgaatccgaacgtgtcgttgggtctgttccaggaagaacccgcgagcgacaggccggcggcgacagtcgcgtcgatgtcggtgaattcataggactccttggatccgtcggcgacgccggctctggcgaagacgccgaggtccttcgtgacctcctgctccaggttgacgctgatgccggcccggctctgatagcgccggaccagggcggtgtccgcggctgtgcccgtcgcttgcgcgagcgcaacggcgtcgtcgaagcgacccatgcgcccgcgcgtcaagaaacccgtaaccgcgaccttgcccggcttgccccagatctcatggcgatgttcgatctctccgatccactggaattgggagaacgtcggatccagctcggtgctgttgggaacggtcgacagatcgaacaagccgccgcggaatgtccagttgcccttgtaccactcgaccgcggcgccgtatgtgaagccccaggcgtcggcggcgtagtcgaacgtgccggtgtccacgatcgaccagttcatgaaatccttgcgcgggtcgtgggcgtacttgttggtgtcgaagacgtcggtgacggcgaattttcccaccgtcaggaccaagcggtcggcactctgcgtgccggcgaactggttgatgtcggcgtcgaccttcttggtctctccgccgaggtcgaacgtctgacggaagaaggcgcggggaatgcgggcgtagggcgcagcggatccgaccttgtaggcctcgccgctcggaaatccggccacacccaaggtcgagctcaggccgaacccctgatcgatctccgggttgacccagaattctccgccggcccaaggccggaatccggcgtagagcgtgacgtcccaggtctgacgggtctggttcgggatgaggctgttcgtccccgtgtagggcgagcggaaaggcgccgcatactgctgcagataggtcgtctgcccatggatgctgaactggtcggtttcgaagggcgtcaagccgtcctcgagaaccttctgcccattttgaccgaagcggtagttgaggccgaggcgggcggtctgcaccgcgagatccgaggacagacgctgcgtgccgccgaaccctttctccttcgcgccgaagtccgtgtagagatattcgaaccgcgccgaccagtttgccgacagggcgacttcggcgccggcgccccaggcggagccgagccgagtgaaaccgatcttgtctcccggggggccgtcgagcgtcgcctgatcgtagctccatgcgaagccgcccgtggcgtagaacaaccagggtcccggcgcatagcccaggcgagcgcgcagcgtacccgacgtcaggacggtttccttcaaggtcgccggtcgctgcgcggtgccgacggcggccgtcccggagatcgtgttcggaaaggtgagatcgccctcgacgccgacgaccatgcgtgagggcagcacgtgattgtatccggcgctcagtccgagagcgtaggagccggttcccttgaacgcgttgagggagttcgtcaggtcgatcgatccggacgacggagccagtcccggggcgccgaaagcgtactgcgaggacccgacgccataggcgaaatggccgccgacgaaggggccgctccagtcgacggcctggccgggccggacctcgccgagatcggctgaaagtccctcggcggccggaccggccgccaggatcatgccgatgatgaccttcttcatcgcgtcgagcgtccgcctcttcataccgctttcgatacggcggcggccgcttggcaacaatttgaatctagcctgcacgccgccaatcctgtcgctgaattgaccagggcgtgggttcgccgcgaaatgtttcacagcgaccctgcagcacccgcggttctgcatacccgtttaggaccccgcccagtcgcaagcgacctcgaacgctcgacgccgcgagggcaggtgatggagcgcgatggtggacgacacgcatctggagatgacccagtgaacccatccagccttattgcgaatagttcttagttgcaagaagcgctattggataggtaatcgtttaacactgtcgacgtgatggaattgcaacagttgttggaggcgctgcgcccagtgcccgcggtgagcgcgatcgagttggatatcggtgccggcctccggatcgtgtttcggcgcctgcttgggcctctaagttcttctggagatcgaatcgctctgccgggtcaccggtcttctccggcggtggtccggggcgtggcgcgggggagttgcctcgcgcgccgtccgatgcctctctcgtcggcagaaacgggggtctcagcagggttcgacgaggagatgggtggaggcttcaccatcgagtaatgccagaccgccccgcggccggacatggtgacccgttctcggtggccgaattggaaaacaagacgccttagcttcacatatctccggacaccaccaaacgggcaccgaatcccgccggggcggtcgacgagaccgttagggggaattgtctggcacaggcgccatcacgaccgttgagcggcgacggggatggcggtccttgactttctgtcggctgggtcgcttggccgccgtgtcgaaaagcagagaacgatctcacgcccgactcgatgcgagtgctggattagccggcgcagccaacacccgaagagccccgcccgggggcgctgccgcgctccggagcgatccgcgtcgtgagtcgcttgaggttcgtaagcaattggccccggacctcgccttcgtccacggcccatagatcggcgagaatcggctcggccttggcgacgtcccaaggaaacagggagcgcccctcgacctgtgcgaagggaccgtccgtctcggtcagtatcctgtcgcggggcatttcggcaaccaggccgcgtcctctctcgccggcgagcatcgccgggccgacgctgaaccagcaaccctgatcgaccgcgcgtttgagctcgcggcgcgtcccggaaaaccaatgcagaacggcgacgcctgcatcggaccgcgacgcgagcgcatcgagaacgggcccggcggcccgcctgctgtgtatcgtcatgatgcggcctccgaccgccccgcacatccgaaggatttcgtcaaagacgtggcgctgcgtttcccaggtcgccttcagttccgggccgccgtctagaccgatctcgccgacgtatctggactcggggagcaactcgtcgaaaagctgaagttcgccccgtcgttcgtgagccagttgagggtgcaggccgagcgcggtgcgtatcttcgccgctcctcgcgccagcgccgcggtcccagcccatgccgatggtgtggtcgtcaccgacaggacgaagaggtctcgcgctctgcattcgtcggctgtcgcgacgggatccgggtagaggtctagatgggcatgaaggtcgatcacttgacaccgtatttcgcgtgcaaggcgccgagttcggcaagtccccgtcgtagcatatccttcagcgcatcgcgctgctcgatcccctgccacgcaagggctccgccaagccaatcgtcgaaccccgcaccctttgaggccgccagcgccatgccgaccgagcggacgtcgtcgaagccggcgtgatccggatcgtcccgaccgagatgttcgtagacgtagtcggtcggatcgtcttcgccccaagcgaggaaggccgctctgcggacctgacacggcacgcaccgtccgcaatggcgatagttgtagcgctgaaagcggccgcaactcgtcgagttcgccgccagcgtgcgcagcaagtcctggtccgcgcacgtcttcagcatctcgcccttggtcgtgtatccataaggagtgtggatactcacgcccaggttcgcggcgtcgagaacgtcctggaaccttgagaggaagtaagggtgggccgtacgggtgctcaaacttccgatgcggcttcccgtcagcggcgggttgatggcgatgaagccgttttcgcagacgtagagcggcaagttgccgccgggacgatatggcttgagcgccgtggcgacgagaacgccgaaggcaaggaagatgatcgagcgcgcccgctgggaggtatcttcggtgcccggaacggccgcgttgtcgttcaactggaagtggcgcagaccgccgccgatcaacgacgcgaacctgatctgtttttctccatcgccccggactgtcttgctgatggcgacgggtcgctgtccggacgccgcaaggtcgatggcgccgctcaagctgtctagcccacccgacaggagcacgacgctgccttcgggcggtcggaaaacttccgccggcggctgcggcgctgcaccgccggcgatgaaacggaatcgccatcggtcggtcgtgagaaacgtcaacgcgtcggcgaggaggtccgcggacttgttccagaatgccggttcggcgaccgcgacttccatctcgaactcgcgtgtccagccgtccggacttaggctacgtcgtcccgctgcatcagccgccatgacggacatcgcgatggacagcagatcccacgccctgcggttcggagccagacgcgctctgcgaatgtcgttgcgcacggccgcacccgcgctgccgcgatcatcagcccctggctggccgtagaggacgaccctgagcgtgcctttctcctttagccgacgcacctcggccggcgcgcaaagcaacttcactcttcgtacccctcgaagacctcgaacgtctcgcgcaacgcagcctgaacgacgcgcgcgacgcgtccggcggtgagcctgcgtccctgttccttgagtttgcggaaggaggcggccacagtctcggcgatatacgaccgcatctgtttcagtcgagccagcgcgacggtcgcggtgggcgctctctccagcaacgtcttgccgacatccagctcgaagcgccgtgccacatcgatggccgtgaatttttcgatgacgaactcgcgttcgggatcggacagatcgaggagatcggcgtccgggtattccgtcagcaattcggacatcgcgtcgtggatggacgcacgttcggcttccgcatcctgagtcccgtcgatcggtctgacggcctcgatgatcgcgctcgcgatctcttcggtcgaccggccagcgagcgcggccgcatcgacgggagcgtttgcatccccctgcgccgtggaatagagggcatggccgagcgatcccgccgtttgagcggtgccgccgaaccgctgcgtcgcgaaattcgatcccccgtagccattgcggacgtagtgtccgagcccgcgtctaaggtcgcggccgtccccggatcgcgcgaaattgcccaagctcgagcgaacgccgccgaaccgtcgttcgggtgccaacggcgccggctgcaggcttggcggtggcgcagcgggaggcgggggcagggcgccatcggccggaggagcgtccggcggaacgtccggagatccgggctggggtacggg

SEQ ID NO: 350 - DNA, 152000 bp, Bradyrhizobium colbertium
tgcggattccgacgaagtcgcccgggtgtaccgatatgaagtcgcccggggattccgagacgatgtcgcccacctctccgatttgatctcgcccgggggcgaggcgttctagctgctgaggttctctggcattgggcaagccgcacggtcaactggaatcgcggcttgagcttgttgtgtttctgttgcgtttgctgtgggcatgtgggcaacgccttggcgttgtccaagcgcagcggcatgtccacagcgtcacgggctcaggtctttcgggcggattgccgggttcggcgcaggctctcgccagtaaggtcgagccgatgggcattgtggacgaggcgatcgagcacggcgtcggcataggtaggatctccaatgagcacatgccactggtccacggggagctggctggtgacgatggtggaacgatgaccatagcgatcttcgaggatttccaggaggtcgtgacgggcaccagcgtcgagcggctcgagcccccagtcatcgaggatcagcagatcgacacggccgagcccgcgcaataggcgcggatggcgaccgtcgccgcgcgcgagagcgaggtcatcgaacagccgcggaacacgttgatagagcacggagcgattgtcacggcaggccttgtggccgagcgccgaggcgagccagctcttgccgacgccggccgggccgcagatcagcaggttggcatggtcatcgatccagcggccctcgacaagcttggcgaacagcgggcggtcgaggccgcgcggggtgcggtagtcgatgtcctcgacgcacgcttgctgacgcagcttcgcatagcgcaggcgggtggcgagccgcttatcgtggcgcagtgatgcttcacgttcgagcagcagcgcgagccattcggcgtgaccgaggcttgcggcctcgccggttgcttcgatatcgacgaaggcattggccatgccgtggaggccgagggcgttgaggcggtcgagggtcggatgggtgagcaagggatggtctcctagttgtagtagcgcggtccgcggatgttggcatgcaggatcggcgcatcgtccgcggagcgctgatgagcgggacgccgatcgagattgttggcgaggatcgatttgaccgagccgtaggtgcgcgcgccgatgtcgatcgcccgcgcagccgcggcgtccagccgtccgcgcccataggagccggcgagcctgaggatgccgaggcaggcgcggaagccttgctcggggtgcgagcgctcgtcgagaatgaggtcgcacaaagcgctggtcgccggcccgatcgcggcagcgtcctgtcggatgcgcgcgatggtccagccggcgtagcgccgatggctggaggccatgtgctccggcacggtggtgtgtttgtgattaccgctcatgcgctgatgcgcggcgatccgctcgcccttgtggaagatctctacggtgcgggcagtgaaccgcacctcgacctcggcgcgcacaaagcgatgcgggacgctgtagtaatgcttctccacctcgacgtggtaatcgaggctgacgcggcggatccgccattcggcgagtacgtaggggctcgccggcaatggcttgagcgccggccgatcgacctcctcaagcagccggcggcgcgtcacgccgagccgccggatcggccgctcctcgttgagcctggtgagcagctcgccgatcgccgcattgacctcggccaggctgtagaaggtgcgatgacgcaggcggccgagcagccagcgctcgacgatcaggacggcttgctcgaccttggccttgtcgcgcggcttgcgcggccgggccggcaatatggcggtgccgtaatgcgccgccatctccgcataggtccgattgatctgcgggtcgtacaggctcgccttgatgaccgcgaccttggtgttgtcaggcaccagcagcgccggtatgccgccgatcgccgcgaaggcgccaacatgagcgctgatccagtcggcgagcccctgcgtccacgtcgcctgcgcgtaggtaaagctcgaggcgccgagcacggcgacgaagatctgcgccattctgcgctcaccggtgagacgatcgaccaccaccggcacgccgtcgccggcatagtcgacgaacagcttgtcgccggctgcgtgcgcctggcgcatcgtcaccgacaggcggccctcccaggcgcggtaaagctcacagaagcgcgagtaccggtatccgtcgggttcggcggcgatgtactcctcccacaggatcgacagcgtcacgtgcttgcgcttgagctcgcggtgcacggtcgtccaatcaggttcggcgatgcggcggtgaccctgccggttgccattgccggtcttggcgaacaggcggagttccagggccgcgtccgtgagctcgtcgggcaacggccaggtcagacccgcggcctcgaaccgccggatcgccagccgcaccgtcgagggcgccgctcctacccgtcgcgcaatctcgcggctcggcagaccggccgccttcatcctgatcacatcgcgcacacggcgcatcgcaagcctctccgtcggcatccagggtcccccttcgcaaagccgaaagggttgacctatgggagccagaagaggcctcgtcacccgggcgacatcatcccggaatggtgggcgacatcatctcggaatgggtgggcgacttcaaatcggaatggtgggcgagatcatctcggaatgctgggcgacatcgagcggaatccgcaaacacagcaccagcaccggaagttacccagcttaaggtcaacgaaaagaagtggaccgccaccttgatgaaggccgggtggacggtcctgccgaacgtcatctttgaacgccagcgtgccctggggctggatgcgatcgacatcaacatcatcctgcacatcgcgtcctattggtggacggcagaaggcaagccgtttccgtccaagcgaaccatcgcagcggccatggacatcgaaccgcggaccgttcagcgcaggattgctgccatggaagcggctagactaatcaggcgggaagaacggcgcagctcagcaaacggtagccagaccaatgtctaccacctggacggcctgatcgcggccgccaagccatatgcgctcgaaaaaatccaggagcgtgatgaaaagattcaggcaaaggccgcaagggcaagcaggaagggcaagcccaagctttcggttgtgaagggaggggcctaaccagcttcgcgccgtagctcaaccggatagagccctgccgttctttgaaatcctagctgacacttggagagtaggggcaggaggttgcaggttcaagccctgccggcgcgtccatacccccggtttttagttcactttgaatcgtgcaatcgtatttgcgattgcacggtcgtcctacaccgtgagtttgtcggtcgtgaccaagtctttcagcttctttgctgacggcgggattccaggcccaacgaccggcttgccatcggcttcagccgaggcgacagcttcgttcagctccagcagtgcttccaacacatcggccttcttggacatgccgtaagcgtcgcgtacggcgtcgtccagcgctttatgtgctttcttcagggcgtgttctccgggcccttcgatcgcccgatatagctctcgtagtgaaagctcatgcttcgcccgcagatgtgatcgcaagcgccgcacctcgaccgcccgcttggcgacgaggcgaaccgcctcggttgtcggctgctgaggccaggggaagctgtcgaagacggtatccgacgtatagcgaaagtctgccttcagcgttgagcagcgattgatgaaccactcccaatggatgcccgactggaggataccgaaagagtagtcatcttccagcgcgaacacgctcagtgcatcattcggatgaatggccgtcgaaacaaattcgaagatcggccggtgtgtgacccgtgcacatacgatgtatcgcgacagcggggcgagggtccgcatcaggtcttcgcgcgggtaggacatcagccaccagcgctttaaaaagttttcgtggtgcttgttgaccttcgcctcgggatcgtcgtccaaggcttccttatttcgtgcacgctccttctttgccgcttccttccgtgcggggagcaccgtctgctccagatgctcaaacggttgcttgaatgccttggccttcaaaagatcgcgcggctgaaagtcgatgacgtatctgcattcgagtttgtctacagcgccgaggaagtcgtcggcgatcaagaacgggaagagcacctgcgcgttcgccttgttggccttcatcatcgctttcgcttcggtcggctctagaaggaaacccttgtgaccgtgtgtctgaccctggtagcagccgcctttttcagcgttcgccttgatgcgttccgcttggctcacgtcagtcgaaaacgagagcgaggtattgatctcttccaaatctttgtagtcccaacccccggcggggtcgtttcccgactggatgtataggcgtttcttgccatcgtcctcgccctttacccagttcacgatcgatacgtggacgaccgcgtcgcctgaccacggcatagtcgagaccgcttcggtgatcgtgccatcatgcttgacgatatggtcaaggccgctgatgcgggaataattctggcgaatcgtgtttgtgccgaccaggcccgccctctgacccggcttaagctggtcgtgcgctttcctaaaccagtagacgcagtagtcggcccgtccgtcgatatccggaaaagcccctcgaatagtgttgagataggcgcgtccgaattcttgctgggccttgttcttgctctggtacggcggattgccgatgatcgtatcgacctcgggccattctgacagcagcgcgtcacggcacaggatatttccgtcgagattgtcgagaggaagagcatcatcttccgccaagggcaattcgatctggtcgcgctccagaacatcggcggcctcgttcaaggcgagctttttcgcgagcatcagcgtgacttttgtaagctcgacgccgaaagagtcccgatcaacgccaaaaaattgacgaggactaatgagtgacgtggcctgggcctgcttctgaatggtcttccagctgaactctttgtccagcctggccatgagtctgatttcgaggcgtaccatctctctgtaggcgacataaaggaaattgccgctgccacaggccggatcgagcacacggaagttgaggagcgcttttctaatctccaacagctccgtcattgtctttgcggcgtcaatacgctcccgccaggggcgcacgatcgtaggcccgacgatccgttgaatgtcggcctcgtgagtgaaatgcgcgccataggcgtgccgttctcccttatccatgctctgctggaagatggtgccgaagatcgctggatttatcttggcccagttctgccaagcggccccttcatccttcttgccgagcagctccagctctttcttggtcagctcgacgggcgcaaccgtggcaaaaagaccgccgttgaaatagggaacgcctttgtagcgaccgcccttggcagctgtcttgttgttcatctgctggaacaggccgccaaaaacatcgtatgagttttgcccgtgctcaaggcaatcctgcaccagtctcagggtcgttccggccggcatcatgtcgatgtcttcggcaaacatcgcgacgaccgcctgcaacacgaaacgctgcgcctgctctcgcggaacgccgcgtgcgaccatcgatcggaacagctgagcgacctttgctgcagcaatacgcgaaacctcttcgcggtcgttgccgaaaagagggtccggattgtccgcgaacaggaagtttagcgccgtgtagcggttcggcaggtcttcgagccgcacgatatccacgggctcgttgagctgcttgtcgaaatcgtaaatccagaactctttgaagttgcacagaacgacgtaacgagggcgattgggaaccgcgttcagccagtagtcgaaagcctgttggtaatgaagatgcagcttttcgctgcccttcttcatttcgataagaagtcgcggcttccacaccaggtcggcgaagttcgttcctttgcctgaagcctttttcactcggtattcgagttcggcaccggcctctttgtaacccttatggccgaaagcctggaatagccggtcgcaaaaaacctgagcttctcccttctcgtcacccttcagggtttttgcgtaagcgacgaatgcctcaattccctttgcgagttcgctcatcccgcttttctctcggtgtcagcgtcatgctccaaaagctgcacatctaggctcggaatctccggcatggccttgccggcgatggcctgaaggtctccgaccatgccaaccgtggagtcgacgaccgccaatatctgcgtctcgcgcttggcccactggcgccccatgaatttgcgttccctatcgagatcgtcgcgcatgtcgttgaatttctcgactacggcttccacccgctgcttgaatttggttccggtcaggtaatggtagacctgctccatctttgtctgctgcccttgctggacgagacgagagctgctcacgtcgaccagcgcttggcgcagagcgacggcaaccggcaaggcacagcgcgggtgagccacccatatgccgtcaaccaggtcaaaatgctcaatgtgtttgggcagggtatgagaaacgatgagcgccacatcggccccggagcggcgctgatcgtcgcgcaacttggccagccacccatcgctccaggctttggtgcgcttggtctcccacaggatgatgccagcaggctggccaagctggccattgacctgctggatcatatcggcaccaagttcacccttgccgacgggctcaatgacgtccatgggaaaacggctcttcagaagttcctcaagctcaagttcgagaacctcaccctgcgactgctgcgatccttgctcggccttacgcttcagctcctcgatggtccgcgtcatcgactctatggtctggtctttctccgcaacccgcagccgtgcggcctcatcggcttcctgccgggcttttgcgtgaatctggtcgaccgacgcttggacgcgcttttcgatggttagatcgagttcacgcttttcctcatcgagcgcccgctgcttgcgcatcagctcggcctgggcctgctgcgcttcggcaagcttgaggttgttggcctccaacgcttggcggagctcggccgtctcatctgccttcgccttcaattcggctgcggcagcttcgcgcgcctttttggcctcagcggcaaccaactggctcctctccgcggccaggcgttgcttgacttggtcatcgagcgtttcccgatccttagcgagctgttcgcgctgctggctcagctcctcggatttgcgcgcgacctcggcatccttgctggcaagctgttcctgaaaacgttggcgagtctccgcgaggaggggggccgccagtgactccgtcagccggatttcgtagttgcaattggggcagttgaggaggggttcgtgcgcagttccagccacggttgctttgaatgacatgaaccccccagtacctttaggccggaatgaacgtgatccggccggcctcgccgcgcttcctgtgcggctttaccgttatttcgacatcctggtcgaacgctgtcagcatccgcatcagcttttccactgaaaccagcttaaattgaccccggagcagcttggataagtcaggttgtttcatttcgaccagtctagcggctcggtctccttttgttgccttataaatagactcggcgtcccgcaggcgttgccgaatcaggtcaacgtgcctttgcggtgtggcaattcccctggtggatttcttctgaaacgcgtgcaggacgtacaggaccctccagccgcgttgtgtaggccgtccgataggtatcgccgtcaaagttgtcgcgaatctccagtacaccgctgaagcctttaagcggcttcgcattgcgcggatgttcgccgagctgcgcttcaaaaagggactggccgatctcgcttcaggcggccacggggaacggggtgcccccagcctgcagcttgacaatacaacctgacagacatccactgcacaatccatgattttatctatctatacctacaatcggtattggggtggccatgacaggcgacagcgatttatttgattggtgtgcggcacgtcccagctggcaacaggaagccatccggctcttgaccgccaagcccaagctggacgctgaagaactcgaccagcttgaggaggcagtaaagagggacgcaaggatcgctgcgggaacgtcgccggtctggcctgccttgacaaagacgcatctcaaggccggcaacaagttcgctcccgtcaccgttctgggctcgatcggcccgcttcgcaacatcgaccgtctggcggcggggcaaccaccgatcaagtttgctatcaatggcatcacactcatctacggggccaacggttcgggcaagagtggctattgtcgcgtcgccaagaaaatctgccactgtctgcatgacgtgaccttgcgcggcaacgtgttcgagccggcctcagccgatccacgcgaagtcaccctgaccttccgtgtcgatggggaaaaggcccgtaccgtcgtttgggatgatcggaatgcgccgccgcccgaactgggccgcatatccgtcttcgacagtgatgcggccgggctttatgtcgacgctgagcgcaacatcgagtttttacccttcgaactcgcactgctgaccaatctcgctgaggcggtccgcaccctagacgggcgcttcagggccgaagaggcgcgattggtcaaagcccaccaggccccattgccgcagggatatgacaagcccacgaaaatctcgaccatgctggcaaggctgaaagctgacgaacagctaccagacgaggcttccatgcggtctttcgccgtgtgggaggagaaggacgaggctgatcttcaggcaatcaagctggagctggggagcgacccggcacttgttaagagggtcaaggaggcggccaagtcagcggtcgatacgtttgtcgccgatgcgaacgctatctttaaggccctcggcaacgatggcctagcggccctgaaagaggcgcggcagaaggctgctcagtcacgggacgccgcgaaagcagccgcttccgcccttgcagctgaatcagcggtcccgcagctgggcagcgatacttggcgtcagatgctgatgtatgcgcgcgattttgcggccgaagcgtttcccaccgttgagccgccccagctggctaatgccaatacgtgcgtgctctgtcatcagccgctcgatgcgcaggcacaagaacgcttggccgcttttgatgcgtatgttgaaggccgcgccaatgccgacgctgaggccgccaaaaaggattttggcgaaagggccaaagcgatcctcgacctcaaaatcgttggcggtcaggacatcaaggacaagctggttaatttcgtcgaagcatcgaaaccccgccaagcgctggtggatcggcttgaccagttttacaccgccagccaagagcgccacagtcttgcttcattagccattaaggccgtcgactacgcgagtcttggtggtctcccagatctagaccgcattgtgatcgacgatctggtggcagaagccactgtcctcgcgaaagagatcgacgacctgaaaccgacgccggatcaggccgccaaacgcattcagcgtcagcaaaagctcgatgaacttgaagcgcggaagaagttctccgccgatattgaaacgttcgtggcgcggcgcaactcgcttgagctgctggtcaagaccaaggcttgcacgacagcctgttcggtggccggcattacgtcgctcattacgcgtatgcggcgcaaggttttgaccacatccctgcaaaatagccttcaggacgagatcggcgccctcgacctcgggcatctgccgctaaaactgtctgaccggggagaggtgggcaagagcaaagtccagatcgggctggaggcgaagcagaaggtcggcaagaacagcgacattctgagcgaaggggaaaagcgcgcacttgctctggcaggctttcttgccgagctgaaagaggtcggcgtgaggcacggcatcgtcgttgatgatccggtatcgtcgcttgaccacgcccggatggaggcggttgcaaagcggctggtgaaagaggcaaaagcccgtaggcaagtgatcatcttcacgcacaacctgttctttcatcacgccgtattcgaagaagctaaggatatgaaggtccccctgcggcaagaatggattgccaagcatggtgacggacgcttcggcattatcgatgacggccagcaaccgtgggtttcgatgagcgttacaaagaggcttccgatcatcgatggtctgctcaaagcaaagaagccaacgtattcggaagccgacgaggccgagcgatcgtttgtgactagtatctacaccaagatgcgcgagacctgggagcacaccatcgaggaagttctattcgccggcgtggtcgggcgatttcgaccaaacgtggccaccatgcaattaagagcagcccatgtcgacaagtcggactatgagacggtgtacgctggaatgacgcggtgctccaagtactccggccatgatcaagccgcaggcgtccccgccgatctacccaagttcacggagatcgaggcggactttaacaagctcaactcatatgtggttgcggcgaatacccgccggaaaaaactcgaggacgaaggccgcaattctgaaaagagtccgatgccagctgacactctttgaagcatgggtcattgaccctcgggcggaattcggtcaccgcaaatgccgcaatctttatgagcttccgtgcgcggaataactctggtttgtccgcagttcgggcaggaagccttcatgcctgccggcacgaaaattggttccggctttttgactggcggccaacccttgtaggtgccgggtacaaaccggacttgccactgacgatcctcgttctttcggacagaatagccgttgtcccgcagtgaatccttgttggcgtgccaaataggccaaaaccccggcttgaccggcccccatttcgcatgccgcggcgcccacctgggtttcgacatcaagcctcctgcctatcgatacaatcgagagcagttaagacattcaagtgctcgggaactagtgtcgcttcacgcgactggtaagcgggtcggccttattatccagtatcttcagaatcccgaccgctttcagccgagcgcttctcatccatgtctcgtcgattctaccattgaccaccgccgcctctccagcggctgccttcaacacggtctctatcgcttgcgctgcatcgttgatcgcgacggcgtacatttcgtgaccgatttgatctttgtccttggtgaccaagaccgtcaccatccaacgcgccatgtgaatttcctggttagcccgtgaggggcgcgtcggcacatacgatccgccatttcctaaccagttgcgtccacgggtttcaaccgggatatcgtcgagcagctcacgttgaagccggaggcaacttcctccatccggcttcgccggaagcgggctctactcgcttcgctctccgagccgcctgcggcgcctcggcccttcgggtacccttctctaccgatctcgtcgctgcatccggtcccgcgtgccgccttcggtgtcgctatgctcatgctcctgcggggggccgttttctgctgaggcgatgcggcattggcgcgctgatcgagcctgcggccttaaggcgaagcccgcccggcgacgcatgcgtataacgcgaccaagacataggtgaccttgccgtgacgagcggccgctggttttgcccgtcataccgccgacccgggcgggtcttccttgacaccgcgggcgacgatccgcagcgtcgcgtcgggtagaggccgctgcagcttttagcgcttcgtccgaaggagccgtcgtccaagtctcaacctcttccggcgtcgtcaggatcaccggcatcgccttcgggtagacggcgccgatctcggcgttcggctccgtcgtgaggaatgcgtagaggtcattcgtggtctcgccttccttgaccttccgcacggacgttcagttgatccagatgccggcgaagcaggcgaggggacggggctcatcgagcgcgaaccagatatcgccgccttcggccttgttgaactcactgaacgaattgaacggtaccacgcagcggttttcgacgccgagccagcgggtccaatgtttgctcttcacgttgcggatgttggtcgtgccgttgtccggctccattctgagcaattcattgaaatcgacggtcttgcccttggcctgcagttcttcggcccgctttttagtggcggccatcaacgcctttgatgacgacggcattccccaccgcgcggtggcgagctcgcggccctggctccgttgcggacgatcggcgcctggtagtccggaaacacccccggcatcggtgccagattgccaacgtatcggttcacgacgcgaaacggcgcgatgatggcagcctagtttgtcgtgatcgaatagaggttatgccgacgtcggcatataaagattgcacatttcagcggtcgctctcggcgggcaacgacatcgccaggccgcggcacttcccgtgaccgaacaccacttggtttgcatgtccagccgtcacgatgacttcctcaccccgttctgttcaaatgatcgcatcacgatgccgtcgagaatcttgccggcagcggcccgaacctttcgctcagtatctcgaggcatcggtggcagcttttggctcgccacgagatcggtaagttccctatgtatatccgtacggaagccacgcgggtcatccgccatttccgacagaagctgaaatagcgtcatgagcatgaactggatcgccatgtcggctcccatctgctcggcttggtcagccgtgatgaaagaccacgtgttctgatgtttcatcgctatttcaccacacctgaccctatcctgtgtaggtccgaaagcgtccgcgcgtgtaggcatgcgatacggcgttcctcaactccgctatctccgattccaggagattgttcgcaatgattagcgcgcgaacagccgcacgcggatcgccgtcgcagacggcgatcgcctggtcgacggcggcttcaagaccgttgtcgtgttcgttcggctgggagaccgaggacatggtctgatcttggttggccgtcgatgatgcatgttcgtattttgttctcgtggagtcaagtgcgctggacctactcccaacgaggtgggccaggtcgcctccgtcggcctgattcgaatttgcccgcggctagtggttcatcacagtgattttgacgttttgataccgagccattcgaggatcggcagggtttccggcggcacgaggatttcgatgcttctggggacgccgggttgacgtcggatgaagccgtttcgttcgagggtgacgatcatctggtggaccgaaggcgggctgacgcggaagtggcgctggatgtcggcttcagcgggtggacgtccgaacatgtgggcgtaggtatggatgaaggccaggtaataaccctgcttctcggtgaggcgcgcgcctgatttttgactcatcgttggattcgtcccggcctccgacaaggaggcaaagcatgaatgtacgttatcgggtcgaattgagccaagccgagcgcgacgaactgacggagatgctcggcagcggcaagaacgccgcccgcaagcttaagcgggcgcagattttactggcggccgatggaggctgccgcgacgaggagattgcccggaccgtgagtgtcagcctctccaccgtcggccggaccaggcgccgcttcgtggaaggcaatctggagcgggccctgagcgaggagccgcgtccgggcgctgagcgcaagctgaccggcaaggaggaagccctgctggtggcgaccgcatgcgccaagccgcccgctggctgcaaacgctggacgctgacgctgctggccgacacgatggtcaagctcaccgatcacaacagtctgtcgggcgagaccgtgcgtcgccggctggccgagaacgacctcaagccgtggcgcagggacatgtggtgcattccccatgtcgacggcgaatacgttgcccgcatggaggacgtgctcgacctctacgccgagacgcagaatcccgcccggccgctggtctgcttcgacgagacccccatccagctgatcggcgaggtgcgccagccggtcccggcccaaccgggacagcgcgagcgctacgattacgagtatcgccgcaacggcaccgccaatctcttcgtcaccttcgatccacatcggggctggcgcaacgtcaaggtcaccgaccgccgcgccgccgtggactacgcccactgcatgcgtgatctcgtcgacgtccattatcccgacgccgcctgcatccgtgtcgtgcaggacaatttgtcgatccacaagcctggggcgctgtatgaggccttcgcgcccgccgaggcccggcgcatcctgcgccgcctcgaattccacttcaccccgaagcacgccagttggctcaatatggtcgagtgcgagatcaccgtgctacagcgtcagtgtctcggccgccgcatcgacgatcccaaaaggctccgaaacgagatcgcagcatggcaaaagaggcggaataaaacccgagcccgcatcaaatggatgttcacaacagacaaagcccgcaccaaactcggccgcgcctatccagccaccgccaaagagtcataatcactgtgatgaaccactagcatggttctgtggtagaaggaacttgtgcgggggtgtgcatcgatgcccatctatcgcctactacaaaattctccgctgggcccggatgaaatagcggttttgaccaatgcttatgagcgcaccttgcgcaagctcagcttggttgatcgcggtgatcccatcgcagaattgatcgccaaaatagttattgaacttggtcagcgcggcgttcgcgacgcgaaacaattatccccctcgccattaaagagcttggcgtcgaataggcggtaggggagccatgctatcggcagtgattatgggtttggtcggacttgtggtggtgatcgggattgccatcctgataagccatttcaacgcccgcgcgtgaacagtcgccatcagaaagttaagaccgcctcagcctggccccttcgtcggacaacacgaagcgcagatatgatggcgtttagcgcgacgccaaacgcggcggccggggaatctatgactttaccgcggctagatccgcgcaaacggaaagccctccgactgttcggacgacgcaaatgcccatcgctgatgaactccagtgcggcgcgttcaatccacaacgacggtgacctatccccacagtcgcgcaggtggctctggcgtggtttgggcgactcacgctaacccatcaatctcaaccgcctcactgcaccaaaaggacaaaaatggttgcagccaaccgtgaactgccggcttctggttatgcgctcgaagtggacggccgactcaaaaccgaatttgcaaccaaagacggcgcaagggcaggtggagaagaactaaagaaacgttttcccatgcttcagatcaggatctatgacgcgcagacgaattcgcgcgaggaaatttagctcaagtctaggcggattctctgcttgtgcgcatccgctagccgcggaccgggctctcgtgttggggtggacggcccccttccgccacactgcgtggcaagatgaggtcgtcgctgacccaaacgaaggagccgcccgtggaaacgattgttcgcatcggtttggatacgtcaaagagcgtatttcagttgcatggcgttgacgggaccgagcagccggttttacggcgtaagttgaggcgcggacaggttttggagttcttcagtcgtttgccgcctgcgcttgtcgcgatggaggcgtgcggggcatcgcactattgggcgcgggagttgcaatcgctcgggcacgaggtggtgatgatcccgccgcaatatgtcaaaccgtatgtgcagcgcgggaaatccgacgctgcggacgccgaggcaatttgcgaggcggcaagccggccgaaactgcgcaaaaactttgtgcctatcaaaagccccgagcagcagggcgcacagatggtggcgcgcgtgcgcaaccagttcatcggtaggcggacccagctcgccaactcgatccgcggctatgccgcggaattcggctttacagcgcccaagggactttcgcggcttcaacaattgctgatcgacattcaggctgacgcgacagtcccggagttgacgaaggagttggtggacgctttggcaacagaactgacgcgcgtcgatgaccagatcgccaagctcgacaagaagctcatgcaactacaccggagtaacgagatgagccgacggctggcggctattccgggcgttggtccgatcggcgcgacgctgctgtcgatcaaggtcgtggatgcacgcgcgttcaagtcggcaagaaattttgccgcctggcttggcctgacaccaaagaatcactcgacggccggaaagaaccggcttggcgtgattacacgcgccggtgacggcatgttgcgaaccgttttggtggccggcgcgacggctgtgatcgcagatatgcgccgacgggaaagtcgctcctggccttggctgaaagacatcatcgcacgcaagccgccgaagctggtggccatagcgttggcaaacaagctggcgcggatcgcctggaaactgatggtcagcggcgagcggtaccgacctgcaagcaacgtcatgccgatgccgacatagacttgaacgaaatgcagagcttggcgccagaccggcaggtttgacgctgggggcggaacttgcaggacaggaagaggtggtacgttcggcgcgagccggtcagtgaaatgctccgctcggtttaccggcagaaaatgccgctctcgtgtttggatctcactgtccgcgaagcccatcttggccagtggtcgcaagacctgaaaacaggccggacatatgagcgcaagcgatccgagcatgctgccagagccaatccttgcaagtcgggggccgtccacatatgaaccgagccgctgacgcttctcggccgtcccggcttcgatcccttgcgcgatacggtgtcgctcgccggaggctctcgcgttaggggccgccggcattgcatgccggcgccgctatcactgccccgaacgcgggtgccttgttaaccggtctcgcgactgcagtcgcctcggtgcccgcgggcattgcatgcccgcgtcgctatcactgccccttcgtcggctgccttctctcttgcctccgctgcgcttcggcctcaaagggacggcgctgaccagtcgtatggcaactctgcgcgtgccaacggtgtgctcggttcttcggttcgagggtggcgtggctgccaagccaattgtattggggtcgtcgcggggcgtcggcccgccttggcgcatttgcggcggcgcagccggctggcgagatcgtgcacgaaggtggccggcggatgcttcaccgccgcgaggttgacctcgctcggcgtcttgcagcgcgcgcacctgatctcaagccaggggtggcctccatttacggcgaatgcgcgctccgtgtccccgtcaccgtcgcggagagtgagagtgcgggccgggtccgacgcgacgggttgaagatcgggggagaggcctccggcgcccgtcgcggagaaccgcgatgtctggacataccgcccgagttcgtgccggcaacgaccgaacgagcctttacaccgaaatcactgacaagatcatagccgagctggaggccggccgttttccgtgggttcagccctgggggacggcgtcgatcaaggcgccgctcgcgatgccgcgcaacgcgtcgacgcagcgcggatattccgggattaacgtgctgatcctatggggtgccgttatcgagcacggcttttcgggacagagctggcttaccttccgccaggcactccggctcggcggccatgtcagaaagggcgagcggggaacgaccgtcgtctatgccgatcgcttcaccccagacgacgaacgtcggcgcgccacggaggccggcgaggagccgggtgccatcccgtttctcaagcgctttaccgtctttaacacggatcaatgcgatggcttgcccgaggatgtcgctgctttggtggtcccgccgccaccaggccagattgagccgcgagccgaggccttgatcgcggcgaccggcgcggatttccgcatcggcggtgcgcgcgcctactacaacacgacgggcgatttcgtacaggtgccgccgccggctgcctatttcgaaccgatcaactggcaccggaccgctttccatgagctcggtcattggaccggccaggcatcccgcctcaaccgcgaccacaccggttcgttcggctcaaaatcatacgcgcgcgaagagctggtcgccgaaatggcgggtgccttcgtttgtgcctcgctcggtatcgtgccgaccgtgcgccacgctgactacatcggttcctggctggaggtgctgcgcgaggataatcgcgccgtcgtccgtgcggcgagcgcggcatcgaaggccgccgatttcctgctcggctttctgccgcccgcgatcgattccgtggttgggggcagcgaggaagctgcatgacggatccgcacgctgtgcccgtatctgtcctcagttgatgctgcgcgtcagagagtgagaggcgtgccggcttgtctgtgacgggaaggaggtcgggagagagtctttcggccgcccgtcatggagaatccgacatggcatgcgtcgtccagaagatcaaactcagtccctcccgcgatattcccttcaacaagctggtgctgagccagtccaacgtccggcgcgtagaggccggcgtctcgatcgaacaactggcagagagcatcgctcagcgcacgctgctacaaagcctgagcgttcgtgcggtcgttgacgccgacggccaggagaccggtatgttcgaggtgcccgccggcggacgccgttaccgcgcgctcgaactgctggtcaagcagaagcgtatggcgaagacgcaacctgtcccctgtgtcatccgggatggcggtatcgccgaggacgattccctcgccgaaaatgacgagcgggtcggactgcatccgctcgatcagttccgcgcgttcaagctgctacatgacggcggcatgagcgaagaggatatcgccgcgcggcacttcgtctcgccggcgatcgtcaagcagcgccttcgtctggcgtcagtctcgccgaagttgcacgacgtctatgctgacgatggtatgacactcgaacagttgatggcattctcggtcacgtccgaccaggcgcgtcaggagcaggtctgggacaacatcagcagatccggcaatgacgagccatatcagatccggaggatgctgacggagaacaccgtgcgcgcttccgaccgtcgcgcccagttcatcggactggatgcctacgagcaggccggcggcgccgtgatgcgggatctgttcgcgcacgacgatggcggatggttgcaggatgtgccgttgcttgatcgtctcgttaccgaaaaactcaaagtcgaggccgaaacgatcgccaaggagggctggaaatggatctcagtcgccgtggactttccctacggccatgctagcggcatgcgtgagctagagggcaaacctgtcgatctctcacctgaggagcaggccaccatcgacgccctcaacgccgagcaggcgaagcttgaatccgactaccaggatgccgacgaattgcccgaggaggtcgatcagcgtctcggcgaaatcgagcaggctttgatggcattcgaagaccggccggtgctctacgatccgacagagatcgcccgagctggtgtcttcatcagcatcgattccgagggacgcctttccgtggaccggggttacgtccggccagaggacgacgtgccggcaactgatgctgatatcgagcagagcgccgatccgtcgtcgaccggagggcaggaggcaggtgcttgcattcggcgagcggtgatcgcggttgcaggcagcgctgctgatgccgacgaagatgatgaggatgcggccaagcctttgccggatcggctcatcacagagctgacggcgcatcgtacgctggcgctgcgggacgcgctggcagaaagtcctgcgatcgcgttccaggcagtgttgcacaactttgtgctgactgccttttaccggttcgcatcatcaggaagctgccttgagatcgggcttcacacgccgacctttcccgcccaagcccctggcttaagggaaagcgcgtccgcgaaggccgtcgaggcgcggcatgagtcctggaaagcacggctgccgaagagcgagaaagatctgtgggacgcactcacagccctcgatggcggtgcgcaagcgtctctgttcgctcactgtgcgtcatttgcggtcaacgccctctatgagccggccaaccgctacaatcagggtcgcgtctccgctcacgccgtccgcacgcggctcgaccaggccgacgtgctggcccgcgcggtgggcctcgacatggtccaggctggctggagacccactgtcgacaattatctcggccgggtcaccaagcctcgcattttggaggcggtgcgggaggcaaggggcgagtcttccgcgcagctgatcgaccacctgaagaaggccgacatggccaaggaggccgagcgccttctcgatggttcgggctggttaccggagccgctgcgtctcgtcgaccccgccgcgtcgccagcggaagaggagggtgaagcgggtccgctgcccgatttcctcgccgacgaggaggaaggggagaacgccggcgacgatgatccgcaacagctcgatgcggctgagtgacatcacagagcgggatggctccggctgtcccgcagttttggggaccggtgcagagcgccggtcccctttttattggcgatggctgagaggtagaggcgggccgggaagggttttgagtcgccgcggtcttaaaggagagcgccgagcggttcagcccattcctgctctcccgagaaatcctcccatgaccgaatctctcgccggcggcgccgtcgcgccgctctcgatccgtgccaccgcagttgtcgcctcgagtgtcatcagggctgcgcgacagcttttgaccgatctcgagcgcagccgccggatcgatgccgctgtcctgcgcggcgccatggaggctgccttcggcgcctccgatgcgaccggggtctggaactggaagacggcctacaacgcctgcgaggcggcgaccgtcctgttgctaaggcgatatggcgccgtcatgcgcaccaaggcgacgtcgccagccgcgatgctgccgatgctgatgaggatcgcgagcctccttccgactcagacacgccgatctgtggagagtgaatccctccagcagttctccactcctatcgggctggcgtttgtagccagccgagcggccgcgatcacgcctactgacgtcgttctcgaaccttcagctggcaccggccttctcgccatcctggccgaacttgacggcgcctccctggtccttaacgagttcgccgagagccgtgctggcattctcgcgcagctgtttcccggcgcctccacgacccagtttgacgccgctcacattaacgaccacctcgatgccggcatcgtgcctgatgtcgtgctgatgaacccgccgttctcggctgcggtccatgtcgatcgacagatgcgagaggcggcactgcgtcacatcggatccgccctggctcgacttcccgaaggcggacggctggttaccatcacaggcgcaaacgtcgcgcccgacaatcccgcatggacctgttccttcaagcggctgcaagaacaaggccgtgtcgtattctcggcggcaattgacggcgccgtctatgccaagcacggcaccaacgtcgacacccgtctgaccgttatcgatcgagtcccggctgacgacgtcgcctcgttcccagtatctcccggcattgcgcccgatctgccgactttgctcggctgggtccaacagcacgtgccgccgcgtcgtccaatggctggcacagcggctggcgtggtgccggcaattgccagccctgcaacgcctcgaacagtacgtgcctacgtcgctcagcgccagtcggctgcagccgtgccggcaattgctcccgtggcgaccgaagtcgcctacgagccggtggattggacgcccacggatggcggcagcatcaccgattcgctttatgaggcttacacactgcagtcgatccgtattccaggcgcgcaaccgcatcccacaaagctcgtgcagtccgccgcgatggcttccgtcgcaccgccggagccgtcctaccggccgcacctgccggctaacgtcatatcggatggcatcctatccgatgcccaactcgagagcatcatctacgccggcgaggcgcattccgcgtttctcgcagcgcctggacagtcgatgcgacttttgacgtcgtggcggccgcgcgcgacgacgcggaaaatgccgttcgctttcgccggggctggttcctgggcgatggcactggcgcggggaagggccggcaggtcgccggcatcctgctcgacaactggctgaaaggtcgccgccgcgcggtctggatcagcaagtccgacaagctcattgaggatgcgcaacgcgactggtcggcgcttgggatggagcggctcctcgtcacgccgctttcccgtttccggcagggcacgccaatccggctcacggaaggcatcctatttaccacctacgccacgctgcggaccgacgagcgcggcgagaaactttcgcgcgtgaggcagatcgtcgaatggttgggctccgattttgacggagtgatcgtcttcgacgagagccacgccatgcaaaatgcggttggtggcaagggcgaacgcggcgaccaggcggcctctcagcaggggcgtgcgggcctcaggctccagcacgccttgccgaatgcgcgggtggtctacgtctccgcgactggcgccaccacggtacacaacctcgcctatgcccagcgtctcggcctatggggcggcgaggattttccgttcgcgacccgggccgagttcgtcgaggcgatcgaggagggcggggttgcagcgatggaagtgctggcgcgcgacctcaaggcgcttggactctatgccgctcgctcgctgtcctatgagggtgtcgaatacgaactggtcgagcaccagctcacagcggagcaggtccgcatctatgatgcctatgccggtgcattcagcatcatccataacaacctcgaggcggcgatgcgggccgctaacatcacgggcgagaccggcacgctgaatggacaggcaaagtccgcggcccggtccgccttcgaaagcgccaaacagcgcttcttcggccatctcttgacctcgatgaagacgccatcgttgatccgctcgatcgagcgcgatctcgacgccggccacgctgccgtcattcagatcgtctcgacgggcgaggccctcatggagcgacggctcgccgagatcccgaccgaggagtggggtgacgtccaggttgacatcacccctcgcgaatatgtcctcgactatctcgcccattccttcccggttcagctctacgagcctttcactgactcggagggaaacctctgctcccggcccgtctatcgggacggccagccggtcgaaagccgggaggctgtcgtacgccgcgacagcctcatcgagaagctcgcgtcattgtcgccggtgcccggcgcgctcgaccagatcgttcagcgatttgggacggacatggtggccgaggtcacgggccgctcgcgccgcgtgatccgcaagggccagcgtctcatcgttgagaaccgtgcggcatcggcgaatctcgccgagaccacggcgttcatggacgacgtcaagcgcatcctcgtgttctccgacgcgggcggcacgggcaggagctaccatgccgagttgtcggcgctgaatcgcaggttgcgtgttcattacctgctcgaacccggctggaaggcggatgccgccatccagggcctcggccgcacgaaccggaccaatcaggcgcagccgccgctatttcggccggtcgcgacagacgtgaaggcggagaagcgcttcctctccacgatcgctcgccgcctcgacacattgggcgccatcacccggggtcagcgccagaccggagggcagggcctgttccggcccgaggacaacctcgaaagccagtatggccgtgatgcattgcgccagctctacatgctgctggcgcgcggcaaggtcgagggctgctcgcttgagagattcgaagatgcgaccggactgaagcttatggatgccaacgggctcaaagatgagcttccgccgatcacgaccttcctgaacaggctgctggcgctcactatccaactgcagaatattctgttcaccgccttcgagcagctactgaccgcccgtatcgaaggcgcgatcgcatcgggtacctacgacatcggactggaaaccctccgtgctgaaagctttgtcgtcactgatcggcgaacgatctatacacatccggtgacgggcgccgagacccggctcctcacgatcactcagcgccagcgcaatcatcctgtaagcctggatgatgccctcgaccgcctgtcggatcagcgtgctgtcccgctgatcaatgagcgctccggacgagccgccgtgcaggtcccagccccgagcttcatgctcgatgatggcgagatcgaacgacgcgtccggttgatccggccaatggagcagcacagcctccccctgaagatgatggcggaaagccattgggttgaagccgatcgcgaacgcttcgccgcggcctggcaggtagagcttgccgaggtggccgagttcaccgaaagcacgatccacatcgtggcgggcttgttgctgccgatctggaagcggctgccgaacgagtcgacgcgggtctatcggctgcagacggatgctggcgaacgcgtcatcggccgcaaggtctcggcagcctgggtcgcgaatgtccttgccgttgacgagcccaagctcgcgaccgacaaggcctttgccgcgctgatggaggggaggacggtccttgagctcgccgaaggcctccagctccgccgtgtccgggtcatggacgcatatcgcatcgaactttctggattcaacgacgcgatgcgcgaccggctgcgcgcgtacggcctgttcggggagatcatcacctggaagctacgcatgttcgtgccaactgacactgatggcatcgaagtcctggcgaaggtgctcgaccactacccaatcgagcgcatcgccgaacgggaggctgcgtgatggcccgcgacgcctccgaactggcacactgcctcgcgcgcgaagccgaagcggtgtgccgttattatctctccaacggcaggcgccaggggcggtactggctggttggcgacgtgcacaatacgccgggccgctcgatgttcgtgcggctccaggactcaccgaagggacccgctggcaaatggacggatgccgcaaccggcgagcatggcgatctcctcgacatcgtcagggaaagccttggtcttcctgacttccgcgccgtcgccgaggaggcaagacgctttctcaagctaccccgggctaaaccggaaggtgcctcaaaaccggctcgccccatcaccgcggttggctcacaagaggccgcaagacggctgtttgcgatctcaggtccgattgagggtaccgtcgttgagacttatttgcaccgtcgcggaatagcccgcgtgtaccatggtggcagcctgcgcttccatccgcgctgctactaccggcctgacgagcatttgccgaccgagacctggccggcaatgatcgctgccgtcaccgacctcgatggcgggatcaccggcgtgcaccgcacctggctcgatccggacggctttgatcgcgttcggctcggcaaggcaccggtcgacacgccacgacgagccatgggcgacctgctcggtaacgcagttcgtttcggtgtggctgacgacgacgtgcttgtcgccggcgaaggcatcgagaccatgctatcgctacgctgtgtgcttccgacgttgccgatggccgctgcgctttcagccaatcacctctcggccatgctgctgtcgtcgagtttgcgccggctctatatcgcccgcgacgccgatgctgccggagacgcggtccgggcaatcctgacgcagcgcgcagcagccgccggcatcgaagccatcacgttgtcgccccggcttggtgatttcaacgaggatctctacatcttcggcctcgatgctctccgtacggctttgcggatgcaactcgtaccagaggacgtctcccgcttcctgctcttgtcgaccgctgtcgcataggcgcgttttgtttcgacgccgacagctcggtcgaggcggtgccaatgccgaagaggcgcgcgacctcggccttctagagggcgatcggacggcaagcggcccgggccgccaatggctgcggtgcggctattttccgccggccctgcgggcctttgcatcgcgaagcaaaatagccgcacctctgccatcctccgctggcgcttcggccctccgcttcgctttcgggttctggcccgctccgcccgccgcctgagtgatcgccacgaaggccgcgatgggcgcggccgatccggcaaaggacctcttccatgaccgaccatgacgacatcgaaccgccgcacgccgcctctgcaaccgaccacgtcctcagcgaattgcagctcttcggctaccgtccatttgacgatgagccagatccgagaccgctacccgagggcaagatgatcgccggcgcagtcgccgatatcttcgacgccttggttgccaccttgagcgatacgcggctcgagccggaccttagcgatttgctctggtcgaccgtcaacctgttccatcgtgccgcggaccgaattgatcgccatctcgatgacaacgaacaggctcaacgcaagagccagcgcgagcagaatggttcggaagtacgatcggtcgaactcgagcgcctgacggccgaaggcatcacactgatcgagcgccgcaactgcctggagctgttccgcgatcaggccatcgagcactttgagctccacaccggttcaccctggcgcccccgctcgggttcgcttgtcaaccatcgcacgctcacggcggcaatgatcgactcccgggatttcatcgcagccaagcgccgcgcagagaccgaggtcttgttgccacctgggcccaagatcgcactcactggcggcctcgacttcaacgaccacaccttgatctgggatcgtctcgacaaggttcacgccaagcatccggacatggtcctgatccatggcggctcaccaaagggtgccgaactgatcgcctccaaatgggcgaccaaccggaaggttccacagatcgccttcaagccggactggaccaagcacgccaaggcggcgccattcaagcgcaacgacgccatgctcgaactcgtgccgatcggcgtcatgcatttcccgggcacgggaatccaggacaacctggccgacaaggcgaaacgactcggcattcccgtttggaaatttggcggcgcgtgagcgccgccttgccaccttccgaaccaccaaggcggagttgcaagcgccgcaactccgcctcgtttcggttgcatatccagaatcgcgccgcggtggtggtggaaggcgcgaccgttactcctttgcatacggagccaccaccatgatcgcccttggacttgtcctcaacaccgtcggcatcggcttgttctgctggctgatcttgacgctggccgtgtacgctttgccgttttttgtcgccgtcagcgccggggtggcggcatttcatagcggcgccggcatcctcggtgcgccgctcgtcggcattgtcgccggcggcgtgacgctcgcgattggacagaccgcattcgcgatcgcgcggtttccgatcttgcgtgcagccatagcggccgccttcgccttcccagccgcgattgctggctatcatgtggtcttcgcgatgtcgcaactcgggatgccctcgctggcatggcgtgaggtcttcgcgtgcctcggcgcggtctttatcggtggtacggcgtggacacggttggctgtccttgcggagccccgtccattggagtcgggcagggtcgtgccaagcgcatctccggcgggtctttctgccgctacgcacgacggatagtccctctccacctgcctcctcgatcagattcgcgcagatcggagcgttgaaggagggatcgtcgaactcgagcgaacgtaagcgttccttcgtgcggagcccatagcgagctgcgtcatctcggcccggcccatatagttgcgatggtgaggcccttcggtcgcggctatttgtcgtctgacaattccgccgtttcctgcatgtcgtttctttctctacgcctggaaattccgacttcttgcacattcgaaccgaaattggccaagtcttctccccaggtcgtggttcagcacgcggacgcacgtggcctctttgatggcttgatctggccgaagaccggctgcgcctcgatcgtctgagccgcaacgccgtcgctcaagactttcttcccctgggctacgcccattcctcgcgaggcaagaaagtctttacgacgtcgtcctccgcttcgctccggcccgcaaccgggtgcgtcgccgatcgtcctcggcctgtccatcgccatcgaggccgcggtggtcgcgggctcgaaacacaacaggagaagtgacatggctaacatcggttctttcaagaaggtcggcaacgatttccagggcgagatcatcaccctcagtctgcaggccaagggcgtccgcatcgtcgccgagcagaaccgctcctctaacgagaacgcgcccagccaccgcgtctttgtgggccgggccgattatgcgaagcgtggcgttatgcggagtggtggcgtctgagtgcaggttttccgcgggtttcgggaccgccgcgctccgcataatatcgtgagagaagcagcggcgcctcgcgcagggcgaggcgccgcaagcttgcgggtcagcgcgaccagaccagcgcgtagccgtcatcgaccgcgacgaggttggcgtagatcggcgctgagaaggacgggtcgtcgagcttcaccgaatgatagacggtgttctccttggaggtccgctgccacgcggcacctatctcgacgttgccggccatcacgcgcaggctcggagccttctcgttctcggacggttcggccggaaggaagcgcgccttgatgttgagcgagagcgtcttgatggtgccgctgtaggatccatcttcggcgcgggtgaaggtgccaatctgagccatggtgatctcctgttgttgtatccaagcccgcgaccatcgcggccttgatggcgatctttgagcgccgcaacgaccggcccgcagccttggcccgcagcgaagcggaggatggcgggctgagcgatcttgttgcctcgcgaggaatgccgccgcttggcggcaggggaagaagatcgcgaacgagccattgcgggtaaaggtcggcgagcgcagcgagcgtattgtggcgcgtgatctgccagcaaaaggccgctatggtttaggcggaagcagccccacaggagagcatcggctcaaaggcacttcacaactgcggcaatgacggcggcgtcacggcagcattccgctctcccggtgcaattgagcgccattaagcctcacccgtaagaacgcgaagaaccggcctatgcgcgctggcagcaacagcgagaatgcggcacgcgcaggacaaaatgacgccgccgagtgaggtgcgccgactcggtccaaacagccccgatcttctgtggacagacggccttgtcgtgacgccaagcgctcggaccgtcgcagaacgccgcatgctgtggcctccaagcaacaaaggaggcaatcatgtcgaagcagaaacgcaagcattggaacagcgtagagagtcggctgcactttgcgaaaccgtatgtcgatggcttcgagaactggcttcaagaccatggatacacgccgagcaccattgaagagaaggtgagactactcgcaggctggaccgactggatgcatgcggcgggttttgcgctcgacaatgttttggacgggctcactgcatccgcggctgccttcaaagggaagaagagcatccgcgcctacgccggcgcaggtcggctgttcatccgctatcttcaagatcgagaaacccttcccagatcggcaccaccgccatcgccgacagagatctggccgctccttgcggcattccggcgctggatgcgcgaccagcgtggtgtggtcaactcaacgctcgatacctatcagtcgaccctggtcgatcttctcgaagcgctcggcgacaatccaacagcctttaccgcccatgcaatccgagcctttgtccttgaacgtgccaagccgcacagccgcgggcgcgctaaatcgattgccgctgcaacacgggcgttcctccgcttcctggtggcgactggacaaagcccggtaggacgcgattatgccgtccccggcttcgccaactggcaattggcgtcggttccgagattccttgccgcagacgatatcgcccgcgccatcgcagcttgcgagggcgaagggcggttgcgcgacaaggcgatcgttctgctgcttgcccgtctcgggttacgggccagcgaggtggccgatctgaaattggccgacgtcgactggcggaatgggcgcattaccgtcgccggcaaatccagacgcgaggagtggcttccgctgacccaggaggtcggcgatgcgatgattgcctacatcgagcgagtcaggccaccgttgtcgacgccccgtttgttcatcaccgaagccgccccggttcgaccgctgacccgcatcgccatcaaatgcatcgtgcgtcgcacgctgctccgagccgggatcaaaagtgcccatcaaggagcccatgtgttgcgccattccgcagccacgacgatgcttcggcatggcgtcagtttgacaggcgtcggcgccgtcctgcgtcaccgatcgccggcaatgacgatgcactacgccaaggtggacttcgccctcttgtcggagatcacgcagccctggatcgggaggctgccatgctgagcgatgacgcggaacgttacatcgagcttcgccggactcttggcttcaagctccgaaagccgtcgcgacaccttcaatcctttgcgcgctttgcgacggaaaagggcgagagttatgtcagcgccgccacagcgctggaatgggcgacgatggcgccaactcggtgcacccggcatcgccgcctcggtgacgtggtgcggttcgcgcgctttttgcgggccgagaataccgctcatgaggtgccggtcattctctttgccgaacgcgcatcgcggcccgttccctatatctacacgccggatgaattgactcggatccttgagggcgccggccaactccgccggcaaaagcccaaccccttacgtcggcagctctatgtgatgctgttcggattgatcgccgccacggggctgcgcgtatccgaggcgctcgaccttcggttcgacgacttactggccgacggtgtcttgcatatccgcgacaccaagttcggcaaaagccggctcgtgccgttgcacccgaccgtggtggaggctctcgaccgctatctcgacaggcgccgccttgtcgcgggatcggacgatcacctgttcccctcggcgaagggcaagagactcgcctccagcacggtgaactatacattccgctgtgtcctgcggtttgcgaatattgctccggagcggccccggcggccgcgcattcatgaccttcgccatagcttcgcgacgcatgttctggagcaatgcaacaccgagcgcgacgcggtcgcccgacacttcgtcgcgctggcgacctatctgggccacgtcgatatcaagcacacttactggtacctacaggcgacaccggaactgatgaccgacatcgccgccgcggccgaaacgttgatcatgggggagcccatatgaccctccttgctcctctgatcaccggcttcctgcgcgactacatgccccgtcagcggggctatagtccgcatagctgcgaggcttatgcctacagcttccggctcttgttcgccttcgcggcgaagcgcatccagacaaaaccctcgcagcttcttatcgaacagctcgacgcggcattgatcctggactttcttggtcacatcgagcgcgagcgcggcaatggagccgccacccgcaatctgcgccttgcctcgatcaagacgttcatgcgctacgttgaataccaggtgccttcggctctggagcagatcggtcagatccacgccatccccgtcaagcgccacgatcagaagcttatccgtcacctggtcatggtggaggtgcgcgcgatcctgaatgcgccggacctcacgacacgtctgggcgtacgcgatcgggcgatgatgcatctttgcttcgcggccggactgcgtgtctcggaactggttggggccatgatggcgaatctatccctgcagcggccgccgagccttctggtcctgggcaaaggtcgcaaggagcgatgtcttccgctttggaaagaaaccgcagccgatctgcgggcgtggttgaccctgcggggctcggttcgtgtgcccgagctcttcgtcaatgccgaaggagcgccgatgacgcgggccggcttcgagtacgtgctggagaagcatgctcgggcggcggccgagacgtgtccgtccctatgcaaccgttcgatatcgcctcatcagctgcgccacagttgcgcggtgatcatgttgcaggccacacacgacatccgaaaggtcgccttgtggctgggccatgccgatatccgcaccacggaggtctacctgcggatggatccctccgaaaagctggaggcggttgaagcggtcgttccgccggagctgcggcgcggacggttcagagcgccggatgcgttgatcgcctctctgttagcggacacatcgccgccgccggcgtgaaaaagccgagcttcaccgagtggtcgcggtccgtcgatatcctcggtgcagcccttgctcgcttgcattgcccacccagttccggcagttgtcgttcgatcgcaaaccggcgagcgaatgccttgagccgtgcgtgatcgttgacgatgcggcagcgccatcatcgccgtggtgttggtatactgggccatcatctccgttgctgtgcgcagcctgcgaacacgcggaccttttgatgtcggatcacgccccgggatgcggtcgctgcgcttcccggcctgatccccgcaacgcttgcagcaacttctttccccgctgctgcgcagcttcctcgcgcgacaaacaagttgccttcagccgtcctgcgctgcgctgcgggccttacggctgcgggtcggccgtcccggggcttcggatcgccatcaaggccgcgatggtcgcgggcttgaaacagaaaacggagattatcatggcccagatcggtaccttcacccgcggcgaagacggcgtgttcgccggcaccatcaagaccctctcgctcaacgtcaaagcgcgcctcgtcccagccgacgaatccaccaacgacaaggccccggacctgcgggtgctggtgggcaacgtcgagataggtgccgcgtggcaccgcacctcgaaggagaacaccgagtaccactcggtcaagctcgacgatccgtccttcccggcgccgatctacgccaacctcttcaagggcgagaccgactacaccctcgtctggtcacgctgaccgaccgctaccgcgacggttcgcccgccgagccgtcgcggctcttccctcgggattatgtggagcgcggcgagcccgaaacccgcggaaaacctgcactcagacgccaccactccgcataacgccacgcttcgcataatcggtgttatgtggtgcaccacataacgccgagatcggagcagcctggtcgaagcgctccgaggagggccgcgactatctctcgctcaagcttgacgatccttccttcaacgcgccgatctacgcgaacctgttcgacgacgagggtggggaaggctacagcctgctgtggtcacgctcgcgtaagaacggcgactaaagcgtagagctcgctccgccccgcccgagttcctccgggcggggcttctgtttggttcactcttgggagatcgcgattgggtgaagctaagcatccaagcttcaacgctccgaccacgccaatatgctcgacgacggaaacgcctacgatttgtttccgcgcccagaccgcttcagcaagtctcccggctccgatcccaatgcttcggcaatttgtccaagcacagtaacacttgccgatacgtcgccgcgttcgatagcgccgacgtaacgagcgcttaagcccgcacgctcggccagttcctcctgcgtcatttgtagctcgtggcgtctccgacgcaggtttaccgccatgatctccttgagatccatagcgacatgggaacccgaaccggaacgatcgttctaggaacgatcgttcctattcgccacgagatatgctattcaatcaatacgcggaggcggacggtcgttcttgatcccggtggggatgcaatgccaagtcgggctggtggagccgatcaaaatagggctaaagtaagtctggcgaacagttatggcttgcagtgagttggaatcattcgctctgtgacgaacgcatgaaaaaaccacttccagatcccgacgtggccgacgtagctccgacagaccccgttctcacggtgtacgatgaggagcacgtcatcacgtatctacgaatgctcgatgcggacgcggaaggagcagactggcgcgaggtggctcaactggtactaaagatcgacccagagcttgagcatgatcgcgcaaggcgtgcgttcgatacccatttggctcgtgcgaaatggatgacggagaaaggatatcgtcatttgctgcgcggcggcgcatcaaatccgaatctttgaagcccttccgtagaggaatttactccctgatttccgtgtttgatccgatgcatcacgcgatgcaggatcagggacttcctcaaccaaagctggtcgggtttatcgcgtttcaatttcgcagtgcgatggggacgcgtaatgccaaaattcgattggagatcgccagacgcctatgatcgcgttcaagaggcggaaatcaccggactagcgtgggaatgtctccgccgtaatcccgatttcggagctgattgtcgtagcgccttagaggcgcttcccaaggcaagcccggaattccgccagcgttggggcttgtcttttcgtagctgaccccagccattcctgcctcgaacagaccgtcttctgggcgccggaagttctgccgacggtcgttccggtgcggcctgtatcgcacgcggtcccccaagcgagcgtcgccctggatctcggcagcttgaccgacggtcagctgcggcaaggccctgatggttggcacgcagtattgcgtttgcagaaggtagaacatcgcgtttggttcaaggaagcgccggtcgttgccggtacctatgcggtcgaactgccgctcgaccctgactttgaattccgcgcggatgcaggcaagcggctgtggcgcgccctcaatggcaggcctccggggccgccgctgcatgcgctttccacgcatcgccggcgccggctcgcgcttgctctgcgcgcgctcgatgcgcgcacggacggcagtacctaccgggaaatagcagaagtcctgttcggcgccggacgcatttccgaacgcgactggaagactcacgacctgcgcaatcggaccattcgcctggtccagagcggtcttgcgctgatgcgtggcggctatcgcgcattgttgcgtccgacatctcgcaaaaaataggacgcgcttcaggggtatcgaaaatgcgcccccttatcttcggcatcccccttcgaggctctactccgccaatgtgtccgttgacgcgccgccaaactcgctggcgctccagacgaccgcggagtttttcagatgggcgatcctaccgccggcttgccgccacgatacttgcgcaccgccgaggcggcccgattcctcagcctttccggccgtaccctggaaaaacacaggacttacggcaccggaccggcttaccgaaaaatcggcggtcgcgtcgtctatgcgctcgacgacctcaaggcttgggccgaccgtggcaccaagacgtcaaccagcgatcccggtgccggcaccgtgctgcctgcaaagcggcacgcacccgttccttatgcggggaaggagcggcgctgacagatgtccgagagcaatttctcagcacgggggcgccgtcgctctgagcgcgatcaactcgatctatttcgtgcattgcccggcgacttggccgcacgcgatgcgcaagatttgatggcctatccgttcttctcgctggcaaagtccaggcggatcattccgatcgattttcgcgtcgggaccatcctgatccgcgtcgaggccgtgccagagcacggcatggcgacgatctgggacgcggacgttctgatatgggcggcttcgcagatcgttgaggctcgcgacgctggcctgaagacatcgcgtctgatggccgcgacgccatacgagatcctgacctttgtcgggcgcggcaccagcgtgcgtgactatgaccgtctcaaagctgcactcgatcggcttcagtcaacgaccgtcgtgacctcaatccgccagccgacggagcggcggcggcatcgcttctcctggatcaacgaatggaaggaaacggcagattgccacggcaagcctcgcggacttgagttgatcctgccggattggttctacacgggcgttctgaacgatgcgctcgtgctgaccatcgaccgtgggtatttcgatctcaccggcgggctcgagcgatggctttatcgtctcgtccgcaagcacggcggccgtcagggcggaggctggagcttcgacgtcgtacaccttcacgccaagtccggcagcctatcgccggtcaagcactttgcttatgacctgcgccagatcgtgcgccggcagaccctgccgggctacgaactcatcatcacgcaggatccaaacggcgcggagcggctgaactttgcacctactgcgatcgacccgctcacagagcggctgcgaaagcgcgggctcgtacctcacccaggggaaaagctgtgaattcgctcgtgctatcggggaccacaactctcgtgccatcggggaccggatcctcgtgctatcggggaccagaatcgcactcaacgccttggcgcacaacatcttctcgacctcgtaactctactaacagggaatccttcggattccttctaacggacctcgacggccgggatgcggtgccagcaggacagttgccggcccaacagcggcgcgacgaccagaaccgcactcctcctttcaggcctgcgctccagcatcccggtatccagggtgcggttgtgcgtgccacacgtccgacactgacatggagtcgcaagtgaatgacgttacgactgtcgagcttctctggctcgaaaagcggattgagaaccggattcggtttggtcatccgatctctgaaaagatcgtcgaccttcatcggcgtgtcctctcattcgcgcccggcagcatctttgcgttcgtgcgctggacgtccaacgacttcgggaccgtgctgtcccggatcgacatcttgcgtgcggcggcaccgggccagcgctactcaaccgtcccttggatcaaccctggcggcgagagtctgctgcgactatctggctggccaaaggtcgagcgcgttctgcagctgatcgatgcggtagaggcactcgggatcgaccctgcggacgctgcgcctgactactggcaccacgttcacaaccggctgtcagtcaacgaggcgccgcgaacctatacgcgcggtcgtcaccaggcgtggttgcatcgccggaaggtgacgtcatgaccggccgaatgacgaccattctcgcgacgtttggaagcgtcgccctcgtgctggccggaagtgaaaaagagacgccttcctacatttggaacgcctcggagagcgtacccattggcctgtatcgattgcaaccagtcgaccgactgagcgtcaccgacctcgtcgcaattcgaccgccggagccgctcggaacctttctcgatttcaatgggtatttgccgatcggcgtgccgatgctgaagcggatcctcgcgctccctggacagaccgtctgcagaaccgggctcaaaattgctgtcgacgacgttgaggtagggcaggcgagggaacgcgacgcccgcggtcgacccttaccggtctggcagggatgccgtctgctctcgaccggtgaagtctttgtcatgaattggcagtccgaggactcgcttgacggtcgatactttggaccgctccctgcatccgcggttatcggcagggtggtgccggtgtggacgcatgaggagtgatcatgcagatcggcagcatccctccgacctatttcggctcattcttgcacactctgatcttccctcaccggggcggtccacaacaggcagagcggccgcacaggcagcgacgcaaccggtgcaagctgttattgccgggtcagattggaggactacgtccgcgtcggatcattgcacgccttgtcacggccatcgtgcctcggtttgcattcgaaacgctgcaacacgatcatgacgctagactctcgggtttgctactgaaggaccctcgctcacgcggcaagagttcgcggaggagtacgatattaaggtgctgatggcatacgggcgatgccttcggcccgcgctctactcgtcgcttcgctcctcaccgagccaccctgcgggtgtctcggccctccgggtaacgatcgctatcgcaaacgctcgcttcgctcgcaaacagtggggggcttcgcaaatcaactgccaaagtcgcggcggctctttcgcaatgaatcggccaccagccgacgttcgggcaggcgcaattggatgatccaccgcaatgaccctaactgcattttgtcgcaaatcgccgcgagtaccgcgaggctgttggcttggaagttgggccctgggaaccagcaaccgaggagggcaggataaaagccgcaaggtgcggccggtcggtcggttgggaaatgtcagcaatctcaatcatgctccgaacattgcgaaggaccggcgcaacttgcgagtttcgccatggcgctgttcttgctcggttttcgacaccttgcggcgggcaagatgagccgcaacgacgatttccgcatccgtccaggccgtatccgttcgacgcgcgcgcccaaggcaaaatcgtttctcgcgcaggccctcagagccgcgcagaaggcaggcggtctctcacacggcggagtcaggaggagtgggtccttcgggcgcggccgtgcggcgagcgttgccgcggcacggctcctcaacaaccgcgcccggggcgccatggtcaaggcgcgtgtcgtacgccggatgcggtcgcccggcgcactgcgagcccatatcggttatctcaaacgggacggtgtcacccgcgatggatcgcccggtgagctcttcgatgctgccggggacgatgcagacggccgggcttttgcggaacgctgcgacggggaccggcatcatttccggttcatcgtctcgccggatgatgccactgagctggaaagcctgcggagctttacccgtgagctgatggatcaggcctcgcgtgatctcggcacgcggctcgactgggtcgccgtcgaccactggaataccgagcatccccatatccacattctcgtgcgcggtcgcgcggacgacggttccgaccttgtcatcagccgcgactacatcggaaccggcctgcgggcgcgcgcaggtgatctcgtcacgcgtgagcttggcccgcgatctgagctcgagatacggcgcggtctcgaggcagaggtcacgagcgaacgctggacgcggctcgatcgggtgcttgcccgggaagcgggcagggcggaaggggtggtcgatcttcggcccgaacgcgatgtcgcgcgcgatccgttgcgggagatccggatcggccggatgcggacgcttgagcggctcggacttgctgaaccagccgggcccgcgcgctgggttctggccgctgacgcggagcagcgcttgcgtgcgctcggggagcgcggcgatatcatcaagcggctgcacaagagcctagccaaggatggtgcatctcgcgcgccgtcatcctgggcgctcgagggcgaaggccatggcggacccgtgatcggccgtctcatcgcccgcgggctggatgacgagttaaggggaacagcgtttgccgtggtggacgggatcgacgggcgtgtgcatcatctgaagctccccgacatcgatacagccggcgacggtccgatcgggggcattgtggaactccgtcgttttgaggatgcgaggggccggccgcggatcgcgcttgccgtccgctccgacctcaacctcgaccaacaggtagtggccgaaggggcgacctggctcgatcggcgcctcgttgcccgcgaacctgccgatctctcgcgagccggtttcggtgccgaggtccgccgcgcgcttgatcgtcggattgatgcgctggcggaacggggcctcgtgcgccgggacggagacaaggtcatcatcggccgcaatcttatcagtaccctgcgtacccgcgagctcgattcagcgggtaagcgtttggctgaagaaacggggctggcgcatatgcccgccgaggcaggccagtcggtttcgggagtttatcgccgaaggctgtcgctcgcctcaggccggtttgctatgattgacaacggcctgggcttccagctcgtaccctggataccgtcccttgagcgcgaacttggcaggcaagtaagcggcatcgccggtcccggcggcgtcgactggagttttggacgcaagcgcgacctttcgctctgacccgccgatctctgcgctacggcgcgcgcgaccgcgattgcctggatattgtcgttgcgtgggtgcacggggcgagcgcttctgggcctatgtccgcgaccaagattctctgggggcagctgttccttgtctcgatcgtcgtgctcgcctttgtttggacggcgaccgagtggacggcctggcgtctcgcctaccaaccgcagctcgggcccgcctggttcatggtcgggcgctggccgatctatcagccgcttgctttcttcatctggtggttccagttcgacgcctacgcgccaaaaatattcatcgagggggcctgcatcgccgcaagcggcgggttcgccgctatcggcatcgcgatcatgctgtcggtctggcgggcaaaggaagctcagcaggtgaccacatacggctcggcgcgctgggccgacgcacgtgaggtcaggcgggcgggccttctggggaccgacggcgtcgtgctcggccgctttgatggccgatatctccggcacgacggccctgagcatgtcctttgctttgctcctacccgttcgggtaagggcgtcggcttggtcattccgactcttcttacttggccgaactccaccatcgttcacgacatcaagggcgagaatttccagctcacctcgggctggcgcgcgcgctttgggcccgtgcttctgttcgaccccaccaaccaggcaagcgcggcctataaccctctcctcgagatccgcaaaggcgactgtgaggtacgggacgcccaaaatattgctgacatcctcgtcgatcccgaaggcgcgctcgagcgccgcaatcattgggagaagaccagccattctttgctggttggcgcgattttgcatgtcctttacgctgaagccgacaagacgctcgccggcgtcgccaacttcctgtctgacccatcacgcccgatcgagacgacgctgaatgcgatgttggcgacgccgcacctcggagagcgcgttcatcccgtggtggcttcggcatcgcgcgagctcctcaacaagagcgagaatgaacgctcaggtgttttgtcaaccacgatgagtttcctggggctctatcgcgatcccgtcgtcgccaaggtcacgggacggagcgactggcgcatccgcgatctcgttgacggaccccggcccatctcgctctttcttgtcgtcccgccatccgacatcgcccgcacaaaacccctgatgcggctggtacttaatcagatcggacggcgattgaccgagagcctggacaccgatcggcgacgacagaagctgcttctgatgctcgacgagtttgcagcgctcgggcggttggatttttttgagagccagcttgccttcatggcaggctatggcattcgcagctttctgatcacccagagcctgaaccagctcgaacgcgcctacgggccgaaccacgctatcctcgacaactgccacatccgggtcgctttttcgaccaacgatgagcgcaccgccaaacgcgtgtcggacgcccttggaaccgcgaccgagatgcgcgcgatgaagaactatgccgggcatcgcttaagcccttggcttgggcacctcatggtcagccgccaggaaacatcgcggccgctgcttacaccgggggaagtcatgcagctctcacctaacgaggcgattgtaatggtctcgggggtgcaccccgtgcgcgccagcaaggtccgatactatgaggatacgcagctaaagcgccgggtcttgaatccatcccgcgccaatccggtcgccctggtcgcgcaggcagacgattggtcaggccgtccgcaaatcccgccctctgccgaactcctcgcgaaggtgacgcggagatcccgtgatcccaacggcggcattcgccgtgagcccgagctgccgcagcacgaggatgtcgtcattggggctcccctggccgagaacgagttcgatgccgcgccagatgatggcgacaccgatgcggtgcaggcgagggctctgagccgttcgatgcagggcatcgcgcgttccgtcaccatcgacccggaggatccgatggatctctaggctagtgagcatgaaaaaggcccaactcagcatctatctcgatccagagaccttcgctggcctggaggccttcgcaaagcgtcacagcaagtccaagtcgctggtcgcggaggctgccatcgcctccttcctttcgcccgacgaatccgaccggagggaggccgcgatcgccaagcggctggatcggatcgtgcgcgtcctcgaacggctcgaacgaaacgataccgtcacgctggagacgatcgcgctgttcatccgcttctggctgacatcaacgccagcgctgccggagcaatcgagcccagcagcgcgcgccaagggcgcggagcgctatgatcgttttgtcgaagctctcgggcggaggctatccagcgggtcgaccatgctgaaggaggtgagtatcgaatcgcacgacggggagaacgccgtgcgtggcaacgacgacgccggcgccggcgcgagctaatcagcccgccgatcccttctttcgctacgccaaggtacgatcgctatcgtcgacggttgcagcgccaacgatgctgctcttctgttgcctccatcagactcaatcaccccttggcaaaatccgtcgcaccgcaatcgttgcggccttgatcggtgcgctcagagtacggagaagagcgaaaatgcagctccacggcgaacccgagttggaggccagccaggccgcggtggcaaaatcgccacctcacaaacggaattccgcggcaacccgcaaggtaaccgtccggatcaccgagaagattcacgagcaactcgaagctgcgactgaacgtccgggcgtgggcaagagcatgatcgtggaggctgcgcttgcacaatttctgaatccgcgccctccagaaaatgcggtgcatgacggttttgacgacatacacgcccgattcgattctctggagcgcaatttacggacaatcgctgagacggtcgcgctgcatgcgcgatatcacctcgccgtgatgccgccgctgtcgcaacagcaacagcgagaagcctgccagctcggtgatgagcgcttcaaggtcctggccgagcaagtcgatcagcgggttcagcaggaccgttcgcttatccaggagacgatcgatcgcctcaatgcgacacgatttaacggcttgaaatcgataatcgatcaggatgagacagtcgacctcaagccgacagacaccccaaacggcgccggtttgcgaggcgatgcaaatataaagcaggaatcatccgctgccgcccaggagggcggcagcaattccaactttcgtcacctcccgaacgccttctgctggccggcatgatcaagctggatacgaagacgcaatacgagcggcgacaagcaccgaaccggacgcggatgaatgtcaacacgtcgatgatcacctgagccggaagtggtggcgcctgatcctggccgtcttcctcccatttgccgctggctattatctttccttcctcttccgaaccatcaacgcctccatctctccagcgctggcatccgaatttggacttgatgccgcaaagaccgggctgctcgcatcggtctatttcctcgtcttcgcaggtgtccaaattcccattggcgtccttctcgataggtatggaccgcgtcgtgtccagggcgtgttgctggtgatggcggccggcggcgcgaccctgttcgggaccgcaacgggattttcggagcttctggttgcgcgcgccatgataggacttggggttgcagcctcattgatggcagggctcaaggccgtggtcatctggtttcccagggagcgtatcgccctcgtcaacggctgcatgatcatgctggggtcgcttggagccgtcaccgcaacggcaccgaccgattgggtattggattggatcggttggcgaggtcttttcgaagtcctgacttttgcaacgatcgccgtagctgccttcacttactttggcgtaccggaaagctccagcaatgaagcagcgtcgacgacctcccggcttactttgtggtctgtgtattccgacgcgcgattcctgagacttgcgccactgtcggcagcctgcatcggctcgtcatgggccctgcaatctctgtgggctgcgccctggcttacggatgtggaagggcttgatcggcatagtctcatgacgcagctgttcatcatggctctcgcaatcagtttcggagcgttgctgctgggcgtgatggcggatcgtctacgcagacgcggcacaacaaccgaaatcctgatagctggcatggcaggggtgttcattgcggccgaacttgcacttattctccgggtgccaatgccatcgctactgccctggtgtgccgtgtcagttatgggagcggcaacagttctcagctatgcgatgatcgccgattattttccgcaaggccttgccgcgcgagcaaatggggcgttgaaccttgcacattttggttcggcgttcgcggttcagtacgggatcgggcttgttgtcggacaatgggcacctcaagacggtcattatccggtaatggcgtatcagtttgcgtttggtctcagtgcagcctttcaggcagccgcattgctctggttcgctgtgccttggctccgaacgttgagcaggcacctttacgcgtcgcttacgcggccgtttgcagagcgagacagccaagcggaatttgtcatggtgcccgtcgagggatctatcctcgaggcgcgtgaggcggtggaatggtagactggccggcctgtgcctggtttccaagccgtcttttgcggcgatcggtgctacgttgggatttcgacattccccactttttctttttctacgccaggccgcgaaccaaacatcccgcttgttgcgcgaagaggtttactgccttttctaattgatcccactgaggtcgttcaggcgacttcatttgtggggacggtggtgacaatccattccattcaatcggaggcaatatctcgcggcgcgcgcatgctgcgcactgcacttggccccgcgatctcgcgctttctggaagatccttcagtcgtcgaggtgatgctaaaccctgacggccgattgtggatcgaccgtttgtcgagcggtctgacggacaccggtgagatcctgtcagcgccagacggggagcgcatcattcggctggtcgctcaccacgtgggtggtgaagtgcatgcgggtgcaccccgtgtatcggccgagctacctgaaactggcgaacgttttgaaggtttgttgccgccagttgttgcggctccagcgttcgcgatccgcaaaccggccgtcgctatctttacgcttgatgactacgtcttggcagggatcatgacgtcagaacaggctatagcgctgcggcaagccgttagttcacgcaagaacatcctggttgccggcggaacatcaaccggcaaaacgacgctcacgaacgcgctgctcgcggaagtcgccaagacttccgatcgcatcgttctcatcgaagacacaagagagctccagtgcaaggcgccaaaccttgtcgctctgcgcaccagggacggcgtggtgtcgctttcggatctcgtgcgctcatcccttcgcttgcgtcccgatcgtattccaatcggcgaggtccgcggggccgaagctctcgacctgctcaaggcctggggtaccgggcatcccgggggaatcggtaccatccacgcaggcagcgcgctcggagccttacgccggctcgaacagctcatccaggaggcggtggttacggtaccgcgcgccctgatcgccgagaccgtgaacgtcatagccgttcttgctggccgtggcgctgatcgccgcctttccgaacttgctcacgtcgccgggctcgggacgtcgggcgactacagcctctcagcatcaggagaccagtgatgaactgccgatcgcctctcggccgaagggccgttacgaccgcatcaattgcggccttctgcctgttcgcttcgccggcctggtccgcaggctcgaatatgccgtgggagcaaccgctcaatcagatcctgcagtcggtcgaaggcccggtcgccaagatcgtcgccgttatcatcatcatcgtgaccgggctgtccctggctttcggtgacacgtcgggcggttttcgtcggctggttcagatcgtgtttggtctgtcgatcgcgtttgccgcatcgagcttctttctgtcgttcttctcgttcggcggcggagtggtgatctgatggatgagcagatcccagggtttgttgcgcccgtgcatcgcgctttgaccgagccgatcctgatgggaggcgcaccgcgggccgtcgcaatcttaaacggcaccttggccgcggcactgggcctcggtctgcgcctttggcttgccggtctcctgctctggttcatcggtcatatggcggccgtctgggccgcgaaacgcgacccggagttcgtcgaggtcacgcgccggcacattcgtatccctggtcacctctccacgtgagtccttccatgatgaatcttgccgaatatcgttcctcgaatgcgcgcctggccgacttcctgccctgggccgcccttgtcgacgagggcattgtccttaacaaggatggctcgtttcagcggacggcaaaattccgaggccccgatctcgacagcgcggtacctgccgaactcgttgccgtcgccgggcgcttgaacaatgccttgcgtcgccttggatctggctgggccctgtttgtcgaggcacaacgccatgccgcgggggcctatcctccgaacacgttcccggatgtcgcatccgccttggtcgacgccgagcgcagggcccagttcgaagaggccggcgcccattacgagtccagctactatctgactttggtttatctgccgcctgccgaaggagcggccctggccgagcggctcctttacgagggcagcaaccggcccgtcggtgcagacgcacgtgaggtgctggccgggtttgtcgatcggaccaaccgtgtcctgcagctcatcgaaagcttcatgccgaaatgtggctggctcgatgatcaggaaacgttgacctatctccactcgacgatctcgaccaagcgtcaccgggtgcgcgtcccggaaatacccatgtatctcgacgcgctgcttgccgatcagccactgaccggcggtcttgagccgatgctgggcaccgcccatctgcgggtgctgaccgtcgtgggatttccgaccgcaaccgtgcccgggattttggatgatctgaaccgactggcattcccttatcgctggtcgacccgggcgctcatgctcgaccggaccgatgccgtgaagctagtgacgaggattcggcgccagtggtttgccaaacgcaagtcagtcgccgcgatcctgaaggaggtaatgaccaacgaggcgtctgcccttcttgataccgacgcccacaacaaggcgatcgatgccgatgcggccctccaggaactaggcaccgatcaaatcggggaagcctttgttacggcgaccgtcaccgtctgggacggagatccccgggctgccgacgaaaagctccgcctggtcgaaaaggtcatccaggggcgcgatttcacctgcatgatcgagaccgtgaatgcggtcgaagcctggctcggcagcctgccgggccacgtttacgccaacgtccgccagcccccgatatcgaccctcaacctagcccatatgatccccctgtcggcggtttgggcgggcgaggtgagggaccatcacctcaaggcgcccccgctgttcttcgccaggacggaaggatccacgccgtttcggttctcgctccacgttggcgatgtcgggcataccctggttgttggtccgaccggggcgggcaagtcggtgctcctggcgttgatggccctgcagttccgccgctatccggacggacaggtcttcgccttcgatttcggccgctcgatgcgcgcggcggcgttggccatggacggcgactggcatgacctcggtggcgcggtagcgggcgaaacggatggatttatgtccctgcagccgctggctgacatcgatgatgtctccgagcgcggctgggcggcgcaatggatcgcctcgatcttgtcgcgagaaaagatcgacgtcaccccagagaccaaggatcatgtctggactgcgctgacctcgctggcgtcggctccgcacgaggagcgcaccctcactggcctctcggttctcctccaatcgaatatcctgaagcgggcgctccagccctattgcctcggtggtccctatgaccggctgctcgatgcggagaacgagcacctcggtagctcatcggtccaggtctttgagaccgatggattgattggaaccgccgttgcgccggcagtgctggcttatctattccatcggatcgaaggccgcttcgacgggcgtccaacgctgctcatcatcgacgaaggctggctcgcgcttgatgatgcggactttgccggcaagctccgggagtggctaaaaacccttcgcaagaagaatgcgtcggtggtgtttgcgacccaatcgcttgcggacatcgatggctcggcaatcgcgccggccatcatagaaagttgtccgacccggattctgctgcccaacgatcgcgcgatcgagccgcagatcatgacgatctaccggcgatttgggctcaatgaccggcaaatcgaaatcctggcgcgggcgattcccaagcgagactactactgccagtcacgccggggcgatcgcctgttcgaactcggacttggcgaggtagcgcttgccctcaccgccgcttcctccaaagccgaccaggctttgatcgagcaggtgttggctgaacatggccgcgaaaacttcgtgagtggatggctgaaggcccgtgatgtcgcttgggcgaccgatctcatcccacacctcgctgaactgggggcttccaaatgaaccgcttccgccgtgttgctgccgctggcgtggtggcacttgccgtgcttgtcggttccaaaccggccttcgcgcagttggttgtgtttgatcccaacaactatgcccagaacgttctgaccgccgctcgagccctgcagcagatcaacaaccagatcacatcgctgcaaaatcaggcgcagatgctggtcaatcaggccaggaatctcgcgagcttgccctattcgtcactgcagcagttggagcagtcaatccagcgtacgcagcaactgctcgcccaagcccagcgcatctctttcgacatccagcaaatcgatcgcgcgttctccaccacgtacgcgccggcatctcccgacgccacggaccaggcgctgatcgcgaatgcgcaggtccgttggcaaaactcggttgcaggctttcaagatgccatgcgggtgcaggctacggtggtcagtaatctcgacaccaatcgcgcccagatgtcgacgctcgtcaccgccagccagggcgcgaccggcgccctgcaagcgagccaggctgccaatcagcttcttgcgctgcaggcacaacagcttgccgatctcacggcaacagtcgccgctcaaggacgcgcccaaaacctggaatctgcccagcgaacggccgctcaggaccagggcagggagcaactccggcgcttcctgacgcagagccgaggttaccagcccacaatagtgcagatgttccaccaatgagtgatttcagggcgttcaaggcgctgtctctcggcgtgacaatctttgtcgtcgtgctcgctgctgcttgcaccatccacctgcgtgacgacgacaatcagcctcagcctgcctcttcggtcgtccgagaaggcgatccccagacagccgagctcgagcgatgtcgttcagttggatacgagcaaaaagacagacttgccgaatgccgaaaggtttgggcggaacagcgccgccacttcctaaggcagaacatcgacactccgcgcaatcccgcccggcccgatccagacgccacaccgcctgcgtccgtcaaggatcagagccgtttgccgcccggtttgtttccggcacctcagccgacggagcgatagatgggtggtacaggcatcatcgaccagtttctggaaacattcacccgctatatcgactctggcttcggcctggtgggaaatgaggtcggacatctcgcgtccacgcttgttgccatcgacatcacgctggcgggattgttctgggtctggagctccgatgaggacatgatcgctcggctggtcaagaagaccttgtttgtcggcgtcttcgctttcctcatcgggaactggaatggcctggcccgcatcgtcttcgagagctttgccagtctggggttgagggcctctggcacgggcttgtcgtccgcagatttcttgaggccaggacggatcgcccaggtcggcctggatgccggacggccgatccttgaatcgatttcggggctgatgggctacgtcagcttcttcgagaattttgtacagatcgtggtgctgctgtttgcctggatcgtcgtgctgctgacgttcttcatcctcgccatccagctctttatcaccttgatcgagttcaagctgacgaccctggccggtttcgtgctgattccgttcggcctgtttgggaagaccgccttcgcagccgagcgcgtactcggaaacgtcatctcgtccggcgtcaaggtattggtgcttgccgtcatcgttgggatcggatcgaccctgttctcccagttcacctcggggtccggcggtaaccagccgactatcgaaaatgcgatggcactggtgctcgcggccctctcgttgcttggcctcggtatcttcgggccgggaattgccaacggcattgtatctggcggtccgcaacttggggccggtgcggccgtcggaaccacgatggccgcaggtggtgtggttgccgccggagcagcactcgcagcaggcggggctgctctcaccggcagcatggttggaggcgcggcgaggggaggcagcgcgctcataggcggcgcggcatccgcctttcggacgggcgcgcagaccggggaggcgggcgccacttcggcagcgagtcccctgcgatcgctggccgcccgctttggcagatcaaatgccgcgggcgatgaagccggcggcgcggatgcgtcatctggaggcgcacccgcctgggttcgccgcatgaaacgtggacaggctgtcagtcatggtgtctcggcgacgacgcaggcgctgcggtccggggatcgcggcggaggtggggcctccgtcgatctcaaggattcagagcgctgaggtcagcaccgtcggagcacctctcagaactcttcaaacgtaccaaacgctactcacgcccgatttctcgtacgtcgaggtcaacatgttcaaacgatcggccgttcattatggccgcacacctcagccggttacgccttaccaaaaagccgcgcaggtttgggatgaccggatcggctcggcgcgtgtccaggccaggaattggcgcttgatggcctttggttgtctgttcctctctgccggcttcgccgctgctctcgtctggcagtcagcacaggggtccattacgccttgggtcgttgaagtcgatcgcctcggcgaagcaaaggcggtcgcgccagcaaattcgacctacaaggcaaccgacccgcaaattggcttccatctcgcccgcttcatcgaacatgtccgcggcctcccgatggacgccatcgtgctacgcgaggattggcttcgggcgtatgatttcacgaccgatcgcggtgccgccgcgctgaacgactacgcccgcaacaacgatcccttcacaaaagtcgggaagatccaggtcgccgtcgaagtatccagtgtcatcagagcttcgcccgacagcttccgtatcgcctggatcgaacgccgctacgagaatggtcagcttgccgcgaccgagcggtggagcgccatcgtcagcgttgtcgtggaaccgccgcgcgacatcgatcggctgcgcaagaaccctctcggcatctacgtcaacgccatcaactggtccaaggagttttgacagtgatgccgacaaatcaacgttcactgcgaatgaaaacggggagtggatttccggctctcctgatttgcgcctgtgcccttgctgggtgcacgacattcaagccgccgcagatcagctatgacgacgaaatcccgccgctgcccagtcaaccggcgcttgcagacgatcggccgcgctcccttcacgtcccacccgcttggacgccggcacggggcggcaaggagaaggaagccgaagcccccgttgaacggatcgaaagcgccaacgatgcggcccgcgtacagcctcggaaggcggggtatttcaacgctgtgcaggtgtttccatatagcccaggcgcgctctatcaaatctatgcggcgccaggacagatcacggacattgccttggagccaggtgagaaattgatcggctccggacccatctccgcgggcgacacggtgcgctgggtggtcggagataccgagagcggcagcggtgacatccggcgggtccatatcatggtcaagccgacacgagcggccatcgaaaccaacctcgttctcaacaccgatcggcggacgtatctgatcgagctgcgctcgcgtgaaaaatcatacatgccatcggtctcctggttctatcctgaagaccgagccgcgcgcggtcgtgcgcttccgccaaaacccttcattccggatcctgcccaacggcgctatcgatacaccttcgagggcgacaatcctccctggcgccccgtcagcgcctttgacgatggccgcaaggtctacatcgagttctcgccgggcatcgggcagggcgaaatgcctccgctgttcgtcattaactccgacggcaagccgggtctcgtcaactaccgggcattcggcaacgtcctgattgtcgaccggttgttcgcggccgccgaactgcggctggggggcgaggaacagcaaaaggtccgcatcatcagaaccgatgggagatcttgatgagcaacaccgaacaggaggccacaaaccggacgggtgctccgccggcgctcgagacagaaacgagttcttttcggttgcggccggagcgcccgcacgtcacgcggctctcgcgcaaagcactgatcgggggcacggcgctggtgctgatcctcttgaccgctgccgttttcctggcgctgcaaacacgcgagaagcgggctcccgccccggacgaactctactcaaccgatcaccacaatgtggcggacaagcttgcgagcttgccaaaggactacggttcaattcccccggacgtgccacgactagggccgcctttgccaggtgatctaggccgtccaattgtcgcggcacaggcccaaaacggcccgctagcggttgacgccgagcaacaacgagcaagccaggaaagtgaagctgcacgaaccagcaaagtttttgccaatacggtgacccgaccatcgcctggccaagcggcgccagccgagacctcgccaacgggagccacttcaactgacgacgcatttgcccagaacggtcaagaccgtaaactcgcgttcgtcaatgctttgatcgatcgacgcaccactagtcctgaccgtttggccaagccggcttcgccattcgtaattcaggccgggaccatcattccggcggcactcatcactgggatccgctccgatttgccgggccagatcatcgcgcaggtaaccgaaaatatttttgacacgccgaccggtcgggctcgtcttgtcccgcagggagcgcgcttgatcggtctctatgatagccgagtatcgtttggacagtcgcgcgtccttctggtctggacgaggctgatcatgccgaatggtcgctctatcgtactcgaaagacagacgggggcagacaccgcggggtattccggccttgaggatgaggtcgacaaccattggaaggagttgctcggagcagcggccttatcgacattactcggtgtgggttcagagcttggatctggcgccgacgctggatccagcacggccgttcttcaggcgctccggcatggggccgccaattctctcaatcagaccggacagcaagtggtccgacggaacctcaacattcaaccgacgctcacaatccggccaggtttccctgtgcgtgtcatcgtcaaccgtgacttgatgcttgagccatacaaaggatagggagtacacatggcgaaactcaagctcggtgccatcgcggacgataaacccgtgaagttgacgatcgaacttccggcagccgtacatcgcgatctgcttgcttacgctgaaatcctcgcgcgcgagagcggccagtctgcgtatgatccggtaaagctgatcgcaccaatgttggcgcgattcatggcgacggatcgcgcttttgcaagatcacgaaagacgccttacggagccaccggaccgaggggatagcgctcgccaagcaatttcaggaggttttggagagcagggttttcgttgtccgctcgccaaaccgctgaaaagccgatgcggctcgaccccgttccgtcgcgcaactcccgataaactagaccggaaaaattggccccgatatcggactccagcacgagactgatgccgaaccccacggcgatcaagctcttgatgaccccgcggctgacgtcatgacgttcgatccgcggtcggtcatcgggagagattagctttgcgttcaagagatcctcaagctcgcgccctggatcgtagtggctgagcaaaacagtctgattccgtagatccgtccagtagatgacttcgcgcgcagccaaaggatgctcactcggcagaacggccagaattcgttcactccagagtggcgttgttttgctatcgagggcttgcgggtcgcccgttaggatgctcacgtcaatgacactgttgcggagcgcggttgtgagccgcgttctcgacctctcgacggttacaagctcaacgtgcggaaaaagcttcttgaagtcgagtaatgttgcgcgcagattgcctgccgtcagcgaagtacagaacccgatgacgagacgacccgcttcgccagacccgtgcgctcttgttgatgcagtcagcgcctcgacttgttcaagtatcgagcgcgtcatgcgcagaaagtgacgacctgccggcgttgctcgaacgccaccgcttgaccgctcaaagatgacaacgccaatcgagtgctcaaggagctggacagaacgactgagtgtcgattgcttgatcgacaatgcatgggcagcttgccgaaaactcccgtaatcttcggcagcgatcgcgtgttggagttggctgaagacaacggtcaggcgtcggcctccgacaggtggaccggcaaaattcgtatcgtccatatgagcgacaccttcatgctcaagttgcgtcgagttagatcgtgcaaaacattaagacaattgttggttgtaagatgacgcggcttgctccgtgaacaaccgagccacgacgctccaagcaaggcagagtattgctcgaatcggcgaattgtgaagcgaccgagtctagaaatccacgagcgttacccgcagacagttcggagaaaatctcgtccaaccgtcgttgcttgcaccccgccgctggatcgctcgaagtcggtcataccgagtgaatgttcgagctggctaatgcaacggctaagcgcggattgccgaagcatcaagacttcggacacgcgccgaaagcaaccgtgacccgctgctgccacagcgtatcgaatactctgcagatcaacgtcggacgtttgactaggactaggttttctgtgggataatattcgctgaccattcttgccgctactgaacattcgtgccattagaggacgcttcaactcacccactcttgcgctacggcggcctggtgtctgcagcgctcgggagccccgagaagctgccggttgaacgcaatgcgcttgaaccagtaatgaaggccgagcaggtccgtaaatccgatgccgccgtgaatctcggtcgccagacgggagatttcgcggccggcatcacctagatgcgcctttgcctgcagcgcggcaacgcgagcttcctcaggagacccatcctgagcgtgagccgcgtaccacaccagcgagcggcacggctcgagcatggtgatgatgtcggcgagcgtatgcttgacggcttgaaacgagccgatcacgcggtcgaattgcacccgctccttggaatagagcagcgccttgtcaaacatggactgcgccgcccctagcgtgtcggccgcgagcatgacgcggccagcgtcgagcacggcggtcgccgctgccttcggatcgttggcggcgccaaggatctcaacccccgcatcatgcagtaccaaagccgtcaacggtcgtgtgcgatcaagactgcgatgcgtgcttacgctgacaccgggttccccgaccgcggcgaacaggccggcacggccgtcatcaaggtagacaatgaaatgcgtcgcgtttccgccatcgagcacacccgttacgcatccggacagcatatttccggcgaggcggacagccgcctcgccggtctgccccgacatgccggcgaacccgaccccgatccggacttcgccgcttgcgatccgcggcagccatgctttctgctgggcgcggtcgccactggcaatcagggcgaggggggccatgaccagcgcagccgcgaatggcgtcggtgtcgcgtgatatccaagcgcctccgcggcaacagccgcatcaagcagcgagaggcccagacccccaaagtcctcggggaccatgatgcccatgatgccctgttccgtgaggcccgaccatagttcaccatcgaagcccaagccgccctccgcgatcttgcgcaacttgctcatgggcagtctttggtccagaaatccgcgcaaggaatccgctagcatcaattgctcttcgctgaggccgaactccatgcttatcctctgacggttggcggggcggatttcggctcgcgcggcagacccagtccgcgctcgccgatgatgtttttctggatattcgatgagccgccaccgatgatgaggccgatgtcgtacatgttatctatctgccaggtggtggcttcgtcgtcttccgccgcttcgccgaccggttcgtaagcgagccccgccgcgccgagcacgtcaacgaccagcgatgacagccgatacgcaatcatcgtcccgttcagtttgacgatcaggcgtttgacccccgaatcctctcccttcgcctgctcggtcattaatcgaagaccgtggtatttcgaggccatcacctcgccctggagtttgagcaatcgctcgcgatactcggggatgtcgatgaatcggcagccatcgagcgtcgtttttttcatcaattcgacagccctcgccagacggtaggtcagcttgttggcgtcgccgagcagcatccgttcgtacttcaaggtgacattggcgacatgccagccgtcgccgcgtcccatcacaatctggtcggttggcacgcggacatccgtgaagaacgtctcgttgaactcggcgcggccggtcatcgtgaccaatgggcgcacctcaatgccaggcgcattcatggggacaagaaggtaggacagcccatcgtgcttgctcttgtcgagctcagtacggcagaggaggaacatcatgtcggcgtagtgggcagaactcgtccagattttctggccattgacgatgaattggctatcctcgacacgggcgctggttttggcggcggcaaggtcggagcccgaaccgggctccgaatagccctggcaccaaatgatgtcaccgcggatggtaggcccgatccattgaatgcactgctccttcgttccgacctcgagcaatgtcggcaccagcatggaaatgccctggttcatgatgcccggagacacgcccgcgttcgagaattcttcggcgatgatcgccaattccaggatgtcgaccggcaggccgaagccgccatattcgcggggaatgttgcgggcaaaataaccgcgctccagcagaagcttctgccaatccagggctcgcgcgtcaggccgcttccgtccgccccccgttttcggcgaaaggtggccgtatttctttacgaagccgcgcgcttcctcctggagggcgcgatgtcgggcgctgtagcggaggtccatagagacgctctttcccaggcgcggtttgtgcctgttactctacacggaaaggactagccacggtcgattgaccgcgctacggattaaatctaacatctgttcgaaatagtcgtgccttgggcggccggcgtcaagtagaaagcttgaatgattgttccgtcgtcacggaaatcgttcaggggttgcgagcctccgtgggagctttgcctatgtcactgaaagaaaaggccgccatcactggcgtgggagagaccgagtacacgcgcatgtcgggcaagagcatacttgcgcttcagctcgaggcttcgttgaatgcgattgcggatgcggggctcagtcccaaggaaatcgacggcattattccatactcgaattcgccggtcgtagccgaagactttgtcacgaatttcggtatatccgacctgcgcttttcggccactgcgccgctcggcggagccagctgcgtcgcggccatacaatgtgcgctgctcgcgatcagcggcggcgtgtgcagcaacgtgctgatcccgatcggtcgtaacggctcgtctgcgggtcgcatcggcacgcgcgttcagcaaatgccccagttcaaggtcgttggtgagcatgagatgccggtcggcgcgatcgccccggcacagctatatgcgccgatggcccgtcgccatatggaactgttcggcacgacgagctcgcagcttggcgaaatcgccgtgtctacccgtcacaacgcaattctcaatggccatgggatgatgacgaagccgctgacccttgaggatcaccagacgtcacgcatgatctccgatcctttgagactttatgattgcagcctggaaagcgacggcggcgcggcgatcgtggtcagtggcgcggaccgggcaaatgatcttcgcaaaccaccggtctacgtcatgggggtcgccgaaggccatccggattcaccgagcgtcatcacgcaacgcccggatatgacgcgcctcgggatcgcgaaggctgcgccgaaggcgtttgccatggccggtgtttcgcctggagatattgacgttgccgagatttacgactgcttcacctacatcgtgctgtgtcaacttgaagacctcggcttttgcaagaaaggcgagggcggtccgtttgttgcgagcggagcgattcggcttggaggaaaattgccgatcaacacccacggcggactgctttctcaggcgcatatggtcggcatgaaccacattgttgaacttgtgcgtcaactcagaggcgaggccggcaaggcacaagttaggggagccgagatcggccttgtgactggatacggcgatatgggcgacggatccgtcgcgatcatgcgcaaaggatgatcgcaatgactgcggagacctacctcaagcccgttcctgagccgacccatgagtcgaagccctattgggatggcctccaaaatggacggctgctccttcagaaatgcgggcaatgcggaaaaatccgtcactatccaaggccggtttgtgacgtctgttattcgtttgaagtgaaatggatcgaggcctcgggccggggaacggtccacagctggaccatcacccatcacgccttcaatcccgggttcaagctcgatttaccttacattctggccactatcgacctcgaggagggcgtacggatgcaagtccctcttcgcggcgccagggagacggacgtcaaacttgggctgccggttcgtgtcattttcgaacaggccaagcccgatctggtgactcccgcctgtgtaaccgcgtcgtgaccatcaccacccggagcggcatcaagatgaacgtggacattgacgcactgcgcaagcacatcgggacgaaaatcgtcgagcacgatgtcgccacccaggcgccgctgcgcggacttgcggtgaccttcgatcggcaggaccagattccagggcccggggatccgatccagccggggtggcatctggtgtatttcatgccgctgtcgcccaaggctactctcggtgacgatgggttgccgatctctggcggcgttctgccgccgatgccgtttccacggcggatgtatgcgggaaccgaactgaccttccacgatccgatccgcctcggcgatgcgctcaagcgcgagacggagttcaccgatgtctcgctacggtcgggcggtaccggagcgttgatattcgcgacgcagacccgtcgcattttcacgcctcgcggcctttcgattgtagaacaaaatcacacagtgttccgcgaagaagtgaagcctggagagaagagcgtcacaccgaaaaggaacaagccgccagccgatacaccgtggcgccgaacgattacgacggacccggtttccttgttccgctattccgcgctgactttcaacccgcaccgcattcattacgaccgggactatgcgatgcgcgtcgaaggttatcccggccttgtcgtgcatggaccctactcgcagcagtgcctgatcgaccttgcgcgcgatcacgctccggaaaaaacgctaaaatcgttttcgcagcgcgcccgtgcaccactgttcgacacggcgcctttcagcgtcgttggccgcgccgttgacggcgaaaaaggagcggagctgtgggccctcacaccggagggaaccatcgccatggaagtcacaatacgatacgcgtgagaacaatggttaatgaaaaagttgttttgacggatatcaatgattgtggccaatcatcgcttctgtgtaagcagttatgccccgaagcgcgcgtcagcttaaagaagctccgccgcaaagctgatgatgtttaagcagccatgtgggttgacttcacgatagacgatctggcgatccttcaggctcagctacggctgctcatggcgcaacccgcgagtgtagatcgtgcggccgacgagtgggatcaaaagagcgcaggacgggcaatttgagaatgatcgcttctagggttggcaaaattgcgacgttgacgtcggacaacgtgaatagctgcgctccgcttctgcatttcgcacatgcgaccggcttcaatgcggaaacgtatcgacgctttctggagcagctatcagcaagcttccgtgtcgtcgcgtccgacgcgcgtggacatggacgcaccacattgccagcaattccggaaaggctaacaagttgggagacctatgaattggatcttgaggagcttcttggcgtttacaaggagcctgccttcctcgtgggtcattcgatcggtgcaaccgtcagtgtgatgctggcggcccgacggccagacttggtgctcggggtgggcttgctcgagccgtcatttgtcccgttcgagagggcgtatcgagttgcgagcgagcggcgggaggggcgcatcgtggacttcgatattgcaatccaggcgcgcaagcgccgatcgacatgggcgtccctgccggagatccgcgagtcttatgcaaagaaagcaatgttcgccacttggcaagacggatttcttgaagattatcttgagggtgggttggtattcctagctaacgatcaaatccggctggcgtgtaatccatcctgggaagctgcaaccttccaggccgcgacgaccgatttttgggacattcttccacgttacaaaggcaagttactgttggcctacggctcgcgatttagcactgtaagtgatgtcgatgcgaagaagattgtcgaacttgcacctcaaactcgcgtattcaattttccggagaatagccattttcttccaatggaacggccagaagcactatctcggctgattatgagtgagtttgataattcctagcgtggctatcgccgcggatcgattgagcgattttactgttgcgccggcgcgacgattgccatgaggccgcccaacgtgattgcgcgcgactggatcgtggcgccaagcatcggttgttcagcggaaaacatgcggcgccattccattggaaatcacggagacgacccgggaatcaatcgcggaaaagtggacattgacgataactgcttccaacccacataacagccatgtgttgatcactcttcagactactgggacacgtttggcggcgacggcggccggtgaaatgacgtcgatgtcgatcggcacccgccagcgctcggtgtagcgcacctggggcgccgcgttgctggccggtgcgccttccagcacaaagccatcgaagccggcactcatcacctcgttgcatttctgcacatagaccgggaagccgccgatatacggcatgaagacgcgcggccggccggggatgttggtgccgacataccaggagctgcaggtcgatcgcagcgaaacagtcgatacgtcagtgacgtgctcgacccaggcgtcctcgtcctcgcgcttcggctcgatggtcgcggccccgacgtcgcgcatgtgggccatgcagtcggccagccagtcgacatgctgctcaatcgcctggatcatgctggcgagcactgagggactaccgggaccggtgatcgtgaacaaattggggaagccggcggaggcgatcccgaggtaggcgcgcgggccggcgcgccacttctcggccagcgtcaaacctttgcggccggtgatcgcaatcttgtcgaacgaacccgtcatcgcggcaaagccggtggcgcagacggcggtgtccagtggatacgcgaccccgtcgacctcgatgccgtcaggcgtgaagcgttcgatcggcgtcttggacacgtcgaccagtttgacgtgctccagattgtaggtctcgaagtaggaagtatcgacgcagagccgcttgcagccgaacacgttgtccggacacagcaggtcggccgtcgccgggtccttcacgatgccgcgaatcttgcggcgggcgaagtcggcgatggtgtcgttggcggccttctcgaacagcagatcgccgaaggcgccgaggaagggcaggccgccgcgggtccaggcttcctcgtattgccgttcgcgctcttcgggtgcagcctccagcgccggcttcatgttgaaaggaaaatagaagccggtcgggcgtccgcgtgccttggcccgcaacgccggataatccgccttggccgcctgcaaatattcagacgtcaggctctcgttgcgcgccggcacggaccacgtcgccgtgcgctggaataccgtgaggtgcgccgcctgctgcgcgatgattgggatcgactgaatcgccgaggagccggtgccgatcacgccgacccgcaatcctgtaaagtcgacgccttcatgcggccattcgccggtgtggtagatcggaccgcgaaagttcttcatgcccctgaagtttggccggttcggtgccgacaggcagccgaccgccatgatgcagaatctggccaaaaccctgtcgccgcggttggtctcgatcagccagcacccggcgtcttcgtcgaacgtcgccgcggtgacacgcgtgtcgaacacgatatcccggcgcaggtcgaaacgatcggcaacgtggttggcgtaggaaaggatctcggcctgcggcgcgtatttctccgaccagttccactcctggtccagctcctcggagaaggagaatgagtactgcatactctcgacgtcgcagcgtgcacctggatagcggttccaataccaggtgccacccacgccactgccggcctcgaagacccgtgccgagaagctaagcccgcgcaggcgatgcagcatgtacatcccggcaaagcccgcacccacgataacagcgtcgaaaaccgctcccatttcgcctgggcgctcttgtcgcgttgtgttgtcggcaatcatgactcgtgtcgtctcctttgcaggtcgactaagctaatcgagataagttcgttctccgcaggcgccagagggttcgcaaataaagcccgagaaatgcatctcgtaccccggctcgcctattaagtcctgagtcttatattttggtaggcgggcagggcaatccaccagtggccgaagctggtacatggcggatcgaaacgcagagctggctagctatatgccgcaggcggacggcatcggagatatttgcaatggaatggaatcagcgccaacttggccggcaacgtcggtaaatcgacttcgccggccagagacagttcatttttgcgtctcagatttggcgaagtccgccgactgttccttcactacgctccaaacctcgtcttgaaagccagcgatccaatcggtttgtgcaacccatttctctccatcccacatttcaatgcgtgtcttgccgccgccgccatgatcctgtgccgtgactgtaataggtgcaatcagcccgttagcatcgtaatttttcagactctcaagaccagtcttaattttatcgggtgttagcggccagccgccattcttgatcgcaagccgtgcgccttcgaatgcgatcgagtagatcgcaagaccagtgttgtaatagacgtcctcggtaaatttgcgatcaccgttgcctttgcccctgtcgtaaagctccttgataatctgctgaaccaacggctgatatgagccgccggcgacgttggtgccgcgtttcaatcccttagcgacatcgggtccaatattcttgatatcgacctcgttgagccaattaacagcgatatacttttcaatcgagatcccattgcgcttcatctcgcgcgatgcgatcacatgcatattcgacaggctccagctcacaatccagtcggggttaagacgacggatctgcgtccatgccgaggcctgatcgttgcccggcagcggatacggcacgagctgcaactcgaaaccctccttctgcgccagcgtcttcagaataccgatcggttcctgtccgaacggataatcgatataaaagaacgcgaccttgacgcccttcagatttccgccggacttttgtttgatgtattcaatgtcattggcggcctgaccccagtaggtcggcccgatcggaaatacccatttgaacacgttgccatcgaccgcatcccctcgaccgaccagtgactggatcaggatgttgccatccttcataatgcgcggaaggaccgcgcgcgataccggcgtcgacaacatgtcgaacaccatcacgccttcgcgcttcaagcgttcgtagcattcgatgccgcgctgcggctcgttgccgtggtcctgcacgataatttcgatcggatggccttcgagacctcccttcgcattgagaaggtcggcatagtcgcgcacagcttgggcaatctgcggcgtgacgaacgtataggccttgctcaggtcatagcacagcgcgaagcgcacaggatcggccgcggctgccggcacgacgttgagcagcgccaacgctagtccgcctagtatagatagtaatctcattttagcgatccttccttggttgactgagcgaactcaggaaattcttaatcatcccagctttatcgaacgacgcacatctggtgatcgtcaggtcagccaacgtttccgccggctataatgtttgatgtcacgaaaattcttgttttgcgcgcctcccaggtaaaattcctgaatgtcgggatttttcttcaatgcagccgcactgtcgtgcatcacgatgcgaccgctttcgatcagatagccgtgggagacaatttcgagcgcggcaatggcgttctgctcaaccagcaatatcgaaagtccttcatcgcggttgatgcggccgaggatctggaagatctcagccacgagaaaaggagccagtcccaggctgggttcgtcgagcatcaatagttttggctgggtcatcagagcacggccgattgcgagcatttgctgttcgccgccggagagataacccgacgcgacggtccggcgctcgtgcagacgtgggaaataactgtaaacccggtccttgttgcggttcatgtcctggcggctatgcaacgccgaagccgcgatcaagttttcgtcgggcgtgagatgttcgaacacccgacgcccttcgagcacgtgggcgatccccagcttgacgcggtcctgcggcatcaggccgccaaggctttggccgcggaactgcaattcgccccgccgcacctcgccccgctcggccgtgagcaaaccgctgatcgatttcagcgtcgtactctttcccgcgccattggcgccgagcagggccaccattccgccctcgggcacatcgatcgaaacacctttgatcgcaagcgaaacgtggtcgtagacgacctcaatattgttgagggacagtatcttagcggcaatgggtgcattcatggcgttcgtgcttcccgctatttcttcgtgtagccgaaaggccataccagaagatagtcccgaatgttgttgtagatcttcccaagccccagcggttcaatcaggagaaacccgataataagcgcgccatagaaagcttggggtagatgagccagagtttcgatacccagcgagaacccgaacttggttgccgcccaggagatgaaactgttcataacgcccggcatcagcagaatgaacgcggcgccgaaataactgccgatgatgctgcccagcccgcccacgatgaccatcgccaacgcctgaattgagacgtcgacggaaaactgctcgggggttacggcatggtaaaatgtaccgatcaggatggctccgctcacgccaccgatgaacgaggatgtcgcgaacgccaccagtttgaagtagaagctgttcacgccgatgaccgcggctgcgtaatctttctcccgaacagcgaccagagcgcggccgagcgcggtgcgccgcagattgagcatgaaggacgtaaccagcacgcaccagacgagggcgacgtaatagagtcctgcatcggaggtgacagcccagcccagcaggcggatgtcaggtgcctgcaacgtggcctgtgtgccgccgctgatcgcgggtacgtgcgaaatcgtccagtccatcacgaactgcaaggcgagcgtgctgagcgccagatacaggcctttcacgcgcagtgcggcaaaagcgaacacacttccgataaccgctgctgttattcccgcgaggacgatggcaatctcccacggtatgcccgcccttgtggcatgaaccgcggcgtaggcgccgattcccatcaccgctgcgtagcccaaatgaaattgccccgcccatccgaggatcaaattgagaccgagcgcgcccgcagtccagacaagccaaggcagcaagtaactgctgagataaagcgtgttcatgtagatcggcgcggccagcgccagcaatagcagaataccaatcatccatcgatcggcggggatcggaaacagtgcgcggtcggcgctgtaatccgtatgaaaaatcccggcttgacggaatagcatgatcctagaccctctcgatgtcgtggcgaccgaaaagtccgtgcggtcggatcaagatggtcaggatcagcattgccgcatcgacaagatcgcgactcgcgccacccaacaggggatcgagaacgctggatgcaattccctcgacgacgccgagcaggacgccggcgagcaacgcgcctcctatactgtccagtccgcccaaaacggctacggtcacgcccttgagcagcagttgcgcgagcgattgatcgacgccctgtaccgaactccagagcacaccggcaatcgtcgcgaccaccgccgacatggcccaagacagcgcgacgccgcgctcgaccgaaatgccgaccgaccaggccgccgtataatcatcggaaatcgcacgcaaaaccacacccatccggctccggaagaacagcacgaaaaaaccgaacatcgcaattgtgaccaccgctccaaaagcgtaagcacgattgatcaataatggaccgagaaaaagcggggcatcgctgatgcccagattcatgggtcgcgtggtaccgccccaaatggtcatcgagccggctcgcaggaaaatctccaggccaagcgtcatcatcaggatcatgatgatggggcggccggcgaggcgccgcagcgccacccgttcgatggccattccgatgatgaacattgttatgatcgccagcgaaatcgcggcccagatcggtgcgcccgcgctgttggcgaacgcgagcaggacataagcggccagcatcgtcatcgagccctgtgcaagattaggcaccgatgacgatttgtagatcaggacgattcccatcgcgacaagtgaatacatcaagccaataagcgcgccgttggcagcagattccatcaacgatatcgcgtccattcttcaggcctcctgtaccgacagtgtgcgttcgatgacgccgacttcgcctgactcgtagctgacctttgccttcatcagcactgtgttttgatgcccgtagatggcgtcgatgatcggtttgtagcgctcctccacgacgttacgtcgaatctttcgggttctggtgatttcgccgtcgtcggcatcgaattccttgtgcaggcagacgaatttccgcaactgcaagccgtgcggcagtgcactgttaacgtgcttcaccgcggcggcgatcagggcgatgacctgcggcttctgcgacaggtcggcataggagatgtaggaaatgccgcgcagttcggcccaaaggccgacagcttccttgtcgatgcaaataatggctgacagcgtatcgcggccgcttccgagtaccgcagcatccttaatgtacggactgaacttgagccggttctcaatatagttgggaatatagcgctcgcccttcgcggtgtgcacgatgtccgacaggcgccccagcaccacgaggtgcccgtcaggttcgaggtaacctgcatctccggtgtgtaaccagccgtcttcgaggctttcgcgcgtggcctcgtcctgcttgaagtatccgctgaacacgctgcccgagcggaccaggatttcgccggcgtcgcttatccggatatcgacgcccggcaggggacgtccgacggtgtggagccttacctcgttgagatcctggatggcattgtaggcactggtttcagtctggccatagagttggcgcaatttgatgccgagcgcgcggtaaaagacgaacgtatcctcgcccatcgcttcaccgccggtgaaggcgccacgcagccgggtcaggccgaattggtccttgatcggtccatagaccagccactcgcctattgggctcaacaaccactgcttgagtgtcggctgaccgccttcgagcttgcgtttttcggctgaaatggccaacgccataaaaaacttgtagaccagcctcttcagccacgaggaatcttccatgcgcacctggatggtggtcaatagattgtcccagctgcgcggtgcggccagatagaaagtcggcgcaatctcgcgcaggttttgcagcacggtctcctgccgctctggaatattgatcgtgaagtgcagggcgattccggcgcccatcgtcaccgcgaagtcgccaacccaggccatcggcagataggccagaatgctctcgccgaactggaacgctccgcctcgataggcatttcgaacgccggccaacaggttacgatgcgacagcaccacccccttgggcttgccggtgctcccggaggaatgcacgaacacggccgggccctcgggctgcgcgcgggcgatcagctcgtttcggagattggggttgcggatgactagctccgcgccctttgcctgaagcgtgtcccatgagatcaggcctggattggcgtaagcggccagtccacgcggatcgtcgtagataatatgctcgatcgtcgcgccttgctcgcgcagatcgagtattttgtccacttgttcctggtcttcggccagcgcgaaacgcgcgcccgcctcatgaacgaagtggcgaatttcatcgagggttgcatcggggaaggccggcatcgcgtacccaccgagggcgccagcggccagcatccccgcgtagagccgagggcggttgtcgcccagcaccagcatgacgtcgcccgccttgaaatccagttcttcgagaccagcggcgcagcaaagcacgatctcgagcagctgctgccacgtcgtctgattccagatgcccttgtctttctcgcgcatcgcgacacgatcgggaaagacttcggcattctgcgccagaacgcggatcagcgtggtatcggtttcgaaattccaggccaaggccggttcagcgcgcgacatgcgcacccccgatgtatgcctcgatcacccttgggtcggcgacgacgtcggccggcacgccgctgccgatcatttcgccatagttcaacgccagcatgcgatcgcaaatgcccgtgatgacgtccatgtggtgctcgatcagcagcacggtgacattgcgttcatcgcgtgcatccaggatgaagcgcgccatgtattccttttcttcctggttcatccccgccatcggctcgtcgaggataaggaagctgggctcggcggccaaagcgcgcgccaattcgacccgcttcttcaggccgatcggaatcccgtcgaccagttcgtcgcgtacgccttcaagctgcagaaaatcgatcacgtcttcgaccgcggcgcggttcaacgtctcgtcgctgcgggcaagccaccaatagagcgccgtacgtcctacactgggtttcatgtgaatgtgacggcccagaaggatgttatcgagtacgctcataccattgaagagcgccaggttctggaaggtgcgggcaactcccaacgtcgcgacatagtgtggcgccaggcccgtgatgtcccggccgttcagcagaatatgtccacgctgtggcggataaaatccggtgattgcgttggtgagggtggtcttgccgcatccgttggggccgacaaggccgaatatctcgccgcgctcgatccgcatatcgattccgttcagcgcgacaatgccgctaaagcgtcgctcgacagaccggcattcgagtactggggcgtcgccgccgcgatccttgagggtcaacttgaatcccgtttgaaggtcaatctgttaagaacactttcagtttccaaatctaacgtctgttaggcatttgggcaactgaagaatggtgcgttgcaattggccaaacgaccgtacacgcctcattgtgcgagatatgcgccccgcccactggctaagagaactcggctggtatcggtcacgcgtacgtcggcagtgcttatccggcgccccagtttgaccaccatgccgcgagcgagaactgtcccgcgggtggccggccgatgataatcgacccgaagatctgccgtagcacttacaatacccccggctgcgcgaacggcgtaaaggcccgttaaatcgatcagggctgccaggattccaccgtgagttgcttcgattgcagtattggcaacaaattcctcgcgccaaggtagagaaatttcgatttgttcacgagcgaccatgatggctttcaatcccagccaccggtggaacggcgaaatcatcaacgccttttgaaattcagcaatagtctcttcgttgggggggccagtctcattcactcgttcgctcctatgtattttctttcagcaatcaagcactgacatgccaccaccggctatcactggttcattccttcgacaaagctctcacaaaatgggtcgacttcgattgcggggctaatcgtcgcgtgtatcgccattacgttgtgatatctgcggtcctcgaaagaaactgacgacggcctcagtaaatgcatcatttcgatcgccaacgaccatatgacccgcgccggcaatatcggtgtacgcagagtggggagcaagtcgaagaaactcttgcgcagcatccacgcttaccaaattgcttgatcctccacgtatcaggtgaatcggcagcttaaggtttttggcagcgtcggtcagtcggttttcggactggcccactttgccatttgtcacagaagttatgaagcgcggatcccagtgccagcgaagacgtccgtcatcgcatcgtctcaaatagcggtcgaggctctccgagcctttccgtcgccgtcgatttggcaaatagttggcgatcgcctcggcggcttcatcgggcgaagcaaagccgtccgccaaatgtgccctcatgaaatccaggacgtgcgcaacgccgaccggctccatatttggtgtaatatctacaagcgtaagcgaagtgaaggatcctgagcgaagttcaccttcggctatcaagcccgccaggccgccgagggaagcgccgacgagagctggtttctcgtctagttgatcagacatcgcaaggagatccatcgcaaagtcgtcgagttggtaagagcccgatggcgaccatgcactttccccgtggccacgcaaatccatcgcaattgcactatatcctgcctgcatcaaggcccgtgcagttcgagtccacgccaagcgggtctggccccctccgtgcgccagcaaaatcggcgaaccctcaccaaacacgtcggctacaatcgcgtgtccctgagccccgcaaaaaatcttctgttttttcacttgcgtcctcaactatcgtcacaccgcgctcaagttgttccttattgaaacggcacctcgaaataacgcgcaacacctggcaatcgccaagtcctctctaagagttgtcgaatttgactgcggcgcgatcgatttcgcccttggcggtcctcggcagttgatcgacgaaaacaatgtgctttggcttcttgtagcgtgcgatctttccggcgacgaagtcgatgagctcgtcggcggtgacattcgcgccagttcggcgcacgcagatcgctttgatggcttcgctccactggggatcaggcacgccgatgaccacgacgtcggcgatatctggatgttggagaatcgcgttttcgacctccgccgggtagacgttctccccacccgtcttgatcagctctttctcgggagcacggccggcataccagagatagccatcggcatcgaaatagccgatgtcgccggtgtgatgccagccattacggaaggtgtgggcagtatcggcgtcgttattccagtagcctttaaaaacggtgggaccacgcaccacgatctcgccggtttgtccggtgggccttggtttgtcggcgctgtcgacgaccgtaatggtgcgccagaacagggggcgcccagctgatcctggccggttgcggtagggcgacagcgttgcgaggcccgatgtctcggactgtccgaaggctgcccagaataccgcgtgggggcacgctttctcgaagcgttcaatcgtcgccggggtatccagtccggtcacagcacgcaacgtcttcaattcgtcgcccttggcctgatccatcaggcccgccagcatcggcgcgaactccgacatgacggtcaccctctcggcggcaatgtcgcaaaccgcctgttgcgggtcgaatttcgaagcgatgacgctggcgccgccagcctgctgtaccgtcagcatcaggccaaggccggcgacgtggaacagcggcagcacaccaagattgacgtcgcgctcggtcaggctccaggcctgcaccagcgagctgtgcgccgttagaaggttggcttgcgacaacagcgcgccgcgcggccgcccgccgacggcggcggtgtgaatgattacgaagccatcatcggcgctgaagttcacgtcagacatcgacgcgtccgaagccgcaagatttgcgagcggcgcaaacggcgcagtgtgcttgccgatgccaaaatagctccggaccgaaggtagcgacggttttagagccgcgataatctcctggtattctgcccccgccacaaccagcaccggcgcaccgtcggcgaggacgtagccgatttcttcggcgttgagccggaaattaaccggcagcaggatcgcgccgagccgtgcgaccgctccgatcacatcgatcatttcgagcgagttttgcgaaaggatggcgacgcggtcaccggattttacgccctcgcgtgctaggcccgccgccagccgctcgacccttttcagatattcacgatgggtgatgcgctggccttcaaaaacgaacgcggtgcggtcgggaaaaaattccgcattgcggcggtacacgtcgaggaaagtaaattctttcaggggcatcgagtcctcgatgttatgcacgatctatctaccgcaaagtgctccactcgaagaaggtcttcgaagccgtcgctcgcagcgcgctttgtcaactctcgaattttggctcacgtttttcgagaaaggcagcgataccttcctgtgcgtctcgatgcatgaataggagcggaaaaccatcgatggcgtgccgtatctcatctccaccgaggccgcggttgtaaaacgatttggccatctgcaccgcaagctttggttttgatgcaattcgttcggcaaatgccagggcgtccgtgagcagatcgccgtgaggaaccacacgtagtacgaggcctagtctgaatgcctcatccgcgctgattggatcgccgaggatactcatttctttggccttggcgcggccgaccatatcgtgcaggcgtacaatcgcaaaaccgggcagtagtccgagcttgatctccggtaccgcgaagcgtgcgcgatccgatgcgatgataaagtctgaagcgatcgcgagttcaaagccaccgccgaacgcaataccattgacggcggagattacgggtttgcggcaattttccggtgccgctaataccgccaaagcctcgatcataaacttgcgtactttgtccggatcaaagttgaagccgctaatatcggcgcccgcgcaaaatgccttgtccccgttgccggtgatgatggcgacgcggacgttgtcgtctgcatccactttcttcaggccatccagaataccctcacggatgcctgtgctgagtgcgttaagcttgcccggctcgtccagcgtaaggatggcgatcttccctttagtttcatagttgacgctgcctagtctcatcgcagtctcccttacgttatagcgccctgtctttagcgaaacgcgctgaaatccggcttgcgcttctcgaggaatgcattggcgccttcctgctgttcttgtgtcgtaaaataggcgggtgcgacctcgcggacgaggtcatccatgtcgcgctccatgatcggcgccatgtgatagtagaatgagcgcttcagaatcttcaggcaagtggggctcaaagccaggagttcgtcgcaatacttccgcacctcgacgtcaagttcggccatcggaacgacggaattggccagtccccagtcgagcgcttgtttggcggtgtagcgtcgcgccagcatccagagctctcgcgcgcgcttgtggccaagcacattggcgctgtgcgagacgatgtagcctccggccggggagccgacacgtggaccattctggccaaagatcgcatgctccgcggcgatggtgaaatcgcagaaataggcgatgtggtgtccgccgccaatcgcgtaaccgttgacacgcgcgatcaccggtttcgggcattcgacgatgtggcggttaaagttgaatttcagtccttcgagcccgctcttgccgccggcgtccttctcccagttgacgtcgccgccgacgcagaacgcgcgctcgccggagccggtgaggacgatgacgccaactgttttgtctgcggttgcctcgaggatcagccgctccatctctacgatgttatcgccggtaaaggcgttgagggtctttggccgattgatggtgatggtcgcgacgtagtccttgacgtcgtacaagatctctttttcggacacgatggaactccattttgttctggcgaaattaacggccgacgtcagccgatcatggtgtatccgcctgacaccgacaggacctggccggtgacatgacctgcggcggcggacgagaggaacactacggcattggcaatatcgtttgggcgacccagcttgcgcagcggcagcgccttggcgactttctcgaattgctccgccgtgaacattgagtctggctttgtccacatgctgttggcgccgacttcttccgtatccacgggaacagtgacgccaggacaaacgacgttgcagcggatgccatagcggccgttctctttggcaatggtcttcatgaaagaattaacggcggccttgacgccaccatagaccgcctcgcgcggctcgcccgagcggcttgcgtcggaactgatcgacacgatagcgccggcacccttcggaatcatgatatcgagcgcacatttggtgcagttaagcacgccgacgtagttgatcttgataatcttgtcccagaactcgggcgttgtttgcgtaaagaacatcagctgatcccagcctacgttattgacgagcacatcgaccgtgccatgcttatcggtagcggccttgaacatggcgtttacctgatcgaaatcggtcacgtcggtcttgattacctgaatgctggcagcgccgttcttccgcgcaagttcggcaactttctccgcctgcgcctggtcgagatcgccaaccgtaatgttggcgccctcggctgcaaacccgagcacaatggctcggccgatgttggagccgccgccagtgacgacgaccgatttgcccttcagattaaaatccatacttgccactcccggttctgtcattgaattacggttgctgctctggctccacgaccacgacaaccgcgttgcgctcgacggtctcgcccggccggcaattgactgccgtgaccacgccatcggtttcgcaattgatccgcaactccatcttcatcgattccagtacggctgcgacatcgcccgccttgatcgtatcgccgactgcgacgttgaccttcaggatcatgcccatcataggcgcacgcagctcgccgctggtttcggcgacagcgctgatgtaggtaagataggggattgccgtcagcgtgtggacgccgcggcgatggtggacaaagatggtttggttttcctgataaatgcgcaccgtctcacgccgcgcgccgacaatcgccgtgaagcagtcgtctttgagcgggatgagtctgaccggtagcttctcgtcgttgacgccgacaatcatcgagccgtcggccttgagcggtgcgaatcggatctccgcgcttgcgcccgcggtttcgaggtgcaggatcggaatcggtgacaatccgtcgccacccgcggccatgtgccatccagtcatttcgcgcgactgccacggcccccttgcgaggggctgtcgttgccggatcatccagaagtaggcgcccagcgccaacgccccggcgtccagattctttgccttgtcgaccaactggtcgatttgctcgtcgatcaggcgtgtgtaaaaggtggcactgcgcgtcgctggcaggccgagcaagcgcttgagaaatccttgattggtcgtaattccgaaaatcgaggtcgcgtcgagagcccgctcgagtttatcgagcgcctcattgcgcgtttcggcgtgggcaatgagttttgccagcatcgagtcgtaatacggcgtgactaccgacccgctttcgacgcccgtctcgacgcgaacgccgtcggcgggaaatttgacgtaagcgaggtctcccgtgcaagggagaaaattatctgccggatcctccgcacaaatgcgcacctcgacggcatgcccgctacatgtcaccgcattttgtgtaaacggcagcccttctccggcggcgatgcggagcatcacctcgacaatatcgatgccggtgaccatctcggtcacggggtgctcgacctggagacgcgggtttacttccagaaaatagtaggtgtctccgctcaggatgaattcgacagtgccgaccccgcgatagttcaggcgcttgccgagccgcaccgcgtcggcggccattttgtcgcgaagcgttgcggcgagattgacggcaggggcttcctcgatgagcttctggtgacggcgctgcagggaacattcacgctcgagcaggtgaagcacgttgcctttgccatcgccggcgatctgcacttcgatatggcgcccgcgttcgaccagtttttcgacgatcagtccgggatagccgaacgaattcttcgcctcacgcatggccgattcgatctcattggcaaggccatcgagatcggaaacggcacgcatacccttgccgccgccgccggccgctgccttcagcatcaccggaagcccgacttcctggacgatccgggcgatctcggcagcatcctcactgggcttcttgctgccggggacgataggcacgtcggccgcctcagcctctttcttggcagaggccttgtcgccgagccgttcgatcacgtccggcgtcggcccgataaaaaccagacctgccgcctcgacggcgcgggcgaacgtggcgttctcggccagaaatccgaagccgggatggatggcctgggcgccggtcgctttcgctgcggcaatcaccgcatcgatccgcaggtagctgtcggacgcggcggcgcctccaatctctatggattcgccgatcatcttcacatgcaaggcgtcggcgtcggctgtggagtgaatgccggcaaccgcgaccccgagccgatggcaggttcgcgcgatccggcaggcgatctcgccgcgattggcaatcaggattttcttgaacacggaacgatatcctctgtcatcacatcctgaacacgccgaagtctgtttcctgctgtggcagacggccggcgagatcaagcaagagggccatcacgtggcgggtctcgagcggatcgatcaccatgtcacaccaggtgttgcgcgcgaagttgtaggcgttcgcaaaatcctcaaaagtcttgcgaaccggagcgcgataagcctcgcgctcttcgtcggtccagctcgtgccatcgcgcttgtggatatcgtccttgaccatcgcgagcgtgttggcggcctgatccggccccatgatcgcggagcgcccgtgcggccacatcatcatcgcatgaggtttgaaggcacggccgcacatcgccagatagccggctccgtaggaattcccgatgatcagcgtgtatttcggcacgttggcgctggccattgcggtgatcatctttgcgccgtgcttggcgatgccgccttcttccgcctcgcgcccgaccataaagccggtgacgtcggccatgaacagcagcgggatattgcgcttgcagcagaggtcgatgaagtgagtcgccttcagcgcgcattcggaaaacagcaccccgttgttacagagaatcccgatctcgaagcccattatgcggccaaagccggtgatcagcgtctcgccatatagcggcttgaattcgtgaaactcactgccatcgaccaaccgcgcaacaatctctcgattgttggtggggatacgcgggtccgtgctgatcagcccataaatatccttggggtcgaagcgcggctctcgcggtggcgccacgttccaccgttgcatgggaatgtcaccgagattggcgacgatatcgcgggtaatcgcgatcgcgtggctgtcgctttccgccagatggtcggtgacgccgctgacgcggctatgcatttcaccgccgccgagcgcttcgacgccgacttcttccttggtcgcggcatagaccagttgtggtccgcccaggaacatggcgccctgattgcggatgatgacggtctcgtcgcagagcgccggcatgtaagcgccgccggcggtcgagggcccatggacgattgcgatctgcgcgataccctcgctcgacatccggatctggttgtaaaagatcgatccgaactgtccgtcgtcgggaaaaatgttgggctggtccggcaggttggcgccgccggattgcaccatggtgacgcaggggaggcggtgttgccaggcgaatttctgtgcgcggacgtgcttcttgcaggtgatcccgtagtaggtgccgcctttgaccgtggcgtcgttggcgatcagcatgcaggcgcggcccgacaccattccaacgccggtgacgatgctgccgccgggcggcacgccgtcatacatgccttcgcccgcgaactggcaaaattcgaggaacggcgagccgggatcaattagcgcagcgatccgttcgcgaggcagtaattgcttgcgctccttgtgcagcagccgcgcccgttccggaccgccgaccattgcagctgcccggcgctcatgcagatcggcgattctcaagccgtaagcgtcccggttacggcgatactcttcgctcgcagcggacacatcggacttcatgagagccattgcagacaacctcgttctttggggggatctctgaacaattgaagacgaatcgccggtagaatcgcgcctcaccgttccgggtcttgctctaataactgcgaggcaagcccatcacgtgctcgccgatgtagttgagaatcatttcgcgattgagcggcgcggtcttcaacagccgcaccagcggatagatatcgaagatgccgtactccttggtgaacccgttgccgccgaagcattgcagcgcggtgtccaccgccttgatgccggcgtcggctgcggcaagttttgccatgttggagaattcgccggcttcgcggccctgatcgaagatccaggcggcttttagtgtcatcagcgatgccaattcgacatcggtgcgggcgctggccaggggatgctgcaagccctgataagatccgatcggcacgttgttgaaaacccgccgctccttggcgtattcgactgcccggttcagggcatagcggccgagaccgcaggaaatcgaaccgacaagaatgcgttcgggattaaggcttttgaacaaaatgccgaatcccttgtcgacttcgccaacaatgtcctccggcccaagatcgacttcgtcgaaaaacagctgccattgtgtttccggggccggaatgctcactggaatgtattgcttctgcacgcccttggctttcaggtcgaccacaaacagggtgaagccatcggttttcttctgaacctcggtatgcgctgtcgttcgcgtcaccaccagcgcgtagtccgcgccatcggcgtcggtgataaatgtcttctgaccgctcagcgcgaagcgattgccacgcttctttgctatcgtggaagtacgaatcgtgttggttcccgcgtcaggctcggtgatcgcgaagcaaaagcgcgtcttgccgccacacgcatcgggcagatagcgcaatttctgcgcttcgctgccgtatttggctatgaatcccaagctcattgccgcgccgacgacgaggtttagcagtggaatgccattgtttgacaagccctcaaggaacaggtgcatctcgaccatgccttgtcccgagccgccgtattcctcaggcaccatcgttccgacgaagccatcctccgcaaccttgctgtaaagggcttgggggaatacgtgcttgtcggcgcattccatccagtatttgcgatcgaattgcttcgcaaccatatcgccgtattcgtagatttgccgctgctcgtgcgtaagatcaaagtccatgtgggaactccgccgccggccgaaaccgcgttgttctaagttgagaattcgaaaccctctcgggaacaccgtcgagtttattgtttgcgaggcggccggctgtcggtcggcagcatcaattgcttgctatctttaggcagaagcggctaggatttcaacctaacaatcgttcgaaaacgaacgaatgttagaaaataatgaagaccgtcgagcccgcatttcctggcttgtgatcagttttggggaatagccaattgaccgcgatgaaatccgctgtcgcgaccgggtcggacgagttcaagctcaatcgcgctcattatctggcgcggatcgccgatctccaaaggcgtcgggccgaggccaatcagggcggctccgccaaggctcgcgccttgcataaatcgcgcggccagctgctgccgcgcgaacgcatcgcggcgctgatcgatcccggttcgccgtttctcgagttcggccacctggcgggcgaggggatgtacgacggcgtgccgccgggcgcgacaattatcacgggcgtcggacaggtctgcgggcgcggttgcatgcttatcgccaacgatgccacagtgaagggcgggacgctgttcggcatgacaacgaagaagcatacccgcgcccagttgtttgcgtggcaacaccggctgccctgcatcaccttggtgcaatcaggtggcggcttcctgccggacatcgccaatatctttccggacgaagggcaggccggatcgatcatgtacaatcaggtaaagatgtcggccgagaatatcgcgcagatcgccgtcgttcacggcccttcgaccgcgggcggcgcttacattccggcgctgtgcgacgaggtggtgatcgtacgcgaccagggcgcgatgtttctcggcagcccgcaactggtatttgccgcgaccggcgagaccatcgagatcgaaccgctcggcggcgcggagatgcacagccggatcagcggcgtcaccgaccatatcgccgagaatgacagccacgcgctggcgatcgtgcgtaatatcgtcgccaacctgggagagccgccgcgattgcgctggacggtcgagcagggcgaaccgccttgccatgcggtcgaggaaatctatggaatcgtcagcgctaaccggcgcatcccaacggacaaccgggagatcctggcgcgcctcatcgacggcagccgctttcaagacttcaagcatcttcacggcgaaaccatgctatgcggatttgcccgcatccacggtttcgaggtcggcatcctggccaataacggcgtgctgttttcggaaagcgcggtcaagggggcgcacttcatcgaactttgctgcaagcgcgacattccgttgctgttcctggtcgatgtctccggctttatggtcgggtccgcagtcgagcgtcagggcattgccaagcatggagccaagttcatgaccgcgatggcctgcgccgatgtgccgaaatacactatcattaccggcggctcttatgccgcggcttatttcgcaatgctaggccgcgcgttcaaaccaaacgctaccctgatgtggccaagcgcccacgccgccttgatgggaccggagcaggcggcgacaacgctaacgatggtgcgcgacaatatccatcagcgcgaaggcagttcttggaccgacgaagaacgtgaagagttcaagcggccgatcctgagggacttcgaggcgttcgccgatccctataactacgcccgccatttgtggtgcgatatggtgatcgaacctgcggagacccgcgaggtgatggcgctgctgctcgacctcgccggccggacgcctgccaagccgacgagattcggggtgttccggatgtagctgctcgcctgtcaggctaagcccgccggaagcgcggcagcgtcacttcctcgctgattttttcgcagacgagcatgacgtccatgtcgaacgtgacctcttcgggcttgccgccggtataggtgctgatcatccgcgggccctcctccagatcgatcaacaaaacagcgtagggcagatcggttttgaaagcgggtcccggtgcgcgctgtaccacgctgaaggaatgtaccttgccgcgcccgcttgccggtcgatgggcaagattttcgccgccgcactgccggcacatcgcctgctggtaatattgcacgtggccgcaatcggcgcagtgctgcagcagcagcacgccgtcgtgcaggccgcgccagagggcggcggaatccgcgtcgggcgtcggcaccggcttcttcatggcgtcttcggacgagatcacagcgtgttctccgtgcccagaatggtggtggcattggttgcgaaacccgcgccgaggctgtgcaccagcccgagttccgcgcccggcacctggcgttcgccgcattggccgcgcaactgcgcgatgacctcatgaaaatggaacagcgatcccggcattcccgaatgggcgaacgacaacaatccgccatgggtgttcgatggaatctggccgccataggtcatatggccgtccgcgacgaaacggccgccttcgcccttcgggcaaaaaccgagatcttccagcatcatgatgacggtgccggtgaagcagtcatagacgccggcgacgtccatgtccttggggccatagccggccatttcgtaagcctttcggctcgacgcgaccgcgccggtttcggtcagcgagggcatcaggaaaatatgttcgtgggtgtagcattcgccgccgcccagaatgtagatcgggcttttgatgccgagcgccttggcatgttcggccgatgtcagaatgaatgccgcgccgccatccgatatcagcgagcaatcgagcttgtggtagggcgtcgtcaccatagctgagcttagcacgtcgtccaccgtgatcgggctggtctgctgcgcaccgggcgtgcgcatagcatgacgccgctggaccacggcgacttccgccaactgttccggtgtggtgccgaaatccttcatatgccggtgtgccgtcatggcaaaggtattcgcgacaggaatgccgaacggcatctcgtattgctgatcacggctttccgtcatcgagcgcagcgccagatccggcgtcaggccggtcagcaggctgtcgccgccgaccacgagtacgacctcggcgaggccgccatgaatggcagcggcgccaatattgaacatcgtcgccgccgtcgcgccggatacctgaagcgtgttcgaaaaggtcggctgaatacctaaatactcgctgaacgcaacgctgaagcgatggaagggagaagcgaaggcatggctcgacagcacgccgtcgatctcgtttttcccgatgccggcatcggccagcgccttcttcgcggcgtcggcggcgagccataacgggctctttcccggcaccttaccaaccggcgacattccgataccgattaccgcgaccttgccgcgtagcgtttgtttacgaatggaaagcatttggtctccgcccggcgtgatgcgtgaaggtcagtttccggccgtcgtgcgtgccgaggcgacgcccgtgctgccgccggaaaatcccaagaacttggcgtaggtatcgactggcacccgcctggtgacgagcttgttttcgggcgcagtcgtgtcctcgtaacccagcgccacgccacaaatcaggatttcggtgtcgtcaaacgaaagatgcttgcggatgatgtcgtggtaccaggtgaacgcggcctggccacaggtgtgcaggccatgaccgcgcgcggcgagcaggatgttctgcaagaacatacccatgtcgatatagctgccggtgttcaagcggcggtccatcgtcacgaaaagtccgaccggggcgtcgaaaaaaagatagttgcggttcatctgcgatgtgcgtgcggcaacgtcgtcgcgagcaatgccaagctttgcgtaaaggtcgtagccgagctcgcgccgacgcccgatatagggctcgtgccattcggtcggataatactcatattccggccgatgcttgtccggttcagtttcggcagctttcaggatgtccgcgcagagccgatccttcacctcgcccgcgatcgcgtagaccttccacggctggatgttgtggccacttggcgcacgcgccgagacctcgatgatttttcgcacgaccggttctggaaccggcttgggaagaaatcgcctgaccgagcgccgcgtcaaaatggcttcttcgacattcatgtttccgtctccgattgcggtgccttgccgcgagcagttttcgttcgacgaaaattgcgacgcgaagagctaatgggcgtgtccgtattagctgtttacccgttgcctttcgcccgccagcctggcttcgagctcgtggcgctgaaccttgccgctggtggaccgcggaaattccgaaaaatcgatgaaccggaactgccggggacatttgtatccggcaagatcgcgccggcacagagcaaacaggtccgcctcggtgaccgtggtgtcgcggcgcgacacgaatgccacgggaacttcaccccatttcacatcggggacacgcacaaccgcggcctcggtgatccctgcatcactcatcaaaacgcgctcgatctcggctggataaacgttttcgccgccagtcttgatcatgtacttggcgcgatcgacgaaatcgagcgagccgtcatcattgcgccgaaacacgtcgcccatgtgaaaccacccgccgcgaaaatcgcgcacgttggtatcatcagctttccaatagccggagaataaagttgggctgcgaatagccaactctcccggtgcgccaatcggaacctccttgtcggcagaatcgacaagcttgatgtcgcagaacgcgctttgttgcttcgccaggctggcaggtatttcgcctaccgggatcaacgatctggttgccggcggcaagccagtctcggtcgaaccaaaactgttgacgtagggagctcgcagcaggtcagtgacctcggcgatgacatgcggagggaccaggtcggccatcgcgccgcaaaggccaacgccttttacggtcgttttttgctccttgaagccggcgatgaatgcttcaatcatgcccggaatcaagacaaaccagccgatccgatggcgctccaaagcagacaataacggctcgatctggaagccatcgaccacgacgaccgttcccccgcgcaacagtgtcgcgagactgtggtccgtggatgccatgtgaaacagcggcgcccaggccacaaaggtatcgtgatgcgaaatgttcagctcggaactgaacaccagcgcccgcatgatcatcgcccgatgcgaaatgacggcccctttgggttggccggtggtcccactggtgtaaaggataaccaggccgtcttcggattccgccgcaatgggcagcgcatgaccgttttgttcttgcaatatatgctcgtattgcgggccgatcttgataaccttgcggtcccctatgggagaaagttcgagatttccggccagttcttcttcaacaatcaagagcttcggtgagaccagatcgatacaataggcgagttcccgctgcgacaatcgccagttcaggcaagcggtgatgaccccgagattggcggccgccagctccacttcgagatactccggtctgttacgcgagagcaatgctacgcggtcgcctcgtcgaagatcttggctcgccagcatcgaggttgcccgatgtacacggtcaaggagctgcccatagctgatctgtctgccctgatactcgatcgcgaccgaagatttgtggatcagcgctctcgcgcgaaacagctcgccaatcgtgggactggcgcccgccctcgttgtcagagctttttcgtgcccgtctgtcacggcaaatcctccgaatcttgctctcgccgcccccgacgacggcctcaattgaaaagtataagcttgcagcctttcccgatcggttttaaattctaacatctgttcgaatgaattcatagcaggttcgtggcgaggacgtatcggaaggcaggagaaatctgccgactgcgatatgcatcgtcatcccctgtaagatttaacccgaccaagcaaatcaagtgtccagaagggaagccgatgtccaatcgttatgctgcttataccaaattgaagctcgactatccgtccaagcgggttctccggctcacattcgaccggcccgagacctacaattcggtcgacgccgagacccacactcagctcaccaatatctggcgtgacatcaacgacgatccagatgtcaacgcggtcatcgtgaccggagctggcaaagccttttcggcggggggcgatttcgagctgatcaagagtattctagacaacccggtcgcacggatgtcgacctggaaggaggccaaggatctcgtttataacgttatcaattgcaacaagccgatcatctcggcgatcaacggcgtcgccgtcggtgcaggtctcgtcgtcggaatcctggccgatatctcgatttgtggaaagtccgcgcgcatcgtcgatggtcatacgcggcttggcgtcgcggcgggcgatgtcgcttgcatcatctggccgttattgtgcggccttgcaaaagcaaaatattacctgctgacctgcaagccactgtccggcgaagaagctgagcggatcggtctggtgtcgctatgcgtcgaagacgcggacttgcagaggatagcgatcgagacggccgaggagctttctagcggcgcgcaaagcgcgatccgttggaccaagtacgctcttaacaactggctgcgcgtcaatggtccgctgttcgatacctcgaccgcgcttgagattttgggtttcaccggcgccgaggcgcgcgagggattggcgtcccatctcgaaaaacgcaagccggtgtttccgcaggattgcccgctctgattttcgcgcgcggcggtcatctcagaagggggccggaatttcacccggccttcttcttgcggcagccgttagccgagaattatttcatcgaactgacgatctcgcgaagcctgaatttctgcactttgccgctcggcgttttcggcaaggcttcgagcacctcaatgcgctccggccagtagttcttggctacagcgttctccgccatatacgccatcacgtcagctaacgtcagtaatgctccctcgcgcagcacgacacaggcacaggcccgctcgcccaagcgttcatctggcactccgacgattgcgacttcccggacggctggatggcgatacatcagttgttcaatctcgatcaccggaacgttctcgccgccgcggatgacgatgtccttggtgcgccccgtgatacgaatgtagccgtccttgtccttgcgggcgaggtcgccggtctcaaaccagccatcctgatcgacggcatagagatgcggccgcttgaggtagcccacaaaggtgccggggcccctcgcttgtaggcgcccttcttcatcgtgaggcaggactttgcccccgccatcgacgatcctgacttccataccctggcttgggcaaccgtcggtctcgaagactttttccggtggatcgtcgagcttggtggtcgtcaccagcccgttttccgtcatcccccatcccgagacgatgtgcgcaccaagattctgtgtggcctggcgcactaaaacacggggaattggggcgcctgccgatacgaaagtgcgcagtgaacgcagcgcttcaggccgccgctccgcctccgcagtcaaatccgccagaaacggcgtcgatgccatggtcatcgtcacgcgctctgtctcgacaatatcgaccgccttggctggattccagatatcctgaagaatgacccgtcctcccagatacagcggcagcagcaggccgacgagaaaaccggtctgatgggccatcggcgaggccatcagcacgacatcgttggctgtgagacggacgcgatcctcaaaatatcgcacgctgttcagcaacgtattgcctgtatgcatcacccccttgggctcacctgttgtgcccgacgtataaagcaattgcacgacatcatcggccgaggcagcggtcgctgcctcaacccgctttcccggcgaattcagcacggtctcgaagtcttgattgtcgcccgaaccgataatgacgacgtgctcaagtgtgggcaccttggccttgaggcggtccgccattgcggcgtgatcgaaatcgcgaaatcgctgtggaacgatcagcacgcgcgtctcggccaaggtcagcatgaattccatttcgcgatcgcggaaaatcggcatgatgggatttgtgaccgcgccgatccgcagcagtgcgaggtgaagagccatgaattgccaccaattcggcaactgatacgacaccacttcgccaggcttgacaccaagccgcaacaaattagccgcggttcgctcggcagcttgctgcagttcgccgtatgtcagcgccgtacgtcggttggacgcagcttcgtagccaacaaccgcgagccgccctggatcgtttctggcatgcctcgaaaaaaactcgagcaaggtttgatcgctccagaatccagcggcccgcatcgcttgcttgcgctgatctgacaagatcggatccatccccattgtacgcctctccttatgaaatccttggagtaccggggtcggggcccggtaaaaagtccgcttccacccagcccgacagctcgccattttctccgtggtttatgcggcgccaagtttctcgcgaagcctgtcaactgcttcgggattggcgagtgcggaaagatcgccgggatccttgctttcgaacactgctcgcagcacccggcgcatgatcttcatgttgcgggttcgaggcagatcatctacaaaaattatcttctccggccggtacgatgctcccatgccgctcacgatagcggatgagagctcgttgacaatttcactctcgacgttcgtacctggcatgagcacgcaggcacaaacgatcgccgaaccctttaccgggtgcggaataccgaacaccgccgcctcggagaccttgccggtgtcgatcaaaatgccttcgagctcggacggcccggtccgcttgcctgaaatcttgatggtgtcgtcggagcgcccgagaatatagtaaagcccatcatggccgcgcatcgcaaaatcgccatgcacccaaaggccgggaagcgtgctccagtagctttcgacatagcgcgcatcggccttccacaagctcttggtcaatccgatcgacgcctggcggagcaccagttcgccgacttcgccgggcggcaagctcttgccggacatgtccacgatgtccgcgccgacaccgagcgccggacgggagaacgaaccggggttcatcggatggttcggcgtccccgtgaagatgcaacctccaacctcggtgccgccggaaatgttgatgattggaagctttctcttgcagacatgctcgaagaaccattgccacggcgcgttggtccatgcctcgccgcccgacgcggtcatacgcaggctcgacagatcgtggcgctcgacgtcctgcgttccatagcgcatcaaactacggactatggtgggggatactccgagatagctgacgcgatgatcctggatcagccgccagaatcgtccggtgtccggaaaatccggcgtgccttcggcgatcagaaggctcgcgccggcgaaactgggaatacatgcgcacatcgcgccgaccatccagcccatgtcactgagaaagaaaaaacggtccgatgatttgaaatcggcgcaaatgatcatgtcgcgtgtgaccatagaaccgatgaagctgatatgggtccaaacgcaacccttcggttcgccggtggttcccgaggtgtacagcagaatcgcggcatcttccgcattcatttcggcggtcgcgatagcgccgtccttgccgatgacgatatcgtgccaccagtgatcgcggccctttcgcatcggggtttcgatcttaaggccttcacgatcgacgacgatcacgtgctgcactgtcggtgaggattcgagcgcgacgtcgaggacggatttgagcggtgccgcagcgccccgccgccaggtcccgctcgcggtgatgacggccttggcgccgccatggttgagccgggtttgcatgggagccggaccgaagccggagaacagcggcatcaggatcgcgcccaatttcagcacagcgaaaaacgcgataaaggtttccggcaggttcggcaaatagagagcgaccacatcgcccttaccgacgccgagatcacgcagtccctgcgcaagccgtccgacgccgcggtccaattcacgataggtaagcgcgcgctgttcgcgcttgtcttcaccctcccagaccaaaaatgtctggtcccatacgggcgtgctgcgatgcttgtcaatgcagttcagcacgatgttggtggtcccgccgacgcaccagcgtgcccatggctgcccgcgcgacagatccaacatttggtcgtaactgcgatagaatcgaacatcgcagaacttaaagacttcctccattagccatgccggatcggcctcagccttcgacgcgaggtgatcgtaatcgtcatatccggttgcgcgcaggaaagcggtcagattgcttgttgcaattagctccggcggaggtgtccatgcataggacgttggattattcatcgactacgttccctgatttgcagtcaagttcaattcgagattgacttaccggccgataggaacgcatgcccgatcgaacacgagacggtggacaggcccgcccgataagcatgtgtccagcctggacgcctaatgctaacgctctcgtcttgcgagttcaatcgattctaacaatcgtttgataaatctattcgtatggaacaacaaatgaggtatccatcttttggacgccggtcgcaacccgatttgacttgcctcaatttctaacgtctgttaggttagtgcaggtaccaatcgaggcacaagtgaaagtcaacccggacctcgcggaatttctcgctccaacgcattacgtggattgcgactcacctgcgattagagagtttgtctcgcgtgtggctggcgacaaacaggaccggtcgacggccgagaaggcaatcctcctatttaacgcggtacgagaccagatcagatacgacccctacgcggtgagtttgtccgaagccgattatcgcgccagcgagattctcaaaacgccttcggcgttttgtgttccgaaggcaatattgttgacggccgccatgcgcgcagcgggaatccccgccgcgatcggctttgcagacgttcgcaaccatctgaattcccccaagctgacggagttaatggggactgatctcttcatttatcacggctacgtcgcgctttggctcgataggaagatgttcaaagtgacgcccgcgttcaacatggagctatgtgaacgatttggagtccgacctcttatcttcgacggtacggccgacgcgttgtttcacgagttcgacacgagcgatcatcgccatatggaatatgtcaatgaccgaggttggttcgccgacgctccgataggcaagatgcttgaggactttcgcgttgcatatcccgcgctggtgacattgaatactggtggcgtcttaatagatgacgctgccttcggagcgcctcaatcaggggagtaggccggagcgaacgaaaccgcgggatttgactagccgaatccaggtgcgagctgaacacgacacttgggcgcgcagtttatcgatggcgcgatcggaatcgtccgattggccccagcccgaaaatctacgcacggcggcacgcgtctcgccgagagatggcaatgggggcgataggtacgctcattttgagatctgccgcaattcggaaggctgcttggcgtattgaaccgcgacacgaccgaccttttcacgtgcgatgacaagtttctgaatttgtgcggttccgtcgccgatttgcaggcccatcacgtcgaggtaacgctgatgaaacggcagatcggtggtgtaaccgtagtggccgtgagtgaggaggcactggtggatgatctcgcaggtcactttcggcacataccatttgcacatcgcagcttccgcggtatgtgcaagcccgcgatctctgagcgaaagcgtatagtagcaaagctgccgcatcatggtgagctgggtctcggcttccgcgagcggaaagctcacgccctgaaactgcgcgatcggccgctcgaaggcgagcctttcggttgagtattgccatgcttcatcgaccgaagcctgggcaggtccgatgcactcaaggccgatcaaggcacggctatagtcgaagcctgacatgatcttggagaatcccttgttctcctctgccatcaggcactcggccggaatgaagacgtcgtcgaagaacaccgagccgcgtccgacaggtttggtaccgatgtcatcaaaatgcgtccgcgtgattccgctctgcgccagatcgacaaagaatgcgctgacgccacgtgcgccgtcttcgaccttcccggttcgggcaaagatgactgctgcgtcgcattgatctgaaaaactcatggaagtcttttcaccgttgaggcgatagccatttcccgatttttcagctcgcaaaatgaggttggcagcgtccgaaccgccccgcggctcggtcaggccgaggccgatgatcttctcaccccgggccacttgcggtagccactcctgagcgatttcgggcgaggcgtgctctgcgagcattccgccgagcagtgacgccagaagttggacgtagctggcgttgaagtctccataagcgatctgctcgacaataatgcctgccgtcacgctgctctcgccaaggccgccgtatttttccggcagatcggcgccaatcaggccgagtgaccccatttgtttcagcatggcacgatcgatgcggtgttcccttgcccgcctctgatagtgggggcccagcttgtccttcgcgaaacgcttcgcggtttcctgaaaagcctgctgctgctcgctaagcgcgtaatccatcgcgattcctcccatctaggtgatcttcagttcttgcattcagtctaacaactgttagaaatttaacaaccagccacggaggcaagtccatgctgacgccgaccagccccggaacatcgctttaccctcatttgctatcttcgctaaaggtagggcggaccacgttgcgtaaccgcatgatcatggggtcgatgcacacccgtctcgatatggaggacaacggcgtgcacaagatggcggttttccttgccgagcgcgccaagggggagataggactcatcattaccggcggttatgcgcccaacagcgcgggtctgattgagcctggggggccgattttgaccgaacgtgcgcaagctcgcgaacttcgtcgcatcactgatgctgtccatcagcacggtggtaaagtctgcatgcaagtgttgcattcgggccgctattccaagcaaagggactgcgtcggtccttctgacatccccacccgcatcaatcggtttcccccgcgtgcaatgactggggcagagattgaacagacgatctcggattacgtgcgctgcgcgctgctcgcaaaggaggccgggttcgatggcattgagatcatgggatcggaaggttacctcattaatcagttcacggtggtgcgaaccaacaaccgtaccgatgagtggggcggatcggagcagaaccgccatcggctcgcggtggaactcgtcaaacgctcgcgaagcgccaccggcgacgacttcatcattgtctaccgaatctcggcgctggacctcgtcgaaggaggtgcaaccggcgaggagattgatcggcttgcccaacgggtcgaggccgcgggcgccgacattctcaacaccggtatcggctggcatgaagcgcgcgttcccacgatcgcttacgtcattccgcgcggcgcatggcgttttgcggcatcgcgtctgaagaaagcggtcaggattccggtagtggcatcaaatcgcattaatacgccggataccgcagaagagattctggcggcgggggatagcgatctaatatcgatggcccgcccgatgctggccgatccgcacttcgccaggaaggtgcgggagggcaacgccggcaaaatcaacatctgcattgcctgcaatcaggcctgcctcgacctgatcttttccgagcggaccgcgagttgcctggttaatccgcgtgcctgccgcgagactgagtttgaggacggcccggctcagacctcgcgcaggatcgcagtgattggcgcaggcgcgggcggtctcgcagctgccgcggaagccagccgacgcgggcacaaggtaaccctgtttgaggccgctgatcgcataggcgggcaactcaaccttgcccgagcagtcccgggcaaggtcgagttcgacgaaatgctgagttattacagcggccaaatcgccgatggcggcgtcgatctcaggctgaattctgctccatcggttagtgacctgaaagacgcgcggttcgatgctgtcgttgtcgcctgcggcgtccatccccgtgtgccggagattcccggcatcaaacatcccaaggtggtgttctacaacgatttgttgagtggcaaaagccacgcgggacggcgagtcgccatcatcggcgcgggaggcatcggtttcgatgtcgccgaatacctctgccattcgcagcctgatgaaccgccaaaatcacgggcaatggatattcgtgagtttcagcaggagtggaatgtcgatgccagccttacgaaagctggagggctatcgggcgatccgctggcaccaaagccaagttcgcgcgaaattaccatgctgcagcgcaagaagacgcggcctggcctcggtctcggcgtctcgactggttggatcctgcgtagcagtcttgaaaagcgcggggtcaagattgtcggaggggttatctatcagcggatcgacgatcaaggtttgcatttcgtggccgagggtgagccaagtacgctcgcggtcgatacgatcgtagtttgcgccggccaagtatctaaccgcgatatgctcaccgaactgctcaagaccggaatcgagacgcatgtcatcggcggcgccaaggaggcttccgaactcgacgcgatgcgtgcggtcgaggagggcgtgcgggtcgcgcacgcgctttaaaggggggaggagcctgagatgagttcgcaaagcagccagccgagttacgggttcaccgacgacgaactctccacgatcccgacagtgtaccgacctgatctgttcaccggccagaccatcatcgtcagcggcgcggggagcggactcgggaaggcgatcgcattcctgtttgcgaggcttggcgccaatctggcaatctgcgggcgcgacgccgagaagctcgcacacgtcgttccggatctagagagtctcggcgcccgcgtcttcagtagaagtctcaccatccgcgaccccgatcaagtcaacgaattcgtcaaagacgtctgggatcattttggtcgtgtcgatgtgatgatcaataatgccggtgggcagttcgcccagatggccatcgacttcaagccaaagggctggaacgcagtgatcgataccaacctgaacggatcgtggtggatgatgcaagcggcggctcgcgagtggatcgagcgcggcaagaccggcaatatcgtcaatatcgtggcattgatctggcgaggcctgccggggatggcgcacaccgccgcggcgcgggccggggtgatctacgcgtccaagaccgtcgcggtcgaatgggcgccgcacggcatccgggtgaattgtgttgcccctggcgtcaatgaaaccacggcattcgaccgctatgttccggaaggctccgcgacctacaaggaagcgaatcccatgaaacggcacggcgatgcatgggatatcgccgaggcctgcgtttatctcgccgcgccgtcagggaaattcatcacgggcgaaacgctttcggtagacggcgggcagcaaatgtggggcgatccgtggcctgccggacgtccgaaatattttcgcattggtcagacgtaaacaagctcccgaaatcgaatatccgatatgccgccgcagcgttaacgattttgaccgctacgacaatcctgcatcgccgcgttcgcgtttggcaaatttaacggcgtcgatcatatcgcgggcgtcgtgggccagatgtagcgtctcgccgccgtcgatgtaccagtcctcgccggtgacgaattgaccgagcggcgaggacagaaaaatgattgctgcagaaatatcctcgacgctgcccatgcgccccagcacgttgcggttgagcctgacccagtcgtccggcggtatcggatagcggccaagcgcctcggtcttgatggttccgggtgcgacgcagtttaggcgaataccgaactcggcccactcgtaggcgagcgttcgcatcatcgcggtaacgccgccgcgcgctgccgcggtatgcacgaagccgccaaggccgctgcggatacaggcggttacgaacacaatcgatccgccattcgccaacatgaaatggtccgcggcagccttggttacctgccacgagccgatcaggttgttgcggatcacggtttcaaagcccttgttgctgagttcgcgggctggcgtgacgaattgtccgccggcattattgacgaggatattgagcccgccgaactcggctttgatcttctccatcgcgcgttcgatcaagtcgggttcgcgaatgtccgccgacacggcaaatgcctcgccacccgcgtcgcggattacctttgcggtgctctctatcggatcgatgcggcggccgagaacggcgatgcgggccccgcagcgcgccatctcaatggccgtggcgcggcccattcctgtgccgccgccggtgacgagtgcgacctggcccttgagaagttccggcgcgaagcgcgtttttgaaggactctcgtgcatcaccaatcccatgcctgaaaatacttttgcgttcggtcgagtttaatatattctaacatatgttagaatacataaaaaggcagatcgatgtcagacaatgaacctatacgttattcgctcgaggatggcattgccacgattaccatcgatcggcccgcgcgtaagaacgccctgtcggttgaggcgatgaacggtttgaccaatgcctgggagcgtgtcgaacgggattcccaggcgagggtggtgatcctgacctcggctgactgcggcgtattctccgccggtctggacctcaggcaggcagccgagatcagggcgcgtgacggcgtcgacatactgaccctgatgcgcgatccgatgcaaacggccatgcgaaccgtttcaaagccgatcatcgcggcgatgactgggtcgctgatggcgggcgggatgctgctggcgctgaagtgcgacctgaggatcggcttacgcggtacacgcgccgggattaccgaggtcaagatggggcggggatcgccgtgggcagtaccgctgctctggatgttgccgcaacccgtggtgatggaactcgtcttgaccggcgagaccctgccgatcgagcggctcgcggagtatggtttcgtcaattatctggaagaaacacccgacgctgttcgtgcgcgtgcattgcaacttgcgcgcaagattgtagaaggcgcaccattgtcggtgagggcggccaaggccagcgtgttggccgcgatggacctcggctgcgagaaggggctcgttgaggccaacaggcttcatgtcgaagcctacgcaagcctcgatgccattgaaggcccgagagcctttgcagagaagcgtaagccggtgtggcaaggtaaataaggcaaggcagatgaggattgtgccgaacgatgtccgctttcatgctttcgagttgatagcggataccaatcctttccgacaatttttccttacccgcagggtcaacgatgagcacgcaccacgtcggcaccccgaaacgctcggcttatttcagagaagagcatgaactgctgaaagcccagatacggcgattcgtcgaggaggagatcaagccgtatgcgctgcaatgggagcaggacggcatggtgccgcgcgacgtgctgcggcgcatgggtgagcttggctttctgggcatccgctattcagcagaatatggcggctcgaacatggatacgttggccaccgttgttttggccgaggaactgggacggtcgacgttctcgggagtggcgatcacggttctggttcataccgacatggcgtcggtgcatctctacaacgccggctcgcaggccttgaaggaccacttcatgccggatgtcattgcagggaagaagatcgtcgctgtcggcgtcaccgaacctggcgcgggctctgacgtgaaaggcattcgcaccaccgcgcgccgcgagggcgacggctatgtgctcaatggcaccaagatgttcatcaccaacggtgtacatgcggacctttattgcatcgccgccgtgagcagtccggatgcacgtccgtcccagcgcttgtcgatgttcctcgtggagaaaggtacgcccggtttccgggttggtcgcgatctcgacaagcagggctggaggtcatcagacacggcggagttgctgttcgaggattgccggatccccgcaacgaacctgctcggcgaggagggacgcggtttctacgggatcatgcaaaacttccagaacgagcggatcgtgctcggtgcaatggcgatgggtgaggcgctagctgcgatagagatcacgctggactgggtcacgcagcggcagaccttcggcgcgccgctgtggtcgagacaggctatccgtcatcggttggcgatgctggcggccaaggttgaggcagggcggcaacttgtttattgcgcggcatggctggtaacgcaggggatcgatgccaccaaggaagtatcgatggtcaaggcttattgcggcgagctcgtcaacgaggtgatgtacacgtgcctgcaatttcacggcggcatgggttacatgcgagagagtacgattgaacgaatgtcgcgagatgctcgcgttcaatcaattggcggcggcactactgaagtaatgctggaagaggtcgccaagcgtatgcgataaccaacgcacaaactggaaacactaacgcggcaagatgccgttgaagatcagcaacgtggtccggctcgccaattcctgtaccgagctgctttttcgcgcatcgaaccactcgaccgtccaattcaaggcaccaagaataaacctgcgtagcggaacgattagtatctccgggcggatttcgccggcacgctgcgcatccgccagcatgtcatcccaatatttgccataggcgcggcgcagtggacgatggcgcttcttgatgcgctccggcaactgaccgtagacgcgcatgttggcggaggtgtagtcgctttcttgcagcagggtgacaagatgagctttgatcgcggcgctgatcttgttccggtgcgaccccttgccaagttcgttcacacttgcctttaccgcatcgaatatacgttgcaatccaagttcgaggatttcgtccaatatcgcggttttcgaatcgaagtggtagtagatgctgcctgccttcattcccgccttgtcagcgatctgtcgaagcgtagtggcggaatagccctgctgtcgaaaaagctgtgccgcgacccgaaggataaggtctcgtgaaacgtgcgatttcggcggcacggaaagtgcgacatttttacgcttgggctcgcgcttggcaacccgcttcattctcgatgaagatttcaaatcttgctcgctcaaacccgaatggcatcaccgtacaaagcccagctcttgcaccagatgagtaatgccgtgtaatagaccaacaaggctgttcgggcaacattgcgaagcgctgaaactactttcaatgggcggccagcgaacgactcaagcctcggacgatacatcatcacgatccgaccgtaatagacggatcggcctcttgcaagggagccgggccttgtccccattggtctggccggctacaactcgatatcgccggccagcagccgctgcgcgatggtgcgtgccaggatctcgttggtgccgtcggcaatgttgatgattcgcaaatcctgcaaggcatggacgaggccgacctcgttggtaaggcccatggcgccgtgggcctgtatcgcttgatcgacggctcgatagcccacctgtacggcgtaggctttcgccatcgacaactccttcacggcccgctcgccactatcgagcagcatcgcggcgttgagtcccatcagatgcgcggcgtgaagttcagtggcggcgcgcgcgagcgggaacgagacgccctgatactcggcgatcttggcgccgaacgcctcacgctgctttacatagccgagcgccttctcgatcgcccagcggccctgaccaaccgcacgtgccgaattgtagatccgcccgagcgaaacgccatagagcgcgagcttgaagccgtcgtcgagcgcgccgacgagttgccacggctcaaccctgatgttctcaagcaccagcgcgccttcatgaccgccgggatgaccgaagagccgcaccacgctttcaacttcaaacccctcggtgtcggtcggcaccagaaagccgctgatcccgccggcttttcgctgcgccttacccggatcggtgacggcaaacacgatgcaccattccgcggtgggcgagttcgtggtccagagtttccgtccggtgatgcgccagccgtctccatcgcccaccgcgcgggtctttatcatgctggcgtccgagcccgctcctggttccgacagtccgaaacacatcgaggtgcgtcccgtgatcattgcgtcgagacagcgcgcctgcgcctccggtgtcgcttgcgtcagcattgcgctcggcccaaaggcccaatgagcgatcacccagggcgtcaggatcgaatggccgccgattcgtcggtagacggcctcccaggcgacgtaataggcaagatgtccgagcccgccgccgccaatcgcggctggcgcacacatcgcgtagtaacctgccgcggcggacgccatgcgcacctcgcggattagcgcgcgcacctccggcgcataacgcccgtcggcagcataggtgaggcgcggatcattgaacaacgcgtggttgcgctccaggcgcgggagaacctcggcttcgacaaaccgcatgaccccatcgcgcaccgcaaccacgtcttcgggaagctgaaagccgattgcgctcatgtaaccatcttccgtgtcgagaccaggggctgcgggcgaagcgactttagttataaggcaaactcatctcacgagcgattgtacgctgtcgtgttctccggctgctaaacatcgagggagccgaccagggcgtatcaagggcgagccactcatcttttcttttcaggctaaagccggaaataccccgtcagatcagattgcgacgctcggcctcgctgatggcctgcacgcggttgcgtgctttcaggtcagcgaaaatcctgcgcatatgccatttcaccgtgtcttcgctgaccaggagttggtcagcgatccgcttgttcgaaagtccatcgcgggcaagccgcaggacgctgatctgccggacggacagcgtggtaagctcgagggggaacgagggccgctcagtccttggccttggcttggcgatcccgtcgaaatcgaacgtgacaaaggcatcggcggataccggggccaaggcgagcaacagatcccgcgtgtctagcccggtccggtagcatcccaactgcttgatgagttcgaaggcattgaccgcctttcgtcgcgcgggcgtcagcgccccggcggcggcgtgggccccagcttcgcacatcagcgcgcgcacttccaatcgaccagcaccgatcgaccgcgcgatcttggcagccgcctcggcgttgcggagggcgaggctgtgctgccccttggggatggcttccatcgcgcgcaacagcgatatttgggcacgcaggggtcttgcatggggcccggtcaggacctcactagagtcacgcggcagcaggtagtcgatatcccgcgcgccgcttaacagggccaattcggcaagttccaactcgatcagcattcccagtcgcggcagtgccctttcccccgcaagggcgcgtgcccgttccagcaatgccgcggcgcccctgagattgccattggcccgatgccaggtcgcgatgacgcggctgaccccgtagaacacgtcggtaacgccgtagttggcgacaaagtcaagcaacccggcgacagagtgctcggcgatatccagccgccccagttcgaacagcacgtcaagttccagggcgatcagcagctttgacgagaaggatgtgcgcgtcacctgaacgtcgctgtcattgcgggcggtatcgataagttgcagcgccgtgcgcatgtcgcccctggcgagggctgcctgaatctcggccgcataaagccagccaaaggcatagtgttggtgcgcggcgctgttgactgaatgggccatgactagcgcctgcttcagttcgtcaaaccggtattcactcgctagcatgaaggccagacaggtgagtgccgcacccttgccgacggcattatcgtcgccaaagttactgatccaatcgttgcacagccgctcgctcaactccagttcgtcatgggtcgcagcaccgatcgcgcggaccagttgcagccagccgcggtcaggatgcgcaccggacgacgcgcgcggggcgggcagatagcccagcagcctttcggccttgtcggcctgttggctgaaatacatcgtccaagcgtagctgaggcagatgatcggatgcttgcgcaactcgcgggttgggaaccggcccagccattcgcgcaacgcctcgatctcgccttggcgcagggcgagatcgagcatgatgtcctcactcagccccagcgcccagcggtggtcgcccgcccgcagcgcaaggtttaccgccttctggaactcgcgcctccgccagtgccagaaggccgcacgtttcaggacataggattttcgctcagcactgcgcaccagaaaccgatgctgaaggtaatcgcggagaaccgggtgcagcgagaacagcgttgagtcattttcggcggggcgaaacagcaggtgatcgaggtcgatctccctgatcagcgcgtcggcgttggtggacttgtaggcgtaattgtagctttccgccgaaatcgggtcgatcatcgctgcgttttcaacgaactcaagctgccgacgcgacaggcgtctctcgatctcctcatggaggaaggtcaccgtttcgggccagtttaccgcgggccggaccggcaattcggtccggcacatgatgtggcagagcgcgggccagccctgcgtctcggcgatcatctgctgtgctgttacgttggcgaccgggtgcgcccgcaaaaacgtttcggcatcgtccaaggtgaaggccagatcgcgggcatggacctcccgcactccgctttccagccccagccgggcaaaaccgcgccgggtatccccggcgatagcgaatcggacattcggcggggtttccagcacgaaggtttccagtgcgtgcagcagggcgggtgcgtgttcgatgtcgtcgatgcagattacattggccggtcgctcagcgccgaattcttcccatagcgtggccactaactcggccagatccgccgggaccgctcggccttcgcgggacgctgcgtcgagcagttggccgtagatggcctccgccagcgcgccttccgtttcgtatccgtcgcgcaaagacacccaggctgcgttgtttccagcagccctgaaggccaaccagttctgcgccagaacgaccgattttccataaccctgcgttgcgcgcaagatcagtgtccgggtctccggttggcctgaaaacgtaaatcggggccgcgcgatacagcgcctggcgattgtccccagacgcgcggaaatgcggacggcacgcagccgtcccggatatgtcggctcgtcgcaggtacccctgatcatgggcgtctcaaggcagcgcagatagctataggataccccaatcgggaactacacttaagtgtagttgtgagtcccggcccaatgatctccgcttcctccgctcgctcggaatcgggatgggcgtactggtgtcacctgccgcgcgacgaatggtggggtcaaggggaggacatgccgaatgatcaatacgccagatcagtctgtttcaatcttaggctacatcgaccgtaagcgctatctttggatgctgtccaccctgtggccggcgacgccaatgatcgggctctggctggtagcgcagaccggatggaccatctggtacgccttggtcctgatcgtctggtacgcgatggtgccgcttctggacgccatgttcggcgaggatttcaacaacccgccggaagaggccgtcgagatgcttgagaaggaccgatactaccgcgtcctgacctatctgaccgtgccgatccattacgcagccctgattgtagcggcctggtgggtcagtacccatgcgatgtcttggctcgaaatcataaccttggcgctctcgctaggaatcgtgaacggcctcgcgctgaacactgggcatgagcttgggcacaagaaggagacttttgaccgctggctggccaagctggtgcttgcggttgcgggttacggccatttcttcatcgagcacaacaagggccatcaccgcgacgttgccaccccgatggatcccgcgacctcacgtatgggcgaaagcatctacaaattctccacccgcgagatacccggtgccttccgccgcgcatgggcccttgaagaagaacgtctgtcgcgccggggcaagagcgtttggagcatagagaacgaaattctgcagccgatgctgattaccttcgcgctctatgcgggtctgcttgccttcttcggccccctgatgctggtcttccttccgatccaaatggcgttcgggtggtggcagctgactagcgccaactacattgagcattatggcctgctgcgtgaaaaactgcccaatggccgctacgagcaccagaaaccgcaccactcgtggaactcgaaccacatcgtgtcgaacctgatcttgttccatttgcagcgccactcggatcaccacgcgcatccgacgcggtcctaccaatcgctgcgcgacttcaaggatctgccgacgctgccctcgggctatccgggcatgttcttcatcgcgttgatcccaagttggttcaggtcggccatggactcgcgcgtggtagattgggcccatggcgatctgagcaagatccagatcgaggatggcaagcacgcgctttacgaacgcaagtttggtacggtcggcaccgacgcaaagcccggcttggttgctgccgagtaaaccgccaacttccgcaccgctctcgcttgccaaacgatgcggacacccgacaccacagccctgagccactcgactcgtttcaatcgtcgggcggccagcggctggccatgtggggcggtcaggccgtgcgatagggcagaggttgcgcgccgattacggaaaaaaccagggatagctgccattcggcccagcaatgtcagatcggcggaaaaggaggaaaaaggaacatggccaagtaccagtgtcctggttgtaaatacacctatgacgaaacgctgggccatccgcatgaaggatttcccgcaggcactgcttgggccaacgtgcccgacgaatgggcttgccccgattgcgcagtgcgcgacaaggtcgacttcgaattgatcggcgaagcgccggccgctacgacgccggccactcaggccgtcgagtttgccgggacggcacgtagcgcggtcccggtcaccgacacggccgttatcgaaaagcccgccagcccgatgtcgaaaccggcggcgcggatggccgccgtaccgcaggccgcggaggctttgcccccccaattgttcagcctgcaaagcgagcccggctttgccgaaaacaagccctttgtgaaatgggtctgcatcacctgcgggcatatctacgacgaggcactcggcgacccttccgggggcatcgctgcaggaacccggttcgaagagattcccgaggattggtgttgcccggagtgcggcgccaccaagaaagattacgcgctttgccaggaaacctagtcaactcgtgttggcaaagggtatcgggccgatcaggcccgccatggaggtcattgtgaatattcacgccgatccgaacgacattccattggtggataccagatctaccgttgcggatgtttttgcgaagcaacgggaggcgggctgggcgcgtcgctcggatttcgaccgcaaggcacgcatcgcggcgctgaaccggctgagggaagtcctgcagcggcgcgagacggacatcatcgcggctctttatgcggatttccgtaagcccgagagcgaggtgaggctgaccgaaatcctgccggtgctgcaggagatcgcgcacaccaaacgccacttgaagggctggatgcgatcgcgccgggcagcggccacgctgggtgttttcggcaccagggccaggatccgacccgagccgaaagggatctgtctgattattgcgccgtggaattatccgttgaatctagccttcgggccgctggtctcggcattggcggccggcaacagcgcgatcatcaagccgtcggaactgacgcctgctacctccaccctgattgcggatatagtggccgaaacgttttcgcccgatctggtggcggtggtcgagggcgatgcagcggtcgcgcaggagttgctggcactaccgttcgaccacatcttcttcaccggcagcccgcaggtgggcaagctggtgatggaagcggcggcgaaatcactggcctcggttaccttggaactgggaggcaagtcgcccaccatcgttggccccactgccaacctgaaaaaggccgcgcgtaatattgtctggggcaagtttgccaacaacggccagacctgcattgcgcccgaccacgtgttcgtgcatcgcgacattgcgcaagagttcaacgagacggtgatggcggaaatcggtcgcgtctatggcaagacgcccgaggtgcagaagatgacgcccgactattgccgtatcgtgaatgaccggcatttcaaccgggtcgccggcctgatcgaggatgcccgtgccaaaagcgcgcggatactgctgggcgggcagacggatgcggtgcagaaattcgtggcgcccacgctgatcagccagatcacccccgagatggcgatttcgcgcgaggaactgttcggcccgatcctgccgatcatcgaatatgacgatatcgacaaggtgattgatcagattaacgccaatccgaaaccgctggcgctttatgtcttcgacaatagccgggcttttgccgaggacatcatcacgcgcaccagttccggcgcggtggggatcaaccttaccgtcgtgcatttcctgcatcccaatttgccctttggcggggtgaacaactcgggcatcggtgcggcccacggagtctttggctttcgggcattttcgcatgagaaggccgtcctgcaggaccgctactcgatcgtccacatgctgttcccgccctatacaggttttgtgaagcggctcatcaggcttgtcgtcaaggtgctggggtaactggttcgatggaacaacgatctgaaagtcacggaacgtacgactacatcatcgtgggagccggctcggcaggctgcgtgcttgcaaataggctgtccgcagatcccgcgaagcgcatcctcttgctggaggcgggaccgcgagacaagagcgcgctgatccatacgccgatcggcatcgcgctgctggccaacagcaagaaactgaattgggccttcaataccgaaccccagcagcatctgaacgcccgccccctgttttggccgcgcggcaagacgctgggcgggtccagctcgatcaacgcgatggtctatatgcgcggccacaaggcggattacgacggttgggaagtcgcctctggcacctcggtctggggctgggaccgtgtccgcgccctgttcaagcgactggaaaacaatcaacgattcggtaattcagaataccacgggacgggtggtgaactgtttgtcagcgaattgcagacggtcaacccgctcagccgatccttcgtcaaggcggggcgcgaactgcagatccagcataatgatgatttcaacggcgagcgtcaggaaggggtcggcctttatcaggttacccagaaccgcgggcggcgctggagttcggcaaaggcgtttctggaaagcgcgctggaccggccgaatctggaggtcatcaccgatgcgcgggtgacccgcgtggtgatggacgggcggcgcgcgatcggcgtgtcctacaggcggaacaacaaatacaagcaggcgcggctgaaccctgcgggtgaggttctgctgtctggcggcgcggtgaattcgccgcagatattgatgctctcgggcgtcggcgcagcggaggagctgaaggaacacggcattccggtgctgcatgacctgcccgccgtgggcaagaacctgcaggaccatctggacatcacgctgatgaacgcggccagttcgcgtcaaccgatcggagtggcactcagcttcccgccgcgcgcggtggcggggctgttttcctatatcttccgccgcaaggggtttctgaccagcaacgtcgcggaatcgggcggcttcgttaaaagcacgcccgagcgcgaccggccgaacctgcaattccacttcctcccgacctatctgaacgaccatggacgcaagatcacctacggttatggctttaccctgcacatctgcgacctgctgccgaaaagccggggcaggatcggtctgaaaagccccgatcccctggatgatccgctgatcgacccgaaatacctcgatgacccggaggatatgaaaaccatgatcgcgggggtcaagatcggcaggcgcatcttcgacgcgcctgccatggctgttcattcccggcgcgaggttttgcccggtcccgcggttcagagcgatgacgaaatcgccgccgatatccgcaagcgggccgagacgatctatcacccggtcggaacctgccggatgggcgccgatccggcgtcggtggtcgatccgcagcttcgggtgcgcggtatcgaggggctgcgggtgatcgacgcctcgatcatgccgacgctggtggcgggcaacaccaatgcgccgaccatcatgatcgcggaaaatgctgctgacatgattttggggaagatccatatttaggctgtgtcgcagaatatttccagcaaagctgtcaatccgtgtgaaatatgccgatccggcgggtgtgactccaaccgagttcggatgaaaagcctacgtccgacgctctcgtcgacgaagcctcgccatgccgcaagatcgtcgaagtcgcgcgacgcgcgcagcaacagggcgtcggcgagcgccctcttgagatggccatgcgcgctctcgatcgaaccattctcatgcgacactccgcgattgttgcgggtcggtgtcatgccgtaatagccgcagaatgcctcgtagcgtgtcgtcaaatcctccttggcgtcggcgccgagattgcggaacgccgccgaaaggctgtcgcttcggtgctgctcgggaaccccgcccagcgaccacagggcgttctgcaacccttccgccagcgcgacaaagctctcgccaccgagcacgacatgggcgtgttcgaagccggaaaacggcagacggaagtgatagaaccggcagtccagcaactggccggcgacggtgatccgcgacctcggtgaagtctgacaagcccatgcgacccggcggatgctcctggcggaagatcacctcccggtccgggccgttcaccgcgcgccacgccctgatccgccgttcaagcgtccgccgcttcccggagcccagttccgggtgccgacggcatagttcctcgaacacggcgatcggccgcaatccggggcggccttcagcatggggaggacgtcgttctcccagacgtcgacgaatggatcggcgcggcgacgttcgcggggcgcctgtttttgggttggaagtcggggatccttctcgaaccggtaggcggcggaggtgctgaatccggccttcgcagcggcaatggctggcgaatggttgcggcgcaagttcatgaaaagcctcatttgttgatcggtgacgtgtcggtcagccaaggaattggggtcctctcgaaagagaaaaccgatccttgaccagccgccgttaccgccaaatgaggcccttcgggcgcccacgccgctgctggggtaactccggtcgggctacgccctcccttcgtcaccccagcagcggcgcattctcatcctgattgtcgcgggattcccatcttgattgtcgcgccgcacgacccggacatcatcatgagatgctcgacgaccttggaaaggaccatgaccccagcgatgacatcagaaaggaacttgacacggacccgcaattaaagggccgaataacggtaaatgtggcttggacattctggtcgtcatcacgcaacgactctggtctgtccccgcattctggaaagcagggcagcgatctccccggccggtcgcgctgggctgaacagatagccctgcacctcggtgcagccttcggctcgtagcgcagcaagctgctcctccgtctcgacgccctcggcggtcgtgatcatgccaaggttcaccccgagccccatcatagcccgcacgatcgccaaggaatcggcccgatccggcaaacctagagtgaaagacttgtcgatcttgatcttgtcgaacgggaatttccgcaggtagcccaacgaagagtagcctgtcccgaaatcatccatggcgatgctgagtccgagttgtcgaagctcatacaggaccgcgatggtcgcctccgtatcctgcaacaacgcggtctcggtgatctcaatttcaagccggcttgcaggcagtcccgaatgacctaaggctgccacgacatcgagggataacctgttactcctaaattgaagagaagatacgttaacggcgagtttcaggtgatcgggccatcccatggcgtccgaacacgcctgtttcagcacccaggctccgatttcgttgatcaatccgatctcttccgcaagcggtatgaaattgtcgggcccaaccatgccgcgcacggggtgtcgccagcgcagcagcgcctcgaagctgctgacctcgttcgtctgaaggttgacgagaggctgatagaacacctcgaactcctcccgcgccagagccttgcggagatcgacctcaagcgctcgacgagcttgcattctctcgtccatccaggcttcgaaaaagaagtacttgccccggccatccgccttggctcgataaagagccatatcggccttcttcagaagctggtctgggtcgtgaccatcggtgggcgccacggcgatgccgacgctcgctccgatcatgagctgatggtcgccgatgtcgtagggcgtgctgagcgtctcgatgattcgttgcgccagcacggccaagtcgtccggctgacccacggccaacacaactgcaaactcgtctcccccaaggcgggcgacaaaggcgtcgtcacgcatgctcgcgcgcaaccgatccgcgacagcgaccagcaaccggtccccgatcgcgtggccaagcatatcgttcacggccttgaaaccatccaggtcaaggtagataacggcgagctgttcgccccggcgcgctcgcttgagcgcctgctcggcctctagacggaacagcacccggttgggcaagcccgtgagcgcgtcgtgatgcgccatatgcgcgatcctcgcatccgccgcgcgacgttcgctgatgtcctcgaaggtcgcgacccagccaccattctccgttggtacggccgagatcgagatcgtgcggccatccgcgagccgctgctcaggtagcagacgctcatccctcgcgagagcagcctttatcgtcgcgtaagcttccacaaggtcgcattcccaatcgtggcccacgcattccggctcggcaacgcggtggatgggagttccgggctcgatggcctcggcggggagaccgtaaatatcctgaaagcggctgttgcagacgacaagccggtcatcggcgtcgtacatgcaaagcccctgcgacatgttcgccatggccgaattcagtagatttgatttaaactggacgtccaggccacgctcatggaactggcggagcgttcgggccaacgctccgatctcatgtttgcggccttcatactcgggcaaaaactccatccccggatatgcgtcagcagatgtttcgggccgctcgatagccgaggaagtccgggcaagcggcgtttcgccggtgcgtaaccgttccatggcagcggtgagcaattcgattggcctcaacatgctcctatcgacgaagtacccgatggcaagcccgatcatcaacgccgccatcacggcgcaggaaccgagaacgagagttaagtcaatggcggccaagtgacgatcggacagcgccatgatgccgtccggctcaggtttggacgcaagttccaggaagctcgaccgaatgtcgtttcgcgtgaggataaggttagtgacagctaccgccccgagaagcggtccaagtacgcagaggagcgccacggatccaagaacagtttgccgaagattaaggtgcattttactcgttacagacattgccagccgttggctaatattaggctgtcgttacgaaaggaagtattaaagccggttgacgatgtgtggacactcacaaatctttcaggccgctatgatctagcccgtcttattcgccagatggcaccggagaggctggcgagcgtggtgtaaagcgctgatgcggcgtaggattcggttgcgaagccaaccccatcaccttcaaccgcgaacgccacgcccgccatgaccgatgatacgattctgcccttctcatttccagccgttcacaccaagaaaattacagctgccttcgatggcggtcgcctgacctcgaatgggggcgtgatgcttctggcgatggccgagcggcgtctcggtttggccgacaagttggcccggatgttcccggatcggcgcgacccgacgcgggtcgtgcacagccttgtcgatatgttccgcgctcgcatgtttgcgatctgctgcggctacgaggacgccgacgatctcgaccatctgcggtccgatccggcgttcaagctggcctgcggacggctgccggacagcggtcgcgatctgtgttctcaaccgacgctgtcgcgcctggagaatgctccacgcctgcgcgacgtgatccgcctgacctacactttggtcgacgcatggatggataaagccgtaaccgcgcggccacgtggatttggatcactcaaataccaaaatgctggaacagaagcggggacggcaaccctgggggaggtgtgattgtcgtctcagtcaaatgcgacgccaatccgtttctcttttcgccatttgacatgacacggtcggcttagctgatctgcctctataaccagtctgaactcgtgaggaatgcctagcggactttcgacgtccagggcggcgccgctcgccgacaagttccgcacggtacagctaataccacccccaccgaattctatcgtcccggctttcagcacgcgatgtcgaggcgcggtacgtttgttgtccataggcggaccatagccgaaaattcttagaaattcgcaaaggtcatagtcgacccgcatgagcatgggtcatcgacgggacgtggtgacgggaagaccaaagccagctctgtgaaccgttcctcggcggcgtaggccaagggtgcagaagtcttgaggccattcgacactgactaaagatactacacgccctcaaatcgagccagatctggactgcgtctccccaatattccccgccttacatcgcctcatttacaaagcgttaacctcaatccgtagcggcaacttagccgggaagcatcatcgtgacagcaacccgatggaactttcgagatcgaaatggcggcgcaacacaaccgggcaagaatgttcgcggtactgagcgcgaccaacgaagcgatcttacggagcacttccgaacaagatctctatcaagatgtttgtaatgctgcggttgatggcggcaaatttctgggcacggccattttcctgatcgaggacgactcttcgtggttccggatggccgctggggccggtcccttcgttcatttgatcgagcaacttcgtttttcttctgatgccaccattccgcacggtcagggactcggtggcgaggcgtttcgcacggccagaccgtgcattagcagcgatgttctcaacgatcccagaacccaaccgtggaaggaactggccgcgagcgcgggcctgacggcgagtgccgtgctgcctctccttcgagacggccaagcggacaagacattggcacgatagcccaattcccatcagatctggagccggcctacccctattgagaaatggagaagcggttggcgtcctgctcttcctgtcgagcgaaacggatgtgtttaccccagaatttatgaagctgctggggcggcttgctgacaacgtatcattcgcgatggaaatgctggagcgtgaggacgcccgacgcgctgcagagcaagctaaggaccggctgacgcggatgccccgtcaacgacttcatgaccaagaacggaagcatccgcgacgacggccgcatgatgcgcgacatgtaccttttgcagaccaagaagccgtcggaatcgaagggcgagtgggacctgatgaacgccgccgcgaccattccggctgaggtagcgtatcggtcgctcgcggacccgcccaatggcgccgagcaccttcccgtccctcttgatgggaatgcgggaaacgactctgtctccgccgcgcatgcgctgaattttcccgacctcggccttgcccgtggccacgatctcatgcagtcgcgtgttgtcgatgacggtctcgaccgggcgtccgtttccttcgccggccttcagcccgaaaaacgcttcgtggatcggagaaatgtagacgatcttggccttgtcatcgacgatcgtcatggcgtcgaacggatccgtcagcaggtgctgcaggatgtctcaggagaaatcgacgctgccgatgaagctgagaagtgcgtcgcccggcgtttcgctgagaacgagcatctctctggacccggccggagtgaccagcaccatgtagatcttgcgatcgagattcagcgtcgtgatgcgccgctcgcgggcctcggccatccatgcctgatctgcggtcaacgaattcagacgtggatcggagcccacgccgaccgaagcgattacacgagccgcagcgtcgaagagaagcacaccggcaatcgtggcggtaatcggattaggcatttcctcagtgtccttgttgaggacacgtgagcacagtgaggacgccgctcaagaaactttgccgctcctgaggacacaaatttaagaggctccaaaggctacccctgcaaaacaaggagttccacgacccaggagcagcagcggcgaaatggcacgggtgttgctgatgtctggatagcagcaacgcccatgaaggcagttctcgaatgctgcattgcgagataggatgaaaccgtacttaactctccatcaccctgcgagcgcgcagcgctactacagcgaacggatgtggcgcgaagacaccttctacagtctgctcaccagtcatgcgaccgagcggcctgatgccgtggcgctgcaggatgctcgccaaacgctgacgtggggtgagctcaagcgttggacggacggtgtcgcggcagatctgcgcgaatacgggctggtcggcagcgaccgcgtgatgatgtggttgtccaaccgcatcgaggcggtcgtcatgttcctcgcctgcgcgcgtgaagggatcgcctgcaacccctcggtccacaagacctacacatgcgccgaggtcggcgaccttctcaacacgctgtcggcgcgggcgcttctgactgaagacggttgggggaccgaccgtgcgaccgtcgactacggctggtttctatccggagatcttggcgtcatggacgccaaaggcaatctccgcatcgaggggcgcctcaaggacctgataatccggggcggccacaacatctatccgtcgcactggcttctttcttacttatcgcggccatgcggacagccaacgtgcgtggcacacgctttgctgactaccaaaaaataatgacttcgggagggttacatgaagagttggtcggcaatcgttggcgctctgatcctaagctcgctacctatggctgtgttggctgatacgtacccgtcaaagccgatacggttgattatcccatttgctgcgggtggcccgacagacgcgcttgggcgaacgttcgctaaggaactcggggaagtacttggacaaacagtcgtcgtcgagaacagaactggcgcgggcggaaacattggaacggacgccgtcgccaagtcccctccagacggctacacgatcggcttcggcacgaatggaccgctcgcaggcaatgtcacgctcttcaagtcgctgccttatgatccgaccacggcattcgccccaatcacccgcatcgcgttcgtatcgaacttaatcgcagtgcatcctgctctgggtgtgaaaacgttgagcgaactgattgagttgattcgaagagagcccaacaagcacaatttcgcgcacggaggctcaggcactacacagcatctcggcggagagctgttcaaatcgatggcgcagctgcagatgagcggtgtggcttatcgtggcgaagggcccgcgcttaatgacgttattgcgggtcatgtcccgatcatctttttgagtcttgcgaccggcatccccatcgtgcagtcgggtcacctcatcgcgctggcggtgacttcgaaggatcgcattccggctctcgctaacattccgacggtggctgaagctgccctgccagggtatgttgcaacagcttggtacgcgctgctcgcgcctgccggtactccacagcaaatagttgagaagctgaatgccgcttctcgcaaggccatggagtctcctgggacgaagaagcttctcgatcaagccggagcgattactgcccccaccacacccggcgagcttggcgagttcatcaagagtgaaatcagtcgttggaagccaatcattgagatgtctggcgccaaagtcgactgacgagccggtaggacttcttgcgcgtccaaccccaaatgtgctcgcactcccgaaactaacgacgctggtacttttattgctcaggctttcacaaagagaacttgaagcaccgtgttgcattgcgagatagggatgaaaccgtacttaaccctccatcaccctgcgagtgcgcagcgctactacagcgagttcgcgtgtcatgacgtaccggctcgcgtccctcatggacaagggcgtcgcgccgaatacggccgcggcggtgacgaagatattcgccaccgaaagcaattccaagtgcgccgatgccggcatccagatcatgggcggcgcgggactgatgatgagttcggaaatgcagatgtatttccgcgattccagggtcggaacgataggcggaggcaccagcgaaatcctccgcaacgtgatcgccaagtcaatgctctcataggaggacggacaatgcgtggtatctctcgtcgaacctccctagccggaacaggcgcgctcgcgcacacgccgcgccagcaatagcagctttgcgaacgccgcttcgagcccgccgtcaccttcgatcttgcggccaatgtcgcggatgacgcggccgagataggtgcccagcttcctgaggatcatacacaactcccaccgtatcgcccttgaaggcgacagcatgcgaaggaaaaaatccgcgcgccccttgaccgacgtcgaaaacagcgaaacgaatcccggttgacctcaacaaccaggtaaccaaaagcccttaccccagctgtccgtcagttagcaaaattgctgtccaatttttgcgaaatacgcaggatgaaacatcttcaacgtaccgctgcttgagaagcgatgagaagggctatttggggcgtgctgataatttcggtggttagcgccttcggcggcgttgcctcggcgcaggtgtccgatgaggttgtgcgtctgggcgtacttgacgatatgaccagccgcgttttagactagctgcgtcgggcaaggcttctaagtgtggtcaggctgatgggcgcaaattctccccccgggggacgatggacaggcccccgtcttcgcgcgagtgaagactgagcgcgctcttgctcaccaccctcgacgagacggagcacagcattgatgtacgcaagttcgtgctgagcctgctcgatcttggcttggtaggcagcaatcatgccgctgatctcggcgcgcttttgcttgaacatttgaatgatgagctgatcggccatgctgcattgaagccgaaatcagccggccgcgaccagccccgaacttggtgccgttgctccataattcgagcgatggcggcgttactacgacaacgttacgccgcgctcctcgctcggctatcggccgccggcaccagaaacgatcttcccgccagcatctggcctggcctgtgcttcgctccggccaggccaaatgctggccgatcacggccggactctaacatgagccgtggtaccgctccgtggggcaggccaatctaacgcccgtgcgcgccgtggtatccgagcgaggccgatagttcggctgcggtatcggcgacgagttttccaagtgctccatttggtttcgcgtcgacgcgtgttgagcgaccaaacactgtcagggccatgatcaacttgccggtgatatcgaacaccggtgcacttacggcgccgaagccgtcaccaccgccgtctgacaggcaagaataaccgcgctccttgatttcacgcatcattccagccagagacgcccgttctttcggtacgttgagacggcccgaccgtcggttctggtccaactcgcgctcgattgcggtggccgtacgaaccgggtcttcgtaggcacaaaacaagagccccgtcgcggaataggtcagcgggcagtggtgcgacggcgccatggtactcgccaggtcatgccgggcctcgacgaccttgatcatcgtagggcccttttcgccccagacggctagcgccgctgtctcgccgacctgatcgacaagtgtgtgcagcgtcgcttcagccacttgcaacggctcgaagcgactgaaccccttgagcccaagctggaaagctacaggtccgaggtcgtatcgagacgtcgccgcatcctgccgcgccaatccgacgcgcatcaaactgacgagatatcggtgcgctttggcagagggcatgcctgccctctgcgccagatcggccaatttgagcggcccatcggcctggatcagtgcgtgaattagatcgccagcaacctctaccgattggatgccgagttgtgtcggcttgtctgcgccaggcgcgttttccggcagaggttcggttgagcggtctaccatgagtgtccttcacagcggcaaagttgcctaatccgacaggcttgacagcctggctcgcaggaagcatcattacagaataggaagtttattacgaattgtataactatcgaagctagtacgaacaatacgagacgtaactgtgcgcagcaacagttgatgctaggggagagaggcagatgcacgacggatccatttctggcctgctggccggcgatgtcgctgtcgtcacgggggcggcgcagggcattggagccgctatcgcccgcggacttgccacatccggagcctcagtaatcgtcgtcgatcgatacgccgagggtgcctgcgcaacggccaacgcgatcaaggctgtgggcggacacgccgaagggtatgggctcgatgttgcggaccgtgctgcgtgctttgcttttgcaaccactgcaagggaggtgttcggtgatgtggctgtgctgatcaataatgcagggatcacgcgccgcaccgcacccgacgaccctgaatttctcaaccacctcgacgcgcagattgccgtcaatctgaacggcactgccaacatgacgatagctctgctgccgcagctgcggcgcaccaagggacgcgtcgtcaatgtcggctcgattgcttccttcgtcgcctatcggaattcggccagctacgccgccaccaagggcgctgtcattcagctgaccaaggcgctggcggccgatctggcagcggacggggtacgcgtcaacgggattgcaccaggtgtcattgccacgcctatgaccgaagggacgcgcgctaatcccgaggtgatggcccggtttctgaatcatacgccgatggggcgcgtaggcgagcccgaagagctcgtggggccgacgctatttcttgcctcacgcatgtcctcctacgtgaccggtgtcatgctacctgtcgagggtgggtatcttacttcatgaacgccaccaccataaccgcttgtatcttgtattatggatgatctgccatggttgcctcttccaagcacgcgattccaaatgaaacccagcattgcgatgtgttggtcgccggctccggcgcaagcggcatggttgccgccatcgttgccgcgaagaaggggctgaaggttatcgttgccgaaaaggaagcggtgttcggtggcacaacagcgttatcgggcggctatctctgggtgccgaacaatccggtgagcatcgaagctggggtcaaggacagcaaggacgcggcgctcgcgtatatgaagcacgaatcgggcaaccactacgacgctgcgagggtcgatgcatttctcgacgcaggtcccgagatggttgccttcatgcatgcgtatacgcaggtgcggttcgaagcggctcccgcattctcggattaccatccggatgcgccgggtggcacgccgggcggtcgctcgatactgacgcaacctgtcagtgcgacaattctcggatcggatattgacaagctgcgaccgccgcggcctgagctaacgctctatggcctcgcaatcggctctggtaaagagctttggcacttctatcgcgccacgcagcggctggaatccttcctctacgtcgccaaacgtttggtcaaattcgggttcgaccgctccgtgcggggccggtcgatgctgttgaccaacggcaatgcgctggccgcgcgactgtttcggtcggcgtgcgaactcggcgtgccgatctggctcgacagcccggtgagaacgctcatccgaaacgacagaggccatgtcgtcggtgcggaagtgctgacaccaaaaggcaggcgccgtgtgctggcgaacaagggcgtcgtactggcctgtggcggctttccgtttgattttgccaggcggcagaccctctacaatcactgcgccggtgagagcgagcattggtcggcggcgagtcctggaaacactggagacggcgtacgtctgggcgagtcggttggcggcgaggtcgtcaaggattatcccaacgcgggtgcctgggctccgaccagccttgtgccgcgcaaggatggtaccaagggcccgttcccccacttcatcgaccgcggcaagccgggcgtcatcgctgtctcgcgagccggacgccgcttcgtcaacgaagccaacagctatcatgatttcgtgcagggcatggaatgtgcgtgcccttcggaccaaccggcggaggcattcctgatcgccgatcaccgcaccatccgcaaatacggtcttggccatgtgaaaccggcgccgctacctcttcaaccttcgatccgctccggctacctgatgcgcggcaacactcttgccgagcttgcatcagtggcgggcattgaacgaaacgctttcgaggaaacggtcgcccgctggaacgcggacgttccgactggcacggatactgccttcggcaaaggctcgaccgcctacaaccgttttcacggcgatccagaggtcaagccgaacccgtgcctcgcgccgatcgcgaccggtccattctacgctgtgcgggtcgtccccggcgatatcggcactttcgcaggcctcaaaaccgacgaacacgcgcgtgtgatcggccctgacaatacgccgctcaaggggctttatgccgtcggcaatgacatggcgagcgtgcttggcgggaattattccggcggcggcatcacgctcggaccgggcatgacctttggttacatcgcgggcctccatgcggccagcgaacgcaactgaagaccagtatcgagaaactctaagggaggaaacccatcatgacaacatgcagaaacctgctttccgccggtctgggcctgactatggccgtcgctttattgggagcagcgcaggcccaggataaggaaatccgcattggtgcgttgatcgcagcctcggggccaacggccttcatcggcgcatcacagaagaacgccttcgagatgctcgtcgaacagatcaatgcgcgcggcggcatggccggtaacaagatcaggccgttcctctacgacaccgaaggcaacggcacaatcgcggcccagcagttccgccgcctaatagattcagacaaggtgcatgttgtggtcggcccctcgacgaccggcgaaagcctggcgatccgcgcggtcgcaaacgaaaacaaggtgccgctcgtcagcttcgcaggcgcggaagcggttgttgtgcccccaaccccttacgtcttcaagactccaccgaccgaccgcatcgttgccgagcacctgatttctttcatgaaggtcaagggcgccacctccgtcggcatcctgtcctccgccgatggttttgggcaggccggtgccgcagtcgtcaaagaggtagccagccaactcggactgaaggtcaacgcagcggaagagttcggcccacgcgataccgacatgacgccgcagatcctcaagattcggtcgagtggcgccgatgcgatgctgatctggagcgtcaaccccggtccgaccatcatactcaagaacgcggcggccattggctacaacaagccgatctacaacagctatggtgctgcctcgccgcagctgatcgagcaggccggcgcggcagcggagaagtcttacgtatcgtccatgcgtctgctcgcgcccgagagccttgccgcaaacgatccgatgcgcccagtggtgaccaaactcgcggccgattacaaggagaagttcaaagccgacgccacgaccttcatcgggcatccctcggacgcgatgctgctcatcgaggaagcgctgaaaaaggctggcgggtccccggatcgcgagaagctggcggaagccatgcgcagtggcatttccttccccggcgccaacgggatgtttcgcttcactgacgccaaccacaacggcctcgaccgggagtcgcagtcgatggtgatgctgcaggttcaaggcggcaagttcgtcaccgtgaagtgacctgcagggcgggcggtcttgcaatccgtccgtcagcgaccgaagcaaagcctggaggtaaaatggataccctgctgcaaatcctgatcacgggcctcgtcgtcggctgcatttacggcatggcggcacttggtttcaccattgtgtacaatgctaccaaactgatcaatttcgccaacggcgaattcctgatgctcggcggcgttcttcttgcctgcgcggcgcaggccgccaaactgccgatgtcgctggcgctcctgctcgctgtagcgggtgcggcgcttaccggctggctgatgcagcgctgcattctcgatatggcgatggcgcgcagttccgatccgttgacgctggtgatgctgaccatcggcgtggcgctcgccttgcgcggggcagccgcgctcgccttcgggcgtgaaatcacgttcgtgccggaattcgggcttttgccgctggtgttgataggcaacgtctacattccgagccaaggcctctggatcatcttcgtcctggcgctgaccagcaccgttttgtggtacatgttctcgaaaaccatgttcggcaaggcaatgcgcgccgcgagtcaagaaccgagggccgccgccctttgcggcatcgagccgaagcgcgccgccgccatcgccatgaccttggcgggtgcgctcggtggtttggccggcgcgatgctcgccccgatatccgcagcgttctacgaaaacggcatcttccttggtctcaagggcttcgcggcggctgtcgccggcgggctgggcaaccccatcggagctattgtcggtggactgttgatcggcgttgttgagagcctgtccgccggatacgtcgcctccggcttcaaggatgccgtcggttttatccttctcattctcgttctaatccttaggccgcagggcctcgtcggtcgcgccatcgttacacgggtctgagccatgaccacttcgacatcgaattccaacctccggcatgacgcggttatcctcgcaggccttgctgtggttcttacgctcgcagaactagcgctgaccagccagttccatcgctcgattctgatcctgtcgatgatccacgctatcgcggccattggccttacgttgctgctgggctacgcagggcaggtctcgctcggccaaggcgccttcatgggcattggcgcttatgcggcggcctttgccctgcagaagctggcgctgccagcgcccgtggcgctggtggctgcggtgctattgccggggctgctcggcttcttgatcgcccgaccgatcctgcgcctgtcgggccacaatctcgcgctgggcacattggcgctcggcgccgtgtttttcgtcgtggcggcgcaatggcgcagcgttaccggtggcctcgaccccggtatcgtcgatctgccgagtctggcgatcgcgggtttcagccacgagcgtatactctacattctggcgggcatctcgttgctgtcggcgatcgccgtcgccgtatcactcgtagacgggcggttcgggcgcggcctgatggtgctaagaacatccgaactcgttgccgcttgcatgggcgtcgatacggttcgggccaagtctatggtcttcgccatcgccgccgctttgtccggcctgtctggcgctcttctggcgctttatctacgctcattcaacgccagcgccttcggtgtcgggctctccatcgagcttttgatgatggtcatcctcgggtcgctttcgaccgtctggggcgcgatcttcggcgccttcgccatcatagtcctgcccaacctactcgaaggcttcgatcacgccaaacacctaatctatggtcttgtcatggtaggcatcatgatgttcgctccccggggtcttggagaaacgttgttccgccttgtcacccgcaagagaagcgtcgcatgagcagcacgcctctggcttcgatcaagggcctgtcgaagcgattcggcggcattgcggccgtgtctgacgtgtcgttcgacctggtcgccggggaagtcacggcgctgataggtccgaatggcgcaggcaagaccacgctgatcaatctcgttacgggtgttctcgcctgcgacggtggcacaatcagcctcgaaggagaggacatcaccgctcggccgacgcatcagcgcggcacggccggcatcgcgcgaacgtatcagaccccgcagatagcgcatggcatgagtgttctgaccaacgtaatggcgggcgcttaccggttcggccagcatggcctgttgagttccgtgttccgaccctgggtggtcatgaaagaaaatgacgaaatggctgctcgcgccgcgcagtgtcttacgcgtgcgggcgtcgccgagcagtggtggcagcgtctggcgacggatctgccctatgggcttcagcgccgcgtcgaaatcgcccgctcattggcgcaagatcccaagctgctgttgctggacgagcccgccgcgggcctcaatccaagcgaaacggcggacctgtcgcgtctgctttctgagatcgccgcagatggccgcgccgtcctgcttgtcgaacacgacatgggcatggtgatgtcgatttcctcgcatatcgttgtggtgaatttcggtcgcaagcttgcagagggtacgccgaaagacatcgcatcgaacaaggacgtgattgctgcctacctcggcgcggatgaggcggtggcctgaaatgaccgagcttctctctattgccgatttgaaggctggctacggcccggtcgaagtgcttcacggcatttccatcgccattcgaaaaggtgaaatcttctccatcgtcggcgccaacggcgccgggaaatcgacgcttctcaatacgatttcaggcttcaacccgatccgctccggcgccatcgtgtttgacggacgaccgattgctggaaccgctccagcaatgatcgcgcgcgctggcctacgtcatgtgccggaaggacgacgcgtttttgccgagatgacggtggaagaaaacctgtctctcggcggctatggccagccgcatgctgaagtcgccgatcggatcgaccggatttacgagctgtttccgcgcctcgtagagcggcggacgcaggcggcgggcactatgtccggcggcgagcagcagatgttggccattggcagggccctggcggctaaaccaagggtgctgatgcttgatgagccatcgatggggctcgcacctcaggtcgttgctgaaatattccgcctgatcttgcgcatgcgacacgaattgggacttgggatacttctggttgagcaaaatgccaaagcagcgctgcgtatcgcagaccgcgcctgcgtgctgtctctggggcagatcactctgcgcggcgcaggcgcagatctcttgaatgatccgagtgtcgtcgaggcgtttcttggggggaacgcggctacttgatggaaacccaccgcatctccgagtcaggaccggatcgcgaactgcttggatcgctgcgtgctcttacaggactggatacccccgcaaccatagagcgtttcgagaccgagtatccgaatgcaactttctgggcgacgttcggtcaatccgaagcctcgggcttggcgatgctttcgccgtaccgcgaccgtccgaaatccgcgggccggccgctgttttggcgcagcatcgcggtcgtcgatggcgatgaccgcgcgaatccggccggcgaaatcatcgacttcgtgaacggacaaatcgctcgctacaaacggccgaagcacgttgtgttggtcgataaacttccgaggactgcgggggcgacctcgatcgggctgctgttaaatcagcgcacggcagacgtagcggtaaaggtaacccgccacgacgggctgcctcatccgaccgcggcagagaggcgccgaataccatcgcgccattcccgctgtagccgcgcgcagagttctgcgaccggaatgatgtcgttgacgccgccgactccctgtcccgcggtccagatatccttccacagtttcgggctgatctcgcgcgcgacgttgaagctgctgtggtccttcgggttgtcgtacgggcggttcagcgtctgggcgagaaagctggcgccggccacccgcaccggcacagacggcaatgatcccgtcggcgttggcgtcgagcgccttcttggcatgcttcatcgtggtcgcgtcgtggaacaccagcccgccataggtatgtatggcgtcggtcagttctcgcgtaattccgagggtcgtgatgacgatgggaatttcatgacggatggccgcggcgaagtctgccgcgtgccgaggattggtggagtgaacgacgaattgcgcaccaaagggcgcgcaatgttgcccggcgagccggccgcgtatgtcggccagccacgcttcgaaaccgtccgtcgtgcgctggttgagcaccggaaaggtgccgatcacgccagcttgacaggtctcaacgaccagatccggtcccgagaaacatcggcgctgccatcaccggaattttgagatgccatcgcagtcgatcaggtagcatatcggatgccgattgccagaggaaacgtggtcaacgcgactgcatgcgggcgcctgcatccagatcgagcgtggtcgcgttcaggtacgagttctcgacgatatgttgcaccagccgggcaaattcccgcggttgtcccatccggttcggatacaggatcatgcgatcgacgatcgactgagagacattgtccggaatgcctgcgaccattgcggtatcgaacagccccggcgcgatcgagactatgcggataccgtgtggcgccaagtcgcgggcaactggaagcgtcaggccgattacgcccgccttgctggcgctgtaggccgcttgaccgacctgcccttgggatgcagcgcccgatgccgtgttgacgatgacgccgcgctcgccaccctcggcgtcaggggtgttcctggtcatcgcgagcgcagcgaatctgatgacattgaaggtaccggtcaggttgatcgcgatcaccttgttccacgtcgcgatcgggaacggctcgccttttgatacggtcttggcggcatcggcgacccccgcgcaattcactgcgacatgaacgccgccgaacgcggcgacgaccgccgcgatcccgtctttcacgctgctctcttcggcgacatcgacgacgcgcgccaggcacgcatcgccgaggttcgactttagtgcctgcaattttttctcgtcgcgatcgaaaccggcgatacgcacgccggccgcggcgagcaccttgcaggtcgcaagccccagtccagaagcggcacccgtcactacggcaatcttgccatgaagctccatgaaatatcctcgttgtcttctatttgctcaggatggtcacgcacgccaccgcttcttcgataccgtgcagtccgccgccattttcggcgatcgcgatccgcgcgccgtcgacctggcgggccccggcctcatgacgcagttgcgcgacaagttcgtggacctgcgcgaggccggtggcgccgaccggatgccccttcgactccagccctcccgacggattgaccgggacgcgcccgccgatggcggtttcgccgcgttcgctgatggcgccgccgtcgccaaaggcgcacaggccgagattttcgatctggatgatctcgcccatggcggtggcatcatgcacttcggcaactgagatatcgcccggaccgacgcccgccttttcgtaagcgcgcctggcggcgcgtgcggtgcaatggttttcgacgtccgaagggtcacggtcgctgccggtctggaccacggatgccagcacccggatcgcgcgcgaccgatcgatgccatagcgcttcagtcccgctgcagttgtcaccacaaccgccgcggcgccgtccgataccggcgaacacatcggcagcgtcaacggataagtgatcggcggcgcgctcagcacctcgtcaatggaatagggcgtacgaaactgtgacagcggattttcaacggagtgtcggtgattcttcgccgcgactgcggcgatctggcgctgcgtcgttccgaaacgcgccatgtgaaagcgggagaacgccgcataaacatccatgaatacgctgtagggcttgtcggacgttgtgccgggcggcggatcgatgccttcgccaagcttcatgagccgctcgccgatttcgtccttgcggctgatgtcccaggcgctgtcgaatgacccgaacataagctcgcgatccctcgagaacatcttctcggcaccaaccgcaagcgcgacgtctccgtcgcctgctttcaggaaggtgacggccaggttcagcgccgagctgccgctcgcgcacgcgttctcgatgttgacgaccgggatctgcccgatccccatcgaccgcaacgcgatctgaccgcgcaccatgtgctgcttttccatgtgtccttgcgacgcgttggcgaagtaggcggcttccaatgccgtggtcgcgaggccggcatccgcgagcgctgcgttgaccgcctccttcgtcatcgtcttgatgtccttgtcgagcatgcggccaaacggcgtcatgcccacgcccacgacgtatacgtcttccatggcggcggctcccattctcaggttatattctgtgcccttagcgacagttcggacagcacttcctccgtgtgttcgccgaggccaggcacgccccgcgtcggtcccggatggtggccgtcaataatcaagggttgcgcgacatagcggcgacgcctgccatcgctgtcggccacctcgccgaacagcccccgttcgatgaagtgcgggtcggccgcgacttcgtcaattgcgctgacgggaccccaggggattcccgcggcgtcaagcttgtcggcccattggccgcgtggcgcggcggcgatggccttgccgatgcgcgcaaccagttcgacttcccgtcgggttcgttgcgcgcgtttcagatcagctacgtcctccatgccgatcagcgtgcaaagcggccgccagaaccagtcctcatgcgcgatcgacagcgacagcagcttgccgtcctggcattcgaacagaccataagcgggctctgccgcgatgtcggcgagcggctcgccgttcatcgccgggccaaccatgaccgacatccacgataccagcccgtcggtcatcgacacgtcgatatacgccccctttcccatgcgcgcgcgcgccagcagcgccgcaagcacgccgagcgccgcaaacatccccgatgaaaggtcgccaaccgcgatatcgctcggaagctgcgtcgaacgcgttgcggcctgggcgtgcaggaatccggcgagagcctggtaggagagatcatgggcgggtcggtcgcggtaggggccggtctgtccgaagccggagatcgacgcatagaccaaacggggattgatcgaggccatcgcctcataacccagccccagccgctgcatggtgccgggccgaaacccttccagcaggacgtcggcagaagcgacgagatcccggaaccgctgcttgtcgccgtccgccttgagatcgagcgccaccgagcgcttgttgcgattgagcgcggcgtggaacgccggaaactgccgcgcgggatctccgatgcccggacgctcgacgaggatgacgtcggccccaagatcggccatcagaagcgtcgcgtagggcccgggatattgctcagccaggctgacaatacgaataccctcgagctgcaacatgacgatgtctcttccccggatatgcagagcctaagcttgcagattttattcgttggtctataattttactgactaaattattaattgacccaaaagtcaaatacttgttgtcgaggtgagaacagtgacgacgtctgaaaagatcaagccggagcaaagcgttctggtcgaagttcgtgccgatgcggtatggatcacgctcaatcggccgacggcgctcaacgcgattacgcccgacatggtggcgggaattaccgccgctctaacgcatgccgatgatccggcgatcaaggccgtggtgctgatgggcaccgggcgtgccttttgcgccggagccgatttgaaatacgtcaatagcgcgacgcagggcgatgcacccgccgcgacgcggttcctcgacgccgtcctcgacatgatggcacgactggagacctgtccgcggccggtcatcgccgcagtcaatgggttggccctagcgggcggcctggagttggtgctgtgctgcgatctggttatcgcagcgcggtcagcgaagcttggtgacgcgcatgccaatttcggtctgctgccgggcggcggcagttcggtgcggctgcctcgaaaaatcggtccgacccgtgcgaaatatctgctgtttactggcgatttcgtgcccgccgacgatctggttgcctgcggtctcgtcaacgaggtcgtcgatgacgccgaactgacggcggcggtcgagcgcttggccgccaagctcgggtccaagagctcgctggtgctccgccgcatgaaggcgctggtcgccgacggtctcgaacaaccaaaggaggttgctctcaggctcgaattgctcgcaagcgaagtccacgcccatagccacgatatgaaagagggacttgccgcattcgagcaaaagcgcaagccgtcgttcatcggccgctgaaacgctttctgcgcctcaattatccgagccatcgcttgcggcgccgatagtgcttgatgttccgatagctcttgcgcacgccttcgaggttgaggccgagatagaattcgcggatgtcctcgttggcgcgaaggtcggccgcgttaccttccagtacgatgcgtccgtcttccatgacgtatccgaaatcggcgaggtccagcgcgacgcgggtattctgttcgacgatgagcagcgtcaggccatcttccttcaatgagcggagaacgccgaacacctcatcgaccatcatcggcgccagccccaacgacggctcgtcgatcatcatgagcttcggattggccatcagcgcgcggccgatcaccaccatctgctgttcgccgccggacaaatagccggtcgtgcgcgacttcagcaaggcaaggcgcttgatccggtcgtagacgccatcgagccgccgccgcatcgccggcgctgaaggctccatatgaccgccggcaatcaggttctgctccacggtcaggtgactgaggacgcggcggccctccatgacgtggacgatcccgttgcggacgatttttgccggatcaccgccgtcgatccgcgagccctcgaacgaaatcgtccccgacgtcaccttgccgtcctcggtcatgaggaggttcgagatcgatttgagcgtggtcgacttgccagctccgttgccgcccaagagcgtgacgcaagaccccttgggcacgacgagcgtaatacccttcaccgcaaggatgacgtcgctgtagataacctcgacattgctgagctcaagcatcgacaactccgcggccggagcgctgtcgcgctccggctggttcagccgggttaccacttcgcaatcgtggggaccggcacgttttcagcggcgataacatatttaccatccttgatggtcgcgacgttgacggtcaggcccttgaccgggaatggcgcctcattcgtataagtcaggtttggcagaatgctgaaagtctgatcggccgaaatcggtgtcgtcagcagcgcggtgcgaaccgcctcgccagtgactttgtcggcgccgaccttgcgcgcagccgcctcgatcgcccggagtgcgaccagcgtctgattgtagcccatgacgctcgcgacggaccatgtcgcctgcgacttgtattttgcgacgaccatctggtggaagtcgtgggctttggtcttttgctcagtcggcacggccatgccgtagacttcatagtcgccttccaggtccttcatgccgccaacggccttacctgaggcaatcaggccgttatgcgaactcatcatgatcggaatatcggccttgccgagcgcctgcagcgcacgcttggtcgccacaaccgcggccgtgttggtctggatatcgataacttgcacgcccttgcggatcaggcggccaacctgggtggtcagatcggtcggctgaacttcggtaaaaatggtctcgacgatttcagccttgtccgggttgtccttggcgaacttctccgcgcccttggcaatatcgacataagccggcgaggcttccgaggaaatgatgccgactttcagcggccccttgatgccgcgggtgctgcggaaccattcgaagaacccggcagcctcatggccataagttggccgcgggttgaagatccagggatcgcctttccaagcgaacccgtaaccggccgtcgacatcaacatgggcaccttgtccgccggaagccgaccttgcagcgcggcgacgtcaggtccaccgacgccgagtacggccaccggattgagttcggccttgatgccgggccaaaggctcgcagtctgcgccgcgtcgtagcgcccgtcaaagtccttgatcccgatcttgatgcccattcccttgccgacttcttcgttccaccaatcgacagtggcgcgacgggcgccgacaaggtccttcatgatgtcggcgtagggtccggtaaagtcggcgatcgaggcaatattgtaggtcgtctgcgccgaagcgggcagcgcgagtgtgacgaccgccactgccgcggcgcctgcgatccatttaaaacgtctgctcttcatctctacgtcctcccggttctgttatgtttcatggacaccgccctgcggcggcttcgctacgttcagtatggaaacggccatgtccgatacgaccgcttcaggatattccagcgatgcatcaggccgcgcggctcgaagatcagaaatgctgcaatgacgctgccgagaaacacattcatcagggaaaatacgacatcgccgccgatcgaggggaattgcgagacgacggatggcccgagcgacacgaaggcctcctgaatgcatttgatgacgacgacgccgacgagagcgcccgtgatcgaccccattccgccgacgattatcatggcaataaaccatatcgaattgaacagcgtgaactgatcgaccgcgacaaagcgaacgaaataagcccacaatccgccgccgacgccggcatagaatgcgccgaccaagaacgcggtcgccttgatggccacgacatcaatgcccataatgccggctgcgacgtcgtcgtcgcgcacggctacgaaagcgcgtccgtaccggccccgcaccatgccgtaagcgccaaaggtcatgagcgccgcgacggcgagacagagataatagatcgagatatccgtcgcgaacgcgaatccgaacaggctggcagggtcgagcgtcaggccgttcgaaccgccaaaccatggcaggttcagaacgaagaaatgaaacagcgcctgggcggcgatcgtcgtcagcgccaggtagaaccccttgatgcgcaccgccgacaatccgaagatgaagccgaacacagccgcggaacaccccccgagcgggatggtcaaccagaacggaaaccccagtttcgtggccagaaaaccggtcgtgtaggcgccgacgcccataaaggcggcctgtcccagattgatctggccggcataaccggtggtgacctgaaggccgaggacgatcaccgacgagatcaatatcagcgtcgagatggcgagcagccgcggtccgaacaggatcggcagcgccagcaggaaaatcagaaacaaggctagggcaatctgctgcggacgcgtccgcaccaacgccgcatcgcgcgcaaaactggtggcgaaaatgccggccggatccatcgctcaaaccctctcgatcgttctccacccgaacattccggtcgggcggataaacaagatgacaagcatgatcacgaacgggaataccgagccaaccgctccgccgaccaccgggtcgacataggccgtcacaagtccctgcacggcgccgacgatcagaccggccaacaagactccggcgatcgactcgaatccggcgagcagggccaccggcagcgccgaaagcccgatgtccgacgccaggaaattcagcgacttgccgctgaggtagatgatcgcgccgagggtcgacaatacggcgcccagcgcccaggcgaaagcgatggagcgtttcaccgagattcccatcgacaacgcgacctgatgatcctcggcgaccgcggtcattttgagtccggcgcgggtgttgttgaagaaccacgacaggcccagtccgacaatcaccgtgatcacggcgccgatcagcagtgaccgcggaatcaggatgtcgccgatgatcaccggcttcaacgcgaagatgatcggaaacggccggacctgcggtccgaatatcaaaaggatgaggcccctgatgagaatcagcaggccgatcgtcaccatcaccatcgcgaaactggactcgccgacgagacgcgaaaaaaagatgcgctcgatgataagcccgaatatcgccgataccgccatcgccagcggaagcgccacgaacagtggcagtccggtttggatcaccatccaccagacgatgaagccgccgaacacgacgagctcgccttgcgcaaagttgaacaccttcgacgcgcggtagatgacaatgaagcccatcgcgataagggcgtaaaggagccctaccagcgaaccgttgatcaggtaattcagaaagtcgatcatcatgacatcccggccattttgcgccgcgcctgcaccgccgtggcgaccagaggggccgcgtcgacggaatgaatcagcacgttggccgccatcgttccgcggcgtccatcctggtaggtgacggggattgagagcgccacgcgatctttgccggcgtagaggccgtcgatcaattctgcatagcgttgcaccagaaattcacgtcgtagcttgcgcgtgcgggtcaattcgccctcgtccggatcgagttccttgggaaaattcgcaaatcgccggacttgtgcatgatcgggcagaaatttgttgatgcggacgatctcttcgcggatcaaatcggctacggctgtcatttgcgagaggtcggcgaatgtcgaataagccagcctgcgttcctccgcccaccgcgataccacacccatgtcgatattgatcaacgctccgatgtagtcccgcgacgcgtcgccaagcgtcatgatgtccttgatgaacggactgaagcgcagccgcgtttcgatgaattgcggtggatagctttgaccggaactcagcttggcgagatcctcgatccgctcgaggaaaaccaactcgccggaggtagtgacggaaacagcgtcgccggtccggtaccatccgccatctattcgttcggtggtcttgtcgggcttgccgaaatagccctgaaagaaagatccaccgcgtacgagcagttcgccgtccggtgaaaccttccattccagcgccgctgttgcggggtgggcttcaagccagtggccgacggtttcgaggtcgtagcgttcgcccttgtgaatcgtcatgatgccgatctcggtcgaaccgtaaatattgcgcaagggtacgccgatggcgtgaaacagccggaacacatcgggcgccatggttgatccgccgctcagcgcgaccttcacgcgcgtcaggccgagcttgtcgcgcaacggcttcagaaccaaagtctccgcgatcggaaatgccaagtgggctgccaatggtaccggcttgccgtcgagccgagcgacgttgaccttgcgtccgatcttgacgccccattcgtaaatgcggcggcggattggccccgcgtcgagcatctttgcctggatcgtcgaggccaggctctcccattgccggggtgcgaacaccatcgcctcgaccgcgagttcgcggagattggccagaacctgctccggcgactccggaaagttgaccaccagcggcaaggtgacgccgatcgtaacaccgaacaattgttcggtgacccaggcaggcgcaatgtaggtgaggtaatccatgcccggcgtcaggtcggtgccgttcaccaatcgatgcgcgttgtcgatcagataacggtgcgtgataatgacgcctttgggacgccccgtcgtgccggatgtgtaggacaggatggcgatgtcgtcaggctggcccaatgcgacaaggctatcgaacaaccccggctcggcggcgttccgcttgcgtccctcgtcttccatgtgctcgagcttcatgaggctcggctgccggtaagaccacatgccggtatcatcccagtagatcagcctgcgcaatgtcgggacgctgccgagtactgcgagccccttgtcaatctgctcctggtcctggcctacgaagtaaaccgcctgactgtcgttcaggaggtactcgatttcaccgactgtgaggtcggggtagagcgagacgaccttgccgccgagcgagagcacggcaagctccatccaaaaattctcgggctcgttttcgccgatgatggcgaccgtctcgccgcgcgcaaacgacatcgattgcaatccaaccgccaggttgcggacgcgctcgagcacgtcgccgtaacggaactcacgccagatgccccgatacttgtgacgcgcgattagccgctcgggctccgccgtggcccggtcgacgaatgcctgcggcaatgttttcattggtgtggcggctgaggtcatttttcgcccaggtaagctttcatgaccagcgggtcccgctgaatctgggcgggcgttccggtcgcgatcattttcccgaaatctagtacgtagatgcggtccgcgaggtccatgaccacacccatatcgtgctcgacgagtacgacggggatgccgcgcgcctcgcgtacgtcgaggatgaaccgggcgaggtcttccttttcctcgttgttcatcccggccatcggctcgtccatcagcagaattttcggttcctgcgcgagcgcgcggccgaggtcgacacgcttgcgcaagccatatccaagtgttccgaccggctgatggcggatcgattcgatttccagcaattcaatgatttcctcgacgacctcgcggtgctgcgcttcctccttttgggcccagtgaaaatgcacgaaggcctgcaaaatcgaactgcgcatatgcatgtgccgcccgatcaggatgttctcgatcacggtcatgccgggaaagatgtgcgttccctgaaacgtccgcgccaatccggatcgcgcgatttgatggacgcttcggccgaccatctgctcaccatcgaacacgatgcggccctgctgcggtcgatagaagccgctcatacagttcatcagcgaggttttgccggcgccgttggggccgataaccgcaatgagctcgtcgggcctgatctcgatcgagacttcgttcagggcgacaacgccgccgaacgacattcgcagacggtctgcggtcagcatcggccgcataccgctcacgttgggctccgcatgggtcgccgcttcggcgctcatgtctcctccgtagtcgcgcagtcgttcaaagcgcgcgcgtagttattttcgttgcgttatgaccaatcaggcataatacttacttgcaagtcaaatagatttttgacgcttttcatgcgaccaattcacggcgtgaacgaatgctgggcgaccccaatcttgctgtgcaactccgcacccagctcaaattgcccgttctggttgggccgatgtttctcgtatcgggtcccgaccttgtcatcgcttgttcgcaggccggcgtcgcgggctcttttccgacccttaatgcgcggtcgacggcaatcctggatcaatggctcgcgaggatcacggccgagttgcagccggacgcggctccctatgcagcgaacctgatcgtccatccaaccaacaccaggctggcggaagacgtcgatctggtcgtcaaacacaagtcgccgctggtgattgccagcgtcggacatccgggtcgtgttgttgccgccgtaaagagctacggcggcttggttttctccgacgtcgcctcgctcaaacacgcccaacgcgcggcggaaaccggcgttgatggtctgattttgttgtgtggcggctccggcggcaacaccggttggctcaaccccttcgcattcgtcaccgccgttcgtaaattcttcgccggaccccttgttctcgccggggcgatctcgaatggccgcctgatccatgttgcggaagagctcggcgccgacttcgcctatgtcggtacgccctttatcgcggcgacggagagcatggcggcggatgattaccggcaaatgctgatcgatagcaacgccgacgacattcagctgacggccgaagtcactggccttcccgccaacatgctccgcaaaagcctcgaacgcagcggcttcaggccggagccgaagcatgacggtttcaatctcctgaaggagatcgagacgctgaaggcatggcgggatatctggagcgcggggcagggcgttggcgatgtcgagcgtgtcgagccggctgcgggcgtgatcgaccgcatgacgcatgattacgatgcggcgcgcgcagcaagccagcaacgggccgcgcgcaggttcgcttcagtcggcagtcaatagctcgcgggacggctctcgtccgcttttgccttaacggctcaaggtgggggccgatcccacggatatacgcaatatccagcaaccgcgggatacgctcttaggctagggcgaaacggcgtggtcgagaaggtctgtaaaaaccttcgcgatctccgcgccgcttttcggtccgtccttatcgaaccaccgtgccatccagttgaccgcacccatgaagaaaaacacggtcaattttggatcgacctgccgtatgctgccgtcggccatgcccttctcgataatcgcctgcatctgatgctgcgccttgtcacggcgcgcggcgacgatcttgcggttggcgggatcgagcgcctggaattcgacgaggacggcgcaatcgccgatctcgctgttgtgcgactcgatgaattccttcgcaaacgaaagcagaatttcacggccgttcctgccggtcttgtacgcgtgctcgaacgcgcgatcgccgagatcctgcgacagcatatggcactcgaacaggatttcctgcttgttcttgatgtaataatagagcgcgggcttggtcacgccaagcgtcttggcgacatcgtcgagcgacgtcgcatgatatccttgcgagctgaatgcgcgcgccgcctctttcagcaaggcggttcgcttcagattgaattgctggtcgcgggtctgaacggtgtcgttccacgcggcaagctgacggtcacggccagacaccaccactcctagaatttcattgcgagaacagcagcgctgatcccggcacaattgagctgattcggtcagcttttatcaacgcgaatacccatcgcaagtcaaagattgcgggcgatgatgagtttctggatgttgctggtgccctcgtagatcttgcagacgcggacatcgcggcagtaacgctccaccgggaaatcccgcagataaccgtatccgccatgaatctgcagcgcctcggagcacactttctcggccatttcgctggcgaacagcttcgcgatggcagcctccttcatgcagggcaggccggcctcgagcaggcgcgcggcatgaatatagtattgtcgggcgatatcgacctgcgccgccatgtcggcgagagcgaagctgacgccctgcagctccatgatcggtttgcctgcgacctcacgttcgcgcgcataatgtatggctgcttcgagagccgcctgcgcgattccgaccgcctgcgcagcgatggcgatgcggccgtcggaaagacctgacatcatgatgccgtagccgcaatcgagcgtgccgaggatgttttccttgggaacgcggaggtcgtcgagctggatctgggcggtatgcgcggtccgctgcccgagtttttcctcaatgcgactgactatgtagccttttgcaggcggctcgaccaggaaggtggtgaagccgcgcttgcctgcacccggatcggtgcgcgcgacgatgatcgccacgccggcctcgctgccgttggagatgaactgcttggtcccgttgatcacgaaatcatcgccgtcgcggcgcgccgaggttcgaagtgccgatgtttcggaaccagcctgcggctcggtaatcaggaaggcgccgatcttgtcgccggaggcaagcgcaggaagcagtcgctgcttttgctcggcagtgccgtttttcgcaatgacatgagctgcgccgagattgtgaacgtggacgatcgttccgaccccgccgtcggcggcggaaagttcctcgatggcgagacaataggcgagaaagccagatgccgagccgccgtattcctcggagacggtcatgcccatgaaaccctgggcgccgagaactctcagctcctcggtcggccacgccgaggtgctatcacgctcggctgcagttggggcaaggacatcccgtccaagttggcgcgccgtgttgcgaaccatgcgctgctgttctgacaaaaacggctccgaacctgtatcgctgaaatgcttgttcatggtcgcatcccatccgcaattaaggccgcagagttgcggcatgcaatttacgagaggatacattaatttacccgtgggtcaaatttcggtcatgcgcgcgccggttttcaaatgccttcaactcgttagtcgaccctgaagaaccgggatttcaggctgacatgagccgcagtccgaggctgggccgagctaggattttgaacagcagaaggctcagccggttgatgaggcggcggaagttttatccgacggcagcaaggacggaattggtggcgttaccgtcgcgataccaaaggtaattgcggcccattcggggttcggatttgagatggccgatcaccggctcgacgacggaacgaacgccggctgtgcatctcgcgcttgatctgtggcgttacccgccgcttctagcctgacgtaaacaccctgaacttgtaatccggcggggcgttgtggcccgataacccttgtcgaggagaatgcgcgcgatggtgttgccgatcagcgcctctatctcggggatgacggttgcgagcgcgtggccgtcatagcggttgccgggcagcgccttcgcatggatcacgaactgacagccatcgggtggcatcgttgcctttgcaatgtcgatctggcgggcgcgcgaggcaaagacggccgcaacctttggttcggcgcgttgggcggcggcctcagaactgcgggccgcgcagctcatggaccaggatggcgtcgtgctcggcggttcggccgccattaccttcgccataatggaccagagcacgtcctgtgtttcgcgccgaccggagcggcaggggcgtcggccttgtcattccgaccctgctgacctggccgggcagtttgtcttgttcacgatatcaaaggagagaaatcaaaggagagaactggaatctaacctgaggttgccgcgcccggcatggacaacgcataccgcagcgcacgataagccactttgcggccggtcgacggtgcgttaatcaattgagcaggccagatgtcgatccgaccaatcaaaacccaccacacgttcgaggtgatctcggatcagatccgcgacgaggcccgctcgggcgtcctgggaatgggcgaccgcctgcccaacgagcgggacatggcaaaggctcttgccgtaagccgacacgcccttcggcgaagcgctgcgcggcttggaatctctgggcgttagtcgcttgtgtcggcgcaagcttatccgtcaaagccgatcacgtggctgataccgttcccggcgggcgggccgaccgatgtgctcgctcgtgccgtcgcacccaagctcagcgaggctctcgacgttaccgtaattgtggagaatccaccaggcgccggcggtggcaccgcaatggtttcgctcgcgaaggcgaagcccgatggctaaccgttcgtagcccggcccccagcatgcaggggtccaggcggcacgccaaatagccgcgttcttgccgcaggccggcggctcgatccaaaagacgttggcagacaacaagcgtcacatggcggatggggataatgatggatattggcatatcccgtgcatttctgcagaagggggaacccgtaacttcttgacgtccggcaagacgagctagatgatatccctaacaatcgttagaaattcgttggcgaggagtcgacggtttgtgcggcgcggtatggtcggggttgcctgagccgaacagccgcgatcggcgtgagatggaagaactctgtggatgagagtggcgtccgcccaaacgtggcggctcgtcgttaggaatggaggtccgagtatgagagatcggcatcccgtcactgattgggcaacagacttcgaccaccttgacccgcgatggattgaagacccgttcccaatctgggacgagctgcgccgatcctgtccggttgctcatacgagtcggttccagggtgtgtactttcccacgcgttacgaagatatccgtcagattgcgtatgataccgagcatttctcttcacggcgggttcaggtgcgcgagacgccgccccccgtgaaatcgccggcgcctccgatcacgtctgatccgccgcatcatcgcgccgcacgtatggtcctgctgcctcagttcacgcccgaagccatcaacaagctgatcccgacaacgcgcatgatctgcaatgacctcatcgatcggtttatcggcgacgagacgtgcgacgcagcggtggattttgcccagcatattccggtgcgtgtgattgcagggatgcttggcctgccgccaagcgatggggaaatgttccgtggatgggtgcatgggctcgttgaggaagccatcctggacgatgccacgatggtgcgtaccctgtcggaaatgaccgcctacctgctggatcacgtggagcagcgtcgcaggtcgccggccgatgatctcatcagttatctggccgccgatcggattgatggtgcgcctttgacggacaaccacatcctcggcaccctccgccttctgctcattgccggtatcgatacgacatggagcgggatcggagcttgcctatggcatttggccaaaacgcccgctgatcggcgccgcctagttgctgagcccgcgctgatgcagacggccattgaggaattcttgcgggcctattctccggtgaccatggcgaggctcgtcgccaaggacacggtcgtaggtggctgcccttacgagaaggggcaaatggtgctgctctccttcccggcggccaaccgagatcccgcggttttcccggacgccgataaggtcattattgaccgcaaggcgaaccgccatgcggccttcggcctcggaatacatcgttgcgtcggttcgaacctcgcgcgcatggaactcaccgttgcggtcgaggagttcttgaagaggattcctgagtttcacctcgccgattccaaagctgtcacgtggtccgaaggtgcggtcaggggacctcgaaagctcccactcctgctcggatgaccggcacgccagcctgggcggagcgttgggctcgtcttccgatcgcatataggtctaacaggatgcccagcatgacaccgaaagccctgcgcggccccccgcgcgaatctgggcggacagcttggatctgtgggcgcaagagacagaggaggcggcaaccatgaaaacggcgttgtgcaagaagttgggtatcgaattcccgttatttgcgttcagtcattgccgcgatgtcgtggcagaggtgacgaacgcaggcggtttcggcgttctcggcgctgtcggacacacaccagagagcttgaaaatcgaactggactggatcgactcgcgtgtcaagggccggccctacggtatcgacctgctgattccgaacaaaatggaggacaagcagggtgaccttgcagaggctgagctgcagtcgcggattccggacggacatcgaaaattcgtgaacagcctcctcgagcggcacggcatcgatacgtcggatctttggagcggcgagtacgacaagcgcacggccgacagcatgcgggaggcgggagccgcaaagcttctcgacgtggcgttccaacatccgatcaagctcttcgtcaatgccctcggtgtgccaccgaagtcgatcatggaacgggcacggtcgaagggcatcctcgttggcgcactgaccggagccaaagagcacgccatcaagcacgccgaggcgggggtcgatatacttgtcgctgccggcaccgaggcgggtggccattgcggcgaggtttcgacgatggtactcgtccccgaggtcttgcaggccatcgagccttacgaaaacatcgatgttttagccgcgggtggcatagcaacaggccggcagatggccgcctgcatggcgatgggcgcagcgggcgtctggtgtgggtcggtttggctgacgaccgtcgaggccgagacgacgcccacggtcaagcagaagatgctgaaggcgacgtcgcgcaacaccgtccgttcccggagccgcacgggcaagccgacgcgacagttgcagtcggcctggtcggatgcctggggcgccaaagatgcgccggagcccctggcgatgccgcttcagggactactcagtcggccgcctatggccaaggtcgataagctcgcagagagcggtcacgacggcgcaaagaatcttgcggcatacttcgtaggccaggcggtcggcctgatgaatacggagcagtcggcacggtcggtcgtcgccgatttcatgaaggattatgcggaagctgtagaacggctttcgggcacgttgcatgagtaggtcgaaggacaccacgccaatcgtggaagtcaaccacccagacttgcaggcggcgcggcttgttgcggagcggcgcgttgggaccggtattgcttacgtacgcgcggctcaagtgagatcatctaatgtcaccgacggttgatccgaagcatcccgatttcatcgccgaccagcacgcggcctaccggaggctccgcgcgaatgcccccgtctgctggagtcattcgctcagaggctgggttgtcacccggcatgacctcgtcagcaacattctgcttgatcagcgcttttcggtggagaagttcacgccttttgtggcgacatgtccggacaaatgcgagaaaagatcgagatagtgacgggcgtgctggagaattggatggtttttcgcgaccctccgcagcaccagaggttgcgcggagcgctcgcgaagtatttttcgcccaaggagatggagcggttacgaccgcgcgtgattcaaatcgtcgatgagttgatcgactcttttgctgcaaatggccgtcgagttgattggggagtttgccgtaccattgccgacgagggtcattggcggagttgttcggagccggggagcaccgtatcgccaaattgaagcagtgaggggcaggcaacggcggagcgattttcgtcaaccgtgccgaacaaggtgcccctattgtgccccaactttgctggggcacagctccagggattcgattgctaagtctttgaacagaaaggccggatggtggacgcacaggggatcgaaccttggacctctcccgtgtgaagagccgccgcatcatcgggacggcttctggtaacgctcttggaaagatcaggcggcaagtttggtgcggatcttgtcgcgtgattaccggcgccatcagatgaatgaattcgatcaaaattgcaggatgatcccttacgcgcgttttcctatcggcaccacgtttccatcgctccgcggcaccagggacacgactgccgctcttgcgaggtcttccaaggcggtcgcaatgtatttcgcgtagtgccgctcgatcattttgactgaggtgttgtgcagtttggcgacctgttggatgggcaagccctttcggagaccgcgcacgatgctcgagtgccgcaaagcatagggaatcacctccggcataccggcgcgctggcgaatggccttccagggacgtgcaagttcgcctcttttccacggaccgcgttcagacttcttccacgcgataccgctcggctcctgttcatggatccatcgctcgaaaagaggtgcatcgcttggccgcccagcgattgcgggcaagagcacctcaatcacatcgtcgcccactgggaccgggtctgagccactattgccgccgcgccccttgtaggagcccggcaccatcagacgtcgtgcagaaacctgtacgtcacccacgcgcattcgcctcacctgggcataccgcgcgccggtcgcggccagacacacgacgatccggtatagatcgccatcaaatccttgctcctgatcgacttcacacgcagcttgaaggatggcgccaacctcttcatccgtgagaatctggttatctcgagcaaccgacacatgatcatcatcatcgacccgctcggctttgaagccggccttcacaatggcgaggaacgtcggatttagtttcttccgatctgcggaaagccggggccacgcggcatttagtgcggccttgaggtcattcacgaaccgctgcttggtcgtgacctttaagtccttcggcaaaccctcacgccacgttatcaagtcgtcttctttcagggcatgcagttgcactgatgcgagaggagcagctcccgcagcttcctgattgccgcgcttttcttgaccgagaacgtagcgccgcagcttggtaccggcgtcggatcggacgtcgcgacctgttcggcgtctttctcgagcgtcgcgttccttgatgtaggattcaacggccgatcgcacggtaggagccgggcccgccgcctgcgacgcggcctctgttctggctcgagctacggcctcccgagccgttctcacggcctgttcgaaggtcagaatcccttcggcgcgcttgtcattgatgtcgtttgtgatgccgacttgcgcctgcttgtagttaccgccttcgtggtgattacgccagcgaaca

SEQ ID NO: 351 - DNA, 390 bp, BradyrhizobiumColbertium
atgaagacttgtttggttgttgacgattccagcatcgtccgaaaggttgcccgccggatcgtcgaagcgctgggttttcaggtgatcgaagcggaagacggcgtcgaggcgctggtccactgcaagaaggcgatgccggaagccatcctgctcgactggaacatgcccgtgatggacggcttccagttcctcagcacgttgcgccgcatgcccgggggcgaagaacccatggtcgtgttctgcaccaccgagaccggcatcgaccacatcacgaaggcgatgggcggcggtgccaacgagtacatcatgaagccgttcgacaaggacatcgtgatggcgaaattccaggaagtcgggctgatcccgctgggcgaagagacggcggcctga

SEQ ID NO: 352 - DNA, 381 bp, BradyrhizobiumColbertium
atgctggtcaaatatttcaagcagaccggcgagacctggcaggtcaatccggaattgcgagcgatgatccagcatcggcagctcaacctgctgcacgatttttcgcagctcggcaccttcgacgtcatcttctgccgcaacgtgctgatctatttcgaccaggagaccaaggtcaacatcttcaaccggctggcgcgccaggtcgagcccgacggctttctggtgctgggcgccgccgaaaccgtggtcggcctgaccgatgtgttcaggccgattccggagcggcgcggcctctacaagccgaacgacctgcgtgcggcgtcggccaagccggctctcgccggtgcgccgccgcgcatggcggcgatggcgggacgatag

SEQ ID NO: 353 - DNA, 318 bp, BradyrhizobiumColbertium
atggccgaggatggcaagggcgcggagcgcgtcacgttcagccgcggctatgatgtctgcatcatggccatcgacggcacctggcggcgggattgcaagctcaacgcgatctccgacaccgacgccatcctcacggtcgaggggtcgatccagggtctgaacctgaaagagttcttcctgctgttgtcgtcaacgggtctggcgtaccggcgctgcgaactggtccgcgtcaatggtgccgagatggacatccagttcctgcgcggcaagaacaggaagaagcgcggtgcagccggcggtcacgacgccgcggcgtga

SEQ ID NO: 354 - DNA, 504 bp, BradyrhizobiumColbertium
atgcccagaagctctctttcccccatctcgtcaaacctgcccgacgccgccgagcggagagcgcttcagctcctggtggtcgacgacgatgccacgcaacgccacctgatcacggtcgccgccaggcaggccggccacgaagtcaccgtggcgccgtccgtggcggatgcgatcgagaagctccgcgcggcccgcttcgattgcgtgacgctcgatctcgtgttggaggatggcgacggcatcgacgtgctgcgcgagatggcgagcgcgaaattcgcgggttccgtgatcgtcatcagcggcatggacggcaagcgccgcagtggcgcccgcagctttgcccgttcggtggggatcgagctccagagcctgccgaagccgctggatcttgcggctctgcgcatctgcctcgccaatctcggcaaagccgcgatgggactgccggcgattcacacttggggtggtgttgccaccgatgccatcgtggaacggcaccgcgcctag

SEQ ID NO: 355 - DNA, 135 bp, BradyrhizobiumColbertium
ttggcctacacgtcgcttcttgtcgtagacatcgagagccgcgaggtaattgcggcgcaccttcccttgctgatcgcacggatcgagaccagcatgcgccggatcgccgcagcccagagaacacggcagcgataa

SEQ ID NO: 356 - DNA, 636 bp, BradyrhizobiumColbertium
atggccgaacaaagctctcctggtgaaatcttcgtggtcgacgacgaccctgccgttcgcgacaccttgtcgatggtgttgaaggcggcgggctatgaggtgatttgctttgcggacggtgcggcgctgctctctgttgcgcggagccgaacaccagctgcgatcctgctcgatgtgcacattcccgggaagtccggtctcgacattctgaaggaacttcacggcgaggattatccggcgccgatcttcatgatctccgggcagggcgacattgcgatggcagtgggcgcgatcaagagcggcgcgctcgacttcatcgagaagccgttccgcggcagcgagatcgtcgcccggctcgatgaggcgatcggtgcctatgcccgcaggcaggcggagaacgcatcaccgaagttcggctcgctgcatttccccggacgcgagccgttgacgcgcagagagcgcgaagtgctcgagcagttcgcctcgggtgcgtccaacaaggaagccggccgcacgctcggcatcagcccgcgcacgatcgaggaccaccgcgccaacattatgaagaagctcggcgcgcgcaacgccgccgacctgatccgcatcgtgatgaccgcggcgcaacgcgcgtcgtaa

SEQ ID NO: 357 - DNA, 3519 bp, BradyrhizobiumColbertium
atgaggctcgcaaccacgctggcaacgcggctggccgtcgcgatgatcctgctggtggcgatcaccgtggcggccgttggatggctgggctatcgcaacacgacacaggcggtcattccgcgagtcctggagcgggtcgaagcccaggcacgcctgctcgcgagcaatcttcaatcctatgccgacggagtgcgcggcgatctgatcggctatcgcgccgcggcggccatcaagggcctcatccgcgctcacgccgctggaggaatcgacccttcagacggcgtctcggagcaaacctggcgcgagcgtatcgcgacacggctcgtggccgagatcgaggccaagcccatctatgggcaatttcggatcatcggtatcgataacggccagcgcgagctggtccgtgtcgatcgctccggaccgaatggcgcggcccggatcgccccggacgacgaactggagcgcaagggcgaccgagcctacttccaggaaacgatacggctcaggcccggcgagatttatgtgtcgtcagtcgatctcgcgacccgcaggggaggaacgacgactcctcacgttccaactctgcgcgtcgcgatgccgctgttcaccgacgacgacaggccgttcggcatcatcgtggccaatatcgacatgcgcccggcactcgaccatgtccgctcgaccgtgcgctcgggaggagagatttacgtcgtgaactcgcgcggcggctatctcctccatcccgatcgcacgcgcgaactcggcgcctcgcatgaccgtcccactgactggcgcaaggacttcccctatttcgccgcgttggccggaacgctggacgtgtcgacgcggctcctgaccgatgaatcgggccggccgagcggcgcggcgatcgccccggcactgctcgcgggcaaggaatgggtcgcaatcatcgagacgattccggcgcctgtgttcggcctcgtgcccgcggccatccaaagaacctccttgctcgtcggcgtactggccgtgctcgcggcggcggcactcgccgtgctgctggcccggtcgctgacgcgcccgatcgggcgcctgaccgccgcggtacaagccatcggcagcgggcgcccggcggacattcccgtcgatgccggcggcgagaccggcgtgctggcgcgggcttttgcccaaatggtcgaagagacgcgcgcgaaagcagccgctctcgaacgcgagatcgaagagcatcgccgcaccgaggcggcgcggagccatcacgcggcgcgcgagagcttgttcagcgccgcggtggagtcgtccgacgacgcgatcgtgatgcagacgttagaggccgtcatcaccggctggaatccagccgccgagcgtctttatggctatacggcggaggaggcgatcgggaagccgacgtcgatcatcgttccgcccgaccgccgcgagcagggcaaggattacttgcggcgaatcgcgcggggcgagccgatcgaacggttcgagacggtgcgcctgcgcaaggacggaacgccggtcgagatctcgcttggcctgtcgccgatcaaaggaccgtcgggcgagatcatcggcgcctccggcagcgcgcgcagcctgaccgaggcgcggcgcgccgagcgggcgctgcagcaccagctcgaggagcggcggcagatcttcgagacgtcgcaggacctgatcatgatcatggatgcgcggggccacatcgcgcagatcagcccgagcagcgaggccattctgggctaccggcccgaggagatgacgggccgcagcggcgccgatttcattcatcccgatcatctggagacgtcgcgcgatgagatgcgcgccctccggcgcggcgagcgtccgaagctcgcggacacccgctgtttccacaagaacggacatgaggtctggctgtcatggctcggcagctggtccgagccggcgcatcgcttcttctttgtcggacgcgacatgaccgaagcgcggctcgcgcaggaatctctccgcgagagcgagcggcttgcccgcaacatcgtcgagacctcgctcgacgccttcgtccagaccgacgaaaccagcagcatcctgaactggaactcgcgggccgagcagctgttcggctggcaccgcgacgaggtgctcggcaagcgcacgattgatctcatcgtcgccgagagcgaacgcgagagggtcaggtcgggactgaagcgcttccttgagaacgcggacggcgggacgctgaaccgtcgccacgagctcatgtgccgccgccgggacggcaaggaattcaaggccgaactcagcgttactgccctgaagcgccgcgagggcctgctgttcaacgtcttctaccgagatctcaccgacaagatcgccgccgaggagcgcatccgccatgtcgagaaaatggaggccatcggtcagctgaccggcggcgtggcgcacgacttcaacaacattctcaccgtcatcacgggaaccatcgaaattctggcggaggccgtcgagaaggagccgcagctcgcagccatcacgaagatgatcgacgaggccgccgcgcgcggcgccgatctgacccagcacctgctcgccttcgcacgcaagcagccgctccagccgcgcgagatcgacatcaattcgctcatcgtcgacaccgcgaaactcttgcggccgacgcttggcgagcaggtccagatcgaatcggtgttcgaggacgagaattgcgttgccatcgtcgatcccaaccagctcaccaccgcgatcctcaacctcgcgctgaatgcccgcgacgccatgccgggcggcggcaagctcatcctggagacgggcgttgcctacctcgacgaggtctatgccagcgcgaacgatatgccgccggggcattacgtgctgatcgccgtgagcgacaccggaaccggaatccctgcgaacatgttgaccagggtgttcgacccgttcttcacctcgaagggaccgggcaagggcaccggcctcggactttcgatggtctacggcttcatcaaacagtccgcaggtcacatcaagatctacagcgaggaaggccacggcaccacgatcaagatgtatctgccgcccggcaaaacgccgaccgctgcgggcgaaggcgtggcgccggcaacgatcgagggtgggcacgaaacgatcctcgtggtcgaggacgaccagctggtgcgggattacgtgctggcgcaactgcactcgctgggttacgtcaccttgcaggccgcaaacgccgccgaggcgctcgcgatcgtcgcagccggaaagcccttcgaccttctgttcaccgacgtcatcatgcccggcaagatgaacgggcggcagctcgccgacgaggtgatgaagacacgccccgatctcaaggtggtttatacgtcgggctataccgagaacgcgatcatccatcacggccggctggatacgggcgttctcttgctggccaagccctatcgcaagtcggatctggcgcggatcatccgcaaggcgctgcaatcgtag

SEQ ID NO: 358 - DNA, 174 bp, BradyrhizobiumColbertium
gtggccaacatcctgatcgtggatgacgatccggccgtagagatcaccatccggcggcggctggaacgggcaggccatcacctgacggtcgcaggcgagcctcttgccgcgatcgatggctgcctggaggcggaagagccggaggacgcccatgtccgcaccggctgccgatga

SEQ ID NO: 359 - DNA, 162 bp, BradyrhizobiumColbertium
atgaccggcaagaaaaagacgcccgaccagctccgcagcgcgcgctggttcgcgcccgatgacctgcgctcgttcggccaccgctcccgcgccatgcagatgggctacgcccccgaggagtggaaggatcggccgatcatcgcgatcctcaacacatggtag

SEQ ID NO: 360 - DNA, 1560 bp, BradyrhizobiumColbertium
atgcatttcaagtcgcgcgtcgatgacgtcaagcgcggcatcctgatggcaggcggcctgccgctggaactgccggcgctgtcgctgtcggaatcgctgctcaagcccaccacgatgctctaccgcaatctgctggcgatggatgccgaggaactcttgcgcggccatcccgtcgacggcgtcgtgctgatgggcggttgcgataagaccacgccggcgctgctgctcggcgcgacctcgatgaacatccctgcgatctatctgccggcaggtccgatgctgcgcggcaactggaagggcaagacgctcggctccggctcggacggctggaaatactgggacgagcgccgcgccgggaagatctcggacaaggactggctcgatatcgaggccggcatcgcgcgcagctacggcacctgcatgacgatgggcacggcctcgaccatgaccgcgatcgccgaggcgatcggcatgaccttgccgggcgcctcctcgattcccgctgcggacgccaaccatatccgcatggccagcgaatgcggccgccgcatcgtcgagatggtctgggaggatctgacgccgaagacgatccagacccgcaaagcgttcgagaacgccatcgcggtcgcgatggcgatgggttgctcgaccaacgcgatcatccatctgatcgcgcaggcccgccgtgccggccaggatattgggctggacgacttcgagatcgccagccgcaaggtgcccgtgatcgccaatgtccggccgagcggcgacacgtatttgatggaggacttcttctatgccggcggcctgccggcgctgatgaaccagatcaagccacacctgcatctcgactgcatcaccgtcaccggcaggactattggcgagaacatcgagggggccgaagtccacaatgccgacgtgatccgcgggatcgacaatcccatctacaaggaaggcgcgctcgcggtgctgaagggcaatctcgcgcccgacggctgcgtcatcaagccctctgcctgcgcaccgcgcttcctcaagcacacgggacctgcgctggtgttcgacgactatccatcgatgaagaaggcggtcgacgatcccgatctcgacgtcaccgaggatcacatcctcatcctgcgcaatgccgggccgcagggcggtcctggcatgccggaatggggcatgctgccgatcccgaccaagctggtgaagcagggcgtccgcgacatggtgcggatctccgatgcgcgcatgagcggcaccagctacggcgcgtgcatcctgcatgtttccccggagtcctatatcggcggcccgctggcgctggtgcagaacggcgacttcatcacgctcgacgtcgccgcccgcaccatcaacctcgatgtatcggaggacgaactcgccaagcgccgcgccgcctggaagcagcccgagcgccgcttcgagcgcggctatggctggatgttcaccaggcacatcaagcaggccaatgacggctgcgacttcgactttctcgagacggatttcggcgcgccgatcggcgagccgtcgatctactag

SEQ ID NO: 361 - DNA, 765 bp, BradyrhizobiumColbertium
atgctgacgcatcgccccggaacgacgaccagagagagtacacccatgaccaaactatccgaagccacgcgcaacaagctgaaatccgtctccaccgccaccgtcgccaccgcgctgttcaagcgcggtctccgcatccagatgatccaggatgttcgcccattgagccccgaccagccgaccatggtcggtgaggctttcaccctgcgctacatgccggcgcgcgaggatctcaacaccatcgatgtgttcaaggaccgctcccatccgcagcgcaaggcagttgaggattgtccgccgggcgcggtgctggtgatggatagccgcaaggatgcgcgggccgcctcggcgggcgcgatcctggtcacgcgcctgatgaagcgcggcgtcgccggcgtcgtcaccgacggcggctttcgcgattctgccgagatcgccaggctcggctttcccgctttccaccatcgcccgagcgcgccgaccaacctcacgctgcaccaggcgatcgagatcaacgtgccgatcggctgcggcgacgctccggtatttcccggcgacgtcatcctcggcgatgccgacggcgtcatcgtcatccccgcacacttggccgaggagatcgccgacgaaaccttcgagatgaccgcgttcgaggatttcgtcaccgaggaagtcggcaagggccgtggcatcttcggtctctatcccgccaccgatccgaagacgctgaccgatttcgcggaatggcggaagaagaacgggaggtag

SEQ ID NO: 362 - DNA, 2100 bp, BradyrhizobiumColbertium
gtgacacaagccaagacgccttcccagccccccgtcgccccgcgccggccgtattccttcacgcggcatgggatcgccgtgaccgacgactatgcctggttgaaggacgcgaattggcaggaggtgctgcgcaatcccgccgtgctcgaccctgatatccgcaaatatctggatgaggagaacgtctacaccgagagcctgctcggccataccgcggctttgcaaaagacgctggtgcgcgagatgcgagggcggatcaaggaggacgattccagcgtgccgtcgcccgatgggccctttgcctatttccgcagattccgcgaaggcgggcagcacgagctgttcggccgcatgccgcgcgacggcggcgagggccagatcgtgctcgacggcgacgccctcgccaagggccacaaatatttcaaatttggcggaagccggcactcatatgatcacaagctgcaggcctggagcgcggacaccaagggctccgagtatttttccatccgcgtcagggactgggcgaccgggacggatctcgacgacctcgtcgaggagaccgacggcggtgtggtctggaccgcggactgcaggagcttcttctacgtgaagctggacgacaaccaccgtccgatgcaggtgtggcggcacaggctcggcaccaagcaggccgacgacgcgctggtctatgaggagcaggatgccggctggttcacccatctgcatgagagcaccagcggccgcttctgcgtgatcgcaggcggcgaccacgagacctcggaacagcggctgatcgatctcgccaatcccgaggcgccgccgcgcctggtcgcggcgcgccaggagggcgtgcaatattcactcgccgatcgcggcgacgagctcttcattctcaccaatgcggatgacgccatcgacttcaagatcgtcaccgcgccgctcgcttcgcccgagcgcaagaactggcgcgatctgatcccgcaccgcaccgggctgtacatcatcgacatcgacctctatgccggccatctcgtgaggctcgagcgctcccatgcgctgccggcgatcgtgatccgcgacctcgcaacgaacgaggagcacgagatttcgttcgaagaagccgcttattcgctggacacgatgggctcctacgaattcgagacgacgaatttgcgctttgcctattcgtcaatgacgacgccctcggaagtctatgactacgacatggtcaagcgcacgcgcgtcctgcgcaagcgccaggagattccgtccggccacgatgccgccgactacgtcaccacccgcatcatggcgaaatcgcatgacggtgccgaggtgccggtctcgatcctctatcgccgcgggctcccgctcgagggctcggcaccgctgctgctctacggctacgggtcctacggcatggcgatgccggcctcgttcaatgccaatcgcctgtcgctggtcgatcgcggtttcgtttacgccatcgcccatatccgcggcggcgcggacaagggctggggctggtatctcgacggcaagcgcgagaagaagacaaattcgttcgacgatttcgccgccagcgcgcgcgcgctgatcgatgccaaatacaccagcgccaagcggatcatcggccatggcggctcggccgggggcatgctgatgggcgccgtggccaaccgcgccggcgagctgttcgccggcatcgtcgccgaagtgccgttcgtcgacgtgctcaacaccatgctcgacgacacgctgccgctgacgccgccggaatggcccgaatggggcaacccgatcgagagcgagaaggattttcgcaccattttgtcgtattcgccttacgacaacgttgctgcaaaagaatatccggcgatcctggcgatgggtggcttgaccgatccgcgcgtcacctattgggagcccgcaaagtggatcgcgcgcctgcgcgccaccatgaccggcggcggcccggtcctgcttcgcaccaacatgggcgccggtcacggcggcgcctcaggacgattcgaccggctggacgaagtcgcgatcgtgtacgcgttcgcgctgtgggcggtggggatggcggcggcatga

SEQ ID NO: 363 - DNA, 1437 bp, BradyrhizobiumColbertium
atgctgttcaattcctatccgttcatcctgctttttctgccgatcgtgctggccggctatttctggctcggccggcgcggcaatctggcgccggtgatctggctcgcgctggcctcgctcgccttctacgccatcggcagctggcaattcctggccctgctgctgatctcgatcgccttcaactacggcgtcggccatctgctgatcgtggcgaagctcactcccgtccaacgaaaggccgcgctcattctcggtgtcgccggcgatctcctcgtgctcggcatcttcaagtatgccggctttgcggctgagaacatcaacgcgctgctcggcacgcatctagtcgtccacatcctgctaccggtcggcatttccttctataccttcacgcagattgcgttcctggtcgacgcctatcgcgggcgggtcgcagcctatgcgctgccgcattatgcgctgttcgtgacctatttcccgcatctgattgccgggccgatcctccatcacaaggacatgattccgcagttcgagcgccaggaatcgaagcatccggacgcgcacctgatcctgtgcggaatcatcatcttcgcaatcggcctgttcaagaagacttgcctcgccgatggcatccagccgctggtcgcgctcgccttcgaggcgcgctcgccgagcttcgaccaagcctggcttggcgcgctcgcctacacattccagctctatttcgacttttccggctattccgacatggcgatcggaatctcgctgatgttcggcatcttcctgccggtcaatttcaactcgccctacaaggcgaccagcatcgtcgagttctggcgccgctggcacatgacgctgtcgcagttcctgcgcgactatctctacatcccgctcggcggcaaccgccgcggccgcgtgctgcgctacgtcaatctgatgatgacgatgctgctcggcggcctctggcacggcgcggcctggacgttcgttgcgtggggcgcgctgcatggggcttatctctgcatcaaccatgccttcaacgcggtggtgccgagcattccgtcaccccttgcgaggccggctcgaatcgctggcgccgcgctcaccttcctggccgtggtcgtcgcctgggtgttcttccgggccgagagcgtcgccggggcgctacggatcctccgcgccatggtcgatccctcggaggtcgtcttcggtcgccaggagatcgcggcgctggtgctgatctccatctacgccccgctggtatggctggcgccgaacacgcaagcggtcatgggttacgatcacggcagccgcaaggtcggcgaggccttgcgggcagggcgcatgcggccgctgtttctctatggcgcctcgctggtgctcgccttcggcattctgggtatccagagccacagcgaattcatctatttccggttctga

SEQ ID NO: 364 - DNA, 1104 bp, BradyrhizobiumColbertium
atgggcgccccattcaccaatgtgagacgtctgctcctcgcgagcatcgtttgcgtcctaggcgcggccgcgctcacctatgtcgtcgatcccctgcaattgctccgtccctcgcgcctcaccgcgttctattccgaagacactcgcgtgcagaatgccgggctgatccgcagccagtcgttcgacactgccttcatgggcacctcgctcgcgatccattttcgccagagcgagatcgaccgcgcgctcggtacccgttcgctcaagctggcgatgaccggctccaattcacgccagcagagcttcgtgctggagcaggcaatcgatcgcggcgcaaggcgcgtggtctgggagatggacgacttcatcttcgtcgatgccgccgacatcgaggcggatccttatctgtccgtcgatctttaccgcgcaacggtcacgggcatcgcgtcctatctgttcagcgcggcgatggcgaaggagtcgctgttcgcattgctgaggtcggttccgccgctgcgcgacccgctgacccgggcagcgccgtctcttcccgtcaagttcgcgctggcggacgtcgacgacatctatgcgctgccgcgggatttcgacgtcgcgcgcgactacaatgcgaagaagacgcttgccgccttcacctacatcacagatcctgcgcgcagccgcttcctcggcgaaggctacggctacgacgccatggtcggacatttcgagcgcgatgctctcggcctgatctcacgccatcccgacgtgaccttcgacgtctatttcccgccctattcgatcctgcaattcgtcgccatgcgcgacgcctcgcccgagacgctgaagatcgtcaccgatctgacggccgtcattgcgcagcgactgacgcggcttcccaatgtccgcctccatgacttccgcgcgatcagccaggtgacgcacgatctcgacaactacagcgacgtcattcaccactcgccggtagtcgatgcgaaggtgctgaagtggctgagaagcggggagtatcgggtcgacccgaaagcgccgctcaaatcgctgaatgagttgaagacccagatcgaagtatatcgcctcgagcactga

SEQ ID NO: 365 - DNA, 1188 bp, BradyrhizobiumColbertium
atgaccgttcgcgcgggccgggaatttctggccatccccgggcccaccacgatgcccgacgaggtgctgcgggcgatgcatcgcccggcgatcgacatctactccaaggagatgctcgacctcaccgagagcctgctcggcgacatctcgaaactgtttgcgaccaagggcaagtcctacatctacatcgccaacggtcacggcgcctgggaagcggcactcagcaacgtgctgtcgcgcggcgacaaggtgctggtgctggagagcgggcgctttgcgatcggctggggcaatgcggccgcgctgatgggcgccgaggtcgaggtgctcaagggcgactggcgtcgcgcggtgcggccgcacgaggtcgaggaccgtctgcgccgcgacaaggagcacgccatcaaggccgtcgtcgtggtccaggtcgacaccgcctcgggcgtgcagaacgacatcgaggcaatcggcaaggcgatcaaggcgagcggccatcccgcgctgtacatggtcgacaccgtcgcttcgctcggctgcatgcccttcaagatggacgaatggggcattgatgtcgccatgtccggctcgcagaagggcctgatgacgccgcccggcctcggcttcgtcgccgccaatgcgcgcgcgctcgaggtgcacaagaaagccaacatggcgacgccctattggagctggagcgagcgcgagggtaccgagaattatcgcaaatatgccggcactgcgccggtgcatctgttgttcgcgctgcgccgggcgatcgatctcctgcacgaggaaggattggagaacgccttccgtcgtcacagcctgctcggcgaagccgcgcgccgcgcagtcgcggtgtggtcggaaggccaggtgctcggcttcaacgtcgccgaagccagcgagcgctccaacaccgtgaccaccgtgaccatgagcaacggccatgaccccgcagtgctgcagcgctattgcaaggacaagtgcggcgtcgtgctcggcaccggcatcggcgatctctcgggacaggccttccgcatcgcccatatgggccatgtcaacgcgccgatgctgctcggcacgctcggcgtgatcgagatcgggctcaatgcgctgaagatcccgcacggcaagggcgggctggaagcggcggtggcgtatctgggtgaggaagtggcggcgtaa

SEQ ID NO: 366 - DNA, 726 bp, BradyrhizobiumColbertium
atgttgcgaaaattcctccttgcgctgtctttgctggccctcccgtcgctggcgtacgccgccgagatcgccgggaccgcaaaggtccgtgccggcgatgcggtcgtgatcggcaacacgcgcattcggctcggcggcatcgacgcgcccgcaatcgaccagctctgcctcaacaccaaggccgagcggtggacctgcggcgtcgcggcccgcgacgagcttgccaaacacgccgacggcaagaactgggtctgccacacccgctctatcgaccggcgcggccgcaccgtggcgcgctgcgaggtcggcggcgaggacatccagaaatggctggtgcgcagcggctgggcgctggcctatacccgcatgtcgcgcgactacgaggcggatgaaaaggccgcgcgcgaggccaaggtcgggatgtggcagggcgccttcatcgcgccctgggactggcgcgtccgaaacaagaagaccactattctgggcgcgaccaagccgcccgacggagcgcatgccgtgctgcttgcctcggcctcggggccggtcgccccctcgccggactgcaccatcaagggcaatgtgaacagcgccggcgagtgcatctatcaccggccgaccagccgctggtacacccagatcaggatgaaggtcagcaagggcacccgctggttctgctcggtcgaggaggccgaagccgccggctgccgcgagaccaaacgataa

SEQ ID NO: 367 - DNA, 1728 bp, BradyrhizobiumColbertium
atgagctttcattattttgccggcgccgcctgccgggcgctcacggcgcggaaggacggcccctcgctttacgacgtctgcgacccggtattgtccgtgacggccggcggcgatccacatctggcccaattctacaagactgcactcggcaatcccgcactacggatattgctccgtcgcgccggcctgcccgagctgcgcgacgagacgaagctggcccggttgcgcgaggcgctcgcccgcgcccgcgacgaggccgagcccgactgggccgcgatcggccagccgatcgccgatctcgtcgacagcatcgcgctcgaccatcccatgccgccaccggcgccgttcgctgcggacatgccgcagagcgcgcagatcgacggcgcgatccgcgactgcgcacagcatctgctcggctcgcaccgccgaaacggtttcctgccgacctatgccgccttcaacctgatcggcgatcccgatttccgcgggcgtgagctgatcatggcactgacggggctgaacgcccgcggctacaagaactcctcgctgctgttcaatctcgcccgcgtcttcatcgcgcgctcgccggcgcgcgccgtggtcaatccgccctggaaaggcattgccgagccgatgtgggagccggtgcagatccgccatcgctcggcctattacgacgcgttcttcatcgaggcgctgctgagctatgtcgaaaccggactcgcctcgccggctgacaagacggcagcggagcgcgccatcgccgacatggtggatttctgcgtcaacatcagccgcgaggaggtcgagggcctgggtggcgcacgcttcaacgtggtcaccgcactggcgccggcgccgcatccacgcttctcccgctacttcgcacagatcaagcaggatctcggcttcggaatctacgtgccggattgcgacaccacggcgtgctcgatctccgcagcgacgcaggccggctgcaccgatcccatcatcgaacagccgctattggacttctacgccggctatcaggtgcgcgccggcgtcaacgccccccgcgtgaccgtgccgctcaacgacaacatcgactacgagggcggggttgcgacctggatcgacaacctcgccggcgagcgcccttacggcaacgatctcgacccgacgctcaatctcgacatcctcgaggtgagctttcgcaacctggggcgctggaaggtcttggagactccggcgcggctcgccaccgtccatcgcatcatcggctttcagaagcgcctggcggcgagcggtgccttcgccaatccgcgctcgcacatctactatctgccggagctctacagcgcctatttcggccgctgctatgccgcgttcctgtcgctgccgctggcggcgcaagcggcgatcgacccagccggcgatttcgatttcatccgccaccgcgtgctggcctacgtcaaaggcgagctgatggctgcggagatgaacgtgttcgacgccgcgttggcgctgatcgcgctcggccatctcggggcagacccgcgcgccttcgcgccggccttgaacgtcatcatctcgagccttggcgaaggcggccgccgcggcccgttccgcgcctacgagtggaacaagatgaagacgccgacgcggattcttgtcggcggcccggaggtgacgtcggccttcgtgctgatgggactggcagtggcgaagcgcgcgatggcgcgggggtga

SEQ ID NO: 368 - DNA, 849 bp, BradyrhizobiumColbertium
atgaatgtaaagcagctcgacctttccagacggacgatcgcggtcgccgcagccctcatcggcacggtatcgctcgcgatcggcgcccatgctgctctgaacatgcgtgcgatcgatgccgccaaggccgtcacgaccgaccagatcaccggttcgatcggtcagagcgcgcgcctcgcgctggtcatcggcaatggacattatcccgacgccagcgcgccgctgacgcagtcgatcaacgacgcccgcgcgctgtcctcgtccctgcgcaagaacggctttgacgtcgacatggtggaagacgcaaccaaggacgacatggtccgcgccgtcaaccgcctgaagtcccggatcaagcgcgacagcgtcgtcatgctgttcttcggcggctacggcgtgcaggctggtcgtgagagctacatgctgccggtcgatgccgtgatctggaaggaacgcgacgtgcgccggcatggcgtctccatcgacggcgtgctcgacatgatgaaggagcagggcgccaaggccaagctcgtcgtggtcgatgcctcccgccgtaacccttacgagcggcgcttccgctcctatagtcacggcctcgcgccgatcagcgcgtccgacaacgcgctgatcctcacctccgcgtcgcccggcaaggtcgtcgacgacggcaggggtgagcacagcgtgctggtcagcgaattcctcaacaacctcggtcagcccggcagcgccgaaagcgtcttcaacaagacgcgcctcgccatctcgcgcgccagcgaaggcgagcaggtcccgaccgtttcctcctcgttgctcgaagacgtccggttgagcgaagccggcggctag

SEQ ID NO: 369 - DNA, 891 bp, BradyrhizobiumColbertium
atgcgtcatttgtcccgtgccgtcgttcgcaacttgtgtcccgcagccctcgccggcctgctcgtcgtcagcccctacccggctgccgccgatgacgatgcgccgaaggggccggcggtcacggtgttgaaagtcgcaaaatcttgcttctccgacatcgtcgaggcgaccggcacgatcatcgcgcgcgaggaaacctcggtgcggcccgagcgtcccggcctgaaggtcacggacgtgctggcggaagcgggcgacaccaccaccgccggacaggtgctggcgcggctcgcgctgcccgaaggcggcacgcttcaggtcaccgcacccgtcgccggcgtgatcgcaaattcgactgcgcagatcggcaacttcgcctcggccaagggcgaggcgctgttcacgatcgtggcgcgcagcgaatatgatctggtcggcctcgtcgccaccgcggacgtgcgcaagctcgcagtcaatcagcaggccaccgtgcggatcgcaggtgccggcgacatcagcggcaaggtgcgccgcatcggggcgaccgtcgagccgaatatccagcagggcatggtctatatcggcatttcctcgcagaagcggctgctcctgaacgggagcgggcgcgccctgatcaagaccgggcagagctgcaacgtcgcggtgccgctgaccgccgtgcagtattcctccgccgggaccgtggtgcaggtgatccgccgcaaccgcgtcgagaccaagcgtatcgaggtcggcttgatgtcgggcggcaatatcgaggtccgcgacgggctcaacgaaggcgatgtcgtcgtcgcgcgcgccggcgcgctgctccgcgaaggcgacccggtgcgcccggtgatggcgagtgcggaagccgcgaagtag

SEQ ID NO: 370 - DNA, 126 bp, BradyrhizobiumColbertium
gtgcagcatcggctgaccgatgagccggccgatcgtacgcatgtgtccgtgtcctgcccggcctgcacgcggctgcatttgatcgagcgctcgtccggcaagctgctcggggagcgccgcagctga

SEQ ID NO: 371 - DNA, 177 bp, BradyrhizobiumColbertium
atgccgcgtgagaacgatctcgaaggtaagcccgacatgggtggcaagcatggcggtcaggccggccagcccaagcttccgccgcgtccgcaggagggcgagcgcgatggtgacgtcgtggcaaagcgccacaccggccaaaccgatcgcgcgccgtctccgaccagaccaaaatag

SEQ ID NO: 372 - DNA, 123 bp, BradyrhizobiumColbertium
gtgttttggatctgttggaacaccgcctggtcgttgatcatcagcggcatcatggtcgccaccatcgtcagccaccccgacgccgaattcgccgaagtgcgagcagcccgacggttgatgtga

SEQ ID NO: 373 - DNA, 975 bp, BradyrhizobiumColbertium
atggatcgacgcgcatttctgtcttcgagcatttttcttgcattggcgtcgcgtaacgtcgcacgcgcagcgggcaaggttttccgtatcggctggctcacggcgcaacgagaggcgagccttgctccttttctcgaagtgtttcgcaccggtcttcgcgaactcggatatcgtgagaacgagaacctcgaggtcacctattgctatggcgacgatgatctagcccgcgttgcgccgctggcggcaagcttggttcgcaaacccgtcgacctgatggtcgtgcagggcgctgccgtcgcggtcgtgtccgaactgaagctatctacccccaccgtgtatgtcttcagcggcgaccccgtcgtcgccggcttcgccagcagccttgcgcggccgcgtgccaacatgaccggcttgacgttcatggccgccgaattgaacgccaagcgtttggaaatcttgcgagataccgttccaggcttgcaacgcgtcgccatcgtcggcaatccagaacatcccggctcgcagatcgaacgcgcttacgcggaggacacggccaagaaactccgactggcaaccgacttcttcgccaccgcaaaccaagaccagcttgccgctgcattcgcagcgatggactcgaagcccccgcaagcgatttcgctctttgcggatggttttgccatccaatatcggagccggatcatcgagcatgcgatgaaacatcgggcgcccgtcatttcggggtggcccgtattcgccaggagcggcgccctctgcacctatggacccaagctctccgactcttatctccgcctggcgtcgtatgtggatcgcgttctcagaggaacggccccctcggaattgccgatcgaacggccgacgaagttcgaaaccgtcgtcaatctcaagaccgccaagaggctcggcctgagcttgcccgactccatcatcgcctccgccgatgaagtgatcgaatga

SEQ ID NO: 374 - DNA, 1035 bp, BradyrhizobiumColbertium
gtgtttgccgaatgcgatccgtcgatcatctacggcgtattcgacacattgtggggcgcagggcgcatatgggacggcgtcaaaggcggcacgccggacggcttgttcgagccgcggctggtcggcgccgagcccggcccgatcacgctggtcaccggcgtcagcatcatgccgcaggacatcgccgatcacgtcgcatcgaccgatatcgtgttcgtgccgaatgtgatcgtcactgcaaagaccggcaccgccgggcttgatcgccggctcatcgcatggatcaggaagatgcacgaggcaggcgcacagatgtacggttcatgcggcggatcgctcgtgctcgccgaagccggcctgctcgacgggtgcgaggcgacgacacactgggtttacgagccggtgttccgaaagcatttcccggaggtcaagctccgcatggaccgcgtcctggtgcagaacgggcccggacacaatctcgtctgcgggggcggcgcatcgtcctggcaggatctcgcgctgctgatcgtcgcgaaatacggcggcacggaagaggcgatccgtatctcgaagctgtttctctaccagtggcatcgcgaaggacaattgccgttcgcctccatggtgcagaacgtggatcacggggatggcgtgatcacgcgatgccaggattacatcgcgcagaactatcagcggcaggatctcattgcggcgctggcgcatcactccgggctaccgaagcgctcattcgatcgccgcttccgcgcagcgaccggctattcgccgctcgcctatgtgcagacgctgcgcatcgaggaggccaagcaactgctcgagacgaccgaagcgggtatcgaggacatctgtcgcgaggtcggctacgaggacgtggcctccttccgccgcctgtttcgaaagcaggccggcgtgtcgccgaaggattaccggcgcaagtttcaacttcccgactacgtggcggaagcccggcccccggcctccggcaaaccggtcagggcgcggcgtgctgccggatag

SEQ ID NO: 375 - DNA, 1047 bp, BradyrhizobiumColbertium
atgaacttggatgagacaaagctcgagcagttgctcggactcgtggtcaacgaactcggcgcggcctccaatgcggcgctcgtcgtcctcggcgaccggctgggtctattccgcgcgctggccgaacgcccgatgacgtcaggcgagctcgccgatcggacagggacccacgagcgctacgtccgcgaatggctgtccgcacaggcggcctcgggcttcgtgagctacgatgcgacgaacgatacgttcagcatgacaccggagcagaaggcggtcttcgcggatgaaaacagtccggtcgcgatggtcggcggcttcagcctgctgccggcggtctatcacgacgagccgcgattggccgaagcgttcagaaccggcaagggcctgcgctggagcgatcactgcaattgcatgtcctgcggtgtcgatcgtttcttccggcccggctatcgcgcgcatctgatcgcagaatggctgcctgcgttgggcggcgttgtcgagaagctggagcgaggtgcgaaggtcgcggacgtcggctgcggtcacggctattcgacaaggctgatggccgaggctttcccgaactcggacttcatcggcatcgattacgatgaggcctcgatcggctgcgcaaggtccgagacgtccggcgtgcgcaatctccgctacgaggtcgccaaggcgcaggatttcgccggatcgggtttcgatctcgtgacgatgttcgacgccctgcacgacatgggcgaccccgttggcgcggcacgtcatattcgttctgcactgaaggacgacggcacgctgatgctggtggagccggcggcgggcgacagccttgccgacaatctcaatccggtcgggcgcgtctactacgcgggctccacccacatctgtctgccgacgtcgctgagccaggatgtcggtctgggactgggggcgcaggccggcgagaagcggattgcgcaggtgttgcggcagggcggcttctcgcagatcgccaaggctgccggttcgcccttcaacatgatcctggaagcgcggccatga

SEQ ID NO: 376 - DNA, 138 bp, BradyrhizobiumColbertium
gtgatcgacatcatcttccacctccttctcgcccgcgcctcgctggtcgccggcctgtcccgctggtcctggaggcggctggctgcgctcggccgccgcagatggcgcgaattctggaccgtcacggcgggggcgtga

SEQ ID NO: 377 - DNA, 1074 bp, BradyrhizobiumColbertium
atgattaccgcatccaaggccttcattgccttttgcctgctcgcccttgtgggcactgcgctcgtcgtcggcccgaccgagctgcgccgcctgctgccgggcgggacgaagactgtcgtcgccgtcgcgccggaggcaaagatcgagcccagtgtcgaggccaagatcgagcccaagatcgagcccaagaccgaactcaaggctgaggccaaaccggagccgagaccggatcccaagccggagcttgccgccgctgcgccgcctgcaccggccgcggcgccgccgccggccgccgagccgaaggcgggcgtgctggccgagacgcagaagcaggtggccgcgctcggcgatctcgcgcctcgcaagccaccggcggctgcggatgccggcccgcgtttcgacgtcgcccgaatcgacgatcgcggcgaggcggcggtgattgccggccgcgccgcgccgggcgcaagggtcgaactgctgcgggacggcaagccgctcgatacggtggtcgcggacgcctcgggccaattcgtgatgaccccgccgcagctgcctgccgggtcgtatgagctgacgctccgggccaaggcgccggacggcacggtcacggagtccggccggaccatgccggtgaccgtcgccgaggcgccgccgccgcccgcgcggcccgcaatggtggcgaagcaggacaccaggcaagctgagaagccggacgacaagtcggatatcgtggccgcgctgccgtcggcttcaccgcgcctggcctcggtccccgacggtcaggcggcccggccgaagccgattggcgcgccgaagcccaaggtcctggcgcgggcgccggcagccacgacggttgcttcggcctcgtcggcagacgtgctcaccgccgcgtcggcggaagcgggcggcaaccgggtcattgccaagggcgacagcctgtgggcgctcagccggctcgcctacggcgatggttcccgctatgcggtgatcttcaaggccaaccgggacaagatccagaaccccaatctgatctatcccggccagaccttcgtgatgccgcctaaggcggagtga

SEQ ID NO: 378 - DNA, 1299 bp, BradyrhizobiumColbertium
gtggccagatcggcggtcaagtctgcgttcatgtccgggcgcgtggggctggcgctggccggcgccgccctggtgattgtggcagtgctgctgccaagcagagccgaggcacaattcggattgcgtggcggaccactcggcgtcgcgcgcttcgcggtcggccacatgatgggactgtcgcggctgcgccactcccgcatgggggtgcgcggcggccgccaccgctccgccgcgttgagatcgcaggatccccgcggcgccgggcgtggtcagcgatccaacccctacgtcctgcgcgcggccctcacggcgcaggccgcgctgtcgggctggcatggcgggcgccggccgcaaggctgggggcgccatcccgatggcagctacggctgggtaggaccggtattctggccattcgcgcacgatgatctcaccaacgcgatcatcctgggcgacagtaccagcctctcgctgtacggctatggcgacatctatgccgcgatcttcgcgccttatgcagcgacggagctcgccgcctacaccaagtcgcagggccggcgctcgcggagggtcccctccgcggaggccctttgcgaggccagcgatagcggcggtctgccggtcgaccgcgtcgcgagcaccgtgcaggcgaacgagttgcagcgcaccgcgctcgacgagctcgcgtccgcctggactgccgcgcgcgacaccatcagcaacgcctgcccgtcgcaggccccggcgaatgcctcggagcgtctcggcctgatgcgcgagcggatcgaggccatgattaaggcaattgacgcgatcgaagcgccgctttcgaagtttttcgatcttctcaatgacgaccagaaacgcaggctcaatgcgctcgccaacgagcgtcgcgccgcgctggccgcggttcagcgcaaggactcgcaggcggctgccgcttgtaagccggactacgatccccgctatgacgaaaaggcgcagcgccaatatgagcagctcgtgcagcagcaatggcccgccgccgacatcgcctccacgcttcagctcgacgaggtcgcccgcgcccgatttgaggtgctgcaggataccacgctgcgcaccatgcagaagctcagcgcctgcccgacggaagccgccgcgaccccgcaagcacgcctcgccgccgtcaaggcgcgactgcagacgatgctgcaagaggtcggcggcgtcagcgatgcgctcgacgatttccaggcggatctgagcgacgagcagaaggccgggttcgaggcgatcggaccgaagcggggagcgtga

SEQ ID NO: 379 - DNA, 1044 bp, BradyrhizobiumColbertium
atgcccatgccgacgcacatcctgccgaccaccgtggtcggcagctatccccagccggaatggctggtgaaccgcgccatgctgtcgaaggtggtgccgcgcacccgcctgcacgacatgtggcgattgccgccggaacatctggaagaagcccaggacgatgccaccatcgtcgcgatccgggacatggagcgtgccggcatcgacatcgtgaccgacggcgagatccgccgcgagagctactccaatcgcttcgccaccgcgctcgacggcatcgacgcagacaatcccgcgatgatcgtggcacgcaccggcaacacgcagacgccggtgccccgcgtcgtcggtcccgtgcggcgcaagggcccggtcgagctgcatgacatgcagttcctgcgcaaaaacaccgagcgcgccgccaagatcacgcttcccggccccttcaccatgagccagcaggccaagaacgagttctacaaggacgaggaagagctggcgatggcgctcgccgaggccgtcaatgccgaggcgctcgacctgcagaaggccggcgccgacgtgatccagctcgacgagccctgggtgcgcaacaatccggagctcgccaagcgctatgccgtcaaggcgatcaaccgcgcgctgcagggcatcacggtgccgaccgtggtgcatctctgctttggctatgcagccgtcgtgcccggctcgaacaagcccgccggctattccttccttgccgagctggacgacaccattgccgaccagatctcgatcgaggcggcccagccgaagctcgacctcggcgtgctcaaggacctgtcatcgaagaagatcatgctcggcgtgctcgatctcgcggaccccgcgatcgagagcgtcgataccgtcgccgaccgcattcgcaacggtctgaaatatgtctcgccggagcgcctgatcccggcgcccgattgcggcatgaaatacatgccgcgcgcgaccgcgtttggaaagctgaaggcgatgtgcgatgcagcggcgaaggtcaggcgcgaggttggctag

SEQ ID NO: 380 - DNA, 870 bp, BradyrhizobiumColbertium
atgaaagttgcaagcttcaccatcgccggcacgccgagctatggcatcgtcaccgacaagggtgtcatcgacgcgggcaagcgcctgaaggcctatccgacgctgaaaacgctgcttgcgaagggctcgatggacgagttgaagaagcttgccggcgagaagcctgactacgcgctcgaagacgtcgcgctgctgccgacgatccccgatcccgacaagatcttctgcatcggcgtcaactacgccacgcatcttgccgagagcggtcacccgacgccggcgcatccgatgatcttcacccgcttcgccaacagccaggtcggtcatggccagccgatgatccggccgctggagtccgagcgtttcgactatgagggtgaaatggccgtcatcatcggcaagggcggacggcgcatctcgcgcgaagccgcgctcagccatgtcgccggctacgcctgctacaatgacggcagcatccgcgactggcagcggcacacctcgcaattcgcgccgggcaagaatttcgccggcaccggcggcttcggaccttggatggtcacgaccgaggagctgaccgatattacaaagcagacgctgatcacgcggctgaacggtgtcgaggtgcagaaggctccgatctcggatctcgtcttcgacgtgccggccctgatcgcctattgctcgacgttcacagagctcgcgcccggcgacgtgatcgtgacaggcacgaccggcggcgtaggcgcctatcgtacgccgccgctgtggatgaagggcggcgacgtcgtcgaggtcgagatctccggcatcggtatcctgcgcaatcccgtcaaggacgagggttcagccgcggcaacgcgcgcggcctga

SEQ ID NO: 381 - DNA, 660 bp, BradyrhizobiumColbertium
gtgcacgacttgaccctgacattcgacaacggtccggatccagacgtcacaccgcgcgtgctcgatatcctcggcgggcgcggcatcaagaccaccttcttcgtcatcggcgagaagcttgccgatggcgagcggcgcggccttgcggagcgcgcgcaccgcgagggacactggatcggcaatcacacctttacgcacagcgttccgcttggcgagcaatccgggcgcgacaccgcggagaacgagatcggccgcacgcaggacgcgatcggcaatctcgctcatccgcagcgctggttccggccgttcggtggcggcggcaatctggacaagcggctgctcaagccgtccgtggtcgattatctcacccgcgagaagcacagctgcgtgctctggaattccattccgcgcgactgggacgaccccgagggctggaccgagcgcgcgctcggccagtgcagccggcagccctggacgctgatggtgctgcacgacctgccgaccggcgcgatggatcatctggaacgctttctcgatcgcgccgccgcggccggcgcccgcttccgccaggactttccgccgccttgcgttcccatccgcaacggcgagatcgcgcttccgatcgacgactatgtttcctccatcgaagagagtgtttga

SEQ ID NO: 382 - DNA, 822 bp, BradyrhizobiumColbertium
atgagcgccaggatcagcgccaggatcagcgccaggacgctgcgatatctgatcgtgatcggcctgatcgcgctgtgggagctgctgccgcgcagcgggctcattgccgaattgttcctgccgtcactgtcgtccacgttgatggccgggtggaccgacgcgggtgaatacggccatgcgcttgcggtcacgctctacgaggtcgtggtctccatggcatttgcctgcggcggcggcatcctgctcggcgccatcgtcggcagccttcccggcccgcgcgtcctgatcatgccgatggtgtcgagcctctacgcggtgccgctggtgatcctctatccggtcttcaccgtgtggctcggcatcggctcggagtccaagatcgcgttcgcctcgatctacggcttcctgccgacgatgctcgcgaccgcggccggcatccagaccatcgacccgcagctcctgctcgccgcccgcagcatgggcgcgacactgagccagcggctcgtccgcgtcatcatccctgcggcgatcccgacggtgctgtccggcctgcgtgtcggcggcgcgctggtgatcgtcggcgtggtcgtctcggaaatgctgatctcctcggccggcatcggctatctgatctcgcgctaccgcaccatcctcgacagcgcgcatgtgttcgccggcgtgctgctcgtgctgttcctcgcgatcggcttcaacgccatcatcagatggatcgagcgcaaggcggcgatctggcaaaccggcacccgtggcggtcaggccaatgacgagatcgcttcgggcgcaatgcagccggcgacgtga

SEQ ID NO: 383 - DNA, 807 bp, BradyrhizobiumColbertium
atgcagccattggcgaacgtgaccccgctcaagcccgccgcgcgcgccggcgcgatcgaggtgaagaatgtcggccaggtgttcaagacccgatcgcaggacgtcgtcgcgctggaggacgtctcgctcgaggtcaagcccggccgtttcgtcgtgctggtcggccccagcggctgcggcaagtcgacccttttgatgatgatggcgggcctgcgccagcagaccgcgggcacgatcaccatcagcggcgcgccgatcccgcagccggaccccgacagggtcggcgtggtgttccaggaggccagcctgtttccctggctgacggcggaggacaatgtcgagtttccgctggcgctgcgcggcgttcccaaggccgagcggagggccaaggcgcaggatgcgctcaagctggtcgggctcgagggtttcggcaggcgccatccgcacgaactctcgggcggcatgaagcagcgggtctcgatcgcgcgcgggctggtgcaggacccgccggtgctgctgatggacgagccgttcgcagcgctcgacgagcagacgcgcatgaccatgggcgacgagctgctgcgcatctgggccgccaccggcaagaccgtcgtgttcgtcacgcacagcctgaccgaagctgtgtatctcgccgacgaggtgatcgtgatgtcggcgcggcccggccgcatcgtggaccatctccaggtccagttgccgcggccccggacctacgagatgctgagcggcgatgccttcggcagcctgcgcgaccgcatctggcggcacatccgcaaatcggcatga

SEQ ID NO: 384 - DNA, 756 bp, BradyrhizobiumColbertium
atgcagggcaagctcgccatcaacctggcgcggatcgcgatcatcgtcgcgatcctggcgctatgggaaatgctgtcgcgcaccggcatcgtcaatccgcgcctgctgccgtcggcctccgacacgttcgcgacgctcggcgaactcctgcagcgcgcggccgtgcagaaggacctgatggtgaccgcgaccgaggtgctgaccgcgttcgctctcgccgtgccggtcggcgccctgatcggctttctcgtcgcggagaaccgctactttgccgatgttgcgaagcccctgctgttcttcgccttcagcatcccgaaatcgatcttcctgccgatgttcatcctggtgttcggcgtcggctttgcccagaaggtcggcttcggcttcttctccacgatcttcatcgtgatcatgtcgaccaccacggcggtggagtccgtcaaggtcgagcatctgacggtggcgcgctcctatggcgccactccgatgcagaccgcgttccgcgtctacctgccgagcatgctgccggtgctgctggaggcgctgcggatctccatgatcttcaatctcaccggcgtgatcctcgccgagatgtacgcctcccgcgacgggatcggccatcagatcgcaatctggggcgagaacttccagatgaagcagctcctcgccggcgtcgtgatggttgccgcgatcgccatgaccttcaacgaacttgtcagatgggtggaaacgcgatgcagccattggcgaacgtga

SEQ ID NO: 385 - DNA, 963 bp, BradyrhizobiumColbertium
atgaagatcaatcgtcgtcacgcattcatgtcgctcgtcgccgccgccattttcgccggcccggcgaacgccgccgaaaccattcgggtcggcctgcccaccaaaacatactggccgacgacgatcgccgagaccgcggtgcggcagaagctgttcgagaaggaaggcatcaaggccgagctgacgatctatcgcagcggcgcggagacgttcgagggcatggctgcaggcgccgccgacatcatcctcgacccgccgtcgctggtctccgccggacgcaagaagggcgtgatgtcgcgcatcgtcgccaacgccgcgatgggcaatttcggctggcaactgatggtgcccgccaaatcgacgcttcaagtcaaggacctcaacggcaagaaggtggcgatcaccgcggccggctcgggctcggacctgcttgcgctgtggaccatccaggacaagaagatcgacttcacgcgcgttcccgtcggcggcggtggcctggtgccgaacctgctcgccggcaatgtcgacgccgccgtggtctattcgccgctgagcttccagatctcgaaatcgggcgaggccaagagcatcctcgattacgcgaccgcggttccgccgaacctcaccgccggctggatcgtgctcgacaagttcgccgaaaccaagcctgagctggtgcagaaggcggtcaacgccctctacggcgcggtcgcattcatgcgcgccaatcgcgacgtcaccgtcaagctgatcgccgagctctacgagatgccgccggagatcgcggccctcgaatacgacaacaccatcatgaagctcgagaccagcggcgacatgggcgcggccaatgtgggcgcggccgtgcagctctcgctcgatctcgccaagctcggcgggctcaaggacatcgtgccggccgcggaggtgatctcgaccaagttcaagcccgtcccgaccaagtag

SEQ ID NO: 386 - DNA, 729 bp, BradyrhizobiumColbertium
atgggtccgctccagttcgacatgtcgggaagtcccggtgatggtccgcgcagcctgacgtcggcgctgcacgagcggctgcgcgccgatattctagcgacgcggctgctgccgggccagaagctccatatcgccggcctcgccaagcagttctcggtgagccttgcggcggtgcgcgaggcgctgtcgcggctcgtcgccgatggcctcgtgcaggcgtcggaccagcgcggcttccgcgtcagcccggtgtcgctcgccgacctcgccgacgtgacccagacccggatcgacatcgaggggcttgcgctgcgccgctcgatcgagcggggcgacgatgcctggctcgtgtcggtgcaatcgacctgggcggacctgaaggccgtcccctatcactaccccgacgatccgaccgtgcattacgaggaatgggtggtccgccaccgcattttccaccgcgcgctggtcaacgcctgcggctcgccatggctgctcggctttcgcgacgtgctgcacgagcagagcgagagatatcgccgcctgtcgatccgtcgcgagctcggcggcaagccgcgcgacgtcgaggccgagcacgaggcgatcgtcgcagccgtggtggagcgcgacgccgatgcggccgttcgcgccctgtcgacgcatttcggcatcaccagggacttcgtcgagctcgccgcctcgcgcattgcggaggtgagccgcacgacctga

SEQ ID NO: 387 - DNA, 138 bp, BradyrhizobiumColbertium
atgattgcagcgctccatccgcgggtcaacaaaaatcgaaaatcgattttccgccgcgcgcaagtgagccttggcccctgccgcacgctcgccgcgaccggaacacgcttcgtcttcgcttctcgcaatgacctttga

SEQ ID NO: 388 - DNA, 867 bp, BradyrhizobiumColbertium
gtggcctttgccttgccttcgcgtgcctacgatctgcagatgctggaccggcccgcggaccgtgcgcgggaccatggctgggtctttgggttgccgccgggtatcagcagcgagcaatggccgttcgatcccgtcaccggctatcccctgatgcacgggttcaccttgcttctgccggaggattatcgcgtgcatggcgaggacatcgtcgcggtgtcgttctttgccaccgcgcccgatcacaatgacggcggcgcgcccgacgaccccgagatccgcgacgcggtgatggcccggccctcgcatccgcgcctgtcgcgcatggcggacgttctcaactacgaatatgccgcgctgctgctgacgcaagccgagtatgacggcgcgttcgcggcaccgccggcgccgcttgcgctgacagcggctgaacggccgcgctggctcgatgtcggcggggcccgcgcctacctcgaggcagcgccgccttacgcgaagaagatgttcgccgctccgccgcgctccgatctcggcgagaaccgcgcgatcgccctgacgccgcgcgcgaacgatcccaatgccggcaagggaccgcaggacaagcacgtccgcgaaaagccgccgaccggctatcagccctactattattatgtcggcgaccggccgggccgcgacaattttcgcctgcacgactgggccaaagatcacgcgcacaaccatctcggcggcaccatgcggccctgccaggccgtgccggagatgagcccgttctacatcgagttcgaggaatatttcggcggctacaatttcggcggcggcaacgcgcagctcgacttcaaggagatgaagttcgattgggcgtgcggatga

SEQ ID NO: 389 - DNA, 2448 bp, BradyrhizobiumColbertium
atggcaggagcgaacgacaagacacgatctctgcgcgggggcctgttcgccaagtatgtcgtctccctcgtcggcctcgtcgtgttcgtcctcgccgtcaacggggcgatggagacctggatctcctaccgcgccacccggacgcagctgaccgacgggctggaggacaaggcgcaggccgccgcgcggcggatcgagcagtcgatctccgagctcgaccgccagatcagctgggtgacgcgggcgagccaggacacgctggagaagcgccgcgccgactacgcccagcttttgcaccaggtctcggtcgtcaaccagctgttccagctcaacggcgatggccgcgaggtgctgcgcgtctccaggcaatcgaccacgaccggcagcaatgccgacctctcccgcgacgtgcgcttcaccgatgccgtcgcccgcggcgtcagctatgcgccggcctggttcgccgaccggacgccattgatgtcgatctcggtggcgcattccggcttcaatgccggggtcaccgtggccgagatcgatctcagcttcctctccgacttcctgtccgacgcccaggtcggcaaggcggcctttgcctatgtcgtcgatccgcgcggccgcgtgctggcgacgtcatcgaaagggcccgaggtcggcaaggacctctccaagctgccgcaggttgcggccgcgatcgcgcccggccacgagcccgacacgtcgggcaccgacttcaacggccatgcggtgatgagcgccgcgagcatcgtgccgaagctcggctggagcgtgctgttcgagcagccgacgacccaggccctgatgccgatccgcgaccagctggtgcgcatcgcgctcctgatcggcatgggcctgatggtcgcgatcctcgccggcacgctgctggcacgccgcatgatcatcccgatcacggcgctgcgcgacggcgcacacaagctcggcgaaggcgatttcagccaccgcatcgacgtgcacacctccgacgagctggaagacctcgccgggcagttcaaccgcatggccgaccagatccaggagacctactcgaacctggagagcaaggtcgaggaacgcacccgtgatctcgcgcagtcgatccacgaactcaaggtgctggaggaggtcggccgcgcggtggcctcctcgctcgatctcaacgcggtgcttgccaccatcgcggcccgcgcgatcgagatcacccgtgccgacgcggtgctgatctatggcttcgacgccgagacgcgccgcttcaacctggtcgaggccaacggcatcgacaagtccgccgacggcgcgcatgtcaccatcgcgcaaggcgagaacatcctgagcgatgccgccgacagcggcgaaccgatcgcgctggccgagctcggcgatgccgcagagcagccgctgcgcgaggtcgcgctcgcggccggcttcagctccgtgctcgtggtgccgctgatcgaccagcagggcacgctgggctcgctggtggtgctgcgccgcgccggcggcgcgttcgcgcccagcatcatcggattgatgcgcaccttcgccaaccaggccgtgctggcgatgcgcaatgcgcagctgttcagcgaagtcgaccacaagagccacgcgctggaggcggcaaacacgaccgtgcgcgcccaggccgacaagctgcgcgagcagaccgagcagctcaaggactggaacaagtcgctggaggagcgcgtcaggacgcagctcggcgagatcgagcgcatccgcaagctcgagcgtttcctggcaccccaggtggcgcagctgatcgcctcctccgacagcccggaggggctgctcaccagccagcgccgcgaggtcacggtggtgttctgcgatctgcgcggcttcaccgcgttcacggaagcgaccgagccggaagaggcgatgaacgtgctgcgcgaatatcacgccgcgctcggccagctcatcttcaagtacgagggcacgctcgacaaatatgccggcgacggcgtgatgatcctgttcaacgcgccgatccagttcgaggaccacaccaggcgcgccgtgaagatggcggtggagatgcgcgacaccatcggccccctgaccgagcgctggcgcaaccgcggtcatagcctggggttcggcatcggcatcgcgctcggctatgccacgctcggccaggtcggcttcgagcagcgcctggaatatgccgcgatcggcagcgtcaccaacctcgcctcgcgcctctgcggcgaagccaagcccaaccagatcgtggtgagccgccgcgtctacggcatggtcgagccatgggtcgaagcgcgcgcgctcgacgatctccagctcaagggcttcaatcaccccgtgctggcgatggagatcctgagctggcgcgaggaggtggagaacgtggtggatgccacggcggtgcggcgacgaggttag

SEQ ID NO: 390 - DNA, 2076 bp, BradyrhizobiumColbertium
atgagagcattgaaattcgccggcgcggctttggccgccgtcatcgtcgtgatcgcactcttgctggtggtcgggatcccctcgggcttcctgacctcgacgatcgcctcgcgcgtcgagagagcaaccggctatcgcctgtcgatcgacggcaccaccaagatcagcctgtggccgacgctgaacgtcaccctgaacgacctcacgcttgccagtcccaaggaccgtagcggcatcacgcgcctcacggtcgacagcgtgcaggccgacatatcgctcgccagcgtttggtcgggccgccccgagatcagcgagctcgtcgtcacccatcccgtgctgtaccagcctctgctgcgcgagcggctgccgaatgccggcggcgcctcgaagccgcccgcgctggataccaatggcgcgaccatcgaccgcatcaagatcgtcgacggcgaagtcgccttctcgcgcctgcgcgacagggtcgatggccgcatcagcgccatcaacgccgacgcgatcgttgaccgcgaccgcaaggtcaatatctccggcaccgcgcgtgtcggcgaacatccgaccaagttcgacatcaaggcggccatgccggcctcggcggccgagcggccgacggttcccgtggatttcgcgatcgacatgcccgacgtgctgaaatcccagctcaccggccatgccgagatgcggctcaatggcgatgtcgtgatgatcaacggcgtgaacggcaggctgggcgagggcgtattcaacggctgggcttccgtcgacattgcgagcaagccgctggtcaaggtcgacctcgatttccagcggctggcgatgccgctggcgaaatcgccggaaggcacggcagggcagccctggagcaatgcgccgatcgacgtctccggtctcaactatgtcgatgcgcaagtgagaatctctgccaacgaggccgtgatcggcgatgcgcgcatcgcgccgcttgcgctcgatgccaagctcgccggcggggtgctgaaggccggaatcgccaatctcggcgcctatggcggccaggtctcgggcgaggtgatcctggacgcgaccacgggggcgccgagctttgccatgcattccgatctcgtcggcgtgcgcgcactgccgctgctccagggccttgccgaattcgaccgcatcgatggcaagctgcaggccaagcttgccttgcgcagcgccggcaacagccagcgcgcgctgatggcgaacatgcagggcacggccttcgtcaatttccaggacggtgccatccgcggcatcaatgtcgcgcagatgatccgttcgctgacgacgagcacgctgtcgggctggcaaggaaaccaggaccccagcccggaacagagcacggatctgtcgcagctctcggcctcgttccgcatcgacaagggccaggcggtgacgaccgatctcaatctgatcgggcccctcgtgcgcgtgaccggcgccggcaccatcgcgctcgacaccaagatgatgggctttcgcgtcgagccgaagctcgtgatgacgaccgaaggccagggccgcacctccgagccggtcggtttcggcatccccgtgatgatccagggcagctggtcgcagccgcggatctacccagacatggccggcatgctcgacaatccggatgccgcctatgccaagctgcgcgagatgggcaagggcctgttcgggcccgatggtgccgggctcggcaatatcctgggcagccttggcagtaaccttgggctcggcggcaccgccgcaccggggggcaatgcggccggcagcgccaatccgcaggcgcagcagccggggcagaacaacctgctcggcggccccctgggggaggcgatcggcaatctgattcagcaggggctttcaggtggcgcaggaagcagcactggcagcgcgccgggcagtggccgtagccgcagcctgccggcagcgccctccacgccggcgccgcaggcctcgcctgcggcccccgctctggaggacccgccgctcgcgcagcaggacagtcagccaatgaacgacgtgctgcggcagctcttcaatcggtga

SEQ ID NO: 391 - DNA, 675 bp, BradyrhizobiumColbertium
atgagcaagcaggccgaatttgcggtcatcctgaagatgaacccgatgtttgccgatctcggcgcggacgagctccagcggctgtccaatctctgtcacacccagcacctcggaaacggcgaggtcctgttccagaagggcgatcccggggacgcgctgttcggcgtccgccgcggccaggtgcggatcgaaaccggcgcctccgatggcagccggctgacgctgaacttcatgggtccgggcgacctgttcggcgaggtcgcggtgctggacggccagaaccgcacggcggatgccaccgcgggcgaggccagcgaattgttcgtgctgcggcgcgaagatttcctcagctttctcgagcgcgagccgaaggtcgcgatcaagatcatcgcattgctgtgccagcgcatccgctggcagagcgagcgcatggaagagtccatgctgcagccgctgccggttcgcttggcccggcggctctgcgcgctcgcggccgatttcggctccgaggtccacatctcgcaggagcagctcggagtcttcgtcggcgccgcgcgcgagagcgtcaaccgacagcttcaggcctggcgcaaggaagccatcctcgatctccagcgcggccgcatcctcttgcggaacatgaccaagctgacggcgatcgcgcggaacgagtga

SEQ ID NO: 392 - DNA, 3135 bp, BradyrhizobiumColbertium
atggctctgaatatctcggcatggtcgattcgcaatccgctgccgtctgtcgtcttttcgatcatcctgctggttctcggctgggtgtccttcaccaagcttgcagtgacgcggctgccctcggccgacatccccgtgatctcggtcgcggtctcgcagttcggcgcggctccggccgagctcgaatcgcaggtcaccaagacggttgaagacgccgtctccggcgtcgagggggtgcggcacatcacctcctcgatcaccgacggcctctcggtcaccacgatccagttcgcgcttgagaccaacaccgaccgcgcgctcaacgacgtcaaggacgcggtgacgcgcgtgcgctccaacctgccgcagaacgtcaccgaaccactgatccagcgcgtcgacgtcatcggcctgccgatcgtgacctatgccgccatctcgcccggcaagacgccggagcagctctcttatttcgtcgacgacgtggtcaagcgcgcgctgcagggcgtgcgcggcgtcgcccaggtcgagcgcatcggcggtgtggagcgcgagatcctggtctcgctggatcccgatcgcttgcaggcgatgggactgactgccgtcaatgtcagccagagcctgcgcggcaccaatgtcgacgttgccggcggccgcgccgagatcggcaagaacgatcaggcgatccgcacgctcgcaggcgccaagacgctcggcgacctcgccggcaccatgatcccgctgttcggcggcggcgaggtccgactcgacgatctcggcaccgtcaccgacaccatcgccgaccgccgcaccttcgcccgcttcaacggcgagccggtggtcgcactcggcatcaagcgttcgaagggcgccagcgacgtgaaggtggccgaggcggtgcaaaagcgcatcgacgcactgaaggccgcctatcccgacgtcgacctgaagctgatcgacacctcggtcgagtataccaaaggcaattaccacgcggcgatctcgaccctgttcgagggcgccatactcgccgtcgtcatcgtgctgctgttcctgcgggatctgcgcgcgaccatcatcgccgcgatctcgctgccgctgtcgatcttcccggcgttctgggcgatggacctgctcggcttctcgctgaacctcgtcagctttctcgccattacgctgtcgacaggcattctcgtcgacgatgccatcgtcgagatcgagaacatcgtccggcacatgaacatgggcaagtcgccctaccgtgccgcgctcgaggcggccgacgagatcggcctcgcggtcattgcgatctcgctgaccatcatcgcgatcttcgctcccgcgagcttcatgtcgggcatcgccggccagttcttcaagcagttcggcatcaccgtctcggtgcaggtgttcttctctctgctcgcggcccgcttcgtcacgcccgtgctggccgcctatttcctcaaacaccatgcgcatgaggagccgccgcccggccccatattgcggtcgtatcatcggatcgtggcctggtcggtgaagcattatttcatcacggtgctgatcggccttggggtcttcgccgcctcgatctggagcatcacgctgctgccgcaaggcttcctgccggcccaggacagcgcccgttcactgcttgccctcgagcttccgcccggcacccagctcgcctataccgaaaaggtcaccgaagacatcgtcgcgcgcctgcgcaagcggccggaagtgaagagcatcttcgtggacggcgggcgcgtgccgccgggcacccaggaggtccgtcgcgccgctttgatcatcaattatacgcccaaggacagccgcgacatcacccagcgcgagcttgaattctccatcagccaggagctggagaacgttcccgacatccgcttctggttcctggacgagaacggcctgcgcgcgatctcgctcgtggtgaccggcgtcgatgccaacatcgtcaacaacgtcgcgagcgagcttgcgacgcagatgaaacgcattcccaccatctccaatgtgatctccgaaacctcgctggagcgccccgaactgcgcatccagccgcacgccgatctcgccgcgcggctcggcgtttcgaccgaaagcctgtcccagaccatccgcgtcgccactatcggcgacgtcggacccgcactcgccaaattcgacgtcggcgaccgcctggtgccgatccgcgtccagctcgaggatgccgcccgcggcaatctgaagacgctggagcagttgcgcgttccgctcggcgagcgcggcgagaagggcggcgtgccgctctcggtcattgccgacgtcaagctcgaccagggcccgacgagcatcaaccgctacgatcgtgaacgccaggccaccgtcgcggccgacctcgtcggctctgccgcgctcggcgatgccaccaagaagatctacgacctgccggtcatgaagacgctgccgaagggcgtgaaggtctcgccctccggcgacgccgaaagcttgaacgaattgtcggtcggcttcgcgaccgccatcacggcaggcctgatgatggtttacgccgtgctggtgctgctgttcggcaccttcctgcagccgatcaccatcctgttctcgctgccgctctcgatcggcggcgcgatcgctgccctgctcctgaccggcaaacagctcaccacacctgtgtggatcggcatcctgatgctgatgggaatcgtcaccaagaatgcgatcatgctggttgagttcgcgatcgaagccatcaaagccggcaaaccgcgcgaggaggcgatgatcgatgccggcatgaagcgcgcccgtccgatcgtgatgaccacgatcgcgatggccgccggcatgataccgagcgcgctcgcattcggtgccggcggcgagttccgctcgccgatggcgctcgcggttatcggcggcctgatcttctcgaccatcctatcgctggtgttcgtgcccgcgatgttcatggtgatggacgatttcggcgccctgatctggcgcttctccaagcggctgatcgtgcacagcgaggatgccgagaccgacggtcatcacgaaactgcgccggcaccgaagaacgtcgcgcaccgtgctgcggaataa

SEQ ID NO: 393 - DNA, 930 bp, BradyrhizobiumColbertium
atgaatttgactcagtatctcaagccggcggggaccgtggtgttcgtcctcgcaatcggcgtcggctattatctgttcgaacgccggcaccgtccggaaccgaaggagacgccaagcgaggcgctcgtcatcgtgacgaagtcgaccaacgcctgtttctccgacctggtgcgggtaactggcttctttgtgccgcgccgcgaggccgtcgtcgttgccgaccaggaaggctccagggtcaccgacctcctggtcaccgagggagccgtcgttgccgacaaccaggagctggcgcgcctgaccgcgccgccgcagatcccgggccagccgcagcgccccggcccgcaaggcccgatctcgctgaaagcgcctgcgccggggctggtcaccgaggtccgcaccatcgtcggcgcgccggcctctccccaggccggtccgatgttccgcatcgccgtcaacaacgagatcgagctcgaggcccaggtcccggcggtgcacatgtccaagctcagtgccggtgcgaccgtgcgcatcagccgcgacgacgcgcccgacttgatcggacgggtccggctggttgcccccgagatcgaccgcgccacccagctcgggcgcgtccgcattagcgtcgcgaacaatccctcgctgaaggtcggcgtgttcgctcgcgcctcgatcgacgccaagcgcagctgcggcgtctcgattcccaagaccgcgatcgaccatctcacggtgcaggtcgtcaaaggcaacattgtcgagacacgcaaggtgcgggtcggactgtcgtccgacagcgctacggaaatcctggaagggctcgaggtcggcgaaatcgtcgtggccgatgccggctcttcgctccatgacggcgaccagatcaagaccatgttcgccgatgaactcgatcgcacgcgggtacgctga

SEQ ID NO: 394 - DNA, 672 bp, BradyrhizobiumColbertium
atgaaatcggctgcaaaaggacttaccgcgatcctgtccatcatcaccgtcggggccgcgctgttgttgccgacctcagccacctacgcgggcgatgagagcaacagcaagaatgtcaccgaggacgagatcgtccgcgcactcgcgccgccggccaagaagcccctgacccgcggcctctcgatcgccccgccgaccgaagccgcgccgaacgcggcggagaccaagctgctgcagtcggtgcgcggccggtcgacgcgctcgctgtcgtcgaccgagcgcgaggaaatcgcttcggtcgccaaggacaagccgaacatcgatctcgaaatcaccttcgactacaactccgccaacatcagcgccaaatcgctcccgtcggtgcaggcgctcgggcgggccttgaccagccccgacctgaaaggctcgaccttcgtggtcgccggccacaccgacgccgccggcggcgaagcctacaaccaggacctgtcggagcgtcgcgccgattcgatcaagcgctacctcgtcgaaaagtacaacatctcggcgaccgacctcgtcaccgtcggctatggcaagagcaagctcaagaatccggcccagccgctggcggaggccaaccgccgcgtgcaggtcgtcaacatggaaaacaagaccaccgcatcgaagtga

SEQ ID NO: 395 - DNA, 1536 bp, BradyrhizobiumColbertium
atgaaaattcgcttcttttttcttctgtccctgctcatctcgctcgttccgacggctccgtcgcttgcggccggcgagcgctttgcgctcgtcatcggcaatgccaaatatccggatgccgatgctccgttgaaggaaccgatcaacgatgcgcgcgacatcgccgatgagctcaagcgtgacggcttttcggtcgagatcggcgagaacctgaccggcgacggcatgcgccgcgccttcgacaagctctacggcaagatcaagcccggctccgtcgcgctggtattcttcagcggtttcggtatccagtcggcacgccagagctatctgctgccggtcgatgcgcagatctggaccgaatccgacgtgcgccgcgatggcttcagcctcgagaccgtgctcggcgagctcaatacccgcggcgccggtgtcaagatcgcgctgatcgatgcctccaggcgcaacccgttcgagcgccggttccgcagcttctcggccggcctcacgcccgtcatcgccccgaacggcacgctggtgatgtattcggcggcactggcctcggtggtctcggacggcggtggcgaccgcagcctgttcgtccaggagctgctgaaggaaatccgggtccccgacctgatggcggaggagacgctgaaccgcaccaagatgggtgtcacccgcgcctcgcgcggcgagcaggtgccctggatttcctcgtcattggccgaggacttctccttcatgcccgggaccgccgggtcgcgtcccacaacgacgccaccacctgcgcctccggccgcgccggccgtcgtcgccaataatccgccacctgctccaccgacaccacctccgccgccgaagccggccgacaccgctgcggcaccggctcctcccgcaccgcctgcacccgcgccggctcccgcaccgaagccgcagatcgaggccgccctgcccccgccgccaccgccgccaccggtgaaaccgattgatcccggtccggcgccgagcacagagaccggcccaagcgccgccgtcctggccgacgatcccacgatcaagggcctcaccgccaagattgccgccaatccggacgacgtgaacgcgctgtaccggcgcggccaggtctatgcgagcaagggcgcctacaaccttgccatcaaggatttcgacgacaccctccggatcaactcgaaggacgtcgaggccctgaacaaccgctgctggacccgcacggtggtcggcgacctccagggcgcgctgaaggattgcaacgaggcgctgcgcctgcgcccgaacttcgtcgatgcgttggacagccggggactcgtcaacctcaagtccggagcggtcaagaacgcgatcgccgatttcgacgccgccctgaagatcaacccgcgcctgacgtcctcgctctatggccgcggccttgccaagcaacgcaacggctcggcccaggaaggcgcgctcgatatcgccaatgccaaggcgatggacccgaacatcgttcaggaattcgcaagctacggagtgcgctga

SEQ ID NO: 396 - DNA, 885 bp, BradyrhizobiumColbertium
atgtttgacctttgcggcggacaatggcttggtgcgctcgatcgtcccgccagatccaacccagaaaaagcaaagaccatgggaaacgcctacgaaatctacgctctgcgctatgcaacgatgtcgccgcgcactcccagcatgaacttcctcctgcccgacccgcatgacagcgccgcgcaggatctcgactatttcgtctggctgatccgcggtgggggccgcgagatcctggtcgacaccggcttcaatgccgaggaggcgagcgcgcgggcgcgcaagctgacgctcaatcctgtcgatgcgctggagcgtttcggcgtcgcggcgacatccattcgcgacgtcatcgtgacgcatctgcattacgaccacgccggcaatctcgaccgcttcccgaatgcgcgcttccatctccaggagcgcgagatggcctacgcgaccgggcgctgcatgtgcaacggcttgttgcggcatccgttctcggtcgagcatgtcacgctgatggtgcgccacgtctatggcgagcgtgtcacgttttattccggcgatggcgaggtcgctcccggcgtgaccgtgcatcgcgtcggcggccattccgacgggttgcaggtggtcaaggtcgagacagcgcgcggaccggtggtgttggcatccgatgcggctcattacttcgccaatctgcagcgcagaagcccgttcccgatcgtctataatgtcggcgacatggcgatgggctgggagacgatcgagcgcctggccggccatccggatcgcttcattcccgggcatgatccgatcgtcacggagatctatccgagcgccagcgacaaggtcgaggcctgggcgctgcacctgccgccgacccggtcgtttgcgaagtga

SEQ ID NO: 397 - DNA, 543 bp, BradyrhizobiumColbertium
ttggcgaggacatccagcgacatcgcgctcaaggcgcgggaggccgtcgagacgtcggcgcggtcaaaaccgcggctcgacctgttcaagttcgtgcccttccgtctcaaccggctcgcggcggaagtcagttccgcgctcgcggaggaatatcaggaacggcatggcctcgacatcccggcgtggcgcgtcatcgcgacgctcggcttccgcaacgatgcctgcagcgcgcaattcatctcgcaatgcacccgcacgcacaagtccaccatcagccgcgcggtgacggcgttgttgcatcaggagttgatcgagcgggccgagaacgaagccgaccgccgtgaattccgcctgcaactgaccaggaagggccgcgcgctctatgaggagctgttcccccaattgctgcggcgggaagatgagatcctcgcctgcctctccgcgcaggagcgcaagcagctctcgtccctgctcggcaagatcgagcagagcctcgacctgattcagaccagcaaggaagcggacgccaagcaggcgtattaa

SEQ ID NO: 398 - DNA, 573 bp, BradyrhizobiumColbertium
ttgcgcattcaggcgataggcgccctccggcgtttcgatcgtcagcagagcggaatcgttgcgctgttcgagtgccgtcaccttgttgcgccagcgcaagtcgatatctggcaaatcgctgacgcgatcgaccagataggcctctgcgtaatattgctggagattgatgaaggccggccgcttgtggccatcctccggcagcaaattgaactgatagagctgcgactcgccgtggaagatgcgaccgacgctccacaccacgcccttctcgaccatgcggtcgccgacgccgagccggtcccaatattccagcgagcgtttcgagaagcagatcgcgcgcgagccttcgccgatgcgatcggcatcgtcgagaagcacgacgcgctggccgcgctgggcgagatcgatcgccagcgacaggccgaccgggcccgcaccgacgatcacgaccggatgcgccgccgggccttgggccgaacgatcctgatcgggatgacgtcgatagccgaactgggatttggcctgcgccatgcactaacctcggctctggtcaggggaggactgatctgctag

SEQ ID NO: 399 - DNA, 906 bp, BradyrhizobiumColbertium
ttgcaccgtcagcccgacgatgtctggcgcatcgatcttcagctcaaccgctatgccgatcctgtcgtcgagaggaagccggaaaacgtgcggccgcggatcgcgcgcatgctcggccacgacaagttcgagttcgagtggatctcgctgtacaaattccaatgccggcggatggaccgcttcatccacggccgcgtgatctttgccggcgattccgcgcatcaggtctcgcccttcggcgcacgcggtgcgaactcggggctcgaagacgccgaaaacctctcctggaagctcgatcgcgtgctgcgtggcaaatcgcccgcgagcctgctggagagctaccatatcgagcgcagcatggcggccgacgagaacattcgggaatccacccgctcgaccgacttcatggcgccgaactcgcatcaggaggcgcggctgcgcaaggcggtgctgtcgcttgccaaggagaccgagttcggcaagcgcatggtcaatggcggcaggctgtcggtgccgtgcagctacgactcgccgctgtcatcgcgcgatgcggatgcctggtccggtgggccgccccccggctgctctatgctcgatgcgcccgtggccgcgcgcgagggtgaacagacttatctcaccgacgtctttcgccagggtggaacacacttcgccctgctgtcgttcggcaatggtgcgccgatcgaactccctgacggcgtcaaggacattcgcgtcggcggcgaggccgggctggccgacccggcgggtctcgccgcaaagcgctacgatgcgcagcctgcaacggcctatctgctgcgccccgacggctacgtcgcggcgcggttccgccatccgactggcgcgatgatcgcggctgcgctgtcacgcgcccagggtttgaactga

SEQ ID NO: 400 - DNA, 225 bp, BradyrhizobiumColbertium
atggctctctccaccagctcgaacttcgttcgcccggacgacgccttccgcgccatcgtcgaggcgcatcgcggtctcactgaggagcagagcgccgatttcgacgcggcgctggtgctgatcctcgccaaccatatcggcgacatcgacgtgctgcgcgaggcgatcgggcttgccaggcgccgcatgatcgacggccagcagcaacaacagcaacaacaataa

SEQ ID NO: 401 - DNA, 957 bp, BradyrhizobiumColbertium
atggcgaagaatttcgcatccaccggcgatctctccgagaagaagatcaccttctccgagatcggcaccgatctctatgcctttactgcggaaggcgatccaaacacggccgtcatcgtcggcgacgacggctgcctcgtattcgacgcgcaggcgacgccagcgatggccaacaaggtgatcgagcgcgtccgcgccgtcaccgacaagccgatcaaatacgtcgtgctctcgcactatcacgccgtgcgcgtgcttggtgcttccgcctacaaagcacaaggtatcgtcgcctcgcaggagacctatcgtctcattgaagagcgcggcaagcaggactgggattccgaatatggtcgcttcccgcggctgtttcaggatgcgcagagcatccccggcctgacgtggccgacgctgacgtttgaaggcgagatgacaatctacctcggcaagcgcgaagtacgcctgatgcagctaggggccggccacacctccggcgacatcgtcgcctgggtgcccgatgctgaagtcatgttctccggcgacctgatcgagtatcactcggcctgctattgcggcgatgcgcatttgcgcgaatggccgatgacgttgaacgagatccgcaacttcaatccgaaggcgatcgcgcccggccgcggcgatgcgctgaagggcgttagcacggttcgcgaggccatcgccatgacgcgcgacttcgtcacctcgctctatggcgccgccgaaatctccgtcgccaaggggcgcacgctgaaggaatcgatggcggcgacccgcgaggtgatggatcccaagttttccagcttcgccatctacgagcactgcctgccattcaacgtctcgcgcgcctacgacgaggcatcggggatcgatgatcccgtgatctggaccgacaagcgcgaccaggaaatgtgggccgccctgcaaggaggaggatag

SEQ ID NO: 402 - DNA, 657 bp, BradyrhizobiumColbertium
atggccgggctgacgctgcatccgattgtcggcgcattgccgccgggcacgccggccatatccggcgatctgctggcggtgatcgtcagtgtcgtcgcgtttctggtgtccggtgttttcatgctggcgctggttccggatcagcgcgaatccgcggcggacccggtgatcgtgcccgaggcgaacgagccggatcccattccggccccgattacggcggacagcgtgacgcctgtctctggttcggtcgcggaactcacggtcgccgatgcgcccacgcaggcgacatcggatgctcccatctacgaggccaccctgccggtggagaagtatcgcggcagccagaccatcaacaccgccgacattttctcggtccacgccaacgcacattatacttatgtgttcaacggccgggaggacatcttctgtccgctctcgatcggcgagatcatcgcgcggctgccgcccgatattttctttcgcgtccaccgcagctacatcgtcaatattcagcgcgtcgcgcgtctgaagcgcgcgggcgacaacggaattgccgatctcgattcgccggtgcgccgctcggtgccggtgagccgcagccggttgccgcaattgcgcgagcagctcaccgaatatctgcgaaccagggacaattaa

SEQ ID NO: 403 - DNA, 867 bp, BradyrhizobiumColbertium
gtgattcctggttcatttgactaccatcgtccgaaatccgtcgccgatgccgtcgcgcttctggtgaagctcggcgaagacgcccggcccctggccggcggccacagcctgatcccgatgatgaaaacccggctggccacgccagagcatctggtcgatttgcgcgccatcggagacctcaaggggatccgggaagagggcggcgacatcgttatcggagcgatgaccacccagcacacgctgatcggttccgatctgctggcggcgaaattgccgatcattcgcgagacgtcgctgctgatcgccgatcctcaaatccgctacatgggcaccatcggcggcaacgccgccaacggcgatccgggcaacgacatgcccgcgctgatgcagtgtctgggcgcaagctacgaactcaccggcccgaatggcgtgcgccgggttgcagcgcgtgagttttatcaggcggcgtatttcaccgcccttgagaccggcgaaatcctgaccgcgattcgcattccggtgccgccggttggacatggctatgcctacgagaaactgaaacggaaaatcggcgactatgccaccgccgcggccgcggtcgttctcaccatgagtggcggcaagtgcacctcggcttcgatcgggctgaccaacgtggccgatacgccgctgtgggctgaagaagccgccaacgcactggtcggcaccgcgctcgacaaggcggcgctcgacaaggccgtcgcgttggccgaggcgatcaccagtccggcggcggatggccgcggtcctgccgaataccgcaccaagatggctggcgtgatgctgcgccgcgccgccgagcgggcgaagtcccgcgcgaaaaactag

SEQ ID NO: 404 - DNA, 501 bp, BradyrhizobiumColbertium
atggcgaaagcccatatcgagctgacgatcaacgggcagccggtggaggcgctggtcgagccgcgcaccctgctgatccatttcatccgcgaacaacaaaatctcactggtgcgcacatcggctgcgacaccagccattgtggtgcttgcaccgtcgatctcgacggcatgtcggtaaaaagctgcacgacattcgccattcaggccaatggttcgtcgattacgaccgtcgagggcatggcggccgcagacggcacgctgagcgcgttgcaggaaggcttccgcatgatgcacggcctgcagtgcggttactgcacgccgggcatgatcatgcgctcgcatcgcttgctgcaggaaaatcccaatccgactgaagaggaaatccggtttggtatcgcagggaatctctgccgctgcaccggctaccagaacatcgtgaaggcaattcaatacgcggcagccaagatcaatggcgtgcctttccaggaggccgcagaatga

SEQ ID NO: 405 - DNA, 741 bp, BradyrhizobiumColbertium
gtgccggttgcacgcgcgtttcgatggtcgaacttggcgtccttggcagcgtccgccgcgcttgcccttggcggctgcgtgcagacgaccggtcccgtcgcggtgatgcagccgcgtcccgatctcgactccatggcctatggccagccttacaatgcgccgcagccggtcgtcgttgccaacaacggcggtggcgccatcgcggcgctgagcaactcctttgcagcttcgcccgcacccatgccggtcggctactccgcgcccatgacggtgcgccaaggcgcatcctatcatctcgacgccggcgacaagcttcgcgtcgtcgtctacggccaggaaggtctcaccaacagctatgcgatcgacgccggcggctccatcaccatgccgctgatcggcgcggtgccggcgcgcggccgcaccacggcggggctggccggcgagatcgccgcgcgcctgcgcaacggctacatccgcgagccttcggtagcggtggagatcgagacctatcgtcccttctttatcctcggcgaggtcctcgcgcccggccagtatccttacgtgccgaacatgaccgtcgagagtgcggtcgccatcgccggcggcttctcgccgcgcgccaagcgcgacatggtcaccgtcacgcacagcgagaacggcgcctcgatgcgcgccgtggtgccgctcggcacgcccctcgcccccggcgacaccgtgttcgtcggcgagcgctggttttaa

SEQ ID NO: 406 - DNA, 672 bp, BradyrhizobiumColbertium
gtgggacaggacatcaagctgacggcctccgacaatttccagctcggcgcctatcgcgctgatcccgcaggcagcgcgaagggcgccgtcgtggtgatccaggagatcttcggggtcaatcaccacatccgctcggtctgcgaccgcctcgccaaggagggctatgtcgcgatcgcaccgtcgatcttcgaccggacgtcgccgaacttccagtcgggctattcgcccgacgagattgcggaggcccgcaagttcgtcgccaatccggactgggccgcgatgctgcgcgacacgcaagccgcgatcgatgccgcgaggagcgtcggccccgtcggcatcatcggcttctgtctcggcggcagcatcgccttcctcgcggcaacgcggctctcggggctgaaggccgcgatcggttattacggcggcgcggtggtgcgctttgccgacgagacgccgaaggcgccgacgcagctgcacttcggcgagaaggatgccggcatccccttgaccgacgtggagaccatcaagtcgaagcggccggatgtggaggtcttcgtctatccgggtgcccagcacggcttccattgcgacgagcgcgccagctacgacaaggccagcgccgacgtcgcctggccgcgcagcatggcgttcttcgcgaagcatttgagatag

SEQ ID NO: 407 - DNA, 264 bp, BradyrhizobiumColbertium
atgccgccgcgccagcccttcgtcacgaccttgtcgaacaacacgccgctcgccttcggcatggatgccggagagaccgcgcgtgccctcggccagcccctgcaatatgtgcgtggccgtcccggcaacgaaatctatctcgcgctgcgcaacatcggcggcagcggattgcttccccaccgccaccgcctgttcctgcagttccgtcatggacggctggcaggatggaaggaggattacggtgagaactggatgtgggagtga

SEQ ID NO: 408 - DNA, 153 bp, BradyrhizobiumColbertium
atgccgaaggcgagcggcgtgttgttcgacaaggtcgtgacgaagggctggcgcggcggcatggcgccgaacggttcggcctgcgcagatatcgacagcaacgtcgcgcccgctgccagtatcgcccgcttcatcgccaatgcccttgcttga

SEQ ID NO: 409 - DNA, 765 bp, BradyrhizobiumColbertium
atgccgaggatcgatcgggacggcgtcggaatccactacgaggttcatggcgaggggccaccgctgctgctgacccatggctattcctcgacatcggcgatgtggcatgagcagatcgaggcgctcgcgaaagaccacaggctgatcttgtgggacatgcgcggacacggccagtccgattatcccgacgatcccggcgcgtacagcgaagcgctcacggtcggcgacatggcggcgatcctcgatgcggtcggcgcagagcgcgccatcatcggcggactctcgctcggcggttacatgtcgctggcgttctaccgcgcgcatccggagcgcacccgcgcgctcttgatcatcgacaccggccccggtttcaagaaggacgacgcacgcgagacctggaacgcaagggcacttgccactgccgacaggctcgatcgcgaaggtctcgatgtcctgaaggcggcgacgcgcgagcgcgccaccgccagccatcgcgacgccaagggtctcgcgctcgctgcgcgcggcatgctgacccagcgcgatgcgcgcgtgatcgagctgctccccgacatcaaggtgccctccctgatcgtggtcggcgccgacgacacgccgttcctcgcggcgtccgactacatggcggccaagatccccggcgcacaaaaggtcgtgatccccgcggccgggcacgccgtcaacatcgaccagccccaggcttttgttgacgcggtcgtgcctttcctgaagaacttgccggcatag

SEQ ID NO: 410 - DNA, 294 bp, BradyrhizobiumColbertium
gtggattccgacgccgtcccgatcgatcctcggcattgcttccgcccttcttttctcgccgcgacaccgctggaccttctcccacaaggggagaagggacgtgcccgcggcggcggttgtactctaacgcgccaagttacctcaaagaaactgcctcgatacgatggcacgcatgttcgccaacgctctctgttgcgtccagtcgctgcatcaagccccgctcttgcaatgcacaacctgtccgcgccgcgttgctttcgactcgttccaatttgcatttgcctccgcgcctga

SEQ ID NO: 411 - DNA, 456 bp, BradyrhizobiumColbertium
gtggatgcggcgaacgacacgccgctcctctgggcgatccgcgagcaattgcagatgaccggcaccaagttcggctgcggtgccgggctgtgcggggcctgcaccgtgcacgtcaacggcgaagccgtgcgctcgtgccagaccatggtcggcgacgtcgccggcaagaagatcaccaccatcgaaggcctttccgccaagggcgatcatcccttgcagaaggcgtggatcgccgagcaggtaccgcaatgcggctattgccagtccgggcagatcatgcaggcagcctcgctgctcgccaggaatcccaacccgaccaaggaggaagtggtcgcgcatatggacggcaatctctgccgctgcatgacctattcgcggatccagaaggcgatcatgcgcgccgcatccgagatgcgtaccgcgtccgccacctccggcgagcggaggcccacatga

SEQ ID NO: 412 - DNA, 2286 bp, BradyrhizobiumColbertium
atgaacgagcacgtgaagaacgtcgtccccgcgacgaccgatctcagccgccgctccttcctggtcggcaccgccgcgaccgccctcgtgctcggctatgccgcgctgcccggcatcgatgctgcggctgccgcggcaccggccagtttcgagccgagcgtgtggtacgcgatctcgccggacggtctcgtcaccgtgacctgcggcaaggccgatatgggccagcacatcgcctccaccatggcccagctcgtctgcgaggagctgggcgcgaaatggagcgacatgcgcgtatcgctcgcctccaacgaccccaagttcaacgatcccgtcctgggcgcgcagatcaccggcggcagctggtcgaccatgatgaattttgatgccatgagccgcgcgggcgccgccggccgcatggcactgacggaaggtgcggccgccgcaatgggcgtgccggcgtcggagctcgtggtgcgcgattccatgatcgtgcatccgaaatcgaagaagcagatgtcgttcgccgagatcgtcaagagcggcaaggcgaccaagaccttcacgcccgatgagctgaaggcgatcaagctgaagacgcccgaccaatacaccatgatcggcgtctcggtgccgcagcttgatattccctccaagaccaacggcacggccaagtacggcatcgatgtgatgctgcccggcatggcctatggcgcgttggtcacgccgccggtgcggttcggcgccaccgtgaaatcggtcgacgacagcgcggcgaagaaggtgccgggcttcatcaaggcagtcacgctcgacgacaagaccggcacgacgtcgggatgggtcgtcgccgtcgccagcacctacgccaacgccaggaaggcggcgcaggcgctgaagatcgcctatgacgcgggtccgaacgccaaggtgtcgagccagtcactgctcgacgaagccaagcggcttcagaagctcgaggattccggccagttcttcgtcaaggacggcgatcccaatgcagccttcgggtcggcggccaaggtggtggaggccgagtacaccaccagcatcaacatccacgcgccgctggagccgatgaacgccaccgcggagttcaggggcgacatcctgcacgtctattccggcaaccagttcgcgacgcgctccggcgcgatcgccgcaggtgcggccgggatcgatccgaagttcgtggtcatgcatcagcattggcttggcggcggcttcggccggcgtctcgatgccgacatgatgattcccgccgtgcaggcggccaatgcggtcggcaagccggtcaaggtgatctactcgcgcgagaacgacatgacgatggatttctcgcgtccgctcacctaccagaaggtcaaggccggcgtggacggcgacggcaagctcattgcgatcagccacgacgtggtctcggcctggccgaccgcgcgctggggaatccccgatttcctgacgccctcggtcgacaagaaggggccgcttgattccttcacggtgaacggggcggacttcttctacaccgtgcccaaccattatgtgcgcgcgatcaagaacgaactcgcgcacaacgccacgccgtccggccagctcaggtcggtggcgccgggctggaccttctgggcggtcgaaagcatgatcgacgagatcgcggccgcgaccggcaaggatccggcgcaattccgcatctcgctgctcgacggcgccggcaagaacgacggcggcgcgcagcggctgcgcaacacgctgctcgccgcgatggggctgtcgggctacggcactaggcaattgccgaaaggcgagggcatgggcgttgcctgcgtgtcgtcgcaggagcgcgccagcgcgagctggacggcctgcgtcgcccatgtcgctgtcgcgccgtcgggcgcggtgaccgtgaagaagctcacggtcgcaaccgacgtcggcacccaggtgcatcccgacaacatccgcgcccaggtcgagggcgcggcgctgtggggcctgtcgctggcgatgtacgagaaagcgacgctcaaggacggtggcatcgagcagaccaatttcgatggctatacgcccttgcgcatgagccagacgcccgagatcgcggtggccgtgatcgccaacggcgagaaggcaaccggggtcggcgagcccgcggtgacggtggtcgcccccgccatcggcaacgccatcttcaacgcctcaggcgcccggacgcgggcgctgccgatcacggcagaggcggtgaaggcgagcatgagggcgtaa

SEQ ID NO: 413 - DNA, 1095 bp, BradyrhizobiumColbertium
atgaacgccgcagccaaacccgccgccaaacgtcggcttcttctcgcctccgatcgcagcgacggaagcagcgagctcgccagcattctgacggcggtcggcgacgtctccacggtgaagacggaagacatccccgcccagccggcgcgcgatctctccggcctcgtcgtcgacatcaacctgcgctcgcccgatagcgtgcagcgggttcgcaacaagctgcgcggcgatgcctaccgttcgatgccgcggctgttcgtgctcgcggacgccctgcatcatggcaccatgcaggcctgggcgctgggggccaccgataccatctcgcggccgcttcaggccgaggccatcctgcagcgcattcgcgccgccttcccggacaccgccgcctatgacgcgaccgatcgcggcaagacgctcaaccgcggcgtcgaggcggcgcacgcggtgctcaccaagatgttcgagaagctgccgctcggggtgccgctgaccttcgacgacgtcattgcagccgagagcaagatcctgaaggcgatcaagcattcctcgctgcgcgaatggctcaccacggtcggttgccaccatgtcggcagctatcgtcattgcctgttcgtcaccggcttcgcggtcgccttcgcccagcatctcggcatgcgcgaggacgaccagcgccgcctgacccgcgccgcgctgctgcacgatgtcggcaaggccttcgttccggcctggctgctcgacaagccgggcaagctcaccgacgaggagatggccgaggtccgccagcatccgcggcgcggctatgaggcgcttgccgagcaaggcggtttcccgccggaaatgctcgacgtcgtgctgcatcatcacgaattcctcgacggctccggctatccgaacggcctgtcgtcgaaccagatcagcgacatcgtgcgcctcaccacgatcgtcgatatctacgccgcgctggtggagaagcgcgcctaccgcatgcccttcacccactctcgcgccttcacgatgatggaaggcatgggcggcaagctcgatcagcagctgctgcaggcgttccggccggtggcactgggatcgttctga

SEQ ID NO: 414 - DNA, 1581 bp, BradyrhizobiumColbertium
atgccagttcaacagaccgccgccggaatcgtgagcccgttcgacgggctcgacgtgccctggctgctcaagctgcgcgccgaggtccggcgtgatcatccgttcctgatctgggctccgttcgacgcgccggcgcgacgctggagctacggcgaatttcacgagcgggtcggtgcgctcgcggcggggctggccaggcgcggcgtcaatccgggccaatacgtgctcattcatctcgacaattgcatcgaggcgatgctggcctggtttgcctgtgtcgaattaggggcgatcgcggtcaccaccaacacgcggtcggcgccggccgagatcgagtactttgccgatcattgcggcgcggtcgccgcgatcacgcagccgtcctatgcggacctcgttgcgcagaactgccgcaacatccgatggatggcggtgatcgcgcatgacgcaggcgctgcgccggcgcaagcggtctcgcgcggtgacagtttcgaatccctgttcgccgacagcgccgaccgacccaggcgcgcgactgatccgctggcgccgtgcagcgtgcaatacacgtcgggaacgacgtcgcggccgaaggcggtgctgtggacccatgccaatgcgctgtggggcgccaagatcaatgccgcgcatgaggatctgcatgcgagcgacgtgcaccagacctatctgccgctgttccacaccaatgcgctggcctattccatgctggcgacgctgtgggtcggggcgacttgcgtgatccaaccgcgcttctccgccagccggttctggagcgtcgcgcgcgagcacggcgcgacctggacctccacgattccgttctgcatgaaagcgctgctcgagcaggagatcccgaacgaccacaagttccggctgtggggcacggcgatcaacgagccgccggccttcgccgccttcggcatcaagatgatcggctggtggggcatgaccgaaaccatcacccacggcatcgtcggcgagatcgaccagcccaacatcccgatgtcgatcggccgggccgcgccggaatatcagatccgcatcaccgacgacgacggccggccgacggaagtcggcggcaccggcaatctcgcgatcaagggaattcccggtctgtcgctgttcgccgagtacctgcacaacgagaaggcgacgcgcgagagctttgacgagcacggcttcttcctcacgggcgatcgggtcgagcggcttcagaacggcttcatcaagttcggcgaccgcgccaaggacatgctgaaggtcggcggcgagaacgtcgcggcctccgagatcgagcaggtgatcgcggtggtgcctggcgtgcgcgaggcggccgtggtggcgaagacgcatccgatgctggacgaggtgcctgtcgtcttcatcatcccgcagggcggcgtcgcgggcgctgcgccggatctgcatgatcgtgtgatggcggcctgccgcgcaggcctcgccgacttcaaggtgccgcgcgagatcaggctcgtcgacgacatgccccgttccacgctggagaaggtggcgaaggcggagcttcggaagatgctggggtag

SEQ ID NO: 415 - DNA, 411 bp, BradyrhizobiumColbertium
atgccgatcaaggttcatgccctggatcatctcgtgatcaatgtcagcgatgtcgcggtgaccgctgagtggtaccgcaagattctcggcatggaagtcaagctgttcgaccccggcggcggcaaagcgccgcgcactttcctcgagttcggtaaccagaggatcaacgtccggcaacgcgatgccgacaaggtggactggttcaccgccggccacccgactgccggcagcgaggatctgtgcttcctcacctccgcgacaccggatgaggtggtggcgcatttgcaggcacatggcgttgcgatcgaggccgggccgggcccgaggcaaggcgcccgcggcacgctgcgctcggtctattgccgcgatccggatggcagcttgatcgagatatcgtcatacgagggttga

SEQ ID NO: 416 - DNA, 975 bp, BradyrhizobiumColbertium
atgatcactcgccgtaccgcgctgggcctgcttgccgccagtccgcttgcagccaccccgctgtcgaaggccctggccgccgattatccggcccgtccggtgaaatgggtggtcggctatccgccgggcggggccaccgacatcctggcgcggctgatcggccagcggctctcggaaaggctcggccagcaattcgtggtcgagaacaagcctggcgccgggaacaatatcgcgaccgaatcggtcatcaacgccgagccggacggctacacgctgcagctggtcaaccccgccaactacatcaacgcctcgctctacaagaacctcaagttcaacttcgtgcaggatatggcgccggtcgcctcgttccagcgcgtgccgaacgtgatgaccgtgaacaaggacgtgccggcgaagactgtcgccgagttcatcgagtacgtgaaggccaaccccggcaaggtgaacatggcctcgtccggcaacggcacctcggtgcatctgtccggcgagatgttcatggccatgaccggctgcaagatgcagcacgtgccctatcgcggcgccgctcccgcgctcaccgacatgctcgccggccaagtgcaggtgatcttcgacaacatgccgtcggtcatccagcacgtccgctccggcgcgttgcgcgccatcggcgtcaccaccacggaacgctcgccgcagctgcccgacgtgcagccgatcgccgacaccgtgaagggctacgaggcgagcgcgctgttcggcatgggggcgccgaagaacacgccgaaggagatcatcgccaagctcaatgccgaggtcaacgcggtgatcaaggagcccgacatggccaagcgtctggtggagctcggcggcgagccgcgggcgcagacgcccgaggcgttcggcgcggagatcaaggccgagaccgagaagtggcggaaggtcgtcgagttcgcgggcttgaaggtcgagtag

SEQ ID NO: 417 - DNA, 270 bp, BradyrhizobiumColbertium
atgcgcaaggcaatgctcgcaatgatcgcactggctggattgggagtcggcagcctcgccggcaccgatccagccgcggcctatgattatccctggtgtgcccagggaagaggctacggttaccccggtgaatgcgcctaccggaccctgcaacaatgtcaggcgagcgtgtccgggcgcctgctgacctgcgggatcaatccgcgcgcggcgtacaaccagcagcggccggtgcgccggcatcggcatgattactacgcgccctattag

SEQ ID NO: 418 - DNA, 279 bp, BradyrhizobiumColbertium
gtgagcaggattcaatgcgctctggcggcgctggccgccatctgtctgccagcctttgccggccttacgccgaccgcggcccgcgattatccctggtgtgctcagggcggcgagtacgactatcccggcgaatgcgcctacagcacctacgagcaatgccaggccagcgtgtcgggccggctgctgttctgcggtcgcaatcctcgtttcgcttacgggctgaatcggccgcctcagccgcggccgcaccggcacgtgcgggccgtcgcgccatactga

SEQ ID NO: 419 - DNA, 1224 bp, BradyrhizobiumColbertium
gtggttgcgttcgttttgcaggtgagtgtctccgcggccaacgcggcgggtccgttcggaaccgtcaatgtcggcaactggatcggcggcgctttcagcaatgatgagacgggcgccttctcccattgcgcggcgacggcaccttacgccaacggggtgagtctcgtcgttgcgcagaatgcggcaggctcatggctgctaagctttgccagccccagctttcgcttcaacaagggcgatacggcgcccatcgacttcatcttcgatgggcaggagcaggccagactgttcgcgacctccaatgcacccaacatggtgacgaccatcctgccccccagcgtcgctcgcaccttccagaaggcaagcctgatggtggtgacgaccaatggcagcaagccgctccaattcgtgctgacatcgacggcgcccttggtcgctgcgctggcgaattgcgtcacgcgggtgaaagccgatgggctcaacaaggcgggagatttcgcaaagggcagtgcgaagcctgcggccacggcggacaaggcggcgtcaccgccggccagcaagtccggcaagtccaggagtggtactgggttcgtggtcagcggcaatggacacgtcgtcacgaaccatcacgtgatcgacggctgcagcgacctcaagggcaatctgaccggcgaggccgcggttgcgttgcgcgttgtatcgatcgatgcaatcaacgatctcgccctcctgcaggcgccgtcgacggcgacgttcagagattttgctcgaatccgcgaccgctcgatacgctctggcgactcggtcgtcgcgatcggctttccctaccgcggactgctgagctctgacttcaccgtgaccaccgggatcgtgagttcgctcagtggcatgcggaacgattcgcgtttcctgcagatcagcgcgcccgtgcagcccggcaacagcggaggcccgctgttcgacaccaccggccagatcgtcggcgtggtcacgggaaaactcgacaatctgcggattgcagtcgctaccggtaatatccccgagaacatcaacttcgccatcaagacgggcgcgctgcgtgacttcctcgacaattccgtagtgccctaccagaccgcagagccgaagggcgaactgaaaaccaccgagatcgctgccaacgcccgggcctacacaatgctgatctcatgcaatggcacgggacaagccgatgccaagcggtag

SEQ ID NO: 420 - DNA, 618 bp, BradyrhizobiumColbertium
atgcgcgatctcgacaaggcactttccgacatcgttgcgatccgcagccagatcgctgcgggcactgcattccgcgggtacggcccggcgaccatggcggcgaccggcgccgtcgcgctcatcaccgcggtcctgcaattctggctcttggatgatcccaccggcgagccgctcggcttctttctcggctggttcgttgcggccgcgctctcggcactgatgatcgggatcgagatgcgcgcgcgctcgcgccgtcaccattcaggccttgccgatgccatgatccatcaggcggtcgagcagttcctgccggccggcgttgccggcgtgctgctcgcggtcgtgacgtggaagttcgccagcgagacgttgtggctgctcccgggactgtggcagatcctggtttcgctcggcatttttgcctcgatccgctcgttgccgcgcaccgtcgcgctcgccggcgcctggtatttcctgtccggcttcgcggtcgtggtgctcgcgagccaaacccacacgctgtcgccatggaccatggggctgcccttcgtgatcgggcaggcggtgatggcggccatcctgcatgtcgcgtccggagatgacgatgccgaagactga

SEQ ID NO: 421 - DNA, 375 bp, BradyrhizobiumColbertium
atgccgaagactgacagcgcgcccttctcttacgaaggactcgatcgcgtgatccacgagaaggcgaggctcggcctgttgacctcgctgatggcgcatcccaaggggcttgccttcggcgatctcaagcagctctgcggcctgaccgacggcaatctcagccggcacctcgccgtgctccaggaggccggtctggtcgaggtgaccaagggctacgagggcaaccgaccgcacacgacctgccgcctgaccaaggccggccgccggcgcttcctcgactatctcgccgtgcttgagcggctggtgcgcgacgcagcgaaagccgccggccgcgaggcgccgccgctcgggcgcctcggcatcgcatcgacctga

SEQ ID NO: 422 - DNA, 741 bp, BradyrhizobiumColbertium
atgcaaagtgaaacaacgtcccgccacgagaagcttcatgtcggcatcatcatggacggtaacggcagatgggcgacgcggcgcggcctgtcgcgcgtgcgcggccatgaggcgggcgtcgagaccatccgccggatcgtcgaggcagcacccaagcagggcatcggcgcactgacgctttacgcgttctccaccgacaattggcgcaggccgaaggccgaggtcgccgcgctgatgaccttgctgcgcttctacctcgccaacgaggtgcagagcctggtcaagaacggcgtgcgtctcaccgttatcggccgccgcgatcgcttgcctgagggcatcgccaccgcgatcacccgcgcggaggaggccaccgccgatggtggcacgctgcatttgcgcatcgccgtcgattattccgcgcgcgacgccatcctcaatgccgcggcaaaggcggctgcgctcaccagcctcacccgcgaagccttctcccagctcgtcaccggcgaggccggcctgcgcgatgtcgatctcatcatccgcacgtccggcgagaagcgtctatcggacttcctgctctgggagggtgcctatgccgagctgcacttcaccgagcggatgtggcccgaattcgacgcaggtgatcttgccgaggcgctcgccgccttccatggccgcgagcgccgcttcggcggcctgcgggcgatcgtgccggaggaggtgccttcgctctctcgggtgtga

SEQ ID NO: 423 - DNA, 828 bp, BradyrhizobiumColbertium
atgcgctgcctggtcgtggccgacctgcactattcgctgcctcagctcgactggctggtcagcgcggcgccgcaattcgacctcgtgatcttcgccggcgatgcgctcgacatcggctcgatcgtggatttccgcgcccaaatcctggtggtgaagaaataccttgcgcttctcgccgcgacgacccgcgtgatcctctgctccggcaatcacgacctcgacgggcgcaacgcggagggcgagaaggtatcgcgctggatctcggagatgcgcgagctcggcattgcctgcgacggcgacagcttcagcatcggcgacacaagcttcacggtgtgcccgtggtgggacggaccgctcgtcaagcaacggcttgtcgagcagttgcgcgatgccgccgcaggccggaagcagcgctggatctgggcgcatcatgcgccgccggcgggttcgccgacaagctggggcggcaagcgcttcttcggcgacgtcgagctggtgcagtggatcaagcaatatcagccgtccatggtgatctcgggtcatgtgcatcaatcgcccttcatcggcgatggatcgtggttcgaccggctgggccagacatgggtcttcaacaccggactgcaacccggccgccccccgacctacatcgtgctggacctcgacgcggacaaggcgttctggcttgcggcgggtgaggcgcaatggatcgacctgaatgctccgctacagcgccccgccgctgccatcgaggcgcctccggcctggctcacattcttggatcggattgccgatccgagcctggcgagacctcaagcggcggcaggttga

SEQ ID NO: 424 - DNA, 897 bp, BradyrhizobiumColbertium
ttggagaaccgtccgcgagcgatcgagaatgtccgggaatttcaaacgacacaaagcaagaagcagaccaatacgactgctcgcttcctcattccaccgcgcgacagcatgcttggacgcgtggcacaggcaaggctcaggcagtgcgagggctggaccggatcgccgaactctgatgtccttgcataccctcaaccgctcgtgcccccaatgactcccttcaagaccattcgcgcccgcgccgagaaacgaaagggcgggcccaaggcgctcgagaaactgctgccggcaaagcctgacctcaagcggttggcgaggctcggcgatgaccgcatcctcgccgaaatgaccaagcgggtgttctgcgccggttttgcctggagcgtgattgattccagatgggacggctttgaagacgccttcctgcatttccaacccgccacgctcaccttccagcccgaagactattgggagggcctgctggccgacgcgcggatcgtacgcaacggcgccaagatcatgtccgtgcgcgacaacgccgccttcgtgcaggacatcgcgaaggagcacggcagcttcggcaagtttctggcgaagtggccgtcgtccgacgagatcggcctgctcgatctgctcaccaggcgcggcagccggctgggaggcaacaccggccagatgttgctgcgcttcgtcggctgggacggtttcgtgacgtccaaggacgtcgtggcgtgcctgcgcaatgcaggtctcgatatcgctgaagaggtcaagtcgaagggcgatctcgccaaggtgcaggcgcagttcaacgcctgggccgaggagaccggcctgccttacacttatctttcgcgcatctgcgcgctgtccgtcggcgaggtcaaaggcaagtag

SEQ ID NO: 425 - DNA, 294 bp, BradyrhizobiumColbertium
atggcaaaagcctattgggttgccacgtatcgcgcgatcaaggatcccgagtccatggcggcttatgccaagctgtcgcgcccggccatcgaagcggctggtggccgcgtgcttgcgcggggaatgccggccgctgccttcgagcttggccaaatggagcgcgtggttctcatcgagttcgacagcgtcgagagcgccaaggcggcgtatgcgagcccggcctatcagaaggcacacgatctgctcggagacggcgccgaccgcgacattcgggtcgtcgaagctgctgaatag

SEQ ID NO: 426 - DNA, 294 bp, BradyrhizobiumColbertium
atgaagctcacatccgaacaggtgaagcagaccgtcaaccagctcggcgctcaggtgctgcccgacgagcatcccgcgatgccgcagctcaacagcatgttcggcgagcacaccttcttcgtcgacgagatgggactcaaggtcctcgagccgacgggatcgcccgataccgaacgccacagcggcgaggtcgtcagcctggccgattggggcgattccgatttgacgcgcctgatggcacacgagcccgagccgactggcgtgatcgttgtgttcgagcacgtgcggcattga

SEQ ID NO: 427 - DNA, 1401 bp, BradyrhizobiumColbertium
ttgatccgcctcgggctgcgcttcgaagaccgcatcgaggagcggcggtttgtcgaccaatacgtccgaggcagcctcggctggacgcagatcgcgatgctgctcggcgccgccacctatgcgggctacacgctctgggattgggtgctctaccccgaagtggttccgacgacgctggccatccgtggcggcacggcgctgttcgtgctgctgccgttgacggcgctgttgtcgcgacgatggatgaagccgtgggccgagacgatctttctcgtctattgcgtcattcccggctgcatcctgccgagcatttatctcgtgctgccgtccggcttcacctttgccgcgcccggcatgatgatgatcatcctgttcgtctcgaccatgctgccattgcggatcggctcgcttgcgatcttctgcctgctgtcatgggttgcgctgctggtcgccgagtcgttcgcgttgacgatgccggcgggcctgagattcatcaatcataccctcgtcggcaacgcctacgcattgtcgctctacgccgtggccgcgcgcgagtaccgggcgcggaagcaattccaaacctccgaagcgctgcagcgggagaaggaacgctccgagaaatcgctgcgcgatctgcgcgcgacccaggagcaactcgtgcagacggagaaactcgcctcgctcgggcaattggtcgctggagtcgctcacgaggtcagcacgccgctcggcctcgccctgacgacctccaccaccatgcagaccgatctgcagacgatggcagatgcactgggcggagcatccgtccggcgctccgacctgacgaaagggatcgaccggctcaggcaaggtctcgatctgaccttcgaaaatctgcatcgcgcatccgagatggtgcacagcttcaggcaggtcgccgtccatcaagccgatgaggaccggcgcgagttcgaactcaaggattggctctcggagttgatgtccaggctcgggccgctgctgtcgcacaatggcctggcggtcgaggtccagtgcccagcgggcatcaggctcaacagctaccccggagcgcttgctcaggtgatcagcaatctcgccctgaatacggcagggcatgcgtatcccggcaaaagaggcggcaggtttatcctcacagtcagccagccggacccgaaatcagtccgtctggtctgctctgatgatggcgtcggcatcccggacgaattgcaggcgcgcatcttcgatccgttcgtcacgacaagtcgggacagtggtcattccggcctcgggctccacatcgccttcaatctggtcgcctcatcgttgaacggccggctgcggctcgagcgcacgaagcatccggggacccggatcgccatcgagatcccgctccaggcatga

SEQ ID NO: 428 - DNA, 747 bp, BradyrhizobiumColbertium
atggaggcggtggtcgtcctgttcaccattgtcgcgatcgttggacttgcaacggccgcagcaaccgcggcgagaggcggcaggaccaagcccgcagaacgcagcaatggcaggtctttgaccgcgctgtgtggcctcgtggcgcagggaacccagcgcgtcctcgcgctgttacaagcctgctccggcagttcggccgacacatgccgagatcccgcaatgatcgactggtcctccattctcattccgcagaattccatcgccgaagtcgtgttgcgggggacgctgatctatttcctgctctttttcatccttcgcctcttcctcaacagacagtccggtgccgtcggcatcccggacctactcgtggttgtcctcatcgtcgaggcgacgacggatgcactagggcgcaacgaatcggtcaccgaagcggcgatcctgatctccacggtcatgttctggagctacggcctgcaatggctcgcctatcatgtgcccgccttggagatcctgacaacctctcccaaggtcaaactggtcgagaggggtcgaatgctgcgccgtaatatgcgcaaagaactggtgacggaagatgagttgaaatcgttgctcaggacgcagggcgtagaagacctcaacatggtgaaactcgcctgtctcgaaagcagcggtgatatcagcgtgatcacatacgacaaggctgaacccgcttccggtcgctcgagcaaggcgaaggagcttgcctga

SEQ ID NO: 429 - DNA, 1101 bp, BradyrhizobiumColbertium
atgagcgaatccgacagggtgaccggcaaagcctcgcgggtgcgcaagatcatccatatcgacatggatgccttctatgcgtcggtggagcagcgcgacaatccggagctgcgcggaaagccggtcgccgtcggaggctccgcgcaacgcggcgtcgtcgcggccgcgagctacgaggcccgcaggttcggtgtgcgctccgccatgccgtccgtgacggcgaagcggcaatgccccgatctgatcttcgtcaagccgcgcttcgaggtctacaaggccatcagccggcagatccgcgacatctttgccgagcacacaccgctcatcgagccgctgtcgctcgacgaagcgtatctggacgtgacggaaaatctccaaggcattcctctggcgcgggacatcgccctgcgcatccgcgagaagatcaaggccgagacaggtctcaacgcgtcggccggcatctcctacaacaagttcctggccaagctcgcgtcggaccatcgcaagcccaacggccagttcgtgatctcgccggagatgggaccggccttcgtcgagacgctcccggtcggcaagtttcatggcataggccccgccactgccgcgaagatgaacgcgctaggcatgttcaccggcctcgacatgcgcaaccagacactggagttcatgaacgcgaccttcggcaagtcgggcgcctattattactggatctcacgcggcgtcgacgagcggccagtccgcgccaatcggatccgcaaatccatcggcgcggagaacacgttctccgtcgatctcgccgaacttgatgcgctggtcggagagctcaggcctctcgtcgacaaggtctggcgtcactgcgaggcgaccggcaatcgcggccgcaccgtgaccttgaagatcaagtttgccgacttcgagatcatcacgcgcagcaggtccgtcgcagcggccgtcgcaggccgggacgagctggagcggctggcctgcggcctgctcgaagccgagatgccgctgcccaagcgcgtccggctgctcggggtctcgctgtcttcgctcaaggccggcgacgctccggaaccgcagctgacgctgggcatctga

SEQ ID NO: 430 - DNA, 432 bp, BradyrhizobiumColbertium
ttggtcttcgtggcaggcgtggtcggcatcggttggctcatcggcgcaaccaatctgcctggggaatggtatgccggtcttgccaagccgggcttcgtgccgccgaactgggtgttcccgataacctggacgattctctacgttctgatcgcgattgcgggctggcggacatttcgtcgcgagccccggggcaaggcgatgctggcttgggccgcgcaaatggcgctcaatttcgtctggtcgccggtcatgttcaccatgcaccagatcggggccgcgctcgtcatcctcatctgcctgctcgtcgcgatcgtgacttacatcagtctcgagctgtcacgcgaccgtctggccgccgccttgttcgtgccctacgccgcctgggtagcgtttgccggcgtgctcaatgcggcgatcttgcgtttgaactga

SEQ ID NO: 431 - DNA, 210 bp, BradyrhizobiumColbertium
atgcaatacagctccgagctcattcacaccatgcgtcaagcgctggaaaccgtgatggcaagcgttccggcccatcaatccgtgttcggccttaaggcggccgtcgccgaatacatcctgcacgccgccgcacacggccagacgtcatatgacggactggtgacggccgcgtccgaccagctccacgtgatcattgcgatgctgacgtga

SEQ ID NO: 432 - DNA, 1272 bp, BradyrhizobiumColbertium
ttgccgaagctgaccaagcgggtcgtggatgccgcacataccaccggaaaggacctcgttatttgggacaacgagctccggggctttggcctgcgcgtgaaaaaaagcggggccaagtccttcttggtgcagtaccggaacgccaacaaccgcagccggcggctcaccttgggacgctacggcgtgctgaccccggaggaggctcgccgagacgccaagctggccctcgcggacgtggtgaggggtgcagatccggtcgaaagcaagaagctcgcccgcggcgccatgaccgtagaggaactatgccgcgagtatctggataaggccgagcggggcctcattctcacgcggcggggcgaggtcaagagcaagacgaccctgtacagcgacaaggggcggatcgagcgccacatcatcaagctggtcggcaagaagaccgtgaagggcttcacctccacagacgcaaagggcctccagcgcgacatcatagccggcaaatcagcggccgacgtaaagaccaaaacccggggccgggcgattgtgaccggtggaaggggaacagcggcccggacgatgggcctgcttggcggcatcttcagttacgccgtcgacgagggctatcggcccgacaatccggtgagtggcattcggcgaccaaaagaccaaaccagagaatggcgcctggatgacgccggctatcgccgcttgggtaagtgcctcgccaccgccgaagcaaacggcgagcactggcagcgcgtcctcgccagccggacgtccgccatgacgggctgccgattggacgaggtggaaggtttgctgaagaccgaggtcgataccgtcgggatggccctccgcttgggcgacagcaaaaccggcaagagtatccgccctgttgggcccgccgttatcgcggtcctgaaggtggcgatgtccaagtccaagtcaaagtatgtgttccccgccatcacgaccgacgcgaaacatcatactggcttgacgcggtggcttcagaaggtgtcggccaaggacgtcccggggatcaccagccacggactgaggcattccttcagctctaccgccgaggatctcgggtacacgctgcctaccatcaaggccctgatcggccattccaagaaggggaacgttacgatgggctacattcacaagatcgattcggcgctgctcgcagctgccgaccggatcgccaggcacatcgatgatgccatgaacggcaagaaacagagcaaggtcgtccagcttcggaaggcctga

SEQ ID NO: 433 - DNA, 153 bp, BradyrhizobiumColbertium
ttgctctccgtcggcgaggccgcctggagcgcagctcatcaggctttcgcgagtgacgaaaatccattggaaggggtcgctgccgatcccgaggttagacggatcatcgggtctcaactgacacaggtcgaaccgatcgcgaatgcgctctga

SEQ ID NO: 434 - DNA, 192 bp, BradyrhizobiumColbertium
gtgaccgacacgtacaacgttccctgctctcccaagaccctggcgaagctcgcctgcatcagctcggaaggtccgccctttcggctcgctgggcgcttcccgctttaccccgtctccgggctcgacgcctgggctcagaggaagatcggcccgttggtcagatcgacctctgaggttcgccgcgtcgcctga

SEQ ID NO: 435 - DNA, 192 bp, BradyrhizobiumColbertium
atgaaaaaacatagcaaacgcatccggcaatctcaatcggtttctgacctgccgctcttctcatggcgcgtcaccgttctgcagccgagcagccaagccggcctgttcgtcgcccgccgctaccgcgtgcacccggccttcgctgatctgatcgccaacctggcgggtctcggaagcgaggtgcgccaatga

SEQ ID NO: 436 - DNA, 312 bp, BradyrhizobiumColbertium
atgagctatcccgatagccccggcttcaaggccgtcggccccagcagcgaagcggctcagaagctgacgcagcgtgccaccacggttcgcgagcgcgtccttcagtttctccgatcgcagcatccggcgagtttcacgccggaccagatcgccgaccgcctcaacatcaacttcctgactgtcaggccgcgaatctccgaactgcacttgcagggagaggtcgagccagacggcacgcgaggcaagaacacgtccggaatgtcggcccagtgctggcgcgcggcgaagatttcagcgggagagccccgctaa

SEQ ID NO: 437 - DNA, 120 bp, BradyrhizobiumColbertium
gtgatcacgcagcagataaaggcagcaaggtcgctgctgggatgggagcaattcgaacttgccctgcaaagccggattcgcaaaatcccggcgttcgggctgaaaacagacgttgcgtaa

SEQ ID NO: 438 - DNA, 399 bp, BradyrhizobiumColbertium
atgaagagatcgaccgtcacaaccgtgcttgcgattgccgcctggggtgtcatttccctcatcggttatgccacgctgacgaaggttcaattcatctacacagtttatggaaagatcaaaccgttcctttttggggtcgacatggcgacatgggcgcatctggaacacgcgatcgccttcctgacgttgggctgcctcttcgccgcgacatatcctcgtcgcacagctttagtctgcctgatcgtggtcggcagtgcgctaacgttcgaggtgcttcagacgctgacacccgaccggcacggcaccctgttcgacgcattcgagaaagtcgttgcgggctgcgcagggattgccgcggtcaaggtcgtccagtttattcgagccaggaaacgcgcttga

SEQ ID NO: 439 - DNA, 318 bp, BradyrhizobiumColbertium
atgtctcgcctcgcggacgccgctatcgtggcgattgcgatcgcgagctttcgctcgatgtttcggtgggtccgcggctacgatgggcttgggttcggtgacgtaaagtttcttgccgctgcgacgttgtggatcggccttcgctcgctgccggtcgtgcttctggtcgccgttgtctcggcgctcgccagcgcattcctgctggcgtcgcagcgctacgaagtcgatggtcggcatgccatcccgttcggtccccatctcgccgtcgggctttggctcgcttgggtgttcgatccgatgggcttgctgtcgggatag

SEQ ID NO: 440 - DNA, 150 bp, BradyrhizobiumColbertium
atgacctcgtcggacaacccggtaggagcctgggtcgcattgaatgagcagtggtctggctggcgtctctccgagatcaaacctaacgagatcgtgctcgaggcggatggcgaaagacagaccctgcatctttccgtcttggcgaaatga

SEQ ID NO: 441 - DNA, 120 bp, BradyrhizobiumColbertium
ttggctcgctccccgttcatgaagacccctcgaagcgcgacgctggagtcgagcatcattctgttcggtggcggggacgcgccgaatattgcgggcgctgccgcgattgccggcgcctga

SEQ ID NO: 442 - DNA, 600 bp, BradyrhizobiumColbertium
atgactggcgagttgctccggcggcggctgattttctacgggctcaacggagcgatcgtgctggctgtctgttttgcaatcttcgagccaattgtctcgcatttcggtctgcgcaatgacgagatactggatagcgcagcgcaactcgctcaggtccggcgtgtcgcgcatgacacgttcaggctcgccaaggcttcgacaccggaagccgatccgtaccttgcgggtgccgaggaacggatcgccagtgccgacctccaagccaacctccaagcgttggcgggcgccaagggattggcggtgcaggccgtgcgcgggctgccgggacgtcaagccgcgcaatggcgcgccgttccggtcgggctggaggtggaggggacggccgcggcggtgcgggaactggttgccgcaatcgaaacccagacgccttttctgttcatcaccgacttgtcgctgcgaacacttgccgacggtgacgatagtcgtatgcgggtgagcttgacggtcgagggtgcgttacgcacgccaaagccctccccgggcggcccgctgttgagcgagattcggcccggcggcgaggggaaggcgacgagccgatga

SEQ ID NO: 443 - DNA, 651 bp, BradyrhizobiumColbertium
atgcgaaatcggtccctttgctcggtcgcgtcggggataatcgcgcccagcaaagtagccccggtgaaaaggcgtgagtcctccagaacccgcacgagccgggccgcatcggaagacaaccccgacagagccacagccccgcccgaaatccggagttcagtcaggaaagtgtggtccggaatgacgcgagacagttcatcccacgttgcgaggctgcccggcagggctttgagagccagtagaggaacgggtgatccggctgcgtgctgcccttgctggacgccgcgccgagcttcttggagttcgtcctcgagcgccgccgctcggcttgactgccaccactcgaatcccagcaagccggccgtcgtggcgaccagcagagcggctgcgaggacgcgcatcgtttggatcacccacggcgggtcgtcgtgccgaatctcgcgaagcggaacgaccgcgacggggacatccgttgccgacttgatcccgatggagtcgacctcgcccacttgcaagcccaatagaacgatcttggcctcagcccgatccttcggaataatccagtggcggaaagtcgccagcccactactcggctggccgtccggcgtgacgccatgccatatctcggccggctggaatggtgtgcggtga

SEQ ID NO: 444 - DNA, 570 bp, BradyrhizobiumColbertium
ttgatcgagctgctggtctcactggcaatcttgatgatcctgacaagctttaccgtcggtggattatctgcagctgtccgagcattcgaggcggacagccgcaatgggctcgaaatggcgacgactgctgctggagagaacctccgaggcctgatcgcctctgcgatcaatctgccgcaggctggcaacatttcgttcgacggccagcgcgaggagttgcggctggtcatcctgagcgagggccgcgcgttgcgcgggggcctgcaggacgtccgtattcggcgccgaaacgatgaattgattgtcgaggtcttcggatcgccgagagagaatggtgatcacaaattgccggtgtcctcgacgaccatcgtgaggggcttgagcgatatccgcttccgctactttggaaacgccgctacgaaaagtgaagcggcttggcgcaatgactggatcaagctcggtgggctgcctgccctggtcgagataagcctcaacttcaaggatgcggcgcgcaatggccctgccatggtcgtggcgcttcgaaacgaagggccttcgggaggctcctaa

SEQ ID NO: 445 - DNA, 159 bp, BradyrhizobiumColbertium
gtgacgcccgtgcagcttgggaaagccgctgtgcaggaccgtgcggctccgctcggcgcaatgctcgtgccgtcctgggtggagatcgtcgtgcaagacgaagccggattggagacaaaggtggctgtcctcaagctggcaccggggacggcgcaatga

SEQ ID NO: 446 - DNA, 384 bp, BradyrhizobiumColbertium
gtgctttcgatcatggcgctggtctcggccgccgtcctggtggccaggccaaggacggcagcagcgcgcgtcagcgcggaagctcgtgcgatcgcggcaaaccttcaactggttcgcagccgggctcgtgccggcaacgacgaaatcatcgtcagcgtcgatacccggaatcgacgcattggcgttgcccgcgccatgcgccaattaccgactggcatggaggtctcgttgactgtcgcgactagcgaacgtcatggcgccgtcggcggcgttcgcttctatccggacggtcgttcgagcggtggcgagattgtcctcacctatcacggacgctcggagcgcatcgtcgtcaactggtttaccggcaccgcgaggatcgagtga

SEQ ID NO: 447 - DNA, 1200 bp, BradyrhizobiumColbertium
gtgacctcaggcacgatcgtcgccgaagaacttgatgcggcggtcgaggcgctctatggctcaggccttacgccgatcgagacggtgctctcttcggatagcgcttcagcatcgcgaccgatcgggcggaacgcgcccggcttgcgctggcaaagctcacagcacctaggactgaaggaattatccgcgtttacgacagagcttgcggcgctggtcaactccggcgtttctctcgatgcatcatttcgggtgctggccggcgcgggcgcgtcgcccaggcggcttgcccttgcgaccggcctcctgaaggacatcttggctggtcagcaactgtccgaggccatgagccggaggcccgatgcctttcctcccgactacatcgcgattctcgctgggggcgaggctggaggtcagacggcgcaggcgctcaccttgctgggagagatgctggcgcgccgcgtcgatatcagaaacaagatacgcggagctctcgtctatccggccattctgttggcgatgtcggcggtatcaatcgtcgtgatcgtgttcgtgctcatcccgaatctcacaccgattttttccgatgcaggccttcctctgcctggcgttctggccgcgcttgccgatctgcccgatcattggcccaggtatcttttctggttctcgtttggaacgatcgtttgctggctcgcctatcgcagaatagccggccacgagttgacgatgagaaagctggatcgcctcatatgccgtctcccggtcatggggccgatcgttcagcgacgcgaggcgggtcagtttgcgcgctctgccggcacccttctcgaagccggggtgccgctcatgaccgcgctgcagactgcgcgatcgctggtcaccaaccgatacctgagtgctcggtacagcgaggttatcacccgggttcccgagggcagggcgctaagccaggtgctcgagggcatggaattgctgccgccggcgatgataaggctcatcgcggtcggcgaggaaacaggccagctcgcgaagatgctcgtccgtatcgcttccagcctggaaggcgaggtacagagcaggattgagcaactcgtcggcctcctcaccccgcttctcaccgttggcatcggcggccttgtcggcgccttgatcctccaggtgatgagcgccgtcctgtcgatcaacaatctggcctatcaatga

SEQ ID NO: 448 - DNA, 1782 bp, BradyrhizobiumColbertium
atgtcggccgatgcagagacgttgatgcgcgaggaaccgccgacgacgggcggggcgaaggtcctgtcgccgaggcaagccggatttgtcgacgcgttctcggcgcttttgttgcgcgaaggcctcgtggacgcagctgccgttaccagagccaagcgtgcctcggaagcaaccttcgagcgcctggacgccgtgatggtgaagctcggactgctgtcggaggcggatctttgcggcgcgtatgccgcctattgcgggctcaagatcgtgcgatcgtccgacctcccgctgcagccgctcctcgcggaccggttgaagctgacgttcctcaagggcagtcgcactttgccgatatcggtgtccgacggggtcctgctgctcgccacggtcgaccctttcgacgaggaggctcacaaggccatcagctatatgctgggctggagggtcgatcttgcggtcatcgccccagccgacatcgagcgggcatttcgtaagctttaccaggacgatggcgccgaattggtcggcggagatcaggggctgatcactgtcgggtcaggcgatgggaacgaaatcgatgtcgagcggctgcgggacatcgcaaatgaagctccgatcatccgtctggtgaaccagatcatcgccagtgcagtcgagcgcggcgcgtccgatattcacatagagcccggacgggacgcggttatggtccgtttcaggctcgacggatttcttcagcaggagcgcgtggtgccctcgacgttcagggccgcactaaccacgcgcatcaagattatggcgaagctcgacatagccgagcgccgtctgccgcaagacggccgtatcaaaactgcggtgcgcgggaccgagatcgatgtgcgtgtgtctacgttaccgacagccttcggcgaaagtctcgtcctgcgaattctcgatcgcacccgtgtcgagctcgaattttccaagctcggtctcgatccagcgatccaggctgggctgcacggtctgatggagttgccgagcggcattatcctggtcacgggccctaccgggagtggaaagacgaccactctttataccgccctgaaggagctcaatcggccggagctaaagctcttcactgtcgaggatccgatcgagtatcaactcggcggcgtcaaccagatccaggtccagccacagatcggcttggactttcctgccgcgcttcgctcgatcctgcgacaggatccagacatcatcatgatcggagagattcgcgatctggaaacggcgcggatcgccgttcaggcgtcgctcacgggacatctcgtgttctcgacacttcacaccaatagtgccgttgccgcgatcacgcgactaatcgacatcggcatcgaacgttacctgctcgcctcgacgctcaccggtatcatggcacaacgtctcgtgcgccggctatgttcgcattgcgcgcgcggggcggcctatcgcgccgaagctccctcgcgcatgagatggccggttccggatgaccttgtaatcgactggtcgggcgcacgggaagcggttggctgcgactcttgtcatggcaccggctatcttgggcgaaccagcgttgctgagctgcttgtcatcgatgatgacatgcgggaagcggttggcagacgtagcgatgaccagcggaccatgatctcgctcgcccgagatgcgggctttcgcacgctctatgaggccggcctcatcaaggtctccaagggagagaccacgatcgaggaggtgctcagggtgtcgcgatcgagttag

SEQ ID NO: 449 - DNA, 144 bp, BradyrhizobiumColbertium
gtgagcccggcggaagcccacgcggaacatcacggccatgtcgcgttccgcgtcgggcaggcgcaatcgacctggatcgtgcttgcacggggttgcctctttcgccgcatccgtttcgagctggtaaatgaaaatggcaaataa

SEQ ID NO: 450 - DNA, 828 bp, BradyrhizobiumColbertium
ttgatcaccgtgatctggagcctcgggctgttgacgctactctgcgcaaccgtgatcgtcggcgctcgctatcgggcaaggactgcgctcacggacggctcggtgctcgcggcagctgccgccgcggaaagcgcggtgaacctcgctcttgcgagcattctctcgccgacgcgggaggcgagctttccgaagcagtgccgaatgccgggaggtgagcaggcagagatcgtcgtcgaagaagagatcggcaagatcgacatcaacgccgccagcctctcgacgctggagcgtttcttctcggcgctcgcgcaagacaaggccctcgggagcaagatcgcgttgaatgccgtcaacttccgaacggcacttcagcgcacggagtccggcaatcagacgggccccggcgggacggctccgctgaatgcttcggacggcgccaaaggcctgggcttttccaccatcctggaactggatcagatcgacggcatgtcgccggcgttactccgcgccgccatgcgctttacgaccacgctctctggccggagcgaacccatgccggaagcaatgtctcctgctttgcgtctgctgatgggcttcggcccaaaccgggaagagcgcaggcggccaccaccatccgggcatttcaccatccggaccgacatccgcacgaacaatggctcgcgatatatccgagaagctctcgtatccttcggagcctcgtctgggcaaccttacaccatccgcgaatggcggcgcggcgatatcgcacgagagactgccgcctccttctcttccccttcgccggtacaagcttgcttcaagatgtga

SEQ ID NO: 451 - DNA, 1368 bp, BradyrhizobiumColbertium
gtgcgcttcatcgccaacacgaggctcggtgccattctcgttgtgacatccaacccgagctatctgccgcgcgcgcaatcatggatcaggcgcctcgacgctcgtgccgccggcacagagccgcagctgcacatctatcaggttcagaaccgaactgcggccgagctcgccggcatcctgcagtcgatgtttgcgcaagagatgaaggtcgtgcgttcgacccgaaatgtgtcgccgaaatccaagcaggtttcctttggcagcgaatcgaccaaggcgcaagcaactggcggcggattttcggatccagccatgcaggcgggagtcgcgaaggccgcggatccgttcggtgcttcacgttccacgaataatgatcccgatgcttcggcaatggacacggccgatagcggcaatgtcgtaccaaattccggtgcagagcccatgatgaagatcgttgctgacgacaccaagaactcgttgctaatcatggcaaacgatcgcgactaccagcgcgtgctgcgtgtggtgcaggggcttgatgtggtcgccagccaggttctgatcgaggcggtgatcgccgaggtgtcgctgaatgacgatctccagttcggcctccagtggcagtttgccaagaacggcacgcctacggcgacattctccaatgccctcaccggaggcgtagccgcttcgttcccggggttcaactatgccgtcaacactgcaaacatagcggcaaccctcagtgctctgaatgccctcacgcgcgtcaatatcatttcgacaccatcgcttatggtgctggacaacaagacggcgcgtttgcaaatcggcgatcaggttccgatcacgacgcaaacggcgaccagcacgataaccacgcagcccgcgattgtaaattcgatctcgatgcaggatacgggcgtcattctctcggtgacgccacgcatcaacgaaagcggacgagtgcagctcgatatcgagcaggaagtcagcagcgtcgtgaagacgacgacttcgaacatcaactctcccacaattcagcaacgtcgggtcaagacaacggttgttgtgagcgatggggaggtcctggcgctcggcggcatgatccaggacagcgcgaacaagagcagcaatcagttgccgatcctgggagatatccctggtatcggcgcagtgttcgcaaacaggaaggacgcggttcaaaagaccgagttggtcatcctgattaccccgaaagtggtccgcgacggcacggaaagtcggctgatcaccgaggagtaccgacgcaagatgaacgtttatatgccgcacacttcggcgcgccaacgggcgcctctcaacaccgcccagcgtctggtgacgccgtga

SEQ ID NO: 452 - DNA, 987 bp, BradyrhizobiumColbertium
atggctgtaaacgtcttcgacagtttcctgaaggagtttgagcaaccgatcacggcattcgtgtcgacctcggtctcgaacctcgccacctacatcgacggaccacttcgcaccgccgtaatgctctatgttgttctctatggttttgccgtgatgcgcggcgcgatctccgaaccaattatggaattcgcctggcgggcgatgcggatcgtggtcgtcgtgctgctggcaacgaattcgagcgcttttcagcaatacgtcaccaccctgttcttcgattccttgccaaaggagatcggcaatgcgctggcgggctccgggctgaataccagttccggggctcccttcgatcaacttctctccaaagggatcgacgtcgctaataagatctacgatcaagcaggaataaccgacgtggcgccggcactgattgcgggcattcttctcgtttttgtagcagtcggttctttcttgcagtttgctatcctgctctacgccaaagtaggtcttggcgtcgtcatcgcgctcggcccgctcttcatcgcactgggcctatttgaggcaacccgcccgtttacagaagcctggcttcggcagctcgcgaacttcgtgatcctgctggtcctggtggtcgctctggtcggcttgatgctgactactgtcagcggcttcatcgacaggttcgcggccaacgccgggacggcgggtgagatggtggtggccgcggtcgccatcagcgcagtgctgggtctgtcaggatacatctcacttcaattgccgaccatcgcgggcggtcttgccgggggaggggcgtctctggcaagccgactggtcacgagcccaatgatcgccaatgccacggccgccgccggaggtgcctatgccggcgcccggtggtcggccggccgcggcctcgctgcactcagagccagccgtcaaggcggcagcatgcggcgcgctcaatcgcgcggcgcgacggcggcctaa

SEQ ID NO: 453 - DNA, 246 bp, BradyrhizobiumColbertium
atgaagacgagccttgccattgttctcctcaccgtcgccgcgacccttgcgggctgcaacgacgtcaacaaaggtcaagaagcaaaaactgtcggctggttcttggatcatcgggatgagcttgcgatagctctcaaggcgtgccgcgataatccgggcgagcgcaggaacactcccgactgcatcaacgccaatgaagcccgcaagaaggccttcgtcaaagagatgaaggacgccctgaagtaa

SEQ ID NO: 454 - DNA, 723 bp, BradyrhizobiumColbertium
atgatggtccaacgtaggccgacggctctcgcctgcctgtccgttgtcaccctgctgacggcctcaccggccggggcggagatcgtgttcgacccaagcgtctatgcccggcagtttgagcaactgacggagctgaaaaagcaggtcgataccctgacatcacagctcaaggtcgcacaggatcaattgagccaagccaagcagctttatgacagcttcaacaagcgaaccaacgccaacgacatcggcgcgctcttgaacacaccacagtttcggaaggttctgccccagcagttctcggacatcgaacggctcgtcacggggcagggcggcggaaattttgccgacgccatcgaccactatctttcgcagaaccgcgcgtatgccggcaacagcggaaactcgtactaccaaagcgagctcgaccggatcgcccggcaggcgggcgcgaagcactccatgggccaggcggtgtacgacacggcctcgcagcgcatcgatgcgcttgaggaactcagggctcgcatcagctcggcgagcgacgccaaggagatcctcgatttatccgcgcggctgcaggccgaacaggcgctgctgcagaacgacgtgctccgaatgcagggtctggcgatgatccaacaggcccgcatggacatggatgctcaacgagagcgggagagacggcgacaactggtcgatgaaatgagggcggccctgcaatga

SEQ ID NO: 455 - DNA, 2367 bp, BradyrhizobiumColbertium
atgcgcaatagggcgcttaaaacccgggagatcgagcccaacgtctacctgccgttcggccggcatgtcaccgacacagcgatcggtcttacaacccgagccctgctgactgtgatccggattgacggcacctcgttcgagactgccgagacgtcggatctgaacgatctgcatgctaagctgaatctgaccctgcgcaacgttgcagatccgcaactcgccctctggagccacctggtgcgccgccggacatcggtctatcccgacggcgccttccggtcgacctttgcgacggcacttgacgcacaatatcgccaacgactttgcaaggaagcgctatttcgcaacgatctgtatctgaccctggtttgtcaccccggccgcacggcgacggatacggcggccgcgttctttcggcgggttggccgaagcgtagggaactccgccgaggtcgacagcgcggccctgaagcggcttgacgatgctacgcgagatatcgttgcggcactcgatcgttacggagcccgcgcggtcggcttgtttgagcgcgacggcatcaccttctcagaaccgatggagctgctccacgcgctcgcctccggggaatggatgtcgatgccattgccgcaagggccgatcggtcctgcgctctattcgaatcgcgtcatcttcggccgcgaagccctcgagatccgcggggccggtggatcgcgattcgctggcatgttcggcctcaaggagtatccggcatccacccggcccggcctattgaacgcgctgctgtcggcgccgtttgagctcatcgtcacgcaatcattcgcgtttttggcgaaggcggacgccaagacggtgctgacgcgcaagcagaaccagctggtctcggcccaggatccggccgcctcacagatcgacgagctctctgacgcgctcgacgatctcgaatccaaccggttcgtgcttggagaccatcacctctcgctcttggtctacgcagatacgccgttgcagctgcaggatcatatgagcgtggcacgtcgcgcactggccgatgcgggtgctgtgatcgcacgagaagatcttggacttgaagccgcctattgggcgcagcttcctggcctattcaaataccgggcacgcactggcgcgatcaactcgcggaatttcgcggcgttctcgccgttccacacctatccgaccgggcagccagcggggaaccattggggaccggcggtagcgatgctcaagaccgcatccggctcacccttttacttctcctttcattacggcgacctcggcaacaccttcatctgcggtccctcaggatccggcaaaaccgtcgtgcagaattttctgctgtctcaggcggagcggttaggtgcgtcctacgttttcttcgacaaggaccgtggcgccgagattttcgtgcgcgccgccggtggcacctatctgacactccacaatggtaccccgaccggttgcgcgccactcaaggcgctggagctgacgccagcgaatctttccttcctgggcgaactgatccgaaaactcgtcaccccggacgatcgcccgctgacggtgatcgaggaggaaaggatcgattccggactgcgcgcgctcggtcaattgcgccagtcggagcgatcgttcgggacactgcgggcttttctcggacagcaggaccgcgagggcattggtgcgcggctcgagcgatggtgccgcggcgctcccttcggctgggtgctcgatggcgatcacgacgccatcggcctcgacgcccggttcattggtttcgacatgaccgatctcctggatcatcccacggtgcgcacgccgctgatgatgtatctgttccatcgcgtggagcggctgatcgacggccggcgcctgatcatcgacatcgacgagttctggaaggcccttggagacgaggcatttcgtgatctcgccaacaacaagctgaaaaccatccgcaagcagaacggcgtcatggtgttcggcacgcagtcgccacgcgacgcgctcgcctcgccgatcgcgcataccattgtcgaacaatgcccgacccagatcttcctgccgaatgcgcggggaacacgcgcggactatgtcgacggcttccatctgaccgacacggaattccgcctgatcaaggaggagctcgcacccgaaagccggcgctttctggtcaaacaggggcacaactcagtggtggcggaactcgacctcggcggcttcgacgacgcgcttgccgtcttgtcggggcgtaccgaaacggtcgagctgcttgatcgcattcgcaagcaggtcggcgacgaccccgcgcgatggctgccggtatttcacggtgagcgaaggaaaacgcaatga

SEQ ID NO: 456 - DNA, 342 bp, BradyrhizobiumColbertium
atggtcgaggccgcgcgtctcacggaggacaccttgttcctcgcctgtacgcgtcccgccatggttgccggcgtcacgatggaggccatggctctcaacgtgatgttctcctgcatcctcttcctagtggccgggagcatcgtctacggcttcgttgcgattccgatccatggtctctgtcgcatcatctgccgacacgaccctaacatgttccggattctaatcgcctggatcgaaacccgtgggcgcgcgcgcaacgccgccttctggggcggctcgtcctgcacgccactcaagctcgttcggcgatatcgaacaagggacgtcggttatgcgcaatag

SEQ ID NO: 457 - DNA, 258 bp, BradyrhizobiumColbertium
atgggggccgttctcagcatcgcgttggttgagccggcgctggcgcagaccgcgaacatcgaaggcgtgctgcagaacatcgtcaacatgctgaccggcaacgtcgctcggctgctggcgacgctggcggtcatcatcgtcggtatcgcctggatgttcggctatctcgatctgcgcaaggccgcctatgtcgtgctgggcgtcgccatcacgttcggcgcctccgaggtggtctcgaccttgactgggggtcattga

SEQ ID NO: 458 - DNA, 570 bp, BradyrhizobiumColbertium
atggatccagcagcattcgcggctctggtcgaacaatgcgccccgacggcaatggtccggccgctgacggccatcgtgcggcaggcgagctcgttcgagccgctgctcatcacgagcgaagggcgcaaaccaattccgattcaagccaccgatcgtgacgaagccatccagctcgcgaccgaggccatcgccgccggccagcaggtccgaaccgggctcgctcaacttgatgctgaggaaacaaagaaggccgggctgacggctaccacgaccttcgatgcgtgccagcacattgctggccttggcagattgttcgacgcgcgactgcaagcggcgggcataaaaagcgcaaaccgcgacgaggcgatagcgcacgttgtcgcaagtttctcggccaaggctcccagccaagcgcccgagcctcgcacccaaccgatgccatctgccgatggtgatcgccccaccggcgatacgacaatcaatcgacccgcagcctctaccagcgagcgcccacgttgggacgtctatcgctccggactaggcacgtcagcctttgtttacgaacgatga

SEQ ID NO: 459 - DNA, 576 bp, BradyrhizobiumColbertium
atgcatcgcctgcgagggcgcgtgttcaaggatcggctcgactgggacgtctctgtttccaacggactggagatcgatcagtacgacaccttcaagccgacatatctgctggcactcgagcggaccgaggtcgtgggttgtgttcgcctgctgccgaccactgggcgcaacatgctcgccgatacgttcccggtgttgctggatggcaacccggcgccgaaggcgacgacggtttgggagagctcgcgcttttgcgttgacacaaagactgttgcggcaacagcagagaatggtctgcgcaaagcgacgttcctgctgtttgcagccatgatcgaatgggggcagcaacgcgaccttcaggccatcgcaaccgtcactgatctgcgcatggaacgcatcctgcgccgggccggatggcatctcgatcgcctcggcacgcctcgtcaaatcgggccgaccaaagccgtcgctggattgctgcccgtcaccgataaggctctcgacgcgatccgagcggccgggcagatctcagggcacgcaattgacgcgccatcaagcttggcgatcgcggcctaa

SEQ ID NO: 460 - DNA, 123 bp, BradyrhizobiumColbertium
atgcgcagctcgttccgcgacacgccgaaaatcatcttccgtatgggcagcgtgcagacaatcgacaaattcatcgcatgctcttttgacatctttcattgcgccacttcagtcgcttcttag

SEQ ID NO: 461 - DNA, 480 bp, BradyrhizobiumColbertium
gtgttcctgtgggatggacgtgaagcgcgaagtgcaaaatcagcgaaagagcgccgtctgtttgacgatgcgctcagcttcaagatcaggactggcctgacggttcgcattccctcgagtcagaaccagttcgcggcgtttacgctggcggttgacgagcgcagcctgggactcgatcgtttcatcgagagctcgcaggacatgttggaaaggctgggtctcacctaccatgcgcatgtgagcgcctccagagttgaacgcacgtccccaaacgggaagcaggtaagccccttgactcagcgcgagcggcagtgcctcgccttgatctcagatggcaagacgatgcaggacatcgcggatcttcttggtgtttcttcacgcggcgtaaagttccatctggacaacgcaaggggaaatcttgctgcatcaacccttccccacgctgtggcgctcgcgtttcggcagggattgctcccgtaa

SEQ ID NO: 462 - DNA, 201 bp, BradyrhizobiumColbertium
atggccagattctatgtcctcacgatcgaaccgactctgttcggtgatacggcgttggtgcgcgaatgggggcgtctcggcaaacgcggccgccggcggatggatctttttgccgggaaggtccaggccgtcgaagcgctcgaggcttggctggtccgcaaaagacgccgtggttatgttccaaagaatcccgcgccttga

SEQ ID NO: 463 - DNA, 1101 bp, BradyrhizobiumColbertium
atggcagaagccgctttcaaactgacgccgtcagaggctcctccgtaccgccagccgccgcacaatatcgaagccgagcaagcgctgctcggtgctatgctgatcaacaacgacgcctttcatcgtgttgcggatttcctgaaggcgaatcatttctttgagccgctgcacgggagcatctttgaggtgatcagcgagctgatccgctcgaacaaggtggccaatccgatcacgctgaagaccttctttcccgccactcttgatgtggctggaatatcgatggcgcagtatctcgcgcgcttggccgcggaggcgacgacgatcatcaatgcggtcgattacggccggacggtctacgatctagccgtgcgacgtgagttgatcaggatcgccgaggacatgctcaatggcgcatttgaagcacccatcgattgcgctccagcagatcagattcagcatgccgagcagctactatacgaaatcgccgaaacggggcgctatggcggaggcttcgagacgttcgagaccgcactcgacagcgccattgatcgggccgtgcaagcgtaccagtccgatggcaggctttctggcctcgcaaccggcctcaaggacctcgatgcaaaaatgggaggccttcagccaacggacctcatcatcattgctggtaggcccggcatgggaaagacgtctctagccaccaatatagctttcaatgttgccagcgcctacgatgcggcacagcaagtcggtgtctcgactaaacccgcggctggtggcgtcgttgctttcttttctctggagatgtcgtcggagcaactcgccactcgcgtaatctcggagcagacggagatcccgtcctccaatatcaggcgtggcgacatcgacgaggcagctttcggtaagctgctcgattgccgtcaaaggatgcggcgtctgccgctcctcatcgatcaaactggcgccgtctccatcgctcaactcgcggcccgcgcgcgccgtttgaaacgacaacgaggactgcacctcattattgtcctatatccagctcatgcagggcaagtcaccgcgtgcggcgcagaaccgcgtgcaggagatcactga

SEQ ID NO: 464 - DNA, 294 bp, BradyrhizobiumColbertium
ttggtcgagaaccgcgatgaaaaacgcccgcaactctcagatctccgcgagtctggctcgattgaacaagagtttcgtgaagaatattatctcaaaaacaaggagccgaagcccggcaccgacgagtacctcgcttgggaaacagaaatgagcgatgcgcgcggcaaagcagagatcatcatagctaagcagcggcatggtcccaccgggaccgtggctatgacctttcaaggtgagttcacccgcttcttcgatcttgccgaacacaatcgcttgccacgccgatcagactaa

SEQ ID NO: 465 - DNA, 144 bp, BradyrhizobiumColbertium
ttgatcgtggaaggccgcaccagaaccaaggaaagcccattcgagagcggggctggtccttctccgaaagcatcgtgtgccgcactgcacatctttcatccgcgggcccttgccgaccagatcgcgacgcgagaacaagtgtga

SEQ ID NO: 466 - DNA, 180 bp, BradyrhizobiumColbertium
atgtcgcacaatctcgccctcgctcagaaccacgccttcgatctggcccgcacgctgatggtgccggtcatccttttccaggctgagaacgaattcggtgtgatggtctccagcgaatacgagggcgaccaggacgccatcgtccatgattatgatccatgggagattatggacagctaa

SEQ ID NO: 467 - DNA, 1233 bp, BradyrhizobiumColbertium
atgcccatatcccgacgccttctcaggaccgaagatccggacaatgttctctggcccatcatgggcctttatacggattacctcgctcgcggccgctacggagctaagcgtcgccgtcgatataccgcctgtgctcttcatttcggcgactggttgcacagtgaagacgctggaccaagcaacatcgacgaggctcggatcggccgtttcctcaccggccacctggcgatctgctcatgcgagcccccggtcccgcgtggcctcatcctcaacagggcggcgattaacaatttgctgcgcgttctgcgcatgcattgcattgtcgcgtctccagcacccaacgccatcgaggtggagctcgcccagttcgacgctaaaatgaacgagatctggggactgacgcagggcacgcgcgatcaccgccgccgcatcattcgacgcctgctccgggagcagtttagcacacaaccgatcgatctgagcgtcatcacgcccaatgccgttcgcgccttcgtccttggcgacgccggctggagcaccagcacgatccgtgtcatgggtggggcagtccgctgctatctccgttatcgcgcactgctcggcgacgacgttgctcatctcctcaaagcggtgccgcgcccggcattctggcgggatgccgagctcccggaggccctgtcggccgccgatgtcgagcagctgttctcggcgtttgaccggccttgtccgtcgcgccggcgaggctacgccatcgtgcgctgcctggccgatctcggcttgcgttcgagcgaggtcatccgactaacccttgatgacattgactgggaggaaggcatcgtaagggtgcctgccggcaaggcccggcggtccgacgtactcccgctctcgctcgcgaccggcgaagcgattgtcgattatgtcctccacgagcggccggcaaccgcccaacgagaagtgttcgtccgccacgtcgcgccgctcggcgagcccgttggtagacgtgtcgtgcagaagacgcttcacgccgactatgcccggctgggctgggaccggagccgcgttcacatcctccgtcacacgctcgcaagccggctggtcaacagcggcgtgccaatgaagcagatcgctgacgttctacgtcaccgaagcatcgtcacctccgcgggctatgcgcgggttgacatcacgcggctgtcggccgtcgcgctgccctggcctggagcggccgcatga

SEQ ID NO: 468 - DNA, 948 bp, BradyrhizobiumColbertium
atgctcgcgcgcgccaaggcctacctcgccgagcgccgccgcctcggattcgtgctggatcggtcgggcaatctcacgctcgccttcgcccgcttcgccgacgcaagcggccaccaaggtccgctcacgtccgccctcgtgctgcgctgggcgaaggaggaggcgatgcatgccgatcccttcacctgggcgcagcggctcaacgtactccggccatttgcgcgtcatctggctggtgccgagtcaggaaccaccttccccgaaggctcacccttcgggcgctcgaagcgccgcctagcgccacacatcttcacaccggacgaggtgaacgcgatcatcggagccgcgcgtgctcttccgccagtgttcggtgccggcccggcgacgttcccgacgctccttggtctgcttgcggcggcgggtctgcgcatttcggaggcgctgtgtctccgctgcggagagctcgacgaggctgcaacgcagatcacggtgaagcaatccaaattcgggaggacacgcatggttccgttgcacccgaccgcgtcagcagctttgcgagattacctgcgcacccgagcgaggctcggcgcgaccgaccattctgcgccgttttttctcgacgagcgcagcggtgaagctctgggctacggggccgtgcgccgcgcgtggctccggctgacggcagacctcggcatcgtgccgcgcggcggccatcggttcatccgtatccacgatctgcggcacaccttcatttgccggcggctgatgctctggcaggccgaaggcgctgacattgacaacacaatgctggcgctctcgacctacgtcggccacgtcaatctcggcgacacctattggtacttgcaggctgtgcccgagctcatggcgctggccggcgatcgcttcgaggcgcttgtaccgcagtgcggggaggcgggtcgtgactga

SEQ ID NO: 469 - DNA, 855 bp, BradyrhizobiumColbertium
gtgcagtcagtcccagcacggtcgcggcctaccgcgacacgttcaaagctgctgctcgcgttcgcggagaaggcgataagcaaagcgccgaccgacctcgccctcgccgacctgaacgcgacgctgatcctcgccttcctcgatcacctcgagcgcgagcggaagaacagcgtacggagccgtaacgcgcgcctgtcggcgatccgcacgttcttgaagtatgccgcccacgaagatctgaccgtgcttgcggtcattgagcgcagccttgccgtcccgcagaagcgtcacgacaagcctgtactcggtttcctgtcccgcgctgaaatggacgcgatcatcgcggcgccggactgcgcaacatgggctgggcggcgcgatcaggccctgtttacgttcctttacaacaccggagccaggatctccgaggcgatcaacctccgggctggcgacgtggtgctggatgtctcgccagtcgctcatctccacggcaaggggagaaagcgacggagcgtcccactctggaaggcgacggccgctacactccggcagtggcgtcgccatctgcaagacgccggcccacaggggtatctgttcccaagcaaagcaggcggccggctatcgcggtccagggcggctcagcgactcgcactggcagtcgcgcaggcagcgcgccagatcccgcccctggctgaacgggcaatctcgccacacacgatccgccatacgacagcgatgcacctgctacagtcgggcgtggagatcaccgtcatcgcgctgtggctcggacacgaggatccgagcacgacgcacatctacttggaggcagatctcgccatgaagaggccgctttga

SEQ ID NO: 470 - DNA, 435 bp, BradyrhizobiumColbertium
atggacaagagagaaattgaagagctgcgagaaaaggttggctgcgcggcccttttggagaaagacggctggaaggtcgacgtcaaggaaagcacgcggcgcgcgatcaagtatcgccgcgacagcaacatcatcatcgtcatccaccagggccgcggctggttcgatcccttgtcgccggcaaaaggggacgtattttcgcttgccgaacacctcggcgccgacggtttcgtcgaggcatgtgaccgtgttgcggatgtggttggcttcgttccaagcgcaccagcatggcagcacccggaaaggcccaaggcccttgcgtccattatagagcggtggggacatcgcttcaggccgcgccccggttcgccagcctggcgctatctcaccggcgagcgcggactgccagcagacatcgtgatcttcccccgataa

SEQ ID NO: 471 - DNA, 585 bp, BradyrhizobiumColbertium
atgggcgagatgatgggtcgcccacgtaaggaattctatccctccctgatggacatgccgaccctttcggccgagcagcgtcaatgcatcgaggcccaagcgcgcgcccgcatcagtaagggggcggatgagatccagagtgcccaggatgcgctgcggcatgcgaatgcggccggagatacggcgagtgctgagcaagccgcctcgcggctgcgcgatggcctcgatcaggtgaaaagcagcactaccacgccggaaacaccgaccgagctgcgggaagagcaatcccggttggggacgctgcgatcggcctacgaccgcaccaccatcgcgctggcccaacgtgccaggcttgaagacctcgccgccgccgaagtcggcgcgccggccctgcagggcgccaccgtcctgcagctcgtcgaggggattgccgatcttgaatacgcaatcgggtcccgcgaggtgatcaagaagatattcacgcgctggatcgttgcgcatgtcgtggccgcgatcctgatgtattttctgctcgcgctgcatatcggcggtgagatctactatggactgcggtggctcgcgtga

SEQ ID NO: 472 - DNA, 777 bp, BradyrhizobiumColbertium
gtgaaaaagcttggggttttctatacggtgctgatcgccatcgcagtcgtggccagtttgaccacggtcgccacgctctatcgctcgggctcaggatcggtgccggcctggtcgaaatcgtttcagcctggccagctctcggtcaaacacgccttcctgaccgacaaatgcgagtcatgtcacaccccgaccctgggggtcgaggccaagagctgtatcgcctgccacgccaccgcggcagcagatcttgcgaagcagtcgaccgcctttcatgcgaaggtgcaggactgccgcggctgccatgttgagcaccagggcgctggccgtccgacacggatcaaccatgcggcgctcctgcggatcggctcgcaccttgccgttggggccgaaggtcatcccggcgtgccgaccgagatggtcaatgacatcgccgattttctgggcgtggcggcatcacgatcggccgagaagaacgccctggattgtgcgagctgtcacagcaaccgcgacccgcacaagcagctcttcgggcgcgaatgcgcgggatgtcacgagacgacgacatggcggatcgctggattcctccacccgtcgccgacttccaaagagtgtgcgcaatgccatcaggcgccgccaagccattacatggagcacttcaagatggtgtcaatgagggtcgcgggcaaggagcatgcccaggtcaaccagtgttacctctgccaccggaccaactcgttcaacgacatcaaggacgtcggctggtacaagcaccattga

SEQ ID NO: 473 - DNA, 141 bp, BradyrhizobiumColbertium
gtgaacggtccattccattttgatctgtatcacggcggtgctctccacgattgcatcacattgttcggccccttgccgcgcacctcttgcaaggcgccggtcgataccgcggcccggcttcggctgacgatcccgtggtga

SEQ ID NO: 474 - DNA, 165 bp, BradyrhizobiumColbertium
ttgtatgtgctccatgtcatcgatcaggcgatgggcctgccccggaaatgcctcctgcccacgttatccagctcgccgcaagagtgcagcggcgcattcgtgcagcagtcgcatgtggacgaattacgcttcatcgcatcggccctgccgcatccgccgcaataa

SEQ ID NO: 475 - DNA, 1809 bp, BradyrhizobiumColbertium
atgcgatctttgatcgaagattatgccccgatcggcgattgtcagaccgccgcgctcgtcggccacgatggctcgatcgattggctgtgctggccgcgatttgacgcgggcgcctgttttgcggctctgctcggctcgcccgggaacggacggtggcgcatcgcaccggaggatcccagcccacgcgtcagtcgccgctaccgcaacagcacgctcattctggagacggaattcgagagcgcgggcggttggatcaccgtgatcgacttcatggccctgcgcggcggggtatcggacctcgtgcgtctcgttgtcggccggcgcggtcgcgtgaggatccgcagcgagctcgtgatccgcttcgactacggcgcggtcgtgccttgggtcacgcggcttgaggacggcaccggaatccaagcggtggcgggcccgtccatggtggtcctgcgaacaacggctccgtttcacggcgaaaatctcagcaccgttgcggaactctccgtcgaagccggcgacaccgtgcccttcgtgctgagctatagcccgtcccacgttgcgccacccgctaccctcgatccggaagcagccctggccgagaccgaagcgttctggcaaaactggtcctcgcgttgccggcacacagggccatggcatgaggctgtgcttcgctcccacatcaccctgaaggctctgacatacgcgcccacgggaggaattgtggcggccccgaccacgtccttgccggaacggatcggcggggcacgcaattgggactatcgctactgttggctgcgcgatgcgactttcactttgatgtcgctgatggacggcggttactttgacgaggcgaaggcctggagcgactggctgttgcgggctgtcgccggccgcccatcggagatccagatcatgtacgggctcgccggagagcgccgcttgaccgaatgggaagtgccgtggctgacgggctatcatggttcgcgaccggtgcgcgtcggcaatgccgcccatggccagctccagctggacgtatacggggaggtcatggacgcactctaccaggcccggcggggcggccttgtgatgcgcgacgcgagctgggccttgcagcgcgcgattgtcgagcacctggaaacgatctggcaagaacccgacgagggtatctgggaggtacgcggcgagcgccggcacttcacccattccaaggtgatggcgtgggtcgcctttgatcgagccattcggagcattgaagaattcgggcttaagggcccgctcgatcgctggcgcgcggtgcggcagcagattcatgaagatgtgtgtcggaaggggtacgaccccgatctcggcagcttcgtgcaatcctatggcgccccccacctcgacgcgagcctgctcatgctggcgctggtgggctttctgcccgccagtgatcctcgaatccgcggcaccgtttccgcgatcgagcagcgccttctggtggagaatacgtttgttcttcgctacgataccgaggaggttgcggacggactgcccgcgggcgagggcgcattcctggcgtgcagcttttggttggccgacaacctgatcctgctcggccgacacgaagaggcgggccgcctgttcgagcgcctcttggccctgcgcaacgatgtcggactgcttgccgaggaatatgaccccgtggcgcgccgccagctcggcaacttcccgcaagctttctcgcatatcgcgctcgcaaccaccgcgcgaaatctgacgcaagcggcgaagccagcacaagcccgcgcggccacggccgcaaagtga

SEQ ID NO: 476 - DNA, 1152 bp, BradyrhizobiumColbertium
atggatgcaagctctatcaagattcgccgctcgcttggcgcctggaagcctgaaggctgcgagcggattgcgctggtgcttcagggcgggggcgctctcggcgcctatcaggctggagcctaccaggcgctgcacgaggccgggctcgagccggactgggtcgcgggcgtttcgatcggcgggatcaacggcgcgttgatcgccggcaacgccccggagcaccgcctggatcgcctgcgcgagttctgggagacgataacgcgcccgacttggccgttcacagctgatggggacgaggcgcgcggggcgcgcaacaactggtcgtccctcgaggccatgatgttcgggcagccaggctttttttcgccgaacgtcccgaacccttggatgagtcctcgcggcgctgacaccgccaccagcttctatgacagcgcgcccctccgcgagacactgcggcgcttagtggatttcgatctcctgaaccaaacatcgacgcactacgctgccggcgctgtcaacgtgctcaacggcaatttctactatttcgacaacgcacaaatcgagatcaccgcggagcacgtcatggcgagcggggcgcttcctcctgcgctacccatggtgcagatcgactccagctggtattgggatggcggcctcgtctccaacacgccgctgcagcacctccttgacaacgcccagtgccgcagcatgctggtgtttcaggtcgatctgttcagcgcaaaaggcgtgctcccgcgcgatatgttcgacgtgctcgctcgcgaaaaggacatccgttactcaagccgcacacggctgattacggacacctatgcgaaacgccaccagcagaatctgatcttgaggcgcttgctcgacaagctaggggatgcgaatctcgatgacgaagaacgcgcgctgaaggacaagctctgcaggctgccgaagatcacgatcctacacttaatctatcaacaaacggcctacgagggccaagccaaggattacgatttcagcgcgcaatcgatgcacgagcactggaatcgcggctaccaggacacacagcgcacgcttcggcacacagaatggctggcaatgccggcccaggatggcggcattgttgtccacgatatccaccgtacggatgactga

SEQ ID NO: 477 - DNA, 735 bp, BradyrhizobiumColbertium
ttgggcggcaagtcgcccaacatcttcttcgccgacgtgatggacgagaacgacgccttcctcgacaaggcccttgagggttttgctctgtttgccttcaacaagggcgaggtctgcacctgcccctcccgcgcgctcgtgcaggactcgatcttcgacaagttcgtggagagggcggtggcccgcgtggccaggatcaaggtcggcgatccgctcgatccgtcgacccaaatgggcgcccagtgctccaagggccagctcgagaagatcctgagctacatcgagatcggaaagcgggaaggtgcgacgtgcctgaccggcggaggccgcgccgaactcggcggaaggctgaagcacggcttcttcgtccaaccgactgtcttcgtcggcagcaacaagatgcgcatcttccaggaagaaatcttcggtccggttttgtcggtgaccgcattcaaggatctcgacgaggcgatcgcgatcggcaacgaaacgccctatggtctcggcgcgggagtgtggtcgcgcaacgtcaacaatttgtatcgtgtcggccgcggcatcgaggctggcagggtatggacgaactgctatcacgtctatccggcccatgcggccttcggcggctacaagggctccggcttcgggcgcgagacacacaaaatggtgctggatcattaccagcaaacgaagaatgtgctggtcagctacgataccaaggccttgggtctgttctga

SEQ ID NO: 478 - DNA, 339 bp, BradyrhizobiumColbertium
gtgctcaacaagatcgccgaccggatcgaggagaacctcaccctccttgcaaaggtcgaaacccgcgacaacggcaagccgatccgcgagaccatgaatgccgatgtaccactcgcggccgatcatttccgctattttgccgcctgcatccgcgccgaggaaggcaccatcggcgagatcgatcacgacacgatcgcctatcattttcgcgagccgatcgggcaatcttcgcgatgcgcgggctgggtcgccagatcatgcactatgctgccgagaccatcattccgcagaccatggaattgggcggcaagtcgcccaacatcttcttcgccgacgtga

SEQ ID NO: 479 - DNA, 1026 bp, BradyrhizobiumColbertium
atggcgaaaacgatgaaggcggcggtagtccacgaattcggaaaacctctcagcatcgaagaagtcccaatccccgcaccaggccggggggaagttctcgtcaagatcgtcgcctccggcgtctgccatactgatctacatgccgccgcaggcgactggccggtcaagccgaaaccacccttcattcccgggcatgagggagctggcatcgtggcggccgtgggtcccggcgttgtcggactcaaggaaggcgatgcggtcggcacggcctggctgcacgatgcgtgcggccggtgcgagttttgcggaaccggctgggagacgctgtgcgaagcccagcacatgagcggctataccgtgaatggcagcttcgctgaatacgccatcggcgcggcggactatgtcgcgcgcttgccaaagaacggcgactttgctgcgctggccccgatcctttgcgccggcgtcaccacctacaaggggatcaaggaaaccgaagcccgtccaggtgaatggattgcgatttccggcatcggtggtctcggccatatcgccgtgcaatacgccaaggccatgggccttcacgtcgccgcgctcgacgttaccgaagagaagctcgcgcttgcccggcaactcggcgctgaggttaccgtgaacagcaagagtccggacgctgccgcccaggtggtgaaggcaaccggcggcggcgcgcatggcgtgcttgtcacggctgtgtcagttccggcctttgcgcaggcgctcaagctcgtacgtcgcaagggcaccatcgcgctcaacggcctgccgcccggcgattttcccacccccatcttcgacgtggtattgaagcgcatcaccatccgcggctccatcgtcggaacgcgcaaggatctcgccgaggccgtacagttcgcaaccgagggcaaggtgaaggcgcacattcacaaggcgaaacttgaggacatcaacaccatcttcagcgacctcggaagcggtaaggtcgatggccgcatggtcatgaccctctga

SEQ ID NO: 480 - DNA, 267 bp, BradyrhizobiumColbertium
atgcccgccaaatccatggcctccaaacccgccgccgcggccgccgaaaccaccaccatgccccccgaatccgccgccgtggcctccaaagccaccgccgtgccctccgccgccatgctgcgccgcagccggttgcacatcgctcatgaacgcagcgctcaccaagagtcctgcaagcgtcaccaattgcgcagttcgtctgaaatttctcatcaccgttcctttcacaacgtcaccttcagtccgagaacgcgattattgctgtga

SEQ ID NO: 481 - DNA, 126 bp, BradyrhizobiumColbertium
gtgtcagccaatcacagtcgccgtgaacttcactatgagctcggccgtgtgccggttgccaaatccggtcaactcgtcggcaaactttgcgcagcgatcgccgatttcatcccgttggttgcgtag

SEQ ID NO: 482 - DNA, 207 bp, BradyrhizobiumColbertium
atgggtcccggtgcagcttcggtcgccatcatgaccgaggagatgaagagcgccgatggcagcatccggatgctggcaatggaaatgcccttccatgtcacgaaccgtcgcatgctaaagggcttgcgaccgggagatctagtggaatttgaggcagccaggctgaaaaacgcagtgatgatcacgaacatccgaaaagcgcggtag

SEQ ID NO: 483 - DNA, 453 bp, BradyrhizobiumColbertium
gtgccctccgtcgatccgatggaccccgacttcaaaaggctccgctactgccgctatgccgacgacttcctcatcggcataatcgggagcaagcgggaagcgtgtgagatcatggcttgcgtcgaacaattcctgactgagacattgaagctcaccgtgtcgcccgagaaaagtggggtctatgccgcttcaaagggagtgacattcctcagctatcgcatctcgacatacacatcctatggggctggacgcaaatccaaccgcacgggaccggatagacggacatggcgcgtggtacgccggccggccaccggcaatgtcttcggcgcgccagttagcttcgaccagccggagagccggctctccttcgatgtagagttcctgaagctccccaccattcgcagcgagcgggcgttgcgagagtttttgcggcgcggtgcggtaccgccatga

SEQ ID NO: 484 - DNA, 279 bp, BradyrhizobiumColbertium
atggtccctgtcgactggcctgatttcgacgccctcgccaacgaactgcgtcttccggcgccaacgcttcgcaggaggctgcggatggaggggatgacatatcgcaacatcaaggaagagattcgtcgcggacttgccatggaaagcctgctgcgcgaccgccgcgacgtcggcggaatttccgcagacctcggcttttcggaacctagcgccttccaccgcgcctttcgcaaatggacgggtaagagccctggcgcatttcgccgagaccagggttag

SEQ ID NO: 485 - DNA, 348 bp, BradyrhizobiumColbertium
atgatcccgatcccgagcggcttcagggtctggatcgccaccggccacaccgacatgcgccgcggcatgcaaagtctggccctgacagttcaggagagcttgaagcgcgatcctcatgccggcgatctctatatcttccggggtcgccgcggcgatctggtcaagattttatggcatgacgggttaggcatgtcgctctatgccaaacgcctggaccgcggcaagttcatctggccctcagcatccgctggtgcggtgtcaatctcggcggcgcagatggcctatatgctggaaggaattgactggaggaatccacaactaagctggaggccgcagagcgcgggttga

SEQ ID NO: 486 - DNA, 1656 bp, BradyrhizobiumColbertium
atggatgctgatcgtgacgctgttccggatgacattgcggctctgaaagaggcgttggcggtcgagcgcgcgaaggcgttagaggttgtagcggagctcgcggtcgcccgcgcgaaagcctcggaagacggcgctctgatcgcccagcagaagctgcggatcgccaagcttgagcgtcagatctacggacaacggtcagagcgatcgtcgcggctgatggaccaattggcgctgacgttcgaagagctggaagctgacgccacagaggacgagctagcggcggaacgagctgtcgcgaggacgacgacggtacgcggattcatacgcaagcgcgccgagcgccagacgttccccgagcatctcccacgcgagcgggtggtgatcgatccgccgccggtttgtggctgctgtggcggcacccggctgcgcaagctgggcgaagacgtaacccggaccctggaggcgatcccgcgccaatggaaggtggtcgaaacggtgcgcgaaaagttcacctgccgggattgcgagaaaatcagccaagcgccggcgccgttccatgtgatcgcgcggggctgggcgggaccgagcctgctcgcgatgattctgtacgagaagttcggccagcatcagccgttgaaccgtcaggccgagcgctatgcccttgaaggcgtgccgatcagcctctcgaccatggccgacgccgtaggggcgtgctgcacggtgttggagccgctgttgcggctcttggaagcccacgtcatggcagccgaacgcctccatggcgacgacaccaccgtgcccgtgctggccttgggcaagtgcgatgtcgctcgatgctgggtctatgtgaaggacgaccgccccttcggcggctcagatccgccggcggcgatgttttattactcgcgcgatcgaagtggtgagcatccgcaggcgcatctggccaactacaccgggatcctccaggccgacgccttcggcggatacatcaagctctacgagcctgagcgaagtcctgggcttatcagggaagcggcctgttgggtccatgcccggcgcccgttcttcgccatggcggatcttgaggagaacgcgcggcgcaaagcggccggaaagaaggagatcgtcatctcgcccgtcgccatggagatcgtgcgccgcatcgacgctctgttcgagatcgagcgctctatcaatggccaaaacgccgaccaacgaaaggttgttcgccagacgcagagcgcgccgctcgtcgccgatctggaagcctatatgcgcgagcagtgcgccaagctctcccgcggtcacgatctggccaaggccatgaactacatgttcaagcgctgggcctccttcacacacttcctcgacgatggccgcgtctgcctctcgaacaatgccgccgaaagagcgctgcgcggcatcgcattgggcagaaagtcgtggttattttgtgggtccgaccgcggagggtgccgagccgcagccatgtatagcctcatcgtctctgccaagatgaacgacgtcgaccctcaggcctggctcgccgatgtactcgctcgcatcgccacccagcccgcccacaggctcgatgagctgctgccctgcaactggaagactgcgcaacagcaaggccttgcggcgcaggcggcttga

SEQ ID NO: 487 - DNA, 294 bp, BradyrhizobiumColbertium
atggggcacgtcaacaaagtcagccacgtgttcactctcagccatgtcgctgagatgctcggtgaagatgaggaatggctgttcgaggtcgccgaagaaatggacaccgaggatggccagctatgggtcgtcggcgtcggtgaagatggggtgatggcgttcaccgatgacgggatcgagaacctcaaagagctgatcgcaatccacaaggacacccccagcatcatcgaaaaccgacgccaagcgctcgctgcgatgatgaagcctaggaccgaagagtccgacgagatctaa

SEQ ID NO: 488 - DNA, 786 bp, BradyrhizobiumColbertium
atgattggtagtctgctcatgcgcggaatgctcgtcggtttcatcgcggcaatcctttccttcggctttctaaagctgaccggagagccttctatcgatcgcgcgattgccttcgaggccgcgatggatgagacaagatcaaaggccaaagcggaggaggcaactgccaagggtctgaccgcgcctgtcgaacgggtggagccagagcttgtcagccggcccgttcaggcgggcgtcgggctttttactggtatcgcggtttatagcaccgcattcggtggcctttttgcgcttgggtttgcgttcgcttatcgacggatgggaaatttcagtccgcgagcaacctctgcgttgctcgccttggtcggatttgtcagcatttacctcgtgccgatgctcaaatatccggccaaccccccggcggtcggttttccggagacaattgacatgcgaacgagcctgtatttcgcgatgatcatggtttcgctggctgcgatgattgcggcgggaatgttgcgcaaccggttcaatgcgcgcttcggtgtgtggaattccgcgctgattgccgccggcgcttatggtgtcgccatggttggggtctcgatggcgctgcctagcgtggacgaagtgcccgaaggatttcccgcggcgttgctatggaactttcggttggcttcgctcggcggacaagccattctgtgggcgacgctcggcttgctgttcggcgcgtgggccgagaaggtcgtcgccgagcgccgaccagagccgcgacgtttcgccagttaa

SEQ ID NO: 489 - DNA, 1980 bp, BradyrhizobiumColbertium
gtgaaggcgccggccgccgaagtctatgactggaccggcttctatgttggcggccatgttgggctcgctgctggccgcgagcgcttcatggcggacgcgcttggccgtagtgtgccggccgcaggctcgttcggcctctatcgctcgcccaacggcttcactgaaggcggcagttggcttgagggcgtgcagttcggttacaactatatggtacaaaaccgcgtcgtgttcggcatcgaagccgacggctcgtttcccgccttccccgacccggacggactcacaatcggcgggatctcgaattttgcttcgcccacgctcggtcttgtaagcctgagcgagaccgtgctgtcatcgggcacgctgcgcgcccgcatcgggtacgcgcccggcaattggctgctctatgcgaccgccggtctcgcctggacttacaaccagcagacgattccgcaacttttgaccgccaataaggaggatcgtttcctttggcgcttcggctggaccgcgggcgcgggcgtcgaggtgccgatcgcgccgagctggacggtgcgcggcgaatatctcttcaccggctttccgactaagactctaatctatccggtttccaccgagcgtacggcaacggatttctcgctgcatcaacttcgtctcggcctcaactatcgcttcgacgatccctcgcgcccggccgcccttgcgccgtcgcgcttcgtgcctgcggccgacatcttcgcgatacacgggcaggcgaccttcgccaaccaggcctattccgctttccgctcgccctatgagggaacgaacagcctatctggtggcgcgcagtcgaagcagacattcgacctcacgctctcgaccggtgtgaagctgtggcaaggcgcggagttctgggccaatccggagatcgaccagggcttcggcttcaacaacactcacggcgtcgccggctttccatcggccgagtcctacaagcttggctcgtccacaccctatgcgcggctgcaacgcgccttcctgcgccaaaccattagtctcggcggcgacatcgagaaggtcgatgatgacttctatcagttcaagggcactcgatcgaccgatcgcctggtgctgacaaccggccgcttcggcatcgtcgacatttttgacaccaaccgctacgccaacaacccgaagtccgacttcctcaactggtcgatgatcaatgccggcaccttcgactatgccggcgacggctggggctacagctatggggccgcggctgaatggtacatcgggcgctggactttccgcgccggcatcttcgatctgtccaacacgcccgctggtggcaccagcccgatggcctacgcgctcgatccgaccttcaggaacttccaggcggtcggcgaaatcgaggagcgccacgagctgtgggggcagcccggcaagatcaaggtcacgggctatctgagccgtggcgtcatgggtgcgtattccgcagcggtcgcgctcgcgcgggcgacgggcgagccggcagacatcaatgcggtgcgcacttacaccagccgccccggtatcagcgccaacttcgagcagcagatcaacgatacattcggcatgttcggacgagcgggctgggccgacggcaaacacgagccctgggatttcaccgatatcgaccgcaccatgcagcttggcgtctcgatcggcggcaagagctggggccggcccgacgacaccatcggcatcgccggcgtgctcaacggcatttctaaacagcacgtcgccttcctcaatgccggtggtctcggcatcctgatcggcgacggtcagctcaccaactacagcgtggagaagagtttcgaggcctattacagctatgcgctgacgcccgcgacacgactgaccgtcgactaccagtttatcgccaatccggcctataacaccgaccgcgggccggtaagcatcctcgccggtcgcgtgcactggcagttctga

SEQ ID NO: 490 - DNA, 750 bp, BradyrhizobiumColbertium
atgaccgccgacgaagtctgccaggccatcaatgaggttgccgtcggcgtctgtgcaccggcggccagccgtcttgtaagtcgggatgacccacgcgaagcggtcagtgcggatgccttgctggatgaggcgatgcgcgaggcgatttggcgacgatttgcgcaacgcttcgtcacctttgatgtaagggcagcctactcaatctggatgcaatggtatttgaacacgttgatcccgcctgttttgcttgccgacgtcctgcttggtcagtcggtctcggtcggattgccgactttgagattcgtcatgtcggacgacgcgcgtgtcgatgcaatccgaatcgaaggcgcgagcgatggtagtggagatgatcctttccaacgcttcggatccctcgtgcacgaccacctcgctccattgattgaaatgtggtctagtcgcaccgatgtcgtcgcgcgagtgttctggagcaatgccggccacactttcgaagcgatgcttggtcgcatagaaagcttgtccggccctttgccgcggctcgctgaggcacgcagattgttcgtggagcgcaattggcgtggcgcacccaatcccctgttcgatgccgttcgctatgtgccggagcgcggtgcgatcgcgcggattcggcgcgtgtgctgcctgcaatacctcttgcctgaccgtcgcttttgcagagcatgcccgatcgacgaagcccgcgcctcgcgcgtggatgggccgatatcgtga

SEQ ID NO: 491 - DNA, 210 bp, BradyrhizobiumColbertium
atggtcttagctacgtctcttcccgttgccggtccgattgcgattcccgttcgcgacattttgccgtgggctgtcttcgccggccttctgctttctctgggagtctatttcgtcggcgtggagcagggcgcggcggctctgttcaacggagcgtacgttcatgagttcgttcatgatgggcgccacctgctcggcttcccttgtcactga

SEQ ID NO: 492 - DNA, 1524 bp, BradyrhizobiumColbertium
atgagtgtgaagaggccgacaacgaaagagatgtcggagatctgtgaaacgctcggcatgaacatgtcgattgcggagatcgaggcctttatcgaccaaatggaaggagcggtggccggctacaatgcgctcgacgcgctgccggacgaactgcccttgataaagtatccgcgcaccacgggctaccagccgagcggcgaggagaacgtctataacgcctggtaccgcaagtccaaagtgaaaggtgcttcgtcgggcaaactgcagggcaagaccgttgtcctcaaagacaatgtgttgctggccggcgtgcccatgatgaatggcgcatcgagtctggaggggtatatccccgatattgacgcgactatcgtgacgcgaatgctcgacgcgggggcgacgatcgtcggcaaggctcactgcgagtatttctgtttttctggcggtagccatactggcgccctgggtccagtgatcaatccgcgcaaggccggctattccgccggcggctcctcctccggcagcgccgcactcgttgccgcgggagaggtggacatggcgattggcggcgaccaaggtgggtcgattcgcatcccttccgcctactgcgggacgtacggcatgaagccgacacacgggctcgtcccctatactggcgtaatgccgatcgagaccaccctcgatcacacgggaccgatcacgggaagcgtcgcggataacgcgctgctgctagaggttctggccgggcccgatggccttgaccctcggcaggttaatatctcgaccgccgaatacactgcggcgctaggcaagaatgttaaggaattgcggatcggcgtggtcaaggaaggttttggtcatcccaattccgaggaggatgtggatacgttggtcaggaaggccgcagacagatttcgcaggctgggtgctgacgtgagggaagtatcgattccgatgcatctcgtgggaggagccatctggtcggcgatcgcccacgaaggagcgacggtccagatgatgcatggcaacggcttcggatttaactggaaggggctttacgtcacgagcctgatgcgagcgcatgacgcctggcgtacgcgcgccgacagcttgtctgacacactcaagatcacggtcatgatggggcaatacatgctccagaagcaccggggcgtatactatgccaaggcgcaaaacctggcgcggcggctgcgggcggcgtacgatgaggcgctggccgattgcgacctgttgctcatgcctacgttgcccttgaaggcaaccaaattacccggtccgtccgcccagctatccgaagttctgcagcgggcgttcgagatgcttggcaacacgtcgccattcgatgtgaccggtcatcccgcgatgtcggtgccgtgcggcatgagccaggggctgccggtaggcatgatgctgattggcaaacactgcgctgaaacgactatttatcgagcggcgcatgcattcgagcagtcggaggactggaaatcggcgaaatccagctga

SEQ ID NO: 493 - DNA, 987 bp, BradyrhizobiumColbertium
atgttgacggcaagagaaaaggttccggttacgattctcaccggcttcctcggcgcgggaaagaccacgctcttgaatcgcattttgcgcgaacggcatggcgagcgaattgccgtaatcgaaaatgagttcggagaggcgggcgtcgacaacgaccttttggtcgtaggcgagcaagagcagatcattgaggtgaacaacggctgcatctgctgcacggtgcggggcgacttggttcggattctgggtgaccttcgcaaacggcgggaagccaatcacgactcgtttgatcgcgttgtcatcgagacgacggggctggccgacccggcgcccgtcgcccagaccttcttcgtcgaggatgatgtcgcctcctactatctgcttgacgccatcgtgacggtggttgacgcaaagcacgctgccgatcagttggacgaattccacgaggcgcaggagcaggtaggattcgcggaccggattctgctgagcaaggccgaccttgtgagcgatcaggagctggcgcggctttccgaaaggctggcgcgaatcaatccgcgggcgccaatcaagcctgcgcgttttggcgacgcgccgatcgccgaactgcttgacgttcggggcttctctctcgacagcattctgcaaatagagcccgacttcctcggcgaggatcaccacacgcacgacgattcggtgcaatcgttcgtgttttcgagttcgaagccgttcgatcaagatcgattgcaggagttctttcgcggggcagtggctcgggtgggtagggacctaatgagatacaagggaatcgtcgcgtttgacggtctcgaccatcgcgtaatcttgcagggcatccatatgttgatgaattccgatctgggagcgccgtggtcaccagacgaagagcgttcttcgaaactagtcttcatcggccgtgggcttccgaaaacggagatgatcgctgatctaacggcttgcctggcgcagtag

SEQ ID NO: 494 - DNA, 345 bp, BradyrhizobiumColbertium
atgcaggtcgacgctcaatcgcccctgctttgcaagggtatcccgatcggtccggacagcgacaccaagttcgacgaaccgtgggaggccaaggtgttcgcgatcatcgttcgcctggctcaggacggattcttcgagtggtcggagtgggtggattgcttctccaaggaagtggccatcaatacagccatcgagtcatccggtggcgttccgcggtcctactatgagcaatggctggatgcggctgagaagcttctgatctccaagggggtgacgaacaaggcgcagctgcgcgcgagaggtttcgcagccggttcggcggggcccaataacgtgatgaagtga

SEQ ID NO: 495 - DNA, 315 bp, BradyrhizobiumColbertium
atgaacggagttcacgatttgggcggcatgcacggcttagggccgatcgtgcgcgaggaaaatgaaccgatcttccatgcagagtgggagcggcgtgtgttcgggatgtttgcgggtacgttcgtgtttgccggttactcggtcgacgagttccgtcatgccatcgagaacatagatcccgcgcattatttcgagtcgacctactacgaacattggctgcatgcgttcgaagacatcctgatccggcgcggcttcgtgacccgggaggaatacgatgctcgcatcgctgagttcgtgaagaagggaggaaaatga

SEQ ID NO: 496 - DNA, 612 bp, BradyrhizobiumColbertium
atgtctaagaccgtttcaaaacccgaatctgatccggccgttcgaacgcgcgctctggagtctattctggtcgaaaagggacttctcgacccgaaggcgctcgacgctttggtcgacatttacgaacacaaggtcggcccgcgcaatggtgccaaagtggtcgcgcgggcctgggtcgatcctgaatacaagaatcggctgcttacggacgcgacgtcagcaatcaaggagttcggtttctccggtctccaaggagaggacatggtcgtggtcgagaacacgccggaggtgcataacctcgtcgtgtgtaccctctgctcttgttatccgtggccgacgctagggttgcccccggtgtggtacaagtcggcgccataccgcgcgcgtgccgcaggcgatcctcgtggcgtgctgaaggaattcggcaccgaattgagcgacaacgtcgaagtccgcgtttgggatacgaccgcggagctgcggtacctcgtgttgcccgagcgccccgcagggacggagaaattgacggagcagcagcttgctgacctcgtgacgcgggattcgatgatcggcgtcacgaagctcggttcatctgccgcctccgagcattga

SEQ ID NO: 497 - DNA, 1455 bp, BradyrhizobiumColbertium
atggatctggatggcccggtcgatcaccctgcaggcggccagcggcgcaaagcacttgaccatggccgcctccttgcgcgcatccatgccgcgatcgagcatccaggctgtcttgtagaccatcaggcgcgactgctcgagatccatctcggattcggcgagcatccattgaatggcctgccgctcggcaagcggcttgccgaaggtctcgcgctcgcgcgcccgtttcgccgcctcgccctgcgcccagcgagccgtaccggtcagtcgcgcgccgatcaccgtgcggttgcgattgagctggtccatcatgtagcggaatcccatgccttcctgaccgagcatgttcctcgccggcaccacgcaatccttgtactggtagtcgcagcttctccccagatacgtgcctggcgccatggtctcgtattcacgcagcacggagacgccggggttgggatagtcgacgaggaagaggctgatcccctcgtaccccttcccggggtcggttaccgcgtagcacaggagatatttcggcgtgatgcccggatggttcggcggcggcgcccaacgcttgatgccgttgatgacatagctgtcgcctacgcgaacggccgtcgtctggataccggccgcgtccgaacctgctcccggctccgagatgttgatgtgatagaacttgtcttccttgaggatcgggtagaggtaggcctctcgctgccattcaggggcgacgtacagtgcgggatgtggatcgaggaatcccgaccaggtcgcaagcaggccgtgcatgacgggcgatctgacgatttcctcataaaccaggcacttcgcgatggtcccgagcccttggccgccggcctccttcgggactgcgatgcccctgaacccgtactcgcgaaacttgcgcaccacgtccatgaagatgtcgtggggaacggcgtagtcgtccgttccccatcgatcctccagtggccggcacacctcgtccacgaacgcggcggcacgcgccttgatatcttgctgctccctagaaagttcaaaatccactgcgatctccaacctttgctcagtgaagcgagcctaagacccctgtctcgcggccgttatggcgccgtaggccaatctggttggccgattggatcatcgggccggctgcccgtccggcggcgtcggatgccggcgtcggctaccaaggaggacttgcagggatgcagtccgcgggtaaaccggttgaatcaattccggttcggccgacgatctggagaggttcgcgcagcggacccgatcccgaagagcgctcacgggcggtgttctctcgccgccgtccggcactggctgaatatcccgatgttctcgcgcgagccggtcaggccaggtacaatgcgcatagccgcgttccagggagaccctttcaggatccccggcgtatcgcgctccggatcgacggcgacataa

SEQ ID NO: 498 - DNA, 2043 bp, BradyrhizobiumColbertium
atgtttaccatcggaatcgatgttggcggaacgtacactgacctcgtcgcggtcgatcgcgacggcaacaccgtgttcgcaaaatcgccgacaacgccggcggaccagtctgtaggcgtcatgaatggacttgaggaactcgcaagccggctgaagatgccacgagcggagatgctcgccaggacggaccgcctggtgcacgggacaacagtggcgacgaacgcattgctcgagcggaagggggcaaaggtcgcgctactcacgacggaaggccatcgagacgtcatcgaaatgcgcgagggtctgaaggaagatcgctacaacctccgcatcccacctccggcccccctggttccgcgccaactacgcttcggtgtacgtgagcgcgtcaggccgaacggcgaggtgctgattccactcgatcaagactccctcggtaaggcgatctcggcgatccgcgccgccggagcaagctccgtggccgtgtgcttcctgcacgcctaccgcaatccagcgcacgagattgcgaccgtcgaacgactgaaacgcgagcttccagagctcaacgtctctcggtcgagcgatgtgttgccgcagatcaaggagtatgaacgcgcttcaacaacgatcgtgaacgcttacgttgctccgctggtgcggcgctatctgaccaatctggaagcccggctgagggacgcgggcctgaccagcagcctttttgttatcctttcgcatggcgggatggccccgcttgaggaagccgcgcggctcgctgcaggcaccgtactttccggccccgcgggtggtatctcgggatcccggcgctgtgcggaacagctcggaattcccaaccttgtccctttcgacatgggaggaaccagcacggacatctcgctgattactgatggtcgcgcgtcgctgtccgctgagggagggctcgccggtcaacgtatcgcgctaaggagtctcgatatcgcgagcatcgccgccggtggagggtcgattgctactctagatgcgggtggtacgctccgcgtcgggccagagagcgctgggtcggtgccagggccggcttgctacggcaacggtggtgttgaaccgacggttaccgatgccaatgtcattctcggatatctggacgcgtctgcgttcatgggcggaaagcggccgctcgatcgtgcagccgcagaagcggcagtggatcgtattgcgaaagcgctggagctgtcgcgggacgatgcagcggctggaatctatcgaatggtcaatctgcgcatggcggacggtatccgtctgatgaccctgcgtcgcggtgtcgacccgcgacgcttcgcgctgcttagctttggtggcgctgccggcctgcacgcggccgaagttgcgcgggaacttgaaatcaagcgcattatcgtgccgacggcggcgtcagtcctgtccgcctggggcatgttgaccagcgatctgcggtacgaggtgagccatacgcattacagcgccggccaacggattacggcccaggaggtcagggccatcttcgccaacctggaaagagaggcgacgggtcgcctgaagtcgtggtttggcggcgatgtggcaatcgaacgttccgccgagatgcggtacggcgagcagatcttccagattgatgtcccgctaaacaatcttgattgggcgtcggacgacatcgtcgatcggatagaggatcagttccatcgtcgccacgaagagctatacacctactcgtccccggatcaggaagtggtgttcgtcaatgcgcgggtttctgccctaggcgctgtcccgagcgtcggacaagtcgcgcgtgggcaggagaccgaagcgccttgcaaaccaagagaacgtcgaaaggcgttcttcggccaatggcgagaagttgatgttttcgccgccgatcagcttcgtccggggaacaggatcgaaggtccagcaattgtggaagcggaaacgacgacagtcgtcatcggcgagggcgatcaaatcgaggtaaacgatctgggctggctcgacatcaggctcaggtga

SEQ ID NO: 499 - DNA, 1659 bp, BradyrhizobiumColbertium
atgacctcaaagatcgaccccatcacccgctccgttgtccagcatcgtctaagttcgatcgtgaacgaaatgggcgaagcgatgctgcgtacatcttactcgcagatcctgaactccagccgtgacttctcgctggggatctgcgacgtgaatgggcgtttgattgcgcaggcggaccatattccggttcatgtcggcgcgctgtcctgggcgacgcttgcgatcgaggagcgcttcaaggacatcaagccaggcgacgttctgctgctcaacgatccctaccatggtggcagtcacttgcccgatctgaccgcgttcgtgccaatcttcgatggggaacggaggctgtactggaccatcgtgcgtgcacaccagagcgatatcggcggggcgacccacggcggctacaatccgggcgcgaccgacatttggcaggaaggattgcgggtaccgccgatccggctttatgaagcgggcagacttcgtgacgacctgctcgacatgctggcactcaacgtgcggaattctcgagatttccgcggtgatcttgctgcgatgattggtgcggcgcacctcggcgaacgccgtgtcaggcggctgctcgacgagtttggtggacaggtcgtcgaggccgccgtcgaagcaattctcgatgctgccgaacaacagacgcgggcagtcctagcgacatggcaggacggtacgttctatggagaagcgtatctcgacgatgatggtcatggtcgaagcgatatcagaatcgccgcgaaggtgaccaagaagggatctgacatcgagattgatctttcggagtcggaccctcagtcgacgagctttgtcaattcgtcgcacgccaatatgcaggctgcggtcgtcatggcttttgcctatctcatcgatgcggatattcccaagaacgccggcgcacttcggccgctgaaggtcgttgccaaacagggcacgatcgtatgggcagatcccggccggccggtcacgatgtgcaccagccatccttcgaatgaaattgtggaggctatcgtcaaggcactttcccagtcgtgtccggatcgtgcgatggccgggtggagccgcagattccgcatcgccatccagggtgagaatccgcggacagggcgcaattttatctggcatttgttccaggccaggcccggaggaggggcgtcgtcggcgggcgatggttggtcatcgattggtgaatggcatacggtcgggggtatcaaattcggcagcatcgaggtcgatgaagcccgctttccgctctatttccggcatcacgaatttcgtccggactccggcggagacggcaagtttcgcggcggcctgggcgtgtcgttggatctcgtcgtggaaacggcgaagcctgcgcgagcgaacaccgcaggcgagggcacgaagcatggcgcatgcgggatgctcggcggcagtgatggccttccccatcagtacactctcgtgtcgcagggccgcgcgccgcgggtgctgcgcacgaaggaggtcggcatcgaagtccttcccggcgactgcttcgaggtgcgctcctcaggcggcggaggatggggcccccctggtcaacggtctgctgaagcgcgcgaaggcgacttgatgcagggcctgacgacaaagctcacgacgatttaa

SEQ ID NO: 500 - DNA, 1317 bp, BradyrhizobiumColbertium
atgtatcccgccaatcattctcaatcgcgagatctctatcaacgagcgctcaagagcctgccgggtggcaatacgcgaaccaccgtctatatgaagccgttcccgatctacgcagcttcgggcgccggctgccgtgtccgggacgtcgatggcaatgagtatatcgactgcatcaacaacttcacgtctctcatccatggccacgctcatcccgcattgatcgaggcggcgaccaagcaactcgctctgggctccgccttcggcatgccgacggagtccgaagtcgaactcgcggagttgctggcagcaaggcttccatccgtagatcatgtccgcttctgcaattcgggcaccgaggcggtaatgatggcgctaaaagcggcccgcgcctacacgggtcgcccgaagatcgcgaagtgcgagggtgcttatcacggctcctatgactacgctgaagtcagcctcgacccgacacccgcggcttggggaggcaacgccccggtatcggtagcctatgccaaaggcacgcccgacaacgtgctcgcggacgtcgtgaccattccgttcaacgacgtcgaagcggccgtgagcctgatccgcgagcatggtcccgaactcgcttgtgtactcgttgatcctatgccgaaccgggcgggtctggttccggcggatcgagcctacgtggaagcgctccgtcaggtcacgcgggaagtcggcgcgctgcttgtcttcgacgaagtcatcacattccgtctcggctatgagggcgcacaagggctctggggcatcgatccggacctgacgacgctcggcaagatcatcggtggcggcttcccggtcggcgcggtcgccggcggcaagacgttcatggcggtgttcgatccatcttccggcaaaccggcgctcccgcacggcggcaccttctcggccaatcccgtcaccatgcgcgccggtcttgccgccatgatgttgctcgatgcagcagcctattcacgcctcgatcggatcggcactgcggtacgcgacggcatcaatgcggccttccgcaagactggcgttgccgggaccgcagtcggattgggctcgctcctcaaggttcatttcaccgaccgcaacgtccgggattatcgttcggcttactcgagcgaggtggaagcgaagcgccaggccgttttcaccgccgggttgctcaatcgcgggattttcgtcgcgagctatggcctgatggcgctgtcgttgccgatgaccgatgctgacgtcgatacgattgtgaaggcggccgcggagtccttggaggaggtcgccgcgttcggctga

SEQ ID NO: 501 - DNA, 708 bp, BradyrhizobiumColbertium
atgctgtcgtgtaacgatctcgtggtcgcgcatggcgatatcgtggcgctgcagggagtgaccctccaggtcgaagctggcgaaacggtcgcgcttatcggtgccaatggcgccggcaagacgaccttgctccatgcgatctccggcctcaaccgagtttcgtcgggagacataagattcgagagacgctcgatcgccggatggcccaccgacgcacgcgtttccgctggcattgcgcaggcgcccgaaggccgaaggatatttcctggattgtcggtcgaggagaacctgacccttgcgaccgtcagctggcgccgttggaggcagtcgattgcggccgatctcgatcgcgtctttggattgtttccgcgccttaaggagcgccgacgacaactgggatggtcattgtcgggcggagagcagcagatgctggcgatcggacgtgctctgatggcccgccccaagttgctgttgctcgacgagccatcgctcggcttggcgccgcggcttgccgaagaggtttacgaacaggtcaggtgcattggcgagaccggtctgaccattctggtagtggagcaaaatacggtactcgcgctctcggtcgccgatcgtgcctatgtgctggagacagggcgcattgtgctggaaggaccggcagacgaactcaagcacaatgcgcgcgttcgcgaagcttatctggggcgctga

SEQ ID NO: 502 - DNA, 603 bp, BradyrhizobiumColbertium
ttgaacgttctgactggcctggcgatgccagatgaagggcaggtgcttctcgccgggcaggcgatcacgcggatggccaccaacaagcgtattcgtgccggcctcggccgtacgttccagcacggacgggtattcgcacgccttagcgtgctagaaaacgtgatgacgggtgcggcgatacgcggccgcctaagcgagtctgacctgcgcgacttctcgatggagatcatcgagcaaatgggattggcagacgtggcgcacgaagccattatgtcgctctcgtacggtcggcgccgaatggtggagctctcacgtgcgttggcgtgccggccgcacgtcctcctgctggacgaaccggcggccggcctcaattcaggcgaggtcgatcaactaatcgatcgcctggcggagttgcgggcgatgcacggactcgccgtggtgctgatcgaacacaatatggggatggtcatgcggctcgccgagcgcatcttcgttctcaattttggttgcaagatcgccgagggaactccagcggagatacaagcagatccggccgtgctgtctgcttatctgggcgaaggatatgctcatgctgtcgtgtaa

SEQ ID NO: 503 - DNA, 975 bp, BradyrhizobiumColbertium
atgcgcattcccctgcagatcgcgacggcgatcattgtgctcggcgggatctccggtatggtcctgccggaatatcatcttcgcttgttgaatctctcgctgatctccgcggtcgcggtgattgggctcaactttgcgtttggctatgccggtttgatctcgcttggccatgcggcttttgttggcatgggcggctatggcttggccatcctgacgaccacttgcggatggtcaccgtggctcgctgcgccagtagcgattgcggcgacagccatttctgccggcctgatcgggtacccattgcttcgcctgcgcgggcactacctggcactggcgacgctcggcctcaacgtgtcgttctatatcgtaacgtccaattggattgcgatgacaggggggaccaacgggatcgcgcggatcccgggattggcgcttggctcgttcagcttctccggggagcaccagttcctgtggcttgcgcttatggttctggcgctgatcgccgccgccgcggccgcattgcacaagtcccgcctgggccgcgaaatgatagctgtgcgcgatgatgagatcgcgtccgagatgaccggaatcgatacgacgcggatcaagattgaagcgttcgtgctttccgccatctgcgctgccgttgccgggtgcctgtttgccctgcacatgcgcttcgttgcgccggaggatttcacctatgcgcactcgatcacatacctcgccatgttgatcgtcggcggcgaaggcacaatcgtcggtgctgtcctcggagcggtgctgctgacgtttctgccggaatggttgcgctttctcggtaccgcctacctcttcttcttcggcctgctggtgcttgggattctggtgtttctgcccacgggtctcgttggcctcggccaacgcttgagccgtcggtcagctaaaactccgcttctcgcatctgctcgcgctccggaggcgacgtcatga

SEQ ID NO: 504 - DNA, 876 bp, BradyrhizobiumColbertium
atggcggacttcgttcagctcatcatcaacggtctggcgatcggtagcgtctatgcgctcgctgcgatcggcttcgtgatcgtttactctgctaccggcgtggtcaatttcgccgccggtcagtttgtaatgtttggaacgttcgcgggcgttgcgacgctcgtcaacgcgcagctgccatggcccttcgcctatggtgcggcgctcctcatcatggcgctgttcggggccctgttctttgtctcggtttatctgcctctgcggcgcggttcgatagtgaccatcatcatcgggaccgttgccgtcagcatcacgatgcagaacgccgccttgctatcctttggatcatggccattccggctgccatctcccgtcgaggacagcgcggtttcgcttgggggtgcgatcatttccctgcatgccctggcggtggtcgcggtgaccgcggtgatggtggccgggctatggcttcttttcaatcgtacttcggttggcgtgggcatgcgagccgtagcgcaggatgtacaggctgccagattgatgggtcttaaagtcaaccgcctgctggcgttctcatggatcctcgccgcggtactcgcgggcgtcgcgggattgatgctcggcccgatgtggttcgcggacgtcaacatgggggatccgatcgcattgaaggccttcgccgcgaccatcatcggtggttttgggagcctgccgggagcgatcgtgggcggccttttcgtcggcttgagtgaggtcctcggcgcatcgtatgtctcgtctgcgtacaaggatctgatctccttcggcataatgatcgcctttctgcttgtgcgtccgcaaggcgtgttcggcgagaaaattcaggatcgaggctga

SEQ ID NO: 505 - DNA, 1152 bp, BradyrhizobiumColbertium
atgaagattacgcggaaggctggtctcggcgtgacgatcggagcggcgatgctgtcgttcgtgagtgtggctcaggctcagcagggcagccctatcctgatcggcgcgactgtgccgatgacggggccactgtccctgaccggcaaacagtatcaaaactccctttccatggccgaagaggacatcaacaaggccgggggcatcaacggtcgccatatcaagatcgtgttcgaggacacgcaggcgtccaacggaactgctgtcaacgcgttcgtaaagctggcccaggaaaccaagccagcattcttcttcctgtcgagctactccacgcagaatctcgcaacggcgcccgagctaagcaaagttcaggtaccggcgatgtatgccggcggtgccgacgtcgtggccgataaaggcaacgaatggatgttccggatccgtccggcggacagcgtttcggccgaaggaatggtgaaggccgcagtcgacgtcatcaaggcaaagaagcccggaattctctacatccagaacgactttggtcagggcggtgcgcagactgccgccaagcgcttcgaggccgccgggatcgcggtcgccggcatggaagcctatggccagaacgacaaggacttctccgcgcagctcctcagtctccgcaataaaggcgccgatgccattctgatcttcaattatccgcaggatggcgcgctggtcctccgccaggcgaagcagctcggcttcaagatgccgctcgttacgtcctctgctgcgctggtgcccgcggcgacgcagcttctttcgccgtcggatctcgagggggtctggggcgtggtcgatgccttcatggacgtcagcgtcggcggccggatgaaggactacgtggagcgcttcaaatcgaaattcggggttgatccagatccctacgggctcgcgtattatgacggtgcgatgctgatggcggacggcatgcgcaaggccggaaccgacccgaaggcgctgcgcgaatggctgtcctcggtcaaggggtggcagggcattggccacgtctactcgtatgacaacaaaggcaatggggttcgcgacctcgcggtcgtgaaggcaaagccgggcaccaagaccttggaactggtccaacctgtctcgctcaactga

SEQ ID NO: 506 - DNA, 780 bp, BradyrhizobiumColbertium
atggatgacaactcgcccggcccgctggctcgatacatcgacgtgctcgaagtgattgccgccttccccggcgcgatcacgctcgccgacgtctcatcgatcctcgaactccccaagacaaccgcacatcgactgctgaaagggctggttcgatcagggctggcagtcgaagcggaagcaggacgcacctattccgtgggcgatcggctgacgcgtttgcttcatgcaagcgcggacgatggctggtacgcgtcgctcgccggtccccacattcatgctttgacggaggcgacctccgagacctgctatctcgcacgcctcgttgggtcgcgcgtcctcgtagccgtttcatattcgcccgatgtgaggtggcgcggatatgttcagccgggaatcgagatgcccgtgaatgccgcagcgactggcaaggccatcatggcctttcagagcaaggagctgatcgctgaggccctttcaaatgagcttcccaagccgaccgtcaattcgcacaccagccgaaagtggattgaccaggagttcgcaaaagtcagaagatcgggctacgccacttgtatcggggagatcgacgaaggacttgcggcacttgcggtccccgtcacgctttcggatggcacagtccttcaatccgtcggcatgaccgggccgcttgagcgcatcatgaacaagcagatggaggaacggctttcggctctccggaagactgcagcagctctctcgaaagccctatcccgaggaatggctgtaaatcgtcggcgttga

SEQ ID NO: 507 - DNA, 1404 bp, BradyrhizobiumColbertium
atgtcagcagatccaattcactataagtcgatcacagagctctccgggctgttccgccggggtgagctcctgccgtcgaaggtgaccgaggccatgctgggacggattgagaagctcgacggcaggttccatagctatgcactcgtactcgccgatcgcgccatggctcatgcgaaacgccatgacgccgagttcgcgaaaggcatctggcgggggccgctgcacggcgtgccgattggactaaaggatctctgttacaccacctttgcgccgacggcgggcggcaccacgatccacgccaagtttatcccgtccttcaacgcgacgatcgtggaccggctcgaactcgccggcgccgtcgcgctcggcaagctgaagatgaccgagggcgcctacaccagtcaccatccgaacgatcaggctccgctcaatccttggaacatcgaatactgggttggctcctcctcgagcggatcgggcgtggcaacgtcggcggggctctgcttcggttcgatcggcagcgacaccggcggctctatccgatttccgtccgctacctgcgggctgaccggcatcaagccgacctggggacgcgtcagccgtcacggcgtttttcccctcgcggactcgctcgaccatgtcgggccgatgtgccgaagcgcggcggatgcggccgccatgctcggcgccatcgcgggcgccgatgtcaacgatcccacggcgctgcaggagccggtaccggactatctgaccgggattggcggcggcgttcgcggcttgcggatcggcgtggaccgcagctacacccaggatggtatcgatccgcaggttgtcgccgcgctgctggaagctgaacgcacgcttgcggagctcggcgcagacatccgcgagatcaagttccccgcatacgagaagctcgtcagcatgtggattccgatgtgctcgatcgagaccgcagaggcgcatcttgagacctatccatcgcggaagtcggagtacggccccgatctggcgcagctgatcgagcaggggagatccatgagcggcgtcgagatcgcgcagatccatcacgagcgcttgaagttctgcggaagcctcgcggccttgttcggtgaggtcgatttgctgctcattcccaccatgcccgtgccgatcccaacgctgaccaagatgggcgaatacggcgccgatccgactgtgctgctcagcatccttcgcttcaccgcggtgttcgacttctccggaagccccaccatcacgctgccgaatggcatggcgtcggacggcctgccgctcagcatgcaattggtcggcccgcatctatcggaggatgtgctcgcccgcgccgggcatgccttccagtcggtgacggattggcatacccggcgcgcgccgatcgactga

SEQ ID NO: 508 - DNA, 762 bp, BradyrhizobiumColbertium
atggatctgggactcaagggagcaaaggttctcgtcactggtggcacgaagggcattggcagggcgatcgccgagaccttcgcggccgagggggccaatgtgggcatttgcgcgcgcaatcaggctgacgtcgacaacgcagtcaccgcgatcaaggcgaagggcgtcgctgcattcggcagctcggtcgacgtctccaatggaccggcgctcaaagcctgggtggaggatatggcctccaagctgggcggcatcgatattgtcgtcgccaatgtcagcgcgctgtcgatcgggcaggacgaggagagctgggagaaggagttctcgaccgacatgatgggcaccgtgcggctggtcaatgcagcaatgccgtatctggagaagagcaaggccgcagcgatcgtcaccatctccagcgtgtcgggccgcgaagtcgacttcgccagcggcccctatggcacgttcaaggccgcgatcatccactacacgcaagggctggctttccagcttgccggcaagggcattcgcgccaactcggtctcgccgggcaacacctactttgagggcggggtctggaatcagatcaaggacggcaatcccgagctttacaagaccgcgctcgcgcttaacccgaccggccgcatgggtacgccgcaggaaatggcgaacggtgcggtattccttgccagcaaggccgcgagcttcatcacggggaccaacctcgtgatcgacggtgcgctcacgcgcggcgtgcagttctag

SEQ ID NO: 509 - DNA, 633 bp, BradyrhizobiumColbertium
atgtcggtctcgcgcggcgagattgtcggcgtgatcggccgcaacggcgtcggcaaatcgaccctgatgcgctgtctcatcggcctgctacaaacttggcgcggtacgatcagcttcatggaggaggacgtcacagcgctggaggccgacgcacgggcgagggcgggtttcggctacatcccgcaagggcgtgacgtatttccacagatgacggtcgacgagaatcttctggtcggcgaactgatcggtggcccgcgcagcaagaagctgccggagctcgtatatgaatactttccacggctgaaagaacgtcggcggcaggccgcgggcaccatgtcgggcggcgagcagcagcaactggccataggccgcgcgctgatcggcaatccgtccctcatgattctggacgagccgtccgaaggcatccagccgtcgatcgtccagcacatctgcgaggcgctgaggtcgttccggaacgagctcggaacgaccatcatcttcgtcgagcagaacctggacacgatcctcgcgatcgcggagcgctgctacatcatggagaagggcaggatcacgaagtcgctggccggcggcgaggtcaacgaggacaacgtccgcgaacagctgctgctctga

SEQ ID NO: 510 - DNA, 720 bp, BradyrhizobiumColbertium
gtggcgctggtcgaagtcaagggcgtatccaagaggttcggcgggctgaccgccgtctccggggtcgatctcacggtcaatgcgggcgaggtccactgtctgatcgggcccaacggcgccggcaagagcacgctgttcaagctgatcgtagggctctatccgccgaccgagggcaacatcctgttcgataccgtcgacatcacgaccgagcgtccctatgcgcgcgtgcagcggggcatgagcatcaagatgcaagctccgagcgtgttcaaggaattgcccgttcgacagaacatccagacggcgctccaggaacgattgtccggcgcggagcgcatcgccgaggaggatcgcctgctgacgctgctcaacctcgcaccggacagcggcaaactcgccggtgcgctgtcgcatggtcagcagcaatggctggaaatcgggatggcgctggcgctgaagccgcagctcctgctgctggacgagccgacggccggcatgtcgccggaagaaacctacaagacaggcgagctgatcaaatcgttcaatgccgagggaatgacggtgctcgtcgtcgagcatgacatggccttcgtacggcaggtcgcgcagcgcgtcacggtgctgcatctcggcaagatctttgcgcggggcaatctcgagagcatcttgcaggacgagaaggtcgctgaaatctatctcggtaagacccatgctcactaa

SEQ ID NO: 511 - DNA, 1071 bp, BradyrhizobiumColbertium
atgttcaagctgctggaaggtccacagacgctcgggcgcggcaggatgttctggacctgcttcctcgttgtgttggggggagcgctggcttacccgctgttcgccgactcctacgacgtcggcaatttcgcctacttcctgatctggatcttcatggcgctcggcctctgcctgatgtggggctatggcggcatgctctcgttcggccagaccttgttcttcggcatcgccggctacggatacggcgtgctcgcgatcaacatgggcggcggcaccgcgacgatcgccgcgctcgtgctctcggtcgccctcgcgatgattgcggcaggcatcctcggctacttcatgatctggggcggcatcaacgggatattcttcggcatcgtgacgctgtccgcaacgctggtgctggccttcttcctcggccagacggccgggcccgaatggcatatcggtccggcgcggctgaacggcttcaatggcatgaagggcatggacccgctgaccgtgggtgacttctacatcgagggatcggcgctttactacgtcctggtcgcgctgatcgtcattgtatatctggcgctgcggatgctgttgaattcgggtgtcggcaacgtcatcgtggcgacgcgcgagaatccgcaacgcgcggagatgctgggctatgatgtccgtaaatatcagcttctgaccttcgtgatcggcagcggcctcgcggggttgagcggtgcgctctacacgtcgtgggggcagttcatcacgccctccagcatcggcctccctgcggctgcgatgccgatcgtatgggtggcgttctccggacggagcgacctgacggcgacgctggtcggatcgttcctgctgctgttcggctttcagaccatcaccgtctacagccagcaggccgcgctcgtgctgatgggggcgctgctgctcgcaacggtgatgctggcgccgcagggctttgttctcggcatcggtaaactcgttgcggactggtggcgcgaccgacgtcgaggtgacgatgccgtcgtcacggaggccggtcgcttgcagtcggaagaggcctga

SEQ ID NO: 512 - DNA, 867 bp, BradyrhizobiumColbertium
atgtcggctgaagtgttctcggtattctatcaattcgccgacgtgtttgcgttcctcattctctcggccgcaggtctcgccatcgtgttcggcatgatgggcgtgatcaacatggcgcatggcgagttcatcatgtgcggcgcctacgtcaccgttggcctcgtgaacctcggcgtgccgcttgcgctcgcccagatcctggccgcggtgaccgcgggccttatcggtgtgatcgtcgagttcctggtcgtgcggcgtttctataagcggccgctggattcgctgctcgcaacctggggcttgagtctcatcgtgacgcaatcgatgctcctgatcgtcggctccgccgtgcgaggtatcggaacgcccgagggaagttttgcgatcggtggctacacgttttcgacctatcgcctggtgctgttcggttgcgcggtagccgtgctggtcggcctctacatcatcttcatgaggacgcggttcggcgtgattgcccgcgcgacaatgcagaatgcggcgatggccaaggcgcttggcgcgcgcaccggcaggatctatgcaatcagcttcgggatcgggaccggcctcgccgggctttgtggggcgctgtacgcgccgaccatgacgctgatcccgaccatgggtgcgaccttcgtggtcgagagcttcgtgaccgtcgtcatcggtggagccaacgtgctgctcggaacggcgccggcggccgtgctcctggcgatgatccggatgacgctgaacgcaagctacggtcagatcatcggacagatcggcatgctggtggccgtcatcctgatcattcgcgtgttgcccgaagggctctcaagcgtgctggttcgtcgtgggcgctag

SEQ ID NO: 513 - DNA, 1218 bp, BradyrhizobiumColbertium
atggttttgctcggcgccatgcttggcgcggcggcatcgacaagtcttgcccaggcggccgagccaccgctgaaggtcggcctgctcgaggacgtgtcgggcgaccttgccttcatgggcatgccgaaactgcacggctcacagctcgccgttgaggagatcaacaagagcggcggtatcctgggtcggcagatcgagctcatccaccttgatccgcagggcgacaatgcgcgctaccaggagttcggacgccggctgctcaatcgcgacaaggtcgacgtgctcatcggtggtatcacctcggcctcgcgcgaagctctgcgtccgatcgtcaatcgtacctcgacaccgtacttctacaccaaccagtacgaaggcggcgtttgcgacgccagcatgatcagcatgggcgcggtacccgagcagcaattctcgacgctgattccctggatggtcgagaagttcggcaagaaggtctatgttatcgccgccgactacaacttcggtcagatatcggcagagtggaaccgcaagatcatcaaggatctcggcggccaggtcgtcggcgaggagttcattccgcttggcgtgtcgcagttcgcgcagaccatccagaacatccagaaagcgaagccggactggctgctcacgatcaatgtcggcgccgcccaggattcgttcttcgagcaggcagcggcggccaatctcaacctgccgatgggctcatcgatcaaggtcatgcttggcttcgagcacaagcggttcaagccgccggcgctgaacaacatgcatgcgaccgcgaactggttcgaggagatagacacgcccgaggcgaccgaattcaagaagcgctggcgcgccaagttccccgacgagctctacatcaacgacatggggtacaacgcctacaacgcgctctacatgtacaagtcgctggtcgagaaggcgaagtcgatcaagctcgaagacatgcggaaggtgatcgcgagcggcgacgcctgcatcgacgctcccgaaggcaaggtctgcatcgatcccaagagccagcacacctcgcatcgcatgcggctgatctcggtcgggcccaagcacgaggtgaaggtcgaaaaggactatggaacgatccagccttactggcttggcgagatcgggtgcgatctgaccaagaagaacgacaaggatcagtacacgccgagccatctgccgaagaaatcgtga

SEQ ID NO: 514 - DNA, 996 bp, BradyrhizobiumColbertium
atgtccgaagactggttgaagacatccatcatggccaagcgcgctgtcgccaaaggcgcggcgggcgcaacgcatagtctgacgatcgagcagcagggcggtttccactacgtttacggcccttatgccaagccgacgctgtcgatcgaccccggcgaggtggtcgtcgtcgagaccgaagatgcttttggcggcgtgctgaccaaagagactgatagtcccaccgccaagctcaacttcccttatctcaatccacaatgtgggccgatcgcggtgaagggggccaagaagggcgattgccttgcgatctacatccgcgacgtcgagacccggggcgaacaacccgctggcacgacctgcattattccggaattcggcggactggttgggacgggctcgaccgcgctgctcaatccgccgctcccggaacgcgtgaagaagctgcatgtcgacaggaacggcattcgctggaacgacaagctcacgctgccctacgagccgttcatcgggaccatcggcgtctcgcctgagatcgaggcgatctcctcgctgcagccggactatcacggcggcaacatggatctgcccgacgtcgctccgggtgcaatcatctatttcccggtccataccgacggcggaatgctctacgtcggtgattgccacgcaacgcaaggcgacggcgagctttccggagtggcgctggagcagcgcgcgaccgtcacgctgcaggtcgacctgatcaagaactggagctttgcctggccccggcttgagaccgaggatttcatcatgacgatcggaagcgcgcgtcctctcgaggacgcagcgcgcatcgcatatcgcgaactcgtgcggtggatggcggccgattacgggttcgacgagatcgacgcctacatgctgctcagccaggccggccgcatgcgcctcggcaacatggtcgaccccaaatacacgatgggtgcgtcgatcctcaagaattacctcaagccatga

SEQ ID NO: 515 - DNA, 1401 bp, BradyrhizobiumColbertium
atgacggcaacagacctccactatctcgggctcgtcgaagtcgggcagaagatccaggcgaaggcgttgtcaccggtcgaagccaccaaggcgatgctgcagcggatcgagaagctcgacggccagctgaagagtttcgcgtatgtgatggctgactcggcgctcgctgatgccactacggccgaacaggagatcgcttccggaaaaatcaagggcgtgcttcatggcgtgccggttgcggtcaaggatctctgctgggccaagggtgcacctgcggcccatggcatgacgatccaccgcgacttccgtcccaccgaggacgcaacggtggtcgcacgattgaaggacgccggcgcgatcatcctcggcaagctgcagcagaccgagggcgcttacgccgatcatcacccgaagatcgacccgccgaaaaatccgtggaacgcggatctgtggcccggcgcatcttccagtggctccggcgtcgccaccgccgcgggcctctgcttcggttcgctcggcaccgatactggcgggtcgatccgtttcccgtccgcggccaatggtgtcaccgggctcaagccgacctggggacgagtcagccgctacggcgcattcgagctcgcggcgacgctggaccacatcggtccgatggcgcgaagcgcggtcgattgcggcgccattcttggcgtgatcgcggggcaggatcccaaggatacgacgtcggtgccgctgacggtgccggattatcttgctggcctgaccggggatctgcgcggcgtgacgatcggcgtcgatcgacgatggaccagcgagggcaccgacgccgattcagccaaagtgctggccgaggctttgcgggtggcggctgatctcggtgcgaagatcaaggaaattgcgttccccgatccggcggcggttatcgatgactggttcccgctctgtggcatcgaagtcgcggtggcgcacgaggagacctatccagcgcgcaaggacgagtatggtccggcccttgcgggcctgctcgaactcggccggcagcaatccggcatggactatcagaagatcgtgcttcggcgtgaagcgtttcgcggcgcggtgcgtctgctgttcgagacggtcgatctcatcgcggtcccggcccaggcgttcgcggcgcccacgctttcaaagatggcggcgctcggcgaggacgcctcgctgatcggcggcctgcttcgcttcacgtgccctttcgatatgacgggaagtccgaccgtgacattgcccggcggcttcgcggcgaatggtggtccggtcggcttccagttcgtcggccgccatttcgacgaggctggcctcgttcgcgcaggtgatgcgttccagcgcgtcaccgactggcacaagcgtcatcccgcgatttga

SEQ ID NO: 516 - DNA, 1173 bp, BradyrhizobiumColbertium
atgaccaagccgtctgttcccgttggcatcatctgctcacagtccgggccttatcaggcaatgggccgcgagatcctcaagagcgcgatgatggcagtcgacgagatcaacaaccatgcggagttcgagttcgcgatcgcaccccatattcgcgatcctcgcggcattgtttccgaataccatacggtgtgcgacgacctcatccgcaatgtcggcgtcaagcacatcatcggctgctacacctccgcctcccgcaaacaggtgcttccgatcgtcgagcgcaccgatcgactgctctggtatcccgcccgctacgaaggcttcgagtgctctgacaacgtgatgtatgtcggcgcgtcgcctaatcacaatgtgctgccgctcgtccgctacgtgctcgacaatctgtcgcgggagatcttctgcgtcggctccaactacgtgtggacgtgggagaccaatcgcgttacccgtgaattggtcagcgcggcagatggccatattctcgccgaacgtctgcttgagctcggggaaagcgccgtcggtcacatcgtcgaggagatcgtccgccgcaagccgccgatcgtgttcaatacgctggtcggaagctcgagctacgatttcatccgggcatttcacgcaggtaccaaggctgcagggctgcagattcccatgctgagctgcagcctctgcgagccggaactggcgatcgtcgggccggcgtcggccggctgcatcacgtcgtcggcatatttcgagagcatccgcctgcccgagaatcgtgccttcgtcgcgcgctggaaggcgcgctatggcgaggagagcagtccctccgtcgacgggcaatccgcctatgtcgcagtctatctgctggcgcgcgcgctgcagcgcgcgggcacgtccgacatagcggaggtgcggcgcgcagcggccgggtatcgctacaattcgccgcaaggaccggtgtggatcgacggcggcaacaatcattgcgtccttacaccgcggcttgccgtatccaatccgcaaggacagtttgatatcttctgggaagccgacgcgcctgttaagcctgatccttacctgacgcagctcgacgtggccgtcagccccttgagggaagcctcggcgggcgtcttgccaaatgcgccgcatttgcgggttgtgaaatga

SEQ ID NO: 517 - DNA, 588 bp, BradyrhizobiumColbertium
atgagcagaccgtcttcgttttcgctgcgcggacgcaaggcactcgttgcaatcaaggacgagcgcgacgcgactatcgtgcggcgccagttcgagcgtctcgggatcgagggcgtcgcgtggacgccggctgagcccgtcggcttcacaccggatctgtcgctgatcgacgacgagttcctgcctttgctgcaaccggcgcaacgcgcgtccctggcgcgatcacctgtcatcgcgctgctcggcacagagaccccgagccgcctgaaactggtgttcgaactcgaccccgcttcattcctgatcaagccgttgcgatcggcaggcatctatgcagcgctcgtcatggcattcgagcgaagcgaacgcacaagcgaactgaagcaacagattctcaagctggagcaccgtttgaaatctcgtcgcgtcgtgcttgccgccgtcctcaaggtcatgcatttgcacgcactcgccgagccggccgcctttgcgctgatccgcaaagccgcgatggagcaacgcaagacgatcgaagagctttcggcggagattacggcaaaaggcatgctcccgcgtgcagcaggctag

SEQ ID NO: 518 - DNA, 741 bp, BradyrhizobiumColbertium
atgatggattccagcatcaagtcggccaagcggatcttcgaagttctcgaatactttgaggatgtgaagcgtccgatttccctgaaggaagtcgcgacgaagtgcggctatccgacgtcaagtgccgcggccttgctgaagagcatggcgatgctgggatatctgttctacgacagctacaatcgcacctacatgccgacgatgcgcatcgcgcagatgggccgatggctggacaccgggctcttcggcgacagcgccatccttgcgctcgtcgatttcgtccatgggagactcgacgagctcgtcagcatcagcacacagtccgatctgcatgcacaatacattcacgccctgcaaaccagcaagcgcctgcgcttcgaagtgaagccaggggatgtcaggccgcttgcgatcagcggaatcggacgcacgctgctcagtggtcatactgacgtcgagattgaaaggctcctgcgtcgcatcaacgccgtttgcccgcgggaggagcacttcgaactgaacgcgttgatgaagatcgttaacggcatccggcgcgacggctacatgttctcaaaacacatcatcgttcaggatgccggcgtgatcgcagtcctgttgccaaagcgtgacttcggacgcaacctcgtcctcggcgtcggcgggccggtgtcccgtcttgaggagcggcaggacgaaatcctcgcttgtatccgcgaaggcatcggccggttcctaccgtga

SEQ ID NO: 519 - DNA, 846 bp, BradyrhizobiumColbertium
atggattatcgattgcctgaaggcagctgcgattgtcattttcacatctacggccccttcgatcggtttccgcccggaaacgaaggtcgctttaccgctgcaaaaccattcacgatcgaagacgccttcgccatctgggatgagctcggtatcacgcgtggggtcatcgttcacgccgtgggatcgggcgaagacaacgccgtcacctacgacgcgctgcatcgctatcccgacaggcttcgtgccgtcgcaatcctgcggcccgacgtttcggatcaccggctcgatgaactcaccgacgccggtttcagggcggtgcgcgtcaccatgatccggcaggacggcaaaccggtctcgacactcggcaccagctacgacgatctggtcaagctcgcccctcgcatcgcggagcgaggctggcatgctcagctctggatcgagagttcggatctggcggccgccgcaaccgagctcgagaagctgccgctgaactacgtgatcgatcacatgtcgcggaccatggccgacaagggccacgatcatccggatttccgtgccttcaccgatcggctgaagaccggccgttactggaccaagatctcgggcgcggaccgcaacacgcgtatcggccgtccctatgcggacacggcacctttcatgcgcgccatcgttcaggctgcgcccgatcaggtcgtgtggggcagcgattggccccatgtcggccacagcgccgagacgatgccagatcttcaggatctgcttcgtctgctgcacgaatgcgtccccgacgaagccactcgccgaaagatcctgatcgccaatcctgcgcgtctctacaacttctga

SEQ ID NO: 520 - DNA, 1212 bp, BradyrhizobiumColbertium
ttggacaacagcaagaagctgccgctcgaaggcgtgatcgtcatcgacctcggccaggtttatcagggtccgtatgccggcttcctgatggcgcaggccggcgcgaccgtcatcaaggtggagccgccaaacggtgagccggtgcgtcatcgcgcccgcatcagcaagggcaacgccgtaccgttcgctatgctcaacgccaacaagcgcaacatcagcctgaacctgaagtcgccggacggagccagagtcctgaaggagctcgcctccaaggctgacgtgctgatcgagaattatgccccgggggtgctggatcggctgggcgtcggctatgccgcgctcagcgccgtcaatccgcggctgatctacggctcggcctctggctacggcctgtcgggtcccagccgggacaatctggcgatggacctgaccatccaggccgtgtccggcatcatgagcgtgacaggctttgccgatggtcccccggtcaaggcggggccagccatcaccgacttcatcagcggcgtgcatctttacgctggcatcctcaccgcgctctacgaccgggagaagagcggccgcggccgcctggtcgagatcgcgatggtcgaggccgtctatccggcaatggcttcgaacctcgctgatgtcttcaaccgcaaggccgccgccccgcgtaccggcaaccgtcacggcgggctcgcggaggcaccctataacgtctatcccgcatccgacggctatgtcgccatcatcagcgtcaacgagtcccactggaccggactgacgcgcgcgatggggcagccggaactggccgacgacgcgcgcttcaagacggtgcttgaccgtttgaagcacatcgacctgaccgaccagatcgtgtccgactggtcttcgcagctcacgcgcgacgagatcaccgagctctgccgcgtcaaccgggtgccttgcgccgcggttcgcgacctgcgcgaggtgatcgaagacaagcatctccacgtccgcggcatgctgcgcgagatcgcgcatcccgaatacggcgacatcctcgttcatcgcagtccgctggtgctgcacgataccgcggcgccggactacgtcccgtccgcgcgtctcggtcagcacaatggcgaggtgctgtcgcaatatctcggcctgtccgacggcgagatcgatgcgttgcgccgcgctggcgccatcgcacaagcatga

SEQ ID NO: 521 - DNA, 1173 bp, BradyrhizobiumColbertium
atggtcaagctgtttgaaagcattgcattccgtggcgtcgagctgagcaaccgcatcgtcgtctcgccgatgggaatgtattcggccgagaacggctacgtcacgccgttccatctggttcactacggcaagttcgccatgggcggggccggcctcgtcttcgtcgagcagacctcggtcacccggaaagggcgcatcaccaacggcgatcccggattgtgggaagacggccagatcgacggcatgcgtcagattgttcaagtcatcaagtcgcatggagccaaagcggcgatccagatcaatcacggcggacgcaaatccagccagcagcgcgcattccggggcaatagccatctgaccgatcgcgatatcgagatgggagaggaaacctgggtgcctacgggcccatcggatgtcccgttctccgaaggcttccagactcccattcccctcagcaaggaaggccttgttggcgtgcgggatgcattcgtggcggcggcgcgccgggccatgcttgcgggcttcgacgtgatcgagctccacatggctcacggctatctcctgcaatcgtttctatcaccactcgccaatttccgggccgatgaatatggcggcagcctcgagaaccggatgcggtttccgctcgaagtgacgcgcgcggtgagggctgcgctgccctcctcgacgccgctcttcgtacgcatctcggcgacggactggattgatggaggctgggagatcgaggacagcatcgtcttctcccgtaagctgaaggaactcggcgtcgatctggtcgactgttcgacgggcggcaatcttcgcgccggatcgaccaatgccaatcttggtcgcggtccaggctaccaggtcccgtttgccgaacgcattcgccgtgaggccgacattgcgacgggtgcggtcggcatgatcaggactccggatttcgcggagaagatcctgcaggacgaccgtgccgacctcatcttcatggcccgccagatgctgttcaatccattctgggcgctccacgccgcagaacatttcgggctgaccggcaactttgagaaatggcccgagcagtatggctggtggcttgccaaatggggcggtgcccttcgtgccaatggcgaaagcctggacgggctggagcgataccgcgaggcggccgaatag

SEQ ID NO: 522 - DNA, 1203 bp, BradyrhizobiumColbertium
atgctggcagcgtcgatggttctcctgggccttgcttcggctcatgcgcaggcgcctgcatcgaagccggtcaagctcggcgtgctcaacgatcagtcggggcaatatgcggacgccgccgggcctgcggcggtcgaagtcgccaagatggcgatcgccgatttcggcggcaagctgctgggacagccgatcgagctcactttcgccgatcaccagaacaagaccgatatcgcttcgggcatcgcgcggcgctggatcgacaccgaaaacgtcgacgtcattctcgacatcggcaactccgcggtcgcgctggccctggcggacctcgtccgcgacaagaacaagatgatgatcgtgtcgtcggcgggcgcttcgacgatcaccaacgaaaagtgctctccgaacacttttcagtggacatacaacaccaacacgctcgcgcgcagcacagccaaggcattgatgggccagggcggtaacgaatggttcttcctgacggccgattacgccttcggtcacgcgttcgaagcggatgcttcggccgtggtcaaagcgaacggcggccgggtcgtcggatcggtgcgccatcccttcaacacaagcgacttctcatcgtttctgctgcaagcccagagctccggtgccaatgtgctggcgctcgccaatgccagcggtgatacctccaactcgctgatgcaggctcacgaattcggcttgctcggcctcaagagcaagatgaaggtcgcggcgctgctgtttcagatcacggatgccaaatcggtcggcctgaagaacatgcagggtctgtacacgtcggaagccttctactgggatcgcaacgatgcatcgcgcgcgttcgggaagcggttcttcgacaaggtcggccgcatgccgaccatggttcaggccgggatgtactcggcgaccatgcactatctgaaggccgtcgaagcggccggcacgctcgatactgccgccgtgctggcaaaattccgttcgatgcccgtgaacgacttcttctcggagaagggctatgtgcgcgaggacggcatgcacatccacgattactatctgctgcgcgcaaaaacggtggagcagtccaagggtccgtgggacttctacgacgttgtcgcaaccaccccagccgaagacgccaacattcctcgtgaacagagcaagtgctcgctgatgaagaagtcctga

SEQ ID NO: 523 - DNA, 138 bp, BradyrhizobiumColbertium
atgcatcgccggcgcttggtcggcgacctgaaggcaagaccaggctttgactgccggtcatcgatcgctcaggtcgaacaggacatcgcgaccatagaggcggggctggagaggatttcggggtcgagcgacgcgtaa

SEQ ID NO: 524 - DNA, 300 bp, BradyrhizobiumColbertium
gtgcagcttctgctgaaaaaccgtcaatcggacaaccggcaatcctatctcgtgcgtggccgccggtacgaacagctctctgccgacgatctttccaggctgtgggcggagcagatgagccgctgggccgacgactcgaccgcgtttgatcagagagccctcaacgatcttggggtcgagatggggttgcggcagatggcgccgcctctcgaacagatcgcggcagcaagggagaagatcctcgcgaaatcaggaaaggccttggcggcgatttttgcaggctatcctgagacaaaatag

SEQ ID NO: 525 - DNA, 456 bp, BradyrhizobiumColbertium
atgtcctattcagaactaatcaggcagatccaggctcgccgtccgccggcatgggagcttctgggtgtaggaggggtcagctatgatcagctcctgaatcgcgttacgatcgaatggcatgccgaacagcgtcactgccattcggtcgaagggcatcccaagggcggcatcgtccagggcggtatcgttacgggttggctcgacgccgcgatggccaccgcgagcctgttgcacggtgaataccagatcgccgtcgccagtctggagatcaaggtcgcattcctgcttccggcgcatcccggcctgtatcgcacccatggcaaagtccttcggcagggccgcagcatcggcttcatggaggccgagctgcgtgacgccaacgacgtgctcatcgcaacggcaagttcgacggcggctttgcgcgccaagaacccagccgggaccagcccggcgtga

SEQ ID NO: 526 - DNA, 1038 bp, BradyrhizobiumColbertium
atgagaacgatcggaaagaatcgcggcctggccagacttgctgacgcggacggccactttcgcatggtcgcgcttgatcagcggccgccattgttcgacgctatcgccaaggcgaagggcatcactcgggatcaggtcgaatattccgacgtcactgcggcgaagcgccttctcgtcgagaacctggcgccgcattgcagctcgatgctgttcgacccgaacttcgccgtgcccgccgcgatcgatctgttgccgccccgctgcggcctgatcatgaccctggaagagcaccgtgtcgaggagaccgccggcggccgcaagtcgcgcgccatcagcaattggagtgtggagaaaattcgcgccatgggcggcgatgcagtcaaggtgctggcctggtatcggccggacgccgatgccgcggtgaacgagcaccagaagcgatttgtgcgagagatcggacgggattgcgctcgttacgacattccttacgtcctcgagctgctggtatatccgttcctcggtagcgccaaccacaccgtcgattacgtggaatcgcccggcaagctgccgggcctcgtcatcgacagtgtgcgcgagttcgccaagccggagtatggcgtcgatctgctcaagctggagagcccgcttgcggccaacagcctcccggctcgcgacggcagccctgaagccaaggccgcgcagaaggagttcgacgcgatcggcgccatctgccgcgagcgcagtattccctgggtgctgctgtccggcggcgctgcgcccgaaaagttcgagcgcgtgctggactattcctatgctgctggcgcaagcggctttctcgccggccgcacgatctggctggatgccgtcctgaagaacttcccggatagtgcggcagtatcggccagtctgcgcaaggacggcctcggcgtgctggagcgattgaacaagctgaccaccgccaagggcacgccatggaagccgcgctttccggtattcaccgacatcaagcaggaaggtgacttcgcgcgcgcctattga

SEQ ID NO: 527 - DNA, 942 bp, BradyrhizobiumColbertium
atgggagatttctcggcgctggcggaggttgcttccagagcgaagcctgtgcatgtgatttgcctcggcctgtccgcgctcgaccaggtctggcgcgtcgagcagcccttcgcgggcggaagcgagaagatcaaggccgtcgcgtacggcacgcttggcggcggcatggcggccaatgcgagcgtcgcggtggcgaagctcggcgcgtccgtcgcattctgggggcgggcagggaatgacgccgccggtcacgagatggcatcggctttcaccgccgaaggcgttgacgtcgagaatttccggctgtttcccgacggccgttcgtccgtctccggaatcatcgtcgacagcctcggtgaacggcagattgtcaactttcgcggtctttatccggaagctgcggactggcttccgctggacgcggtggcgcaggcgtcctccgtgctggccgacccgcgctgggtcgagggcgccgcaacgctgttcggggaagcgcgcgcacggggcattccgacggtgctcgacggcgacatggccgacgccgaggtgttcgagcggctgctgccgctgaccgaccacgcgatcttctccgagcccgcgctgacagcttatgccggttccgctgatgacagatccctcgcgggactcgcgcgcttcggctgccgcgtggtcgccgtcacgcgcggcgagggtggcgtgagctggtacgagcagggacggctgcaccggcaggccgcctatgccgtcgacgtcgttgacacgaccggcgcgggcgacgtcttccatggtgcctacgcgctcgcaatcggcgccggcctcgatgtgcgcgccgccatggcgttctcggcagccacggccgccatgaaatgccgccacgccggcgggcggaacggaatccccgatatcaacgagtgtcttgcattcatgaggacgaaaccatga

SEQ ID NO: 528 - DNA, 1074 bp, BradyrhizobiumColbertium
atggcttcgatctcgatccgcaatctcaccaagcgctacggcaatttcacggtgatccccgatctcaatctggagatcgcggaccatgagttcgtcgtcttcgttggcccgtccggctgcggcaagtcgaccttgctgcggatcatcgcgggtcttgagccgatttcgtcgggagacctctatatcggcgacaagcgcgtcaacggcgtgcaggccgcgcagcgcgacatcgccatggtgttccaggactacgcgctctatccgcacatgaaggtctatgacaacatgtcgtttgcgctggagttgcggggcacgccgaaggccgagatcgacgcccgcgtgaagcgcgctgccgcactgctgcacatcgagccctatctggaccgcaagccgaaggagctctccggcggccagcgccagcgtgtcgccatgggccgcgccatcgtgcgcaaccccaaggcctttctgttcgacgagccgctgtccaacctcgacgcaaaactgcgcgggcaggtgcgcgccgagatcaaggcgctgtcgcaggagctgcagaccacgatggtcttcgtgacccacgatcagatcgaggccatgaccatggccgaccggatcgtggtcctccagagcggcacgatccagcaatacgatacgccggagggggtctacgagcggcccgccaaccagttcgtcgccggtttcatcggctcgcccgcgatgaatttctttccggtggagtggagtggcgagggagcgatcctctcgcaaggcggagcggcggtgccgctggatggtgagactgcgggccgcctccgccaagccggcagcgccgtgctcggcattcgccccgagcatttcgccgtcgccgccgatgcggccgacggcatggctgtcaacatcaagctggtcgagccgctcggctccgacacgctgattcatttcgatctcgccggcggccccgccatcgcgcgcgtcgatccggccctgcggccgaaggtcggtgatcgcatcacgctgcgcccgcagccgggcaagatgcatctgttcgatgccgcaggtggacaggtcttgcggtga

SEQ ID NO: 529 - DNA, 1005 bp, BradyrhizobiumColbertium
atgaacctatccctccatccgaattcgatcatgcaggccgcggttttccacggcaatgaccgcattaccatcgagcgcgtggcgatgcccgacgtcggcgccggcgaggtgctggtgcgcgtctcgcgcaccgccttgtgcggttcggacttcaagctctggcacaagggtgccgagttcaccgccggtcacgagatcttcggcgtcgtcgagcaacccggccaccgcctgcacggccgccgttgcgccgtctatatccccttgcattgcgaccgctgcgcggcgtgcaagcgcggcgacacccagatgtgcctggaagtctccagcctgatcggctggaacaggccgggcggatatgccgaatatgtgtcggtgccggaaaactgcctcctgccggtgcccgatgacatcgaggacagtctggcgccgctgctgctcgataccatcggtacctctggccacgccgtgcgcttcgtcagtcgcgtggtgccgccacgcgaggctggtccggtgctcgtgatgggggcaggacccgtcggtctcggagtcgtgctggcgctccgcgcgctcggctttgacgacgtccatgtcgtcgatcccaatgcggcgcgtctcacgatcgcgcaatccttcggcgcaaaggcccaccccgtcggcgacacatcgaagcgtttcgcactgatcatggaatgctccggcgcccatgcggcgcgcaatctcggcatcgagctcgtcctgccgcgtggcgccttggtgcttgtcggcgagaacgccgcgccctggatcatcgaggaaggcaaggtatttcgtcgcaaggacttctacatgatccgtaccttctacttcccggtctcggacttcgagccgaatatcgagctgctgcgcgagtacaaggatgaatatcgcgtcctcgtcgacggcgagttcggcctgtcggctctccctgagaatttcgcccgcttcgccaagggcgagctgatcaagcctgtgctggcgctggactga

SEQ ID NO: 530 - DNA, 828 bp, BradyrhizobiumColbertium
atgagcgatgccgccaacactgatcgctggatccgctggctcaacacgctacagctcgtgcttgccggcctgctcatcatggcaccgacggtgtggatggtgctgtcgtcgttcaagccttccttcgaagtcacagcctatccaccgacgctgatcttctcgccgacgcttgagaattacgacgagctgaccaggaccacgccgttcctgagctacgcgctcaacagtctcatcgtcaccgtcggctcgaccgcgctcggactgctgttcgggattcccgccgccttcgccgtctcctggacgcggatttcgtggccggcgatactgacgctggcggcgcgcatggcgccgggcacgctgttcctgctgccgtggtatgtcatgttccggcagatcggcatgatcggctcctacaccgcgctgatcctcagccatgccgtcatcacgctgccaatcgtgatctgggtgctgctgccctctttcgacgccattccgcgcagtgtcttcgaagccgcgcaggtcgatgggtgcagtgtcacgcgcatcctctggcgcatcgcgatgccgctggtggcgtccgggatcgcggtctcggcaatcctcgccttcgtgttttcgtggaactacttcctgtttgcgctggtgctgtccaatggtgacaccaagacgctgatcgcggcggccttcaacttcatcggcgagggctcgacgcaatggggcgccctcatggccgcggcgacgctgatcgcattgccgccgctggtgctcgcggccctcgttcagcgctggctggtgtccggactgacgctcggcgcggtgaaaggctga

SEQ ID NO: 531 - DNA, 888 bp, BradyrhizobiumColbertium
atgtcggacacggctgcgacattcacgcaggaccggcagaagctggagatggcggcgctctcggcgccggccgtgctgttcacggtcgcgatgatcgcatttccggtcgtctatacgatctggctcggtttccagacattcgcctcgaccggcaagcagtctttcgagggaatcgccaattattccaagctgatctccgacgtcgagttctggcacgggctgtggatcaccatcgcgctgttcgtgctgtcgctcgcgctgcagctcgtgttcggcgtctggctcgcgctagtgctgttccatgccaagcgtctgccggggatcgtgcgctcgctgttcatctcgcccttcatgatgccgcctgtcgtggccggcatgatgtggctggtgatcctcgatccctcgctgggcgcggccaactacatcctgcaatcgctcggcctgccgccgtcggactggctggcctcgccgacatgggtcattcccactgttgcgctgatcgacagctggcagtggacgccatacgtcgccctcatcgtgttgggcggattgcagtcgctgccgccgagtgtctacgaggccgcgcagatcgacggcgcttccccgttcaagacgttccagcgcatcacgctgcctctgctgctgccgaccatcgtcaccgcagcgatcctgcgcagcgtcgacctcttgcgcttcttcgacatcatctacatcacgacccagggcggcccgggcaacgcctccaacacgctcaacatctacggctttcgggtcggcttcgagttcttcaacatcggctatgccagtgccctgatgttgaccctgacggcgatcgtgttcggcgccgtgctcgccttcaaccgcctccgcggcgcagtggcgtggtga

SEQ ID NO: 532 - DNA, 1299 bp, BradyrhizobiumColbertium
atgaaggccaggatgctcgcgacccatgtcgcgctgcccgttctcgtcattgccgccagcgcgcaggcgcaggctgccgatttcgactggatgaagttcaagggcaagacgatcacctttctcgccaacaacaatccggtctcgcaggcgctgctgacctacaaggctgatttcgagaagctgaccggcatgaccctgaaggtcgacggttatcaggaacagcagatgcgccagcgtctggtcacggtgatgaatgcgaacagcgacgaggtcgacgtgttcatgacgctgccctcgcgcgagggcgagcagttcgccgccgccggctggtacggcgatctcaccgcgatggtcaagaacgaggtcgccaaggagtatgatccgagcggattgagccaggccttgcttaagtccgcgaccttcggcggcaagctgaccagcatgccgatgaacatcgaggggccgatcttctattaccgcaccgacatcttcaagaagtgcggcctcgaagcgcccaagaccatcaaggacgtcgaagccgccgccgagaagatcaagacctgcgacagcacggtaacgccgttcgtatcgcgcggcctcaagcccgcggtcgcctacacgttcagcaacatgctgcacaacatcgggggcacgtacatcgccaacggcaagtcgaatctgtgctcggccaagggcaaggaagcactcgacacctatagccggctgctgcgcgacttcgggccgcccggcgtcgtcaactacagcttccagcagatttcggcgctgtatcgcagcggccgtgctgccatggcgttcgaatcctccaacgaactgcgcacggtgatggacggcggtgcgcggctgaaggacaccggcctgctgccgttcccggcaggcgaggctggccaggtgccgaccacgatcggctggggcttggccgtgtcctcacacagcaagcagccggaggcggcctggtacttcgtgcaatgggccaccagccccgaagtgcagaagaagatggcgctccagggcatcgccccgccgcgcccgtcggtggccaaggatcctgaatatcgcaagtggatcgacgaggagccggtccgcaaggaatggcaggcggcgctcgacgtgctcgccaccaagggatcctccgaggtcggctatcccatcgtcgccaatccggaatcgcgcgaattcatcggccaggcggtgcaggacctgatcctgaagcagaagccggtcgatcaggcctgcgccgatgccgacaaggcgctcgatgcgttgatcgctcagaagtaa

SEQ ID NO: 533 - DNA, 1017 bp, BradyrhizobiumColbertium
gtgaaacagggcatccgcgccgtggcggcccgcgccggcgtttcgaccgcctcggtctcgcgcgcgctcaacaatccggatgcggtcagcccgtctctgcgtgcgcgcatcgaacaggccatcgatgcgctcggctacatcccgcatgcgcccgcgcgcatcctgtcgtcgcgtcgctcgcgcacccttggcgcgatcgtgccgaccatcgacaacacgatgttcgcgcgcggcatcgcctcgctgcagcactatctgtcgtcggtcggatacatgctgttcctcacaacgagcggctatgatctcgatgtcgaattgcagcaggcgcgcaacctgattagccgcggcgtcgatggcctggtgctgcgtggcgattgccatcacgacggattgcgaaagctgctcgcggacaacgccgtgcccttcatcaatgtcggtatctaccagcccgacaggccctatccctgcgtcggcaccgacaacgaagcggccgctcatcgcgccgccgcgcatgtcatcgagctcggccatcgccgcatcgggatcgtctcggcgctccagcgcaacaacgaccgcgccagcgcccgcgtcgccgggtttcgccgcgcgctcgccgagaacggactcgagttgcctccgcaatggcatgtcgaggtgccatatacgctcgacgacgcccgcgaggcggcccgctatctgctgaacctgaaagaccgtccgacagccgtagtttgcggcaacgacgtcatcgcctatggcgtgctgctcgaagcggagcgcgacgggttctccgtgccgcgcgacctttcagtggtcggcttcgacgacctcgactggagccggcatttgcggccgagcctgaccacgatccatgttccgaccggagaaacctggcagcgcgccggcgaatatctggtgcgcagcctcgccggcgagcagaccatcatgcacagagaggtcgacttctcgcttgtggtccgcgaatcgaccgccccaccgccgaaatccccgaagtga

SEQ ID NO: 534 - DNA, 735 bp, BradyrhizobiumColbertium
atgacttcgaatttttctctcgcccccggcttccatgccgtcgtgattggcggcgccggcgacattggcgccgcgatcagcaatcagttttgcgatctcggggcgactgtgacggcaacaggcgccaacgaggccgatctcgcccgcacgctgctgaagccgcgcgccggcctcaccctggcgacgctggacgtcaccaatgacgcggccgtcacgtccttcgccgggaagcacacgcgcgtcgacgcattggtcaattgcgccggcatcctggcgcgtgacaaggaattcgagatcgaaaccttcatgaaggtgctcgacgtcaacctcaccggcacgttccggacctgcatggcgttccacccgctgctcgcggaagccaggggctcgatcgtcaacatcgcgtcgatgaacgcgacgcttgcgctgccacgcatccccgcctattgcgccagcaagggcggcgtcgtgatgctgaccaaggccctggccttgaaatgggccgaggacagcattcgcgtcaatgcggttgcgcccggctacatcgaaaccgccatcaacgccgcgggccgcgctgaccttgcgcattaccagcggatcgcggaccgtaccgcgttcaagcgctgggggaagcccgaggatattgccggcgcggttgcgtttctctgcatgccggcgtcgcaatatgcgaccggcactgtcattgctgtcgatggcggctttctcgccggttga

SEQ ID NO: 535 - DNA, 144 bp, BradyrhizobiumColbertium
atgcgtggcggatccttcctctgccacgaatcctgctgcaaccgctatcgcgtcacggcgcgaagctccaatacgcccgattcctcctcgagcaatatcggcttccgcgtcgtgcgcatcgagccgctgcgggatccctcatag

SEQ ID NO: 536 - DNA, 1791 bp, BradyrhizobiumColbertium
atggaaccggcaccacatcctgcgaggccgcccgctgcccccggcatccggctactgccactgttcctgcgcaatttcgtgcgcaatcgcgagaccggccttgtgctggtcgccatcgtcgtcggactgctcagcggcgtgctcgtggcagcgatctcgaacctcagccaggtctcccacgcactgctgttcgacattccgttcgacgcccacctcagcgcaaccggcgtgatctcgtggcagcgcacgctgcttgttccggtgctcggtggcctcgtgcttgcgctgatcggactttacttcgcccggcgcgtcaagggacagcagctcgccgacgccatcgaggccaacgcgctctatggcggccgggtgtcctttcgcggcagcttgctgatctcgatccagacactgctgtccaacgggttcggcggatcggttggactggaagccggctacacccagatctgctcgatgttcggctctcacgtcggccagcgcctggccgcccggcgcaatgacatgcggctcctggtggcctgcggcgccgcgggagccatcagcgccgcattttctgcaccgctggcgggcgccttctacgccttcgaagtcgtgctcggtgcttacacgtctgccgctcttgtaccggttatcgccagcgccgtcaccgcatggctcgtcgcacggcaactgacgcaccagtccttcctgatggtgcctggattcccctcaccggtttccgtcgaaatgatcggccagacggtgctgatcggcatcatctgcgccttcgtaagcatcctcgtcatgctcgccgtcgcattctccgagcgctgctttcagcgcatcacggtgctcaagggcctgctgcggccgattctcggcggcttcctcctcggctgcctcgccttgctgacgccgaccgtgctcggcgccggccacggtgcgatgcagattctgctggtcagcaatccgacttggctcctgctcacaaccaccatcgtgttcaagatcctggcctccgccatctcgctcggctcgggctttcgcggcggcctgtttttcgcctccctcctgctcggcgcgctgatcgggcagctctacagtgtcgtgctgacaggcctccttcccacgatcgcgcttcagcccggcaccgccgcgatcgcagcgctcgccgcgctcggaaccggcgtgctcggagcacccttcagcatggtctgtctcgcgctcgagatcaccggcgatttctccgtcaccgttggcgcggtggtcgcctcctcggtttgcgcgctgatcgtccgtgagctgttcggctatagcttcgcgacctggcgctttcatctgcgcggcgaggcgatccgcggcccgcaggacatcggctgggtccgtcagatgagcgcagcatccctgatgcgcaccgactttgagaatgcgctgacgacgatgccgatcggcgaggcgcagaggcaattctcgccggcgctggtccgccagatcgtattgcgcgatcctaacggcatctatgcgggtatcgtgcctgccgccgcgctgcattccgtgtccaaccaggacgacgaactcctcgggtcgctggcgcaacaacaggatgaatacctgcttccgaccacgccggttcgcgagatcctgaaggccttcgaacgcagcgaagccgacgtgctcgcggtcgtcgaccgccccgaccaccgcgccacgatcggcaccctgagcgaagctcacgttctgcgcacttacggcgaagagctcgagcgccggaaccaggagctgttttcgcgttga

SEQ ID NO: 537 - DNA, 723 bp, BradyrhizobiumColbertium
atggaattaagttccgacagtcacatccccaaatacgcgcagattgccgacatcttccggcagcgcatcgcgcgcggcgtctggactcagggatttcgcctgccggccaacgaggagctggcagccgagttcggtgtgtcacgcgtcacgatcaggcaggcggtggagctgctcgcccgcgacggcgtgatcgaggcgcagcagggccgaggcaccttcgtcacggggaccgtgcggcaggatcgctggctcaaggtcgagaccacgttgtccgatctcgccgacatgtatcgcgacacctcgcccgagatcatcaatatctcggaaagccgcagcgatgcgccgctgcttcccggggatggcaagccggccgaaaagtacgttttcatgcgtcggctgcattcgcgggagaagcagccctactgcgtcatttccatctatctcgacgagaggatctttcgcaggtcgccgaagcgttttcgcaacgagaccgtgattccgatcctgaacgatctcagggatcccaccatcgccagcgcgcgccagaccctgacgatcggtaccgcggatatcgaggcggcgcggctgctgcacgtgcccctgaactcgccagtggccgaagtccgccgcatcttcaccacgcaggaccgcaccgtgatctatctcggcgaagtcacctatcgcggcgacttcgtgcggatcgacatggatctgcggccctag

SEQ ID NO: 538 - DNA, 1527 bp, BradyrhizobiumColbertium
ttgtcggccgatccgtcctgccgcgtgctgttgctggaagccggcggatcggatcgcaatttttggttgaagcttccggtcggctactaccggaccatctataaccagcgatactcgcgcctgttcaggaccgagccttcggaagggagcggcggtcgagccatcgtctggccgcgtggtcgcgtgctcggcggctcctcgtcgatcaacgggctgatcttcatccggggccagcacgaggactttgatgattgggagcgccttggcgccgatggctggagctatcgcgaactcctgccctatttccgacgccacgaacgctaccgcggtggcgagagccagtttcatggtgggctcggggagttcgaggtatccgacctgcgcaacgacaatccggcatcgaaggcctgggtcgaggcgggtgtgcagttcggcctgccgcgcaatcccgacttcaacggcgccacgacgctgggcgtcggcacctaccagctcggcatcgggcggcactggcggaccagttccgcctcggcatttctgcgtcccatcgccggccgccccaacctcaccatcatcacccacgcacaggtcagcagggttgtcttcaacggtcgcgtcgcgaccgccgtcgaatggatcagcaagggacaggtccacagggcgacggctgatcgtgaaatcattctatccggcggcgcgctgcagtctccccagatccttcagctttccggcgtcggtccggccgacctgctgcgcaagctcggcattcccatcgttgccgattctccggaagtcggcgccaatcttcaggaccattatcaggcccgactgatcgtccgcctgaagcagcgaatttcgctcaacgaccaggtccgcaatcccgtcggccttgcgaagatgggcttgcagtggatggtggcaggcagtggtccgttgacggtcggcgccgggcaggtgggcggcgcggcctgcacggaatacgccgtcggcggccggccggacgtgcagttcaacgtgatgccgctctcggtcgacaagcctggcgagcccttgcacagctattccggcttcaccgcttcggtctggcagtgccatggaaaatcgcgcggacagcttgcgatcagctcgaccgatccgtttgaacagccgaggatcgtaccgaactatttcgccgaggagatcgaccgcaagactatcgtcgcgggcctgaagattcttcgcgagatctatcagcagaaagcgtttcgtacgctctgggacgtcgagatggtgccgggcgaggccgcaaaggatgatgccgggctgtgggaatttgcgcgcaacactggtggtaccgtgttccactgtgtcgggacttgtcgcatgggccgggatgcgggggccgtgctcgatccgcagctgcgcgtgcgcggcgtcgagcggctgcgtgtgatcgatgcctcggtgatgccgcggatcacctcagccaacaccaatgcgaccagcctgatgatcggcgaacgtggcgccgcgctggtcacggcgtga

SEQ ID NO: 539 - DNA, 168 bp, BradyrhizobiumColbertium
ttggaagccgacctgtcgtcgccggcacccatcgtagacgccggactacggctcgccgacctgaagaagaagctgcgcgagggtctggagaagcaggtgactactctcggccctgaagggccgagcttctgctctcgcgagcgtctttttcctgcgtccggccgatag

SEQ ID NO: 540 - DNA, 138 bp, BradyrhizobiumColbertium
atgaaggctttgtccgatgtcgcgcaccagatatgcacggtcgtcgccgccttcacgatgggcccgatctcgcaaagcgaaaatgcgcgcagcatcgagggccttggtcttgtcaatgccgagcgcacccttctttag

SEQ ID NO: 541 - DNA, 162 bp, BradyrhizobiumColbertium
atgatgcggagcctccttttgatctttacggtttttacctttctcgatcggccagtgcacgctcaggctccggaaaactgcgacacggcgctcgcgaagatcgccaagaaggctgccgagatggcgattgccgaccacggtacgacgcgtgtgcgggcctaa

SEQ ID NO: 542 - DNA, 294 bp, BradyrhizobiumColbertium
atggcgcgcaagcaggccggtaagaaaagaccgacgaacaaggaattccgcaaacgatttccggcccgggaatccgcggcgatccgcgccttggccgcgaacgtccgtaggctgcgcaaggcgcgcgagtggagccaggatcagctcgccggcgagctcaagatcgagcagaacgccgtctcgctattggaaaacggcaggtcgaacccgacgatcttgatggtggagcagatcgcccgtgtcttcggagtccagctttccgaactgctcaagacctccgcaaaggacgagtga

SEQ ID NO: 543 - DNA, 462 bp, BradyrhizobiumColbertium
atgaacttgttcgaactcgaaggcactctcaccgccataggtcaaaacgtcttcagcaacgacggcacggtctacgcctatctcgagatcaccgatgcgaccggtcgacggacgctggtcgagaaggtcggagtctgcaacgacgtcggttcccagctcatggtcggactgtcgggccgcttctacgtcgatcggttctttcgcacgggatcgctgagatgccaattatggggcctcaagacagaacgcgtgtccatcgtagacagcaccgacctgcgaaagaccatcgccgccgttcagatcctcaagggcatacccacgatcgtggttttagggctgggattgatcctgatcgcgtcgggtgtcggtcttctcctgcaatgctcccgctatgaccgaagaatgttcttcggggcgagcgccgtacccccagcgcttcctaccgccgcggcccgcatatga

SEQ ID NO: 544 - DNA, 498 bp, BradyrhizobiumColbertium
atgaagccgcaagtggtcgcaatctgcgcaatcatgtcagccgcccccgccgcagctttcgatcgcaccatctacaccgccacgcgcggctccggatgtgtggaccgttcgaccgcacatctcagcagatcggtcagcgccgggccgatgtgcttttccgtcgagctgctcgacgagggcaatctggccgcgattgcgatcccgcagccggggcgtatcaccccaagcgcttacgtgtggcgcggctctgacaacgtgttcggcgaccggctcgaacggagcttgatggcgggtaccccgcgggcagtggttctgcggatttggcgagccgagaacgatgcgaccttccaggaactcggcgtattgaaagtcatgccaggcggagctcgccggagcgcctccatcggtgcaaagggtccggacgccaacgtgctggctcgcgaagaggcgggccttgcatcgcgtcgaacgtctatcgacattgccgatcgcatgtga

SEQ ID NO: 545 - DNA, 483 bp, BradyrhizobiumColbertium
ttgttgttcggccagaccgtcgcgacctgggtacatgtcgaggaccagatgattcaggtgttgcaggatcttttgggaagcaggagcgcacccgctcggcagatcttccactcggtcgtaagcaacaaggctcgccaatcgttgatgctggcgtgcctccagaaatcggaaataaaccgtcgcaaatccgatctctacgaggagatcatcctgcagttttcgaagctaaacgcgcagcgcaacaagctcgtgcacggactttggtacacccacgaaacgggccgcgttttcctgtccgaaagcgcggtcgatgatttccaccatatggatgcgcgcgaggcaacgatcgaggaattggagaccatgaacaagggtatgggagtcctgtcgcaagccatccacatgcggaaatctccttcgattgcgcgaatcattctcgctcacgcacccgaaagacagcgcgcccgcgtcggacgaaagtag

SEQ ID NO: 546 - DNA, 2280 bp, BradyrhizobiumColbertium
atggatcgaatggccaagcgaccgaaaaagatcgtccgatgcttcgtctcgttttgcatccaggacggcaatgccgaagagctcaccgttctgatacgggaactcaagaagatcaccgccgggaacgtggaatacctctcgtcgcacgaattggagctcggcgagaccatatcgagtcacgagtcggcactggaaagcgccgacgccttgatcatcgtcggaactcccgaatacaagcgtcgcgtggatctgcgcgagcttcagagcggcgtcggtcgggaattcgagatatatctcagacgaaacgacgattggtcgcgacgaaacccggtcgttgcgataccgatcgtttggaaagggacgtttgaaacggctcttcccaagcagttcgaatcgagtgagcggtcgatcgacctgtcgaatttctacacgttcaacgccgacggcggccggaggttggccgcaagttcggcgaagaacgtggccggcccgatacgaacgatagcgcaccgtcttctttcgttgcagcaggtcgcagtggacgaagaccgccggcggcaatcgtatcgggacttcgacatcgactatttcaagcgccagaagcaggagcgcgagggttacgagagcttccgcgaggacctcttcgtcaagacgcgtcagtacctccgcgtcgaggagcaggaggattacctcctcatcggaagaaagggcgtgggcaagacgacgctgatcagcatcatggagaagcatcaatccttcgcagcacccattgaactcgtggtcgatcgatgggatgtgcatggcgtcggtctcaccgaatataggaagaaggcgagcggggatttcctctatctgcatcgcaacaaatacgaggccttctcgcttctgtgggccgccttcatctatctcgagctgcttcgcgctcaacgcaagttggacgccgacgacttcccggtcgtcgtgagaagagaggcggaagagctgctgcagatgccgcccacggagggaaaggccgcggaattcacggccgcttccgaactggtctccgaattcattcgccagatggtggaactggcgccgagcgggtcgcgggctcgtttcgacgcgttcctacagagaaatctcgatatcgacagtctcctcgaatggatctcaggcggcagcggtccccttcagaacaacctgtccgcgatcgcctcgcgccggcatctgctgtgcctcgacggtttcgattccgacttccaacgcgcacggaacgacgcgcgacgggcgggagaagccacgcaagcggcggtcgtcaagacggaggtcgactggctgacggcgttcatcgaggtcgtcgagtccatcaagcgcccatcggggcgcgccgggcgcagaacgctcgggaagctgaagtcgttgaccatcgtcgccgccgtgccgaaggaccggttcctggaagttcaactcgaccggcgcgattcggtgttggccgcccctacgcgggaactgcgctggagcggcatcgaattggtgagcctgctgcgcaagcggatcgaggttgcgggtggtttcgacacggaagcttccaaaatgaagggcgcctcgcctccggagcggctcaaggagggcatgcagaagttcgcgccggagctggacgtatcggcgacggtgaccgtgaacggaaagtcgttcgaattcgatgtcttcctggaggttctgaggcacaccctatggcgtccgcgcgatatcctcattcattatgccgagcttctggccgttcttaaggacaacagaagactcaaacgcacgacggctcctagcgtgctcggcatcgtcatcgcccggaccaacaatctcatcatcgagcacgaatggctgggcgagatgcgggaccacatcaccaacatcgacgccgtcatcaagcttttccagaacggaccgcaacaactcgagtacgacgcggtgatcgaacggctctcgcatctgcctttcctgttcatgcaccggcagaccgagatgagcggacaagccaagctggcaatgctgtacgaactgggtttctttggggtgcgacgcaagcggatggacgtcggaaatcggcacaagatgcgggatctcttctaccacatctatcccgaagcgctggacttcggcgaaaaggttctgggaaattccgattggatcgtaatacatccgttgttcatcgagaaactgaacctgctgccgaacgtggacgagccggtgatgaacttctcctggttggatatcgacgaacacgatgcggccggaggctga

SEQ ID NO: 547 - DNA, 1257 bp, BradyrhizobiumColbertium
ttgcaaaccgacatcctacaccgcttcctggacaatcgattgatcaacatcggtccggacgacgagcgtctggcgcggttgcgcgcttccgcaggtgccatcgccgagtcgatcggaacgcggccggagcgggtaccgcgcctcgccatggtggctttcgatcctaaggtgccggccgacgaccccgtcatggacgaggtggcggaagcggtcagcgcgagctggaccacgtacacgagcgccttcgcggatcggccgatcgtgcttttccgtgccgtgctgctggaagctttgcgcttatctcaggaagaggaccccggcatcgcgggttcgatcgccttgaccgcccgcaacttgcttcccctggtggatctcggaagagaaggcgccatctggcgggatcttacggacaggtccgaacgtgctttggccgaaggagccgcaatacgctggtccacggcgatgaaggatgcacccgccgccgccgttctgccgacgcccgcgaagccctcgaaatccgaccgcaagcaattgctttcgaaggtggaggccgccgtcgggccacagaacgagaaaggcgaaacgctcaccaatcccaacacgcattggcccaacgcagggaacccttggtcctacatgttcgcgcccaggatggcgaacgccatcggcgaagctctcgattccgccgtcgaggccgttttggccagccgttccgcgaccgatcaagccatgcaaaaggcgatgcagagcttcgtcggcgacgccctacccggctttctacgtgccgggcaggctatggaacgcaagatcgatctgttgtggtggcgccagaccatgtactccaacaccgcgcaacgcagttatcgcgccatgaagcccgaagcggccgccgtgcaaatggccatcgacgtgttcagggcgacgccgcccttcagcccggcgagcgtagaatattttctgcgcgaggcggttgccgacgcgctcggcgagggaaaggggcggacggcgagtctcacgctcaagcagatcgcatccagcaggttcatcaagtcggaggtcgtcaccggctcgattccgttcgcccttgccgagggcccgggccggcgtccgatgatttcagtgttgttgggggccggggaggtggaggaggccctcggtctcgccggcaccaccaaactgaccctggacgatctcgcggtgtggctgttgagggaagcgcaagcggcagccctcgcgaccggagcgaagcaatcgtga

SEQ ID NO: 548 - DNA, 963 bp, BradyrhizobiumColbertium
gtgatcggtcagtgtccattttccgattgcttcgctccggacaccagctgtgtgctcggcgagctgcaccacgacgattgccccgagttcaagaaatccgttccgagcggcgaacaagctgcgtcccgcatcggcgctgatgcgatggtcctcccatggagcgggaacacgctcggcgctgcggaccgctccttcgtagccgcgaggaccaacccgaggatcatcggtatcgtcggccccgcgagggcgggaaagacgaccatgctcgccgcctggtatctcgttacgggtcgcggcgcttcacccgaagcccgtcgtttctgcgggtcgtacaccctgaccggttgggagaacatcgcccgatcgatgcgttggagttccggcggggcgccgagttttcccgctcacacctccagcggtgccggcagagtccctgggcttctgcacatggcgttccgaaacctaagagacggatcgatcgaagatctctttttcgtcgacgcgcccggcgagtggttcagatcgtgggcggttaaccgcgaaagcggcgaagccgaaggcgcccggtggatcgcggagcatgccgacgcctttctcgtcgtggcggattgcgacgccctggccggcgccgagagaggcggcgcgcggaacggtctgacccagatcattcagcgcgtgggcgacgagcgggatggccggccggtctgcctggtctgggcgaagtcggatgtcgacgtgcccgcgccgatcagggcatccatcgagaccgcggcggacaggcatatcggcaatcattcgaccttctcgtggagcgtgaagccggcttccacaggcgaaggaagcaaagcctttactgagcttctctcctggaccatcgcgagccgaggcgagcgctatctccgacgcgccgccgggcaagagaggccctcggatcatttcatggcgttcggtcatggccgctga

SEQ ID NO: 549 - DNA, 831 bp, BradyrhizobiumColbertium
atgctgatcggcgaatcgaacgtcggcaagtcgcattacggcggacagttgctgatgaggctcaatcagcggacgtacgcgctgcgcatgacggcgcagccgacgaacatcgacgcattcaacgacgtcaccaaggcgctgcacgaaggcaaatcggcaccacacacctcggcgaacacctacatcgaaagcctttggcccgtcgtcgacgacgagggccgggcggtggatctcgagtggccggactacggcggcgaacaggtcagacgcctcatcgacgaccgacgcatacccgtggattggcgcgaacgtcttctcaaggccgagggttggatcctgatgatcagaatccagcggtccgccgtcgaggacgacgtcttcagcaaaccgctggccgaagcggcgtcatccgacccgacgagaacggacgcgaaagcatcccttcaggcccgaatggtcgagcttctccagatgctcctctacgtcaggagtgccggcacctcgcgggcgatcagggatccagcgctgctggtgctcctgtcgtgctgggacgaactgggcgatgaaggcgagaagtcggcgccgatcgacgtgctgaatcggcgcatgcctctgttggccagcttcgtcgaaagcaattggcgaaaggggcgctacgatgtgctgggcctgtcagccttgggtcggccgctggacgccaaccggtcggacctggattacgtggactccggacctgaaagcttcggctacatcgtggaaagaaacgggcgacgaaacccggatctatcgatcccgatctcccgcctcgcgtcgatcgtatccgagggatga

SEQ ID NO: 550 - DNA, 2316 bp, BradyrhizobiumColbertium
gtgctgatctggatcgagcccgacggctccgccgggcgtgcaggcatggttcgatctcacgcggtgttcattccgttcgacgcgctggatcgatcgctcgacctcgaaagggtgttcgccgccctcaggcagatgccggatcgagacgtcgcgctccaaccattcgaggccacgtttcggcgagagcgcgccaacgatcggccatcggcgatctcggtcggcctagccgaggcgctggtcgcggccaagaaaattccgatcgtccatctggggcaggagggattcgacggtgccgtcctcgagctgctcggacgtcttccggttcccatgaggcgccaattctccttccggctgagcttcgggccgcaggacatcgagaacgatcagcagaccgtcgtcgccaccccgccttcgttggagcgtcgatggcacgattaccggatagcacgggtgccctcgagcatacaggggacgcccgcagttggcatgcttctcggcctccccgaaggggccggcctggcgaacttcgcggacgcgctgggcactccggtttctgacgtcagaactctgtcgttgctgtccagagcgtacgagctatcgaggtcgccagaggcttcgcccacggctctgctgcggctcatcgatgtgctgtcgccgtcggccggccggggcatcgcgatcaaggcgcgtctgcttgcggcgggtgccgtcgcggtcggctcgatgtcgatccctcagatccgcgggctcaaaaacctgccgctcgcggcgttcggcgcgaccgaggactattggtcggccgtccggcgcagaattccgtactttctgaaggaagacgtcgtggaccgttccatcttcgcgacgctgaaggaggcgctcgccggagacgcggtcgaagcctggtccgaggccgtcgccgagggcttccgcgacggcgcatcgccgctttccgtcgccgcggctcgagcgatgtgggatgaaatcgtggagagcgcttcattcggccccgccgttctcgatctcctgccgcgcgactcggccacggaatcgacaatcgcgtcgtcattgccgagcaccctggcggaggagacggcttcccggctcgtgcccgccgtgcgcagaaggaagtggctgttcttgcatggcctcctgctggcggcatcgcgcccgccggccgaagcggttcgcatgcagctcgaggtcgatgcggacccacgcttcgaaagcggcgtcaaagccgcgatctcgagggcggaagatgccgagatcctggccatagcgctcgagatgacagaggagcgcctcgccaggctggccgccaaggcttgcgtgcggaccccttctctgatggccggtttcgacacgagcggccccgcctggctcgatatcgtgctcgccgaacccggtctggtcgaaacgatcgatcggaaacgggatctgttcgacgcgctgatccgcaaggagtcgcgcgatgccgcgagatggctccctctgtggaaagccctcggcaccagcgctgcagccgatttgtcggacttgccggcccgccgcgagatctggcatcgaattccgtacgacgtgcggccgtcattcctcgccgccaccgccgacggctggctcgcgtcctggcaggacggccgcaatcccgagccggcgaccgaatccgagctcgccaacttcatcacggatcggagccgcatcgttccatatctcttgcggtgcatcccggaccggctcggatcggcagtcgcgctctttcgccagttcgaaagactgtccgagtcgctattcgtcgaatggatcggcgaaatcgggtcgcgcatgagattcgggggcgtcgcagaagcggactcgcaggccatcggcgatctcgtttcgatgcgcttctggaggagcgcggcctacgcggtactcgacatggctcggcatcgcggagacatgatgcccgcgctgacccgctgccaatggcgactcgatatcttcgacacgatgtcggtgtggcgactgcccagcatgcggaagccgaacgacgacgatctctggcgcatcctggagaatatcgtggccgacctctatcccggcggaccgctcgagaacgagatatggagcagggccggtggcgcaatggatgtgctggacctggcgggcaacggccgaacgcgttggcgatccgccctgagaagacttcgcgcgggcggcggtggcaccagcggtagcaggttggtcgcggagatgcgatcggagtatcccgcgaaccgggatctcgaaagcatcgtcgcgttcgacgtcttcaagccggaggaacgggagcattga

SEQ ID NO: 551 - DNA, 1077 bp, BradyrhizobiumColbertium
ttgagcggacgcttcgaatggggacgggctttgctggtgggcgtcgccggatattcgcggctcaaggcgcttccggaagtcgtgttgaacgacgtcgccgatttcgccgacgtgctgcggtcggagaactattgcggctacccgccacaccaggtccggacgttgtgcgattcggaggcgacgaacctggccttgagaaatgcgctggccgacctcgcgtccgcctgccgtccggaagacaccgcagtgttcgtattttccggacatggtgagcgaatcgaggccggcgccggcacgggctcctatctctgcccggtcgaattcgatccggcacgaccgcaggaaacgggcatatcgcgcgaagagctgagcgcgatgctcacggccgttccggcgcgccgcctcctagtcgtgctcgacgcatgtcatgccgcgggatcgatcgtgttcaagtccgggacccaggcgatcacgctcaaggcaggcttctcgggagcggatttcgagcggttggcgtccggaacggggcgcgtccttttcgcttcgtcgcgcgaggacgagacttcgatgatcctcgagggcgacaggaacagcctcttcacgggtcatgtcctcgccggcctgcgcggcgcagcgccgcgcggaccggatggaacgatcggcgtgctcgatctattcaagtacgccagcgactcgatgcgggagccgtcgcagcatcccgtcatgaaggccgaactcgaaagcaactttccggtggctttggccgcgggagcgggcgccactttcaagtccacagccggccgcgcgaaagaggattcgtggtggcaacgcctggagcggatcgccgtcgatctgtacccgtcggggcctcaggagcaactgatctggagccgggcgggctgccaggtgagcgtcctccagcccgccctccacggccgtgcggcttggcacgccgcgctgctgacgctgaagcgcggcggaagcgacgccgatgcaccgaaccgacttgtcagtacgatgatcgaggagttccccggcagcgaggcgctcctgaagctccaggccgaagcgcgctga

SEQ ID NO: 552 - DNA, 1914 bp, BradyrhizobiumColbertium
ttggacgaacctgtcggcatgaccgagacgaccgacgcaagggccgacaattcaggcgccatggacgcggaccacgccgctttggccgcgctatcgggcgccgactacgtgcgcgacaagctcctctcgaccctgacgatgggtgcgttcgacttctcgcgccgggtctacgcgctcaagtgccgggtcaagagcaaatcgaaactggtcgagaaggtcaggaagaagcaacaagaaaaggatcccgagtaccacgcggcgaaggtcaccgatatcgtcggcttacggttgatctgcctgttctccatggaccttcccaataccgtctccgagtttctcgactacatttctttgatgcaagatccgaggctaggtctctttcgcggcgacaagctggaggatgccgttaccgaagcaatcgtctacgcatctccgggcgatcccgccgtctatcgttcgatctacgagaatctctcgacaagactgaggaagggcgccgaaggcggcgtgaactgcgagatggtgccgccctcggaagatcatcggtactcttcgatacacctgatctgcatgacaaacagctactcggatccgccgcgacagattccgatcgaggtccagatcaggacggcgttcgaagacgtctggtccgaaatcgaccacccgaggagatacaaggggccggacttcgccaaggtatacgaaaacgacccgcgtctgcaggggctcgcggacggaatcggccggcgcctgaaggacctgaaggggcaactggaaagctgctcgtcatcggcggagcagatcagaaaggacttcgacctgctgagcccgatgcctgcgcagctgcaagcggcatcggaagccaatccgagaatcctggcgaagtcgtgggcagatgcgaaggcgccggaagccgtcaggcgcaagcttcgcgaaatcgaggagtcgctcaccgaaacctacggcaaactctaccagcacgacagggtgaacccgggtgcggatttcgtcgagctacggagggagctcgaggtcgcgatcgaggcgatcgacaaggtcggtgcggactaccaaaagaaggcggcagccgtattcgaacgggacaagacctacaagtactacagcaacatggagaagggactggcgtattactggttggggcgcatcgaccgcgatcaaggcatgtcgggatggtccggtctgaacgagacggcgttgacgacctatttcgatctccaagcgtcgctcgccgcccccgacccgcttttgtcgtatcggatcgccaacgccctcaaggtaaccgatcagctggatctggcgaccgaaaaactgcaggaagcggtcggggccctcgggagcgatcagcggctcgcgaccgatagcgtctatcgtgcgatcataccgcgtacgctcggctacatgctgtggcaacgcggtcagcggcacctcaagctgggaacgacgctgggccatccggggacattcggcaaagaggcccgtcagcttttcctgcaagccatcctggtgacgctcaacgggcaaaagaacatagggaccttgaagaaggaggatgccgacagcgagacggtgaagttccagggcaatctgctcgcgtattcggtcgattatctttcggccggaggctcgagcgaagatctgaaggcgaacggaatcgatcccgagacgttgttcgagcagatcgagcagttcgaaagggccgccgacgggaacgccgcgcgccttgacacgtgtacgagggtctatcatctcctgggaagacgggaggcggccctccgaaccgttaaagcgttggaggaattgttgagggacgaaaaatccatcaaagtaagctattcttccgattcgatagcgtatatgaaagatacagtagctctcatacgaggcatgtcatga

SEQ ID NO: 553 - DNA, 1326 bp, BradyrhizobiumColbertium
atgaacgagacgatgcgaacgttccgggaccatttcctttcggtctatcagtccgcggccgccgattacgcgtcgaagctcgaagaggaggaatccgtggcgccgggcggcccgtcgacatcgcggaagttcgtggaagccgtcgaggaggtcgcatcgtccaggtcgcaggacctgagcgaggtcgcggtcgtcgaggaaggcatcgctgacattccgaagatctgcgcgagtctgggcttcagatacctcgaggcgctggcgatgcgggacttcgcgcgggcggagcgcataaaggagcagatgacgggcgggacctgcgatcccaaatgggcctcgacacttgccgaatacgtcaagtacttcggcgtcaggggaacgcgggccgaaatcccctacgtgcggccggctacgatcggcagccggaccattccgatcccggccggtgcccgcatcgctttgttcggagattggggcacgggcgccgcgccggcgcgcaggattctggggctgatcaagcagcagaatccggacgttctgctgcatctcggcgacatctactattcgggcaccggcgaggagtgtgaggcgaatttcagcggcgtgatccgcgacgtcttcgaagatgcggtgccgacgttcacgctcgccggaaaccacgacatgtatagtggcggcggcggctactacgacctgatcggcaagatgaacggcggccggatgaagcaggagtcgagcttcttctgtcttaggtcggaggattcggcctggcaactgctcgcgatggataccggactgcacgattacagcccgctctcggtgacggatgcattgacctatgtcgaggacgacgagcaggcctggttggaggagcgggtgcgcgagttcaagggccgaaccatcctggcttcgcaccatcagcttttttcggccttctcgcagatcggcaaaccgtcgcccggcggcaaactgctcgcgcacaatccgtctctgcttgcgttgctccgcaagcttcaggctgtgggcgacatcgcggcctggtattggggccatgaacacaatctctgcatctatggctcatacctcggtctcgaccgcggacgttgcgtcggacacggagcgattcccatcttcgcggaggagaagccctacaaggtgctgaagggcctgtcggaccatcccgaactgatcaagtcgaccaaacttcgcgtcaatgatggcgcctacgagcacggcttcgcgatcctttcgctcggcaagatcgacgggaagacgcgcgccgaatacttcaccgaaggcggcgttatgtacgcggaggaattctga

SEQ ID NO: 554 - DNA, 2130 bp, BradyrhizobiumColbertium
atgtcgaatctttctgctaccctcgatgcatcgatcgatgcatcgcgtgaatcgcagggaccgcacatgagcaaggaaggtcgcctcctcaggcttcggcaattcaattcctcggtccggcttgccgatccgaagctcgccgaggaaagcgccgatctgggcaggatgatgcttcccgaacccggcccggagacggcggaggtcaaagagggcgtgcagaggctccccgaaggcggcgacgtcgacatcgccatcgccgaggaaagcatagtgatgcggcgcttccggcccgtcctggctatcaaggacaaccaatcggaattgatcttcaaggaccgcgaggaaggcacgctctgggaagagcgtctgaagaaggcgacaccggttctggagccggcgatccgtgcggtcgggcgcatcgatctggtccgcgccgatctcgaatgggtcgggaccggctggctagttggcgagaacatgatcgtgacgaaccggcatgtcgcgaacttgttcgcctcgcgtagcggagacggatttaccttcaagatgggcaacggcggcagaatcggcgctgccgtcgatttcctccaggagatcgacagcgacaggcagctcgtcttcaagttggtgcgcccgctccacatcgagcctgcctccggacccgacatctcgctgttcgagatcgagatggtggccggcgatgcgaagctcgcgcagccgatccggctcgctcgcgcccctaaggagaccaacggcatagccgtcatcggatatccggcatacgacagcagaattccagatctcgatctcatggagtcgatctacggcaagatctacaacaagaagcggttggcgccgggcgccatcacgcgcctcgaagccacgcgactgtttcacaattgcaccacgctcggaggaaattccggatcggtgctgatcgacctcgatagcggcgaggcgttcggtcttcacttctccgggacgttcatgacgacgaactatgccgtgaggtcggacgtcgtggccaaggtcatcgatgacgtcgccaaggggcgtccgcgctgggaggcggtcaagcccgaaaatcggtcgcgctcgacccgctccgcgccgcgcgttccggctccgccgtcgcgaagcgtcagcctgacggtgcccctgaccatcacggtgagcatcggcgagcccggcgccgccgaacgtaccgtcgagccgccgccgaccgcgatcgtgtccacgatcgacgacgagatcgaaggcactgaagccgtcgcggcggactacagcgaccgccagggatacgtgcctggctttctcggcccgcacaacgtggtcgatctgcccgtcgtcgagcgcgacgcggacgacgtgctcgcgttgaccgacggaagcggcagcgaactgaagtacgagcactactccgtggtcatgagccgcaagcgccggatgtgcttcttcagcgcagtgaacatcgacggcaagaagtcgctcaagagcgcccgggtcggttggaagtgggacccgcgcattccccgttcgcagcagatcatgaacgaatgctacggcaatccgccgaagttcagccgcgggcacatgacccgccgggaggatccgggttggggggatccggagacggccaaacgcggcaacgaggattcgatgcacgtcacgaacaccacgccgcagatgcaggcctttaactcgccgatttggctcgcgctggaggactacgcgctccagcacgcccgcgaggacgacatgaagatttcggtattcaccgggccctacttcgctcggcgcgatccgaccatgtatggcgtgaggatcccggtcgcattttggaagatcatcgcgtttatccacgacgagaccggaaagctctgcgccacgggctacgagatgagccagaagtcgaagctgcccgaggaggagttcgtgttcggcgcgttcacgtctccgcaactccacgtcgcgacccaggtatcgatccggtcgatcgaggccaaggcgggaatcaccttcggtcggcttgcccaggtggacccgctcgaaaccgacgacgagggaatcgccgacatcagcgatcgcgagccgcttcaggccttcgagcagatcaggttcgtgcgttga

SEQ ID NO: 555 - DNA, 339 bp, BradyrhizobiumColbertium
ttggctttgctgtgctgcccgcatatcgccgccaccgcgaagcatgctgacggaaggccgattgccgtcgagcgcgtggtcgaatcgtcggaccgcaagatgatcgctctgtccgacatcggacccggcgatctgtggcggcccatcgaacagtcttgttcgaaatccgggtctgtggatacggaacgatttcacgtggcggtcacgatcgcgaccgatcgcgacgagacatcgatcgagatcgcgttcgtcgctcgggaggtgtttcagtcgaccaccggcatagacgttccgcccaccgaggggtcgggcggctacgatggccggctgcttccttga

SEQ ID NO: 556 - DNA, 1425 bp, BradyrhizobiumColbertium
atgtcgcaatctaacacgctcaccgtatccaccggtccgcttgccgagatctcggtgctggacggcagcatgaacaccgtcgctcaggcggtcggcgacttgtcgagccaacttgcgccgggaatctacaaggtccgggtgcggaatggtccaggcgttgcggaacggcttgtgtcgctcgatcgggatgtctcggtcgatattcccccgcctccgatcttcacgccgatcccgcttgccgggacagcccgaaccgacgcgttagccatgcatcgcgcgatgaccgcgagcacccagcccacgcatgaattcggatcgggagccgggttgttcgtgttctgccgcgactggaatgcggaacgacgatccgttgcggcgaaccctgcggccggcctctcccttgccgacgatgacggccgcatcctggtggatctcgggtcgctgtacgacgaaaaggcggacgacccctgcgtggcgatgtgcgcgaccgcggctccaggtccttatcggctgaggttgaagtatgccgacggcacggtcggcgaacgcgctctgttcgcctctccgggttgccagacccagatctttctggtgctcgcgcccgaacggcccggttcggacgtgcggcttcccgacatcgcgggcggagcagttgtgatttctcggtcgttcggattcgacggtcacgaccgcaggacggagctcggggagacggctcgctacgcgctgactcaaaaacggaaggtcgtgtcggaccagctacgcgacgagatcgtaaacgagaagttcggcgatccgatgctaggtctgttgggggcgcatctgctgctccgggacgaacccgggaacgttctgctgttcgagacggtcacaggcaatctcctcaggctgctcggtcccgatcatccagatctgcgggcgctctgtctgcgtcgggtcacccccctgccccaggtgccgcggtcgctcgatacgccgccgatgttgagggcaagctgggacatcgcggtcgccgaaagtcttagagacgcctcttcgtttcccgaagcggcgaaggtgacggcgatcgcggacaaggttctaccgaccggctcatggctgatctggaaatgggaggctgtcgtcgagagcgcgaccggcacggcttcgggcctgtccagcgccttggcccagtcgctggagtccttcgtctcggcgcgggcacgattggaggcggcgcgacgcgccaacgaccgcggcgtcttcggcaagctttccaattcggccatcgaggcgatctcgcactctttcgacaggctgcgcggcagacctgcgccgaagccgccgatgccgacgctcgatgtggaagatcgcgcggaactgtcgcgcgtcctcggcgtcccggggccgcttctcgattcgattctcaagaagatattcgactga

SEQ ID NO: 557 - DNA, 1062 bp, BradyrhizobiumColbertium
atggcgcttgccgattacgcgctcgtcgtcgggatcaacgtctatccgggcctgacgtcgctcaagggtgccgagaacgacgcgcgcgatttctacgcctgggtgacttcgccctccggcggcaaggtcgaccgtgcgaatgccgtgctgctcgtcagctccgatttcggcgccttcgccggcgccgaagacgcaaggccggccgcgaaggaaatcgaggatttcttcacgcgcatcgacaacgccgcgattgcgaacaacaggaacagcctagggctgaaggccggaaacaggatctggctcttcttttccgggcatggcttcgcgccgacgctggaccgctcggccgtgctgctggcgaacgccacgtcgagccgcattcacaacgtggccgcactgctgtgggccgagcggttgcacgagggcggatggttcgacgacgtgtttctgttccaggacgcctgcagaagtccgatgaccgacgtcgacctgaccccgcccttcctgaagaagaagatcgccccgctcgctcaggttcggcgcagattctatgccttttccgccaagaaccggcagatttcgaaggagttgccgttgggcggggcgcggatgcagggcgtcttcacgacgacgctgctacaagggctacaagggaaagcgcgcgatcccggaaccggcgccctgacggcggcacagttgaaggcctatcttcaggacaacatgataaagttgcttccgcccgaggaccttgcggacgacgagatcgccaagatgcccgaagtcgtcaatccggatccgttcgacatccttccgccggaagcgggacaggtgtcgacctttccggtgatggtcaggttctccaaccccggtccgccggcgcgggtggagaacagcgcgttcgtggcggtggcctcgatagccgcctcgacgccggaatggagcgtcagcctaccgcgtggcctctacaggctggtcgtcgagggcgtgggggacaagctgtttcaggtcaccggcgccgtagcttccgacgacagcggaaaggtggtcgatgtcgcaatctaa

SEQ ID NO: 558 - DNA, 696 bp, BradyrhizobiumColbertium
atgagcgatgcggatcgagcggcgaacgaacagtggtgctttgcctggttcgaggcggcacctccgaaatccggcacggaaagggcggcgctcgtcaaggatagcaagtgggctccgggtgcgacgatcacgatcgcctttctggacggcaccgaccggcagaaggagctggtcaagaaatacgcccccggttggaccgacggcttggcgaatctgaatctcagctgggtcgccggcacgaccgccgacatcaggatcagcttcaggttcaaggggtcgtggtcggtgatcggcacgacctgcaagcatgttcccgcgaaccggccgaccatgaacttcgggtggctgacgccggcggtgggagaggacgaagcgaggagggtgatcctgcacgaattcggacatgcgctcggcctgatccacgagcaccagaatcccgatcaaccgatccagtggaacgagccggctgtcatcgccgacctttcggggcctcccaacaactgggacatggaaactatccggcacaacatgttcgaagcctatccgcgcaacgagatcaacgggaccacgctggatacccgctccatcatgatgtatccgataccttcgagttggactttggacgggaccagcgcgggcatgaactcggatctctcctccaaggacaggagcttcatccggcagcagtacccctga

SEQ ID NO: 559 - DNA, 162 bp, BradyrhizobiumColbertium
atgacttccgtcacgatcgcagctttctcaaaccgggcgcgtgccgcgcacgaagatccttccggtctcgcgtatcgcgcggccctcggcatcttcttcaccagaaaaggcgtcgtgatccggcgccgcattggattgatttacacgtggaaaccgacctaa

SEQ ID NO: 560 - DNA, 1050 bp, BradyrhizobiumColbertium
atgaatattctcgattcatttccgttccctacggatcaaccggccgcacaagaactcatgcgagtgctcgcctcgctctatcgtaccgagcgcgaagccgttctgttcacccaaccattcggtgtagatccgttgaaggttacgccgaacctttcgccgctgctcctatgggacgagctattgaaggcactcgccgcccagggtacgttgcgcgccgtcgtggaggcggcgcacgaccaatttcccaagaatccccgcgctcgacttttcaaggagcttcttgcaaaccgaaagaccgaaagcagcgccgagcctatagacaagctgggcccttcattcgacgacgcggtaagcgagcccgaagctctgttgttcttcgatgacctcacgatgccgatcgggaacgtccccaaactggtcgcgacgctggaaaaaatgtttcgcaccgcaccggcggtctgtctattgcgcgtggagaatgaaataggcgaattcttcggcaccggcttccgtatctccgccgacaccgtcctgaccaaccatcatgttctatttccgaagaacgtcgtcgcgaaaaggctattcgccgattttggctatgaagccgattccgacggggccatggccgcagtttcgtccttgtccggcgatgtcggcaccataactggagagcaggccgacgactgggcgacaatcaaggtggcgaacctaagaccggaatggcccatcgtgcagccagacaccgctgccgttcccgcgaatggcgatttggcttatatccttcagcaccctggaggccggcagaagcggctgggtttcgtgcgaaacacgatcacagaggtaaacgatcgcgtagttcgatacttgaccgacacggaaccagggtcctccggtgcgccggttttcgatgctctcggtcggatcatcgcgattcatcatgccggcggtcggccgcaggaggtgctcggtaggccgcccgtgaccaagaacgaggggatcagagccagccgggtattcgaccggttgaggtctgtaggcgttctgccttga

SEQ ID NO: 561 - DNA, 1020 bp, BradyrhizobiumColbertium
atgcttgcgcaagaacatagggatctgttgatccaaacggtcagcgctgtctttccggtcgagggtcatttcagagtcctcgtgaacgccacgcgggcgaacagctataataagatcgtcccgaccaatactgcgccctacttcgcgatcgggatggttgttgaagccgccgaggcccaaggttggctccgagacctggtaagacggttgcgcgacgccaacccgaatcgacccgagttcgcgcggatcttggaggaactcaaccggctcgttccattcagcagcgccgcaagtcctttcgacgaggtactgcttcatagtggccgaccattcgtgaatagaaggagcctccgcaatcacctcctgaacctgacggatcccaaaggaccatcgatccttttgatcgatggtccgcggcagacagggaaaacgttttcgtattatctcatcaatcacgtcgcgccgtgcaggggatacgccgtaagccggtttcttctcgggcgcctgcctcggccggacgaactcgcaagcgagattctgggacgtatcggcgtcgagaaggcgctgccgccgatcggattggaatcagcagagcgatgggccgagaaactcgcggatgtcgtggctcgcgcgatcgaagataggaagacgccgcggatattcgtgttcgacgaattctccgatacgccactcccggccgggacccttagcctgatcctcagattgaccacgtattccgacgaggaactgcgtcatctgctgcggatcgtcttgatgcgctttccaagcgaactctctcccgagatggacgaggtagccttgcgcgaaaccgtggagccattctcgtccagagacatgacggtcgccgtttcgcaagtggccaaggcgaacggctgggccgtgagcgatcaagccatttccgaaaaagtggacgaattctgcggcgtcccgggccgcactctgaaagaccgctttggattccttcgcaggctgctgcaagagctgggggccgcggcatga

SEQ ID NO: 562 - DNA, 5667 bp, BradyrhizobiumColbertium
ttggaacggctgcaaggggcgatcttggacggcttcgactcgacgtcgctgagaacggctcttcacccggtcgtgagatgggaaaacctttcgccgcataagccgttggcaattcaaatccacgaaatcttgaggcaagccgacgccgaaggcagaatagcggagcttgtagagcgtgcactcagatcgaatccgaacaatcccgccttgagcgaggtcgcccacgagctcggcgtcaagtcggtagcctcgcgcgagatcgtcaagtcggtcagggcctactcgtcgagactggacagcgagatcgccagacgacggttgatcgaaatcgaacggcaagtatgtctggtggaaaccgagagcggagcaacaggaaccggctttttggtaggcccggatcagatactgacccacgccacggtcttcgctgccggaaacgttatgccggaacccgggcaaacggcatcaatcgcattttcggatgcgtctccgtcaaatcaattcccccgaatcagctgtcgatcgactttcgcatcgcgaaacctcgtcatccttcaagcggaccgagacatcgggcgcgagcgatcgtccttcgataccacctccgtcagtgcccgtgcgagaggctgggtggcaccttccgagggacgacttagcgtcgaagacacggtagtggtcgccttatgggacgaggtcgagcgcattcggttctctcaaggacacgtggtccgaattgacggaaacaagttaagtcatacggccaacatgactcccggctccgccggcgctccgattttcgacgacgagttcggtctgaggggaatctcttccgggctccatccgctcgtctcccataacgaagctttctcgatcgaaggaatactggaggagctggcgtcggcgggattccgatggagtctttcgggcggcatcacagggacgcccgaggctccgcacagccaggagggcgggggtctcgatgaagtcgtccgaaacctccagattgcaaaagccgctgtccaggatccggaggacgacgtctggaacaacgaggacggcgaaaccgatgccgatcgttgggaatgggccgaagcagccgcggtaacggcctacttcgacccagataagctcgtgccgctgggcgagccgtccatcaacgggcgtgtttccttgttgttggagagttcacccgcgcgttcgcgaaccggcaagcagctttggatcctgcccgaacagttgcgggtccgggcactcgagcgactgtccaatcgcggggaattgaagctgctccggtcgaagaactccaatcattccgacgatttcacggatcttctcctcggcgccttcatagcgggtgacggcgcccgcgccttcgatccgcaagacccggatcatctgcgatccgccgtgcaagtcgtgcaatggcttcgcaagacggatatcgtccttccgtccttggacgagctcagaagcagcttggagagagcgacgctgctcggtccgttccggcatcttacttctgggttctttgcgggccgcgacacggagttgaaggagctaaccagctacgtcgatggcccggatagtctggcggacggcacgccgcggcgccccatcctgctctacgctcccggcgggatggggaaatcctcgcttcttgcgcatttcatcctgaaaaactcggaacgcgacgtcctcgacccggaacgttggcgaccgttcgtctacctcgatttcgatcgtcccgaactagatgcgcgcgatcgatctaccgtgcttctcgcaatagtccgctacctcgcgccgcaaatcccggagatcgcgacgctcggaaactccctagtacagacctggtcgtcgcgcagacgcgaaggacgcagttcatcgggtgcggcaggcgcaatcgccggcggcaggcttccgcgattgacggaagcccaattgatgaagttgatggcggatactgcggagttcttgaaagtcgcacacgaagcgaagccggcacctctgcttctcgttttggataccatcgaagaaatccaatacgcgagccccgacgcggtcgagccgctcgcgcggatgatcacccaacttcgcagcatggttccgtggcttcgcccaattctctctggccgagtggagatccactcgattgcggaactggaacatcgcaagatcgaacctctcgaggaggcggcggcccgagatttgctaaagtactatcttcctgaggcgctgagccgaaaggcggatctcgtgagccggctggtcgggaccgtcggcggaaatcctctttccctccggcttgccgcggaagtcttgagtcacgaaaccgaagagtccctaggcgcggtcggagaggtcgatctctggaaaagggttggtgacgcaatcgtccagggacagttgtacgagcgggtcgtcagtcatctccaccaaggaccggtcaagaaaatcgccgtcccgggactggtgctgcgttacgtgacgccggaactcatcaaggacgttctcgcagggccctgtggtgtggaagtcgaagaccatgcgacggcagagtcgctgttcgcggagctggcccgggagatcgcgctcgtccgccaaggagacgagccggggcggttggtcctccgtccggagctcagaaggacggttctcgaaaatttccgcagcgatacgaggagcgcagcgacccgggagctgattcatgcagaggcgataagatacttttcggccaagcccggagcggagaaccgggccgaggagatttaccatcgcctatggctaggccacgatttcgagacgatcgatgccagatggctcaggggcatcgagttgtctctgcgatccgcggcggaagagctgacgggcgaagcgaaaatctacctgacgaacagaatagggggcctcgacgaaggtgccatcgccctgtcagcgccgctttccgaatgggagatctacgccgccaagcgggcttcggatctcctgcagctcggcgacgcatcgtccgccctcgaagtgctcgctcatcggcaagagagactgccaggcagccgcctgtatctcatcgaaagcgtcgcccaaaggtcgctgccgacgcccgatctcaccgccgccgaagtcgccgccgaaaaggcggtcctagccgcgcggaccaataaagatctcggcgaggtccataaggcgctggaagagctcatcgaaatcaaacgacttcgggacgaccccgccggggtattgcgcacactcgtcgagctgggaaatctcggagagcaactcggagacgatttgatcctgcttcaagcggaagtcgaaacactcgagtcagcctcagcgcgcggaagaccggatcgacggttgagcgaggcggcaatcagagtattcagccgacttcccgacgagctcatcagtcgtgggccggagctttgtcgccgggtggcggcacaagtgggcggcaccagtccggagatcctgaagcgagtcgtgaggctcgtggggttcggcgcgttaggcccggaggcctcgggcgagctgcacgagattctcaaagactggggaaaaaccgaccccgaagtagataacgtcgtccgcggggttatggatcagaaaagcatcgcggccgtcgctcaacatctcgtcgtagcgaagcagttggatggcgaggtcgcgtcccgtctctcggattggctacaggggatcgccgtaccggatgcgatccgcgtcgcggcacgacgaacggccgacaaggaggaaaacaaggcgcgcggacagcaggcgatcctttctcgatacaacgagtccctcttggaattcgacccggcactcctgcaagaggccgccgagatccgcggctatggatcggtctcctccgttgcggtgaacgacgaaatcgagctcgaatccatcgtgcttcgccgaagtcgcccggttctcgcactcaagaacaatctgccccaactggtgttccacgacgaagcggatagcgaaatctggcgggatcggctgatccgtgccacgcccgcaatagagagagccgccaaatcggtcggtcgtatcgacctcatcggcggagaactcgattgggtgggagccggctggctggtagccgagaacgtgatcgtgacgaatcgtcacgtcgcgcaggtctttacgcagcgccagcaggtaggcttgacgttcactcgaggccctgccggcccggtcggcgcgcagatcgactttctgcaggaggccgacaacccgaacacggcggccttcaggctgatcaagccaattcacgttgagccgcacggcggtccggacgtagcattcttcgaaatcgagtcgagcggtcgtcgggctccggatccactaacgcttgccaagcgcatcgaacagaatccctccgtcggactgatcggctatccgagctacgatagcagggtcgccgaaaccgacctgatggagcgcatatacggaaggatctacgacaaaaagcggatcgcggtcggtgcgataaccgctgtggaagaacagaatgtggtccacaattgtgcgactctcggagggaattccgggtcggcgatcatcgatctcgagaccggagaagcactgggtctgcatttcagcggaaaattcctcggaaacggctacggcgtacgcgccgacatcgtcggccgtctgctcgagtcgatccgatccggaacggggcgaaggggacaaggcaatcgaagcgatcggtcgttcaaagccgagaggcccgatcgtccgtcgtcggacatggccctaccaaaggacctcgatcggaccgaaggcgagacggaagacgcttctgaatattcggacagagagggttacgatccagcgttccttgctcgacgccaaatccgtcttcccgaggttgtccgaagccgcgacgacttgctttggttcggtttcgatggaacggccgtcagcgagctcaaatatactcacttctccgtcgcgatgagccgcagtcggcggatgtgtctgttcagcgcggtgaacatcgacggggatcaatcgagaaaaaccgctcgcttcggctggcgatgggacccacgtatcccccggtccgctcagatcatgaacgaatgctacggcgatccaccgaaattcggccgcggacatatgacgcggcgcgaagatgccacgtggggagatcgccggtcggcggtgcagggaaatagagacgcaatgcacgtcacgaacgtcgtgccgcagatgcaggcgctcacttctccgatctggcttgggctggaagactacgcgctggagcacgcgcagcaggacgacatgaagatgtccgtatttacgggtccatacttcggggaagacgatcccgtgatgttcggcgtgagaatcccgctcgctttctggaaagtgatcgcattccttcacgacgagaccggcgaactttgcgcgaccggttatcagatggagcagcatcagatcctcgggcatgaagaaacggtcttcgcccccttcgacccaccgcgacttcaagtcgtaagtcaggtctcgatcaagtcgatcgagctgagggccggtctgcagttcgactctctgtcgtcgttcgatccgctcaaggacgaaatcgaagagccggacgaatcgcaagcacggccaattcttctccagacgttggaacggatacgcttcgtttga

SEQ ID NO: 563 - DNA, 273 bp, BradyrhizobiumColbertium
atgacgctgcaggaggcagcctggctgttctggccgatgggaccgctgacgacgacttcgctgcgcaccgcggtccgcgaccgccgcctcgacgtggccgagatcgcgggcaagatcctcacgaacaaggattcgatccagaagatgtgccggtgctcggcgaggacgaaggacaccgcgcccgaagcatccgcggttccggccgagtccggcgccggcatgccgcggagcgtcgccgagtaccgtcgcatggtggccgaggggcggctctag

SEQ ID NO: 564 - DNA, 936 bp, BradyrhizobiumColbertium
atgtggtacgagacggttagggaagagttaaagaaggcccgccagaccggtcagccgtggcatgccctcgccgaaatcatgcggcgcattctggaggcggtcggcgccgacaagcacggccaggtttggcgcatcgccgcgcgcgagaccggcctgtccgaggtgatgctccgcaggtatcttggcgccctcgaccgtctccaggccatcgagaaggaggcgggtctggcggccggcagcctcctttccgcgaccttcgcgcctgccgagctcgcgctgcgcctgcactcgcgcgaccccgtcgccggcctgaaggcgctcaaggacctgacgctgcgcaaggtcaccgtgcgggacatccgcaaggagctgggggaaggcgggtcgccggattcggacgccgccacccgcggccgcagcatccgcgaccgcggcgtcctggtcgctcgttgcgaaaggctcgtcgcgtccgaggccgccgtcctgttcggcgatggcgcgacctcccgccgccgtccgtcggcgcggtatttccgccgcctcggattcgagtttcgagatccggcctgcgccctcctcggcggggccgatctctatctggccgaatccggcggtcgcgacccgctcgacggcctcgcccaatccgtggtgctggcgggctttctgccggccttctacgtcgtggtgggtccggatctcgacgcggtcgacgccgatcggctggcggacgcactcgaagcgctggatgcccgtttcgtgggcgtgctgctgctgcgggacgacggtccggcgcacgtcgtccgcaaggccgaagtcgatccgaggcgcgccccgccggagaaatatcccgctctgctgaagctgttcgcgtcgggccgcagcccgaccgcgctcgtaacgacgacgcttggagatcgcatgccgacgtcgggctag

SEQ ID NO: 565 - DNA, 498 bp, BradyrhizobiumColbertium
atgacgaagcagatccccaccttctccaacctccaggaccttccgatcctgcccgatgcgctccactccctcagcgcggcaccttcaccgcatcccgagccgccgttgcgtcacggcattctcgagatcccggtgcccggcggagcggagacgggcatcgcaacggtgctggccgctccgatccggctgcgcgcctcttcgaccagcgccctgccgccggtgccgaccttcgaacgacgccccatcgcgcgcggagtggcgatcgcgaccgaaccggcgctggcctacctggcctgggcgaggggccgctcgaacgagaagccggccttcgtgtcgcgcgcgccgttcgccaagccgcgcgccgcggcccatggcgtcgagcacaccggcattctcgagctgtcgcatcggccgaccggttcgtcgacggcatcgccgtcgcccgctgccggcacgcgaaggcccgcccggccgtcccagcgcggcgacgtgcggtaa

SEQ ID NO: 566 - DNA, 1626 bp, BradyrhizobiumColbertium
atgggcatgcacttctctcccgttcccggtttcgtgccgctcggctacatccagccgaaggccccgccggacgatccggagctgacggtcagccagatggcgctcgtcaccccctacgccacggcgagccatggcaagcacgaactgccggcggaagctccgaagggcctcatccccgcgagcggcatcatcgtgaccggcggcgaaatcgactgggtcgaagccaccacccgcttcctggtctggtcgggccacaagatcgaatcggcgcgctccatcgccgacgtggccatcgccctttcgaagatgaagagaggccgcggccgcaagcgcctggcgccgcacctcttcccgcggggcgactacatccacatgacggacggctgggacaggcgcaccaccggctgtcccctgatcgaaggcaaggactaccgcgacgacgtcggagccaacgcggcgctggcggagatggtcgagaagcgcgtgcgcaagatcttgggccgcgttctcaagaaggacgtgaaggtcaaggaggcgttcgcggcctacctgatgcacttcaagccgggtgcccgccccgacgcgctcgacgagatcagtcacgggcgcatcgtcaacgacctggcgcacctcgaatccttcatgggcgagaacacgctgcaggacatcggctattcgaccggagtccagtatgtggaatacgagaccgcccaggcgatcgtcaaccggacttccgcgcaggaggacctctccgaggtccgctacgtggcgcgctcgacggcgcggcggcgcgtcgtgacgctggtcaaggtgctcgattggtactgcggcggcgagaaccgcatcgagccgatcaagatcaagatcccgaaagtgccgcgcacctcggtcgatttccttaccgtcgaggagatcgtccgactgatctcggccgcgcgcgggcggatctacgacaggcacggcaacgtcgtcggacatcacgacaagcgcgccgactacgagtgcgtggtccggttcatcctggtgtacctctacggcggcacccgtcacgccaacatcctgttccttacctgggggcaggacgcgagggccggctggatcgacccgaatctcggcatcatcgcgcggcagggaccgctcgccccgatcaccaacaagggtcgcgatacgagcccgctgatcggctcgctggtcgagctcgcggcgcgctggtatgccgaggacgaggcgctgcgcaggcagcacccggggcgctacgtccacatcatccacgacgccgaaggctttccgatcgccaagaagaacccgaagcacgcgatggacgccggcaagcgcatgaacgcgctgttccaggaggtgcgcgaactcgctgcgctgccgcatgcgcgaccccacatgttgaagcatagcggcgtcacgtactgcgtgagggcgggcatgccggtgaacgacgtcgagaacgccttctcgacgaccttcatcacgctgtggacgtactacaagtccttgcagccctggctgcgcaagggtccgtcgcagccgtatgacccgtcgcgcctgaagctgctggccctgcgccggttctcctccaaatcgaaggacaagctgcttgcgaaagccgcgtga

SEQ ID NO: 567 - DNA, 2316 bp, BradyrhizobiumColbertium
atgctgctgcgcgcgtcgttctggccggcagcgcggttcgctacggacctcgacggcgaagcgatcgcggcggcatgcgcactgatgggactgctcggcattcccgaacgcgcgatcccctcgatcgagttcgacgcggcgctgcccgaggacgcgcccgccacgatcgtagtcccggcaggcgggcgcctcgaagccgtgcgcctgccggcggccgcgaagctgctggtggcgcggtggaaggagaagcggccgaccggcatcgcttcgagcaggctgttcgtcacctgcgtcggcaaggagctcacgatccgggacttcgcgacccatctgatgcaggcgggcgaggcgctcgggctcgccgaccacctcgggacctgcctgcgccgcttcttcgtcgacaacttctatcgccacggcgaccacgtcgccgccgacgccgtcgtgctcgaacgccatctcctgcggttcgacgggcgtgcctcggcgcggacgcagacggcggcggagcgacggatggtggcgttgcggaccgattgttttccggacgccggcccgcgcttcttgtccgacgcgcgcgccatcgaggacgcacgccggctcggcggcgagcttcccgacagctacgaaggctgcttcaggccgaaggtcgacaaaagcaagctgcgtcttccccatgaccacccgctgctcgccgatctcgcagccacggagctggcccgctccaagaaggcgcgcggggagcagctgctcgagatctaccggcgccatcgccccgacctggaccgccgtgccgacgacggcaccctgccgcgacggctggcggcgccgatcttcggcctcaactacaacaactatctggccttggtcgccaaggccaagcgcgtttcgggcgagctcaagccgaaccccggtcctcgcccgcctccaccgcaacgcccggccttgtcggagaaggaggccgagcgcgttcgtcggatcgaggagatcaaggatccgggcgaggcccgattgcccgacttccgcttctcgctgctgcgcaggcatgcctccttcgtgttcgatctgcagcgctcgggcaagatcaccgccgaacgcggagccgaactgctgcgtacctacaagcgcaccttcctgcgcatgaagtccgaccacgacgacggcatcttcgatcactggctgaggccccggccaacgggcgccgaggcccgcaaatgggtcgccttggtccgcgaacaccatgcccgccgcgaaaaggggctgagcgacgcggacttcatccgctggctccgcaagactcatcgtttgcctctatccgatcagtccgcacacgcggccatgtacccgaggcgccgcgagaagacggtcagggccgcctacgcgaagccggcgccgacgacgcccgcggcctccgagaccgcgcaactcgaggcgatcgcagcgcgcgctcgggcgtcgcgacaggccggaaaaggcgatcgcaacgtcaggctcggcggcgacgcgcccttcgtgttcggcctcgtccgggccggcaggttgcagggcaaggacgccgcgcgcatcctcggtattcagaaggagctgtcgggcgagctctatcggctgtacctggaggacgatctggcgcttgcgctgaagacgcactcccgggcggagcagaatcgccaccgagagctgctgctggacgagatggcgcgacgaggcgccgacaagggcgtcgccgcgctcctgcgcgacattcgccggcgtcaccggatctacatccagcgtaacaccgcaaccgcgatcctgcagcgatacgagcgcgagcacggacgcaagccgcccgggtttgcgaagggggcgcgcggcatcaggcccgacgtccacccgagtgcgcaggagcggagaaggctgaaggacatcgccgcgacccactgggagggggccgccgacatcgacacgctgcgtcggcgcgtgatgaaacagcacggcgccttcctcgtcgacatggtctcggagcgaaagctctcctgcgcctcggcggcgaggctcacgaaactctatcctagccagttctcggaggtccgtcgcgacttcgcccgggggcagaccgcccgccactgcgaggcgcagccggtcggacaggaaaggcggaggcaggaggatatcgtcgtgcgggaggcggtcgcctcagcggagggcgagcgctacggcgacttcgtcgcgcggctcggcgccgacatcactctggggcacggtcgcatcaggatccttcgtcaggccgcgctgcaggcgcgcctcgtcgcaggagcccgacatccagaagcctaa

SEQ ID NO: 568 - DNA, 171 bp, BradyrhizobiumColbertium
atggcaagacgcaggcaggagacccataccgaggttacgatcaccgcgaaaggcatgcgcatcatattgcccaagaccgatgatctttcgcctctgtattcgcgccggcaggtgaagggcattatcgccgatctccagtctgctctcgataacgacctgttctgcgcctag

SEQ ID NO: 569 - DNA, 2871 bp, BradyrhizobiumColbertium
atggtcggatccgtgcacgcggacctcggcctcgtcgaattctggcgcaaacgcaacgcaccgggctgggccgagaagacgttggctctggcgcgaaagcacgacgacgttccggagcttaagctcgcggctgcgatcgccgtgctcgaattggcgttgggacccgatgctttcatcgggaccccgggcaccttcacccgggcggaactcgaaggcgctgccggcgagatgttggctatggccgagagttgcctgagcaacggcttcgccgaccggcacgaccttctcgctttcgtcaacaatgcggcggtcctgctccggctgacgggccggcagaccgaatgcgaatctctcctcgttcgcgctctgccgtcccttcccgaccagccgcaattgcggaggctgctggctctggcacaggtcgcccaaggccggttcgacgaggccgaggtcacgctgcgcggtgatccggatccggaaagccgattgttcgctgcagagatagtggcccgtcgggacgacaaggaagccatcaagctcgtcgaggccgtcgagccgacggggcgcgatcacgtcgcggaattgaaatggcgcatcttgggcgacctggctctgcgggtgcgtgactacgaccgcgtggaattggccatcgcgaacctcgccgacctgcccggggccaaagtcgcggtcgaacttctgcggctccggcgggacgttcggctcggcatcgacgcggacgagcggcacgcacggctgaaggagctgggtagcacggaattcacgcttggccacaacctcttgcgctatctggtcgcggacgaaatgcgcaatcagcgtctgcccgccgaggcggccgacctgatcgagccgatcgtcgagttgcaaacacgcaacgtagccacccatctctacctcgcctgcctcgtcgaatcccgccgcgacgaagcgttcccggcggcgctcgccaaagcatcaccggaagtccgcaacgatccggagacgctctggctgtgggcgatccattcgtggaacataggcgatctgccggaatccaggcgggcggtggacgccctcctcgtctaccgtccggacggcgcggcggcgcggctcctcaagatcgagatcttgatacggtccaacgagatcgacgaactgctgccggagctcgatcgccccgtcgaacggctcggattcaaccggttgagcgacaagctccgggtcgcctcgctgctgggtcatttcgggcggatgagtcgtgccctcgcctacgcctacaggcttcttctggaaaacagggaagtgtcgcaggcttggctgtgctttcaaggactcattctgtgcgaggggaccaagctcgcgacttccggagattcctgggacaccgaggtagtctgcgaaaacgccgcggtcgacatcgagtacgatgacggcgagaagcagttcgtcatcgtcgaatccgacgcagctctccgtcgcctcgacgaggattcctgggagcccgatcatccgctcatccgccggatcatgggatcgtcggtcgatgcgcgcttcacaaacccgacgaccggcaagtccggtacgatcaggcagatccgacacaagtacatcgccaaacaccatttcgtgttcgccaatcacgaagcgcgctttccggatgtccctgcgttccgtacggtttcgctcgacgtctcgagtccggagggtctcgcaccggttctggaacagctcaaggctaggcacgatttcgccgcgcaagagcaggacaactaccggaacggaccctggccgctcgcgatcttcgcccatcgcgtcggctgcgacagcatcgaagcagccgacggcttggcggcacaaggactgcagatgaaggtggcggtcggatcggaagccgaacgtcgcacagcgatcgcagcaatcgtctcgaacggtgccgtcggttgcgtgatggacctgctcgcgtattggatgtgctggcggttgggcgcgctgggcgcgatctcggagacgtgcggtactattcacatcgcgcagagtacgatggaccagcttctcgcgcgacgggagcgcatcgcttattccgtccgggctggtatgaagagcatgcgctacgatgaaggcaagatggcggtcatcgaagtggcgcccgaggttgtcaaatcgtggctgaccgacgtcgaggcggcgatagaatgggcgaaaaccaacgcgttcatctgcccgctgatcgtgcccgaaaaaatccccgaggttcttagggaattcctgcgcgatggtccgtgggagatattcgacagcctggtcgttgccatccagaaggatattctgcttgtcaccgacgacgcgccgacacgggaatttgccaggcggttcggcttcgaccgaagcacttggctgcagccggcattcatggtcgccgccaaccggaacaagatcgggttcgaaaattacgtgaaatggacagcacacctcatcggtgccggtcacaactacatctgtgtctctggcagagcgttgatacgcgcagcgttgatcgacttcgaggcgggcgaatgccctgggtattacttcaggcggaccgccaggatgatcggcggcgcttccgccgatcccacgtctcacatccgcgtggtgattgaattcctgcggcacgcctggaacgactcgtccgcactccgctatcgcgaaaaaacgaccggattcctgctagaacagctcgtccgtgaacggacatccgaccacggccgcatcctgcgtacgatcgtccgggccgctgccggcgtcccagacctgatcgaatatctgacggcgtggctgcgcggacatttcatcgatctaggccgtacaggcacccatgacgcaaggcgcaaatag

SEQ ID NO: 570 - DNA, 498 bp, BradyrhizobiumColbertium
atgcccgagcgccaagacccaaacggatccaccaaggcgacggacgccgtcctcgacatcgaaagcgagctccgggccgaagggcacgacttgaaggtcatactctattcatggtccgatctcgagctgaagatctgccagcacccggcggctctctccttcttctttcccgccgccgttgcttcgaccgcggctcagtccctgaggttggatcccggatccatctctgcgatcgccgaagccgtagagcgcatgcggctgtcgaacaatgcggtcattccggccgacgtgaaggccccggccgacaactccgaagaccccgtcctgcacgcaaagatcgatctctggcgggacctgttccggaagggaaactcgctcgccgtcgcgcgggacgggcttcttgagcttcacggagagcctctcgagcaagccatgggccagattccgcatcgcgaccaatctcggcgccatcgccatcagattgggcaggcaggatga

SEQ ID NO: 571 - DNA, 699 bp, BradyrhizobiumColbertium
atgtcagaggatcagctgatcgacggcgagtggatacgcagcaggctgcggagccatcgcaggacgcagcgggatctggccgccgcgctcggggtcgacgcgtcggcggtcagccgcatcctagacggccaccggaagctccgggccgacgaggcgtccagaatccgatccttcttcgatccgggcgcggagccgccggtggcgcctccgcctgcgttccggctcgggccgctcgccgggagcgccggcccgcggcgcggtccaccgccgcgacaacgggggaccggcgacattcccgtcttcgcggccccgagcggtaggggcgagccgttcttcgagtttccgtccggcccgccgatggaataccgcccccggccggaacagctcctgggggtcgaggacgcgttcgccatctacgcgccgggcgacatcctcgcgccgaggtaccgggcggcggaaacgctctacgtccacccccgcaagccgccgacggtcggcttggactgcttcgtccgaatgcgggtgcccgaccgtgccgtggccatgctgcgctatctcgggagcgaccggacggtgctcggcttcagcgcggtatcttccccctaccctgccgccgccgtgccccaagcggaaatcgtcaccttgaaggaacacgaggtgctcctgatagggcggatcgttctggtagccgcaggataa

SEQ ID NO: 572 - DNA, 1053 bp, BradyrhizobiumColbertium
atgtttctgaccgacgtagggggtcgagttccgttcacaagggacgatcccttcttccaaacgacccccgaccggatcgacgcccacgtcgacgccttcgtcaacaaactcggctgccgctcggtttcgttcgttcgggtcaagcccttcgccggagccgagacgggcttctgccaacgcaacgtggccgagtgcgtggccctgtacggcggccaccacgcctacggatacgcgctgtggaagaaccccctgttcctgatggcggaagtccattccgtgtgggcgactcctgacggagagctgatcgatcctacccccacggccgaaggcgagactcgcgtctgcttcgcgctcgatccatccctctcgacggccttcgacggagcgcggccgccgcccaatcgggccatgaacatcgtggacaaagccgatcccgccgaggtcgcccaggccgtcgccggcctttctccggcgcgcctcgactacgaaaggcgtcgcgccgaccgcgcgggcctcgatctggaaacctacttggccacaaagctcggacggacggagctgtcgagcgcggtcgacgctttcatcgccgccagcgaggcacgcgacctcctggcgacgccgacgccgacccgatttctctcccacgatcctcaggcattccggagcgcgcagctcaaggtgtgccagctcgaagaccgcatccgccgcctgctggcgactcgcggcggcgagacgtccaagaccacagcggcgccgcccgcccgcgcggcggcggccgcggacggccgccccacggtcgcatccggcttcgacgggttgatcgcggcactgctcgatccgggcttcgacatggtcgccgtcgacctggcgccgagcggaccgaaggtgctgtacgcgggacgcctcgaacgcgacccgtcgcccgggagcgtcaccggccatcgttccgaccaggagccgttcgcagcagtcgcgcagatcgtgaaaacccgtctcggcggcgaaggcagagatcgggacgccgccacgtccgccgagaaatcgtcgagctga

SEQ ID NO: 573 - DNA, 675 bp, BradyrhizobiumColbertium
atgctgccgcaaaagtcgctggaaggctacgtgccggtcttctcgggcctgaggtcgcccgtctgggcgccgctgctgtcggagccgcgcgagcgcgccgcggaagcccgggcgcttctgcaggtgcacgacgaattcgatacctacgacttcctgaatttctttgcggcatcgagcgatccagccagacactgcgcggcgctcgcaaattccttctgcgacatcttctcggtccacctcgcgctcaagttcggcattccgcatggggccaggttcgggagatacgaggaggagtccgaccgcatcgttgggctggtcccgctgggcttcgtgcggtggctcctcggtcgctgtgcgcagaagcgccaccgtccgctcgacgggatcaagcccgccgagttcgaggcgctctgggacttcaggttcgaggcgggagatcggcacagcgaggaggtgagccgggcgttggaacggatggatccggtcgcggtcggcaaactgctgcccgcgttctccagtccgggcatcgagaagaaggcgatcaggagcatcgcgaccgacgcggccgcgcatgccttcttcgtttcgatcgatgtggacaagtaccgcgccgccaaggaacgccggcgccgcgagaagcacgcgttcgcgttcgctcggctaggatacgcatag

SEQ ID NO: 574 - DNA, 432 bp, BradyrhizobiumColbertium
atggacaacacctccaccatcgaccacgcgccgccggcccccgatggctggcgctccgtcgacatcgcctcgccgcgccctctcggcggcccaagctacacgatgatggcaaggcgcaacggcggcgaagagagggtggcccgctacgtgtcactcgcccaggcccttatcgtcgcgctggagcaccgcggcggatgcgaggccgcgatggtctaccgcgaccgcggagacctgcgcgaatacgtcatcggccgccgcctgacgggcgcgaacaccttcgagcccgtgttgcggggcgtggtgccgcgcacggctcgcatcgccaccgaccacatccgggcgttggaattcttcgaggaggtcctcgagcacgacgcgcgcgtgttcttcgacgggcgcctggttcgggatccccccgcacgccccgtataa

SEQ ID NO: 575 - DNA, 603 bp, BradyrhizobiumColbertium
atgcagcccgaaacggagcgcgcgccgggcggcctgtccaaggacgagatcgccgaaatcttctccgggacggtcggtgcctctctcctctgcaccggcctggcgcggagtttctgcgagcggtccgacgaggagatgtccgacaggctcggctttcggttgggcttgaagtccgtcgaactcgacagcccgagcgaatacaacttcaccaccgaccgcatcctagccacgatgccgctgcgcagcgagaagaagcttttctctgcgagcatgggcgagcggcaccgaaggttgaacgacgcgatcatcgactggttcacgccttatccgggttttgccccttactacagcgactatatcggcgagtggatcgcaaagctcatcgcggagtgggacaggaacgagctctgcgtgctgctcgactccttcgtcgacaccgacatcgacgaggagatctatcacgccttcgccgagggcgacgcatacggcgcattcgaggaattcgtcgactggaagcggttcgatgaagaggcggccgctctccgtcgcgccaagacggaagcgttcctgaaggatctggaattcgacggcgagtcatcatga

SEQ ID NO: 576 - DNA, 228 bp, BradyrhizobiumColbertium
gtggcattgctcgatcgcagcttcgacatggtcgcggtagatctcgcgcccagcggaccgaaggtcctgtacgcgggatgcctccaacgcgacctgtcgcccgagaacgtcgccgacttttccgcgcaggagccgttcgcagagattgggcagattttgaagactcgcctcggcgacggaagcagagatcaggaagccgccacggccgccgataactcttcgagctga

SEQ ID NO: 577 - DNA, 477 bp, BradyrhizobiumColbertium
atggcgcaggacgtcggaaccgggctgggcgcaacgcggcttggatttttgggcggtacggcgctcgtggcagcaggcacactgtttggcaacatgctgcctgatggcatcgcagttcccgcggcgcacgcgcaggcagccggtggcgccgcaccggcacccgccgcaccgaagggaccgcaatacctgaaattccccggcaagaaattgtccgtctcgatccgggccgtgcccggaacgacgctgcgcaaaattgggctcgaagacgcctccgatgagccgtcggcgatcgatggcgtcttcgcgcaagacacccctctcgcgatgcaacgtggcggcaccgcacccgcaccatgccggggttcgctcggtgtcgagcaccgcgaaccttgcggactgattatcttggaactgcccataggagagccgcacggtgatcagctcgaagagttatcggcggccgtggcggcttcctga

SEQ ID NO: 578 - DNA, 1380 bp, BradyrhizobiumColbertium
gtgaacgcatccgagattccgaccatcaagcaggcatcgcaggaaatccgctcccgatccatgtcgtcggtcgaactcacccaggcctgcctgggcagaatttcggcctacgacgcggcgctccacagctacatccttgtcgcggccgaatcggctttggaggcagcgcggcgcgccgacgcggagctcgcttccggccactaccgcggtccgctgcatggcattccgatcggcatcaaggacatcatcctcaccggaggcgtggcgacgacggcgcagtcgggcgtcgcaccgcgctatgacagcaacgcgtccgccgacgtcgtgacgcgcctggtcgacaggggatgcatcctgcttggcaagcaagcgacgcatgaatacgcgatcggcggtccctcggacgacctgccgtggccgacgccgcgcaatccctgggacacgaaacgctatgccggcggatcgagcagcgggacgggggtcgcgatcgcggcggggctggcgctcggcggaattggaacggacacggtgggatcgatccgttttccttcggcgatgtgcggcattgccggactaaagccaacgtacgggcgtatcagccgggaaggcgtgcttccgctcgcatggtcgctcgatcacgtgggtcccatggcatggacggtcgaagattgcgccatattgctgcaggcgatcgacccgcttgatgacgccacgccgaacggcagcggcgacttcctgtccggcctcgacaagggcatcaagggctttcgcatcggcgtgatccgccatttcttcgacaccgacaatccggtcgatacaccgacgctggaggcgatcgagagcacgctcgacctgctcaggaggcttggcgccgatgtccgcgacgtcaagctttcgccgctgcatgactacgctgcctgcgccaacgtcatcatgctttcggaagcctacgcgatccatcgccgaaccatgcaggatcgcctcgacgactatggcgaattcttccgcgaccgcgtctcgatgggtgccttcatctctgccaccgactacattcaggccatgcgcgtcagggcacagctcctcgctgagatgcgatcgctgttcgacaggtttgatgtcctcgtgagcgcgacggttccgtttaaggcgccaccgatcgaggacatcagcaagtatgcgccgttcgaacggcccttcctgaccatgccgttcagcgtgacggggctgcccgcgctggccgtctgcgccggatactcgcgtgagggcctgccgctgtcggtgcagtttatcggccggccgttcgacgaggttgccgtcttgaggaccgggcacgcctgcgaaaaggcgaccgcctggcgcgatcgcaggccgtcattgtag

SEQ ID NO: 579 - DNA, 204 bp, BradyrhizobiumColbertium
atgaagccggagtcgaaacagccattctcgatcgaagcctggcgcctggcggcgctgcaatcgaacctccacctcaccggggcgcagcaagctgagctggcgaggggtcttgagctgcttcaggcaatgacggggcggctgcatggtcgcgactgccacagcctggagccgatcaacatctggcacggtgaggagcgaccgtga

SEQ ID NO: 580 - DNA, 1233 bp, BradyrhizobiumColbertium
gtgtcgtcaacgacgaaattcatggctcagcgtgccgcatcggccgccctgctgatttgcctgacggccaccttgccatattcggccgtcgcaaccgagttctcgaacgggaaggtgaagatcggcgttttgaatgatcaatcaggaccctattcggacttcggcggcaagggttcggtgctggcggcagagctcgccgtagaagacttcaatggcaaggtcgccggcataccagttgagctcatcgccgccgatcatcagaacaagccggacgtcgcaagcgcgatcgcgcgccgatggatcgacaccgaggcggttgacgtcattgccgacctccccgtctcgtcggtcgcgctggccgtgcaggaagtcgcccggcaaaagcgcgtcatcaccatgacccaggcgacgagctcggacctgtccgggaaggcttgcacgccgttcgcgtcgcaatgggctgacgacacctattcgctttcggttgcctccgtgagctccctcgttggcgagggaatcaagacctggttcttcatcaccgcagacttcgcgtttggtcacgccctgcaaagggacgcatccgccgccatcgtcaggaacggcgccaccgtcgtggggtccgtcaggcacccccttaacgccagcgatttctcctccgagatattgagggcacagcaaagcgggtcgcagatcgtcgtattcgcgaacggtggcagcgacctcgtgaatgcgctcaagcaaagcgctgacttcggcgtagcgcggtcggggcagaaggtcatgggattcctcatctacttgaccgacgtgcacagcctgggactggccgccgcgcaaaacctcctgatcagctccagcttctattgggaccgcgacgatgcctcgcgcgctttcgcgaaacgcttcatggcaaaacacggcaagatgccgacgcgggagcaggcggcagtgtacgcatcagtcgtccactatctccgggccattcaacaggcacggacggacgattccgaagcggtacgaaagacgatgggcgaacttcccgtcagctattttgggcgctcggcagagctcagggccgacggccgggtggtctacgggtcggcactttatcgcgtcaaatcgccggcggagagccgctacgcctgggactattacgacctcgtcaaggagatacccgccgagcaggtcttccggcccctgaacgacaatgactgcgcattggtggccaaatga

SEQ ID NO: 581 - DNA, 918 bp, BradyrhizobiumColbertium
atgcggtcgcttcttccatcgctttcggcaatcagagcttttgaaacggcctcgcgatacgagagtttttctcgcgccgccgaagagttgaatctgacgcagagcgcgatcagtcagcaaattcgtcagcttgaaggtttcctcggcgtgtcgctgttcgagagaacaggcaaacgcgtggtgctcacggaagccggcgcccaatatctcgccgaagtcctgcccgcgctcgatcgggtggaatcggcgacggcgcgcctgctgacgtcggggcaggtggacggcatcatcaacttcggagtcatgccgacgatcggagcgcgctggctgctgccgcgattgcccaagtttctggggcgacatccgggagtcgtcgtcaacttcaccagtcgcatctatccattcgatttcgaaacgacgaacctggatgccgccatgcattatggcgaaggcgtgtggcctggcgcgtatgccgagctcctgatgaatgaggatctggtggcagtctgcagcccgcagctgatcacaaagcctgcggcccggcccattgaacatctggagcgctgcacccttctgcagcacacgacgcggccgctgggttggcagcaatggctggagcaggcgggtttccatcacatcgacggccgccggggtccgaagctcgatcagttctcgatggccatcgaagccgccaaggccgggctcggagccaccattctcccccgcttcctgatcgaggacgagctggcaagcggcacgctggtcatgccggtcgacatcaccgtgcgaagcaagagcgcttattggctggtctatccggaatcgaaaagccaaagccccgcattgcgcgcctatcgggcgtggctgctcgcggaagccagacgcgtgcttcatgccggcgctgaagccgtgggttga

SEQ ID NO: 582 - DNA, 555 bp, BradyrhizobiumColbertium
atgccgttttgcggccgcgccgactggccaaaggacggcagcaagccgggttcggacctcgccatggtccagcgcggcgccttcgaccagcttggtgcctcgcacgcgatctgcaacgtgatttacggcgcgcaggccgtgttcgatccctatatggccacgggcttctgcaaggcgatcaacgactggatcgcggccgaatggcttgacaaggacaggcgtttgcgcgcctccatcgtcgtgccgatccaggcgccggatctggcgctggaggaaatcgagcgccgcgccgccgacaaccgcttcgtcttcatccttgtgctggcacagggcgagaccttgcttggccgccggcactactggctgatttatcagctcgccgaaaagtaccggctgccgatcgcgatccatgccggcagcgcatcgcacggcgccgagttcggccggctgggcgtcctaccgctacgaatactacatctcggaggggcaggcgtttcaggcgcaggttctgagcatgatctacgagggtgtattcggcaaattccccgcgcttaa

SEQ ID NO: 583 - DNA, 399 bp, BradyrhizobiumColbertium
atgatctacgagggtgtattcggcaaattccccgcgcttaaagtcgtgctgatggagtccggcgtgagctggctgccagccttcatgtggcgcgcctacaagacctggcgcggcgtgcgcgtcgaggtgccctgggtggagcgcgagccggcttccattatccgcgaaaatttccgggtcaccatgcagccgttcgatgcgccggctgatgccaccgcggtcgaggacatcctccatcagatcggctcggacaaaatgttcctgtttgcgtccgattatccccactggcagttcgaaggcgacgatccggtgccgccggccttgccgaagagtcttgtcgcgcccacgtgcgccgacaatccgctggaaacattttcgcggctgaaacttgatgcataa

SEQ ID NO: 584 - DNA, 138 bp, BradyrhizobiumColbertium
atggcggctcgattacgtccatgcgctgtaatctttcgagaggccctggagcacgacccgcgggtgttcttcgacggcctcgagcgcgccaaggatcgcacgcgccgtcgcgccaacatcgtcggaggggcgacgtga

SEQ ID NO: 585 - DNA, 174 bp, BradyrhizobiumColbertium
atggatgctgccgcattcgaacgggtcagaacgtccgtgaatcggctacgccagtccggctcggccgccgcaccgctgcctggccacgatcccttcgacttcgcaagcaacaactcatccggcggattgggaggcgtcgagccacacccgggtggagacccgttcgacttctaa

SEQ ID NO: 586 - DNA, 171 bp, BradyrhizobiumColbertium
ttgcgcgcacttgccgatgcgccgctggttcgtttgttcgccgccgatgttccgcgcttgcgaccgggcgacctcgtgcgcttcgcagccgcggcgtgtcgggatttctttgggcgcgattttctgggggacatcaggctctcctacgtcagggtgcgacctgcagcttga

SEQ ID NO: 587 - DNA, 978 bp, BradyrhizobiumColbertium
gtgcgacagatccgctgcgagacgcgcgatgccgtcaaggcgacattgctggatttcctgcggttcattgggagcggtctgttcgccggattacctgagggtgttcgggacccagtcgccgaccgtctggtagcgctctacgaggaaaagcccgaattgatggacaagttcaattcaagctacttccctgggccgcgatatgtgagggagcgcgcggccatcgacttgctcatgaaggcgggcgttgcctacacgttcgacttcgatatcttcgaggataatgacatcggcgccacggtcaatctgctgcgcgacatcaatccgagcttcacggccggcatcgaaggccatgcaaaacgccggcgacagaacgagcgcaaattcaccgtgaccgacaccttcggcttcctgctcgccaatttgaacgcggcggaggtccgtggcatccgctattgttcagggcagatagtgggaccgaactacgtctatcctatcgcgggccgtgtcggcgtcgaccgctccgtcaaggatttcgccaggatgctgctgttcgaaaacctcggcggcaaggatggcgcggcaggcgccgcgccgacgatgaccgatgacctgatcttcaccacaacgctcaccctggaaggcacaccgaagctcgtcttcgctccggtcggaaccctgttgcgcgtggctaatgcgtcgctggatctcaacgtggggcgcagcgacaagcatcaggttacgataggccttgccgtcgacataggcggcgtggactcggtgcggggcttcctgttctcggcaggccgtggaagcagcactgccctgatcgcgggcgcgcgcgtctcgccgcgaaggccggcatcggtagtctatgccgggcagcgcgtgaccggtggcggcaccccgtctgaggttctcgccgtcatcgcgattgatcaacagaagagcaaggaattcaagctgcaggtcgcaccctga

SEQ ID NO: 588 - DNA, 402 bp, BradyrhizobiumColbertium
atgatgtggctgagcgaggcggccgtgcgggatctgggagccgacatgacggcgcggtttccggcgcgtcaccgcaaatggggcaaggccctacgtccggcgccctggtccaacggccggttcgtgccatcggaatttgtcgcctgcgtcgcggtcggtcccgctccgaagtcgcaggatccgaacatcgtcgatccgatgttcaaaatccagaccggccctccggagcacgccgcggcaatcgcggaggctgtaagcgggggcacgcgcgctccgcagaaagccgcggagaaacgcgtcgtagacccgaggcaatggcacgatgatgtggatcggggcgatcggatagcgctcgtctgggaaatctacggatgtcttctgaaaccgcacccagctggatga

SEQ ID NO: 589 - DNA, 426 bp, BradyrhizobiumColbertium
gtggcatcgggaccgaacgagcggctcgaaggagagaaaatggcgcgttcgcaccggatattcatcagcttcgccatagaggacgaatgggcccgaatcaggctgggtgggcaggccaaaaacgagaggacgccattcgatttcgtcgacatgtccgtcaagaagccatgggacgaggcgtggaagacccagtgccgttcacggatcaagggctgcgacggcctcatcgccctggtgagcagcaacacggcgagggcagccggtgaactttgggagatcaagacggccagggaagaaggggtgccggtcatgggcatgtacatcaccgaggacaatcggccgctttggctcccgcccgaactctcaggcgtcctcgtggtcgattggacgtgggacaacatcaagaactttctgaaccgcatctag

SEQ ID NO: 590 - DNA, 960 bp, BradyrhizobiumColbertium
atggcaaagcgcgcgctcatcgtcggcatcgacgactaccaaaacgtcacgccccttcatggttgcggcgccgatgccaaagccatggcggagatcctcaggaaaaacgacgacgagagccccaatttcgattgtcgcgttctcacgagttcggacagcgagcctatcacacgtcccgtcttgcgccgaagctggaccgagctgttccgggacttcgatggcgacgttctattctacttctcgggacatggctatccgacggagctgggcggatatctcgtcactctggagggcacgcccgacgatccgggccttgcgatgaacgatgtcgtgcaactcgccaacatctcgaaggcgcggagcgtgttgatcgtgctggactgctgccacagcggcgcggtcggaaactacgggaatctgcaatccggcaatcaggcccaactgcgcgaaggcgtcacgatcctcgccgcgtcgcgcccaagccaggtcgcgttcgaactggaaggccacggcgtcttcaccaacctgttgctcggggccttgcgcgggggagcggccgacgtgcggggccgggtttcggcagcttcgatctatgcctacgtcgaggccgcactcggcggtctggatcaacggccgatgtacaaatcgcatgcggcgcggttggagccggtccggatctgcgacgcgaaggtcgaggacgcgttgctgcgccaactccttgtgttctttcccgagcccgaattcgaataccgcctcgatatgacgtacgaagagacgaacggcgcagcgaagccggagcatgtcgccatcttcaagaaattcaaactgctgcagatcgccggtctgttgaaaccgaaggtgggtttcgacctgtattggaccgccgagcggtcgggctacgttcagctgacgacgctgggcgccttctaccgccatttggcgtcggcgggccggatctga

SEQ ID NO: 591 - DNA, 477 bp, BradyrhizobiumColbertium
atgaaggtcttcatttcgcaccaaagagccgattcgacgctcgccggcaacatcgctcaccggctcaggatctatcatcagatcgattcctatctcgacctgatcgatccggaagcctcgacggtgggagacaaactaggcgaacacctgagagagcaactgggactctgcacccaactgctcgccgtcgtgtcgcaaaacacgaagagctcatggtgggttccgtgggagatcggcatatccaccgagaaggaccagccgatcgccacctacgccggcgacaataccgtgttgccggaatatctgaggaagtggccttacctgcgatccaacgccgaactggatgaatacgcgcaggcgtcgaaggccgctgaacggacgttcacccgcgagagaccgttcaaggtcgaagccggcgcccgtcggaccgccacccagcagttctaccgcgaccttagggcccgcctgggccaataa

SEQ ID NO: 592 - DNA, 768 bp, BradyrhizobiumColbertium
gtgctggacgtcgaaaccacggggcttgatccgtcgaccgacgagattctggaactggccatgcttgccttcgactattcgaccgacggcgatttcatcgcgagcgttgcgaggttcgaccgcctgcgcgatccgcaccggccgatcccgccgacggtaaccgcattgaccgggattaccgatgacatggtctccggacgcagtatcgaagaggcggacgtggaggcgttcgtggcgccggcttcgttggtggtcgcgcacaacgcctcgttcgacaggcccttctgcgagcgccttttcccccgttttgccgaaatggcttgggcgtgttcgctgaaagaggtggactgggcaggcgaaggattcgatagcgcccgtctgtcgcatctcgcgtatggctacgggctcttcttcgacggacacagggcgctgaacgattgcgaagcggctctggaattgctttcgcgtccgttaccacgcagcggcatttcggggctgtcggcgctcttgcgttccgcccggcagccacgctggcggctacgtgcggtcgctgcccccttcgcatgccgggaaacgctgaagcagcggggatacaggtgggacccgggcgacggggggcggcggggggcatggtgcaccgaagtgtcggaagacatgatccagagcgaacgcgattttctgtgcagtgatatctatcgccgggatgcggtgatcgatgcgaaacggcttaccgccttcgagcggtactccgagcgatctcacgaatag

SEQ ID NO: 593 - DNA, 2181 bp, BradyrhizobiumColbertium
atgcgcgaggtggaggctgttccgaagtcgaccgagagcacgcccgcggcttcgcccccggccaaatccgagcgtccgaacggcgtcatcccgctcgagatcgccgcaagtacggggtcgtcccgagacgaagcgaatgcaccgccgaaaaagaccgggggcggcggcttcgccggcttggcggtctcgccgaagtcgcgttcctccggagaagacgacgccggaccggaattcgacctcccgatcgacgatgcggaccgcgatccgggccaggccgagctcgtgagctcatcgcatggagacccgcgcaaggccatggtcgccgcggtaatgggagccagcgtctccgcacagatgctcgaagcgctgcagagttcctcgcccctggccgtggtggtggccgtcccgtcggcggactggattgccgccgtgaaccgcttcttcgaagacgcaccgcacggtaggcgatggacttgcttcgcccgcgacgggtccgagcgcacccgtcacaagactacggtcggcaacgccgaagtagcctcggctctcgccaagggtcggtccgtcgtcggcatcgccgtatctcccgatcaggtgctcccgtctacgctgctcgccgcagccgacttccgcctcacggcgacgctcggccgacacgtactcgagcggatcatccgcgatatgttcggcgaagctcctctcgatgtggatgacgccgagctggcgcggctcgggctcgacgacctggttgccgccatgcgcccatccagcgacgctgaaacggtcgcttcccggatcgctgccgcggccgaggtacgggccggacgccgtggtcccgaggaggtgccggagctcgccacggcggtcgaatatggcgctgcgcgggaatggggattggctctggctcgcgacatgagcgactaccgcagcggcgttcttccgtggagcgcggtcgaccgcggggcgatcttcttttcgggccccggaatgggcaagagcgttctcgcaaggagcttggcgcgggcatgcaaggcgagtctcgtgatcggcagcatcggcgaaatcttcgcgaccagttcgggaaacctagacggggtcatcaagagcatgcgcgaactgttcacgcgcgccgtggcggccgctccttcgatcctgttcctggacgagatcgatggcctgccatcgcgcgaatccttggattcccgcaaccgggactggtggatgccggtgatcgaggatttcatgctgcttctggacgacgcgaccagcgggcggcgcgagggggtcgtggtgatcggcgccaccaaccgcatcggcgccgtggacgccgccattctgcggccagggcgcctcgagcgtgccatcgaaatcaagccgccgaacgccgacggaatcctgaacatcctgcgcttccatgcgcgcggagctctgcccgaggaggatctgatggccgcgatcggcgtcatggaaggattcacgccggccgagatcatggaaaccgtgcggagcgcgcgcaggaaggcgcgccatgcaggtcgcgacctgtccatcgacgatctgaccgccgccgcgctgccggagctcgaggtcggccccgatgcccttcgtcgcatcgcggttcacgaagccggacacgtggtcgtcgcggaggccagctgcccgggacaggtgatgtcggtacggatcgggggtcgtggcggcattgccggccttacgcggctcgatccgttatccgacgatctggcgactcgcgaggcgatcgaacgggcggtcgtaggagtgctcggcggccgcgctgccgagcttgtcgtcctcggcgccgcctccatcggcgcgggaggaagcgagaactccgatctggcgattgcgacgcggatgctggcggcgatgatcttttcgttcggattgagcgatgaggagctgatctatctcggcgacgccgaggacgccggccgcgatatccggcgcgaccccgcggcacgtcggcgggtggacgaaatgctgaaacgcctgcagatgcgcgcgctggaaatcgtcgatcgtcaccgcgcggaggtcgtccggcttgcggaggtgctttcccgccgccgattcctctccggtaccgagatccgctccattctgtccggagggcagccggcggccgagcatgctccgaccgacggcattcgggtgggctga

SEQ ID NO: 594 - DNA, 783 bp, BradyrhizobiumColbertium
gtgaacttccagatcatgagcgatctgcacctcgacgtccagggtagcgcgggcgcaccgcctctggcggctggggtcgacgcggtgatcgtagccggcgacacctgcgagggcctcgtgcaggcggtcgagaggcttcgccacgcctatcccccgccggcggcgatcgtgatggtggccggcaatcacgaactctggtcgaagcggttgtccttcgaggagcatttcgaggaaggcttggcggcggccgatgcctgcggcgttctgctgttggagaacggcgtcgaggtggttggcggcgtgcgcctgttggggtgcacgctttggaccgattacgagctttatggagcctcctcgcgccaggccgcaatgcgcagtgccgccgaccagatgctcgaccatcggcgcatcaagtggtcgcgcgacccttgggcgagattccgcccggccgaggcgcgcatgctgcaccagcgttcgcggtccttcctcgagcgtgagctcgcgagggctcacgacggcccgacggtttgcgtctgtcatcacgcgatgacgctcgacgcggtggcgccgtccgctcagcgcaacgttctgagcgccgcgtacgcttcggagatgttgccgatgatcgatcgcttccagcccgacctgatcgtcaccggacacacgcaccacgccatcgacgtgcgacgcggcaaagcccgcatggtgagcaatccagtcggctaccccggcgaggcaaccggcttcagaccttcgtttgtcgtgcgccttcccgccacgtga

SEQ ID NO: 595 - DNA, 444 bp, BradyrhizobiumColbertium
gtgaggaccaagaccaggagccgatggagggcggcaagcccctccctgatcgggacgcgctcgtcgccgcttcggtggtggcggaccgtcgccgcgcagaacttccatccgccggcgctgggcgtgatgaaggcggcggccgcgaagatggagatcttcggcgaagcgcgttggcgtaccgccatcgacggcgacgcgaattgcgccatcgcgatcgttctgtcgatgggtccggcggaatcttcgcttcacaggttcgatctggcgatgaccgccctcgtcatttgcgcctgcggcgggaacgccgccgcctgccttgtcctctctcacgtcatccggcgcctgcccggtgcccgcaggcgagaggcgcgccttgcgacgtcctggttggtgcgcgcctcccggccgctcctggatcgtgccgtttccggagcggcgccgtga

SEQ ID NO: 596 - DNA, 573 bp, BradyrhizobiumColbertium
atgcacgccgaaaccgttcgcttccgcatcgtcggcaccaagcgcctcctcatgagttcgagcaggcttgccgatccgctcgatcccatcgccaaggacctggcgcggctcacttccaaacggcgcaagaccgagtcggaccacaaggagatcagccgggtggaatggaacggttgtctctggttgcacgccggcaagccctgcattcccgcggaggcgttgtcggcgaccttcgtcgccgcggcgaagtcgcgccgtcgcggcaaggaagctgccgccgggctggtcgtcgatgagaacgcgctgctccgctacgacggccccgaagatctcgacgaactctgggaggatgctcgcttcaggttgcgtgtgggcgtgaaggtgaagaccgcgcgcacgatgcgtacgcggccgtgctttccggattggcgcgccgagttcgaagccaagtttcttcccactctgctcaatcgcgacgaggtgatcgagaccttcacgctggcgggtttcacccggggtctgggcgattggcgtcctcagaacggaacgtttgcagtcgaggtgctcgactag

SEQ ID NO: 597 - DNA, 318 bp, BradyrhizobiumColbertium
atgaactaccggacctacatcgcgagcacgcggtggcggaccaaccccgcaaggctggcggagcttgccggcgccggcggccgctgccgcatttgcttcgccggtacggccgacggggctcggatggaggtgcaccacgcgacgtacgaacgttgcggccgcgaagtcgacggcgacctgctgaccctctgcagcgattgccatctcgaggtcacctcgtttctggcgcgccggcgctacgaaaaccgcacgccgcggcgtgcggatgtcgtcgccgtccacgatctgcgccgcccccttttcgatcccacccgctaa

SEQ ID NO: 598 - DNA, 495 bp, BradyrhizobiumColbertium
atgaaagtgggaatcacgggtcatcagaaaaggaagggcgtcgattgggactgggtcggcgaaactctaaagctcgaacttgcccgcctgaccggcgtcacccgcgcattctcctcgcttgccgtcggaagcgaccaggtcttcgcccgtgcggccctgtccgtcggaatacccgtcatggccgtcattcccatggacggatacgaaagatttttcgctccccacgcgcgggccgactatcgctcgctccttgcgctgtgcgacgtcacgaacttgaggtggacgggcgacgagcaggaaggcttcttcgcggcagggaaattcatcgtggaaaaaagcgatctgctgttcgccgtctgggacggcgagaattcgaagggcgtcggcggtacggccgacgtggtcgcgttcgcgctcgccaaattcagaagggtgatccacctcgatccgatctcgcagcgcgtcaccaacatcggggtaggccgtcatggctag

SEQ ID NO: 599 - DNA, 321 bp, BradyrhizobiumColbertium
gtggagaatgatgccgcctgcctcgaacagggcgatatcgccttcctcgtaggtcgggattttgccgaacggatggcgcgtccggtgcggcggctgcttcaactcatcgaacgagaggaggcgaacgtcgtagggctctccgacttcctcgagcgcccaacggacacgcatgtcgcgcgcatgtccatggccctcgtccggagaccgttcgaatgcggtaatggtcgcgaccattgtcgtgctccgagtgagagcgaagaactgcattcatgtaagctggacgtcgtctcgctcgcgagtctacgccaaggtgaagaataa

SEQ ID NO: 600 - DNA, 606 bp, BradyrhizobiumColbertium
gtggattaccaggacaaggaagccctatggaaaattatggcctctcaccccgatctcaaggatagcgtcggcgagcagaagtgtctcggcaccgaaccgccgaaggacgcgcctcaattgaaggggcaacggggcgtcaacatcgaaggactggcggcgcgcaagggatccctgtatttcggctttagaggaccagcgctggggagcacggcaccgattctctcggtggacgcgaaggccttattcgatagctccgatcccaaggcagacgtgacgttcttgaaggtggggaccggacgcggggtgcgggatctagtaccgatcaaggatgggattctggttctagccgggcctgacgacgacaaggcgaacgagaacgttcgctggaggttgggagtttgggacggcgtgccgggcgacaaccccgattacaaggagctcgcggagctggtcctggacggggtcgagctccgcaagtgcgacgacgagctaaagccggaggcaatggccgtgctcgaggattcgaaggacgtcctagacctggtgatcatgtcggacggcatgtgcgatggaggcccccttcgctttaagatcccgcgccgctaa

SEQ ID NO: 601 - DNA, 213 bp, BradyrhizobiumColbertium
atgggcgccgtcagcgatctaagcaaggctcgcgacaccattcacaagaaatccgtaatcgccgcgccgagtccttggtcgaagaaaagcatcgacgcagacattgcgcttgcggtggcgctctcgtggcctgtcgtattcgcaaagcttaaggattcagctcttcgaagccggaagccgccttcgccctctaacgtcaaagttcgcttctga

SEQ ID NO: 602 - DNA, 615 bp, BradyrhizobiumColbertium
gtgctcgcgcgtgacgcccaccattccgatccctccgatggacttcaactcctcctggatggcacagagaagttcgggaaagatcttccgtctcacgctcggctcgaccgacttgtcgacgcacactcgggtgacctcgaagatcccggcggacgacgggagtcgaccgtccgcgacgaggtgtggccaataggtctgcagcatgtaaggacgaatcgtcgggagcagccgcgccagcccacggacgacccgtgcttcgtctctccacacgagatacttcgctgcaggcgtatcgaattcgtcgaactcgagcccgttgtagctcgaatgatccaggccccgccgcaccacgaacacatcatgtctcaatctcgcctgagaagcgaaggcatcgtggaacaaatgcgccgtagcgatggaaaaggattctatcatcttccgctccttcgttcgctccgatggttgaagcatcgcgcggagccaagcgctactcggggaaacccctgctttgcattacgccttcgtgaacgggagtccggcacaagatgttacggatatcgaaatgtgaacgtcgccattgtttcggcgaacgtgatcgtgtgttcgttcggctga

SEQ ID NO: 603 - DNA, 216 bp, BradyrhizobiumColbertium
gtgggcgtcacgcgcgagcacttgctgtcgcacttcattcgatacggcatcgactggctgggggctgccgatgaaatcgaaggcgaaatcgaacgcgcgttcttcgtgccgacggctttcatacggccggaacatcattgcttgaaatatggcataggacccaaggtcctgacgtcgccatcgcagatcgcggactacgtcacgagagcagcatga

SEQ ID NO: 604 - DNA, 1341 bp, BradyrhizobiumColbertium
atgcacattgacgttttcgagcagaatgaatctgcggtccgttactactgcagaaaacttccgaatctgttcgtttcggcaaagggcgcattgatgaaggattcggaaggagacgaattcatagatttcatgtcggcctgcggtacgctcaactacgggcacaaccatccgaggctcaagtccgcagcgctcgactacctttcgcaggacggcatgatcgccgggctcgattttcacaccgcggccaagctccgtttcgtggagaccttcaagagaacggtgctcgatccccgcagactcgactacaaattccagtttcccggtccaaccggggccaattgcgtcgaagccgcgctgaagcttgcaaggaaagttaccggccgatccacggtcgtcgcgttcaccaatgcctttcacggcatgtcggccggcgccctgtcggtgacgggctcatcgatcagtcgatcggggcagcccctctgtgccgttcaccggctgccgttcgagggctatcgaggagcaggtatcgaagatctggagcgtttcgagacgatggccgtcgacccctcgggaggcatcgatccgatcgccgccattatcgtcgaaaccgttcaaggagaagggggactcaacgtcgcctcgaaccgctggctgcgcgcactatcgactatcgcaaaacggttgggagcgcttctcatcgtcgacgacatccaggcaggttgcggccgaacggggaccttcttcagtttcgagcgcgcggagataaagccggacatcgtctgcctcgccaaatcgatcggcggaatagggcttccgatgtcgcttcttctcctgaacccggacaacgacgtctggcgacccggcgagcacaacgggacctttcgcggcaacgcgctcgccttcgctacggcggccgaggcgctgctcctttgggaagacggatcgatggcggacgcctcgatgaacgcagaaatcctctcggaatggtgcgcctccatggccgaacgatcgaggggggcgatcaaggagaagggaatcggaatgatgaggggtctcgaattcgaggaaccatctatgtccgaagtctgcgcttcactcgcgcgcagacgccgcgtcctggtcgaatgttgtggtcctcgagacgaggtgctgaagatcatgccgccccttaacatagagccccatcttctccgccatggcctcgctcgcattgcggatgccgtctggagagcgctccatgcgccgaccgacgcctcaaagcggtatgagccctcgcttgatcccgattatgaccgcggtgatccgattgcccgcgccgagcttgcgcattccgttgcttag

SEQ ID NO: 605 - DNA, 249 bp, BradyrhizobiumColbertium
atggtcgccaacgcattggccgggcgcggcgtcgatcaagtcgaggcggtcgcgagcgtcccaaggcccattgccgtcgtgcaagggcgtaaggacccctttctgagattggattacttcgaacgaatcggcttcaggaatttgtggaagggacgacctcaatttattgaggcggggcatgctgcccattgggaggctgcgaaaccattcaatgcagcgatgatggaatttctgatgcaatcgggttga

SEQ ID NO: 606 - DNA, 183 bp, BradyrhizobiumColbertium
gtgccctggcagatccggcacaacgatgccgaattccgtcttctcaagatctccaaattggcggacgaatacttccttgcacgacgaattgccgtggatgagaaggaccccggtgcgtcccgcgcgtcgatgccagaaacacagctgttcgccgcctataatgcaggtacgcgaaaacattga

SEQ ID NO: 607 - DNA, 906 bp, BradyrhizobiumColbertium
gtggctttgcgcgatcggccggaggtgcgcggccttgcgctcggcttgctcgccgcgagcatctggggctcctatctggctatggcgcgcgccggcgtatcggcgggtctccacgccaccgacatcgccgcgatccggtacggtgtcgcgggattgataatgctgccgtggttgttgaggcgcggggtcatggacatggccggcatgggcatgatgaagggcgccaccttgacactgctggtcgggccgctcttcgttataaccggtgtgtcaggctattcattcgcgccgctggcccatggtgccgtcattcagccggcagcgctgacgctcgggtcgatcggactagcatttctggtcctgggtgataggccgacgattgcgcgcgttgtaggtgtcgccataatcctcgccgggctcgctgtgattgccgggcctggcttgatgaccgggacggcattgacgccgatcggcgacctgctatttgcggctgccggcctgatgtgggcagtgtttacggtcctcagccgccgctggggggtgtcgccggtcgcaggaaccgccgtggtctccgtgctttcagcagttgtctacattcccggctacgtcctggtgatcggagcagatcgtctgttggcggctccgttgccgatggtcgcagcgcaaatcctggtgcaaggcgttctctcaggcgtcgttgctgtcatcgctttctcgaaggctgttcaaattcttggtgccgggcgggccgcagtctttccggccctcgtcccagccatcgccatcctgatgggcgcgcctatcacaggcgagattccgaacagtctccagctcgcaggcttggccctggtcagcaccggcctgctggtggcgatcggcgtgctgcgcaagccacggagtcactga

SEQ ID NO: 608 - DNA, 651 bp, BradyrhizobiumColbertium
atgtccctgcagaccgaactcgacaccttcaagacatcctggcgcgagcgcgtcggcgctgagaccgcgaagctcgtcgatgacgacaatgcagcgctgcagtccctggctgatcgcgcgctcaagaccggtgcacagtttccgaaaaggcaactgccgaatcaaatcggtggcacgaccgacctcggcgctctgatcgcgagcggcccactcgttgtgacctactatcgcggcggctggtgcccctactgtaatctcgaactgcgcgcctaccagaaggcgctgcccgagatcacggcgcttagcgcccgccttgtcgccatctcgccggagacgcccgacaacacgttgacgaccgcggagaagaacgcgctgagcttcgacgtgttgagtgatacagacggtgcgctggcggatgcactcggcatccgcttccaactctcgccagccatcaaggcgctttaccggaaattcggtcacgacctgccgacccgcaacggggacggacagtggtcgctgccaataccggcaagctacgtcatcgagaggggcggccgtatcgcactcgcgagcgtcgatcccgactaccgcaaccggatggatccggccgtagcgctctcggcgctgcgcaagatcgccatcttggcctga

SEQ ID NO: 609 - DNA, 789 bp, BradyrhizobiumColbertium
atgagcgccgaaaacaactcagtgccggcctattttagccgctacgcccacctccgcatgagccgggacgcagacggcatcttgctggtcgagatgcacacgagcggcggccccatcaaattcgatgcgcgcgaccatgaggggttcacggacgccttttacgagatcagccgcgaccgtggaaacaaggttgttatcctgaccggcgtcggcgactacatggccgaaatcgacttcggcagcttcggcaatgtcggcgacgccaatgtatggtcgaaagtgcatgacgaaggcacccagatcctggagaacatcgccaacattcgcgtgccgatgattgccgccatcgagggcaaggcgcacatccacaccgagtatgcgctgctcgccaacgtaatcgttgctgccaagacggcgactttccacgatctgccgcacttcgccggcgggatcgttccaggagacggcgtttacacgacgtgggcatatcgcgctggagcgggccggaccgaggcattcctccttagcccgcgtccggtcacggctgaggaagcagcagcatggggcgtcgtgaattatctgacggacgccggcagtgccgtcgcggtcgcccgtgatctggcgcagcaatacctcaagcaacccgaggtgacgcgccgcaatacgcgcatccacttcatccaaccgctgaaagagcggatcgtccgcgaagtcgggtacggactcgcgctcgaaggggccagcgccagcgcgctcgtccaacagatgatggccgcatccaagacctga

SEQ ID NO: 610 - DNA, 930 bp, BradyrhizobiumColbertium
atgaatgatatggacctactcagcccgatgaggacgttcgtccgcgtggtcgaagccggcagcttcaccgcggtcgccatggaacagaactcgactcaaccgacgatcagccggcagatcgcagcgcttgaggagcatctcggttcgcgccttctcacccgcacgacgcgtgccctgacgctgactgacgacggccgcgcattctacgagcatgcgctacgcgctttggaggccgtcggcgaggccgaaaatgcggtcggccggcggcaagcgaagcccacggggacgctgcgtctcgccgtgccggtggtgctcggccgtcgacatatcgtgccacgcctcgccagcttcctctcgcgctattcagatctgtcgatcgacttgacgatgagcgatagcttcgtcgatctcgtcgagcagggcatcgacctggcgttacgcgttggcgagatcaccgaccagagcctggttgcgcgcaagatcggcatggtgcgccgggttacggtagcctcaccggcctatctcaaggcgcacggcataccacgtgcgcctgccgacctcgcacgccatcagtgcatcgtctacacgcgcctcgccaccggcaatcgatggcactttgagagcaaggatggtccgcagatggtgactgtctcgggccgctatcgcgtcgataactcggaagccgtgcgtgagggcgtgcttgccggcctcggcgtagccgtcattccggcattcgcgttctcgaatgaagtggcgcacaaacaggtgcaagttctgctcaggtcatacgagcccaagcctctgccgctcaatgccgtgtacccgtcacgccgcttcgtcccgcttaaggtgcgagcaatgatcgatttcctggccaacgaacttgagatcgatccggtgctcagtcgctacggcatatccgcagactga

SEQ ID NO: 611 - DNA, 159 bp, BradyrhizobiumColbertium
gtgcgagcgcgtaaatgtgttgcgctcggtcgagaaactcgaggttcaagtcgttcgcgcaccttgaagcgggcccaccccgctgatgatctcatatccgcgctggttgcgatcgaagccgagggcgaccggctcagtggcgaggagttcaagccataa

SEQ ID NO: 612 - DNA, 417 bp, BradyrhizobiumColbertium
ttgacgaaccaggacctcgcggtgcaggtcggtatgtcgacctcgccttgctggcggcgagtgcggcgtctcgaggacgccggcattatcaaggggtatcaagcgatcatcgaccgcaggaagctcggcctgggggtattggccttcatccgcgtgcaaatcgacagccattcggagactgaagcgcagcgtttcgaagaagacgtcctgaaactcgatgaagtagtggcctgctactcaatcgcagggaacgccgatttcctgctgcaagtcgttgcacgcgacctggatacgtttgccgatttcgcgatgaccgtggtgcgccggttgccgcgcatcaaggaaatgcagaccacgtttgtgctaaaggaaatcaaaccgttgcgaatgctcccagtctcacagctcggaacctaa

SEQ ID NO: 613 - DNA, 327 bp, BradyrhizobiumColbertium
gtgaaggaccatcgcctcgccgaggccgcggcgacactgacgggcgcggaggccgatccggtgggctttctggcgctgcccaccttcggcgcggtcggcgagccgacgctgatcggcaagccgagccccggccgttgcaccctggttcgggccgccgtcccctcgaaggtgtctggccccgtgcttggggcggaggccaccctgcgcctctttccgagcccccgcgacgagctcgacacgctcgcgcccgtcagggtatcgggggccacgttctcgaccttcggcctcaccgtcgtgggcgccgtgccggctggagccgcgccgtga

SEQ ID NO: 614 - DNA, 1101 bp, BradyrhizobiumColbertium
atggcgcttgctgatctcggcgatctgctcgggccggacgaacatgcctttgaccttggtggtctggtccgcgcggcccatccaacccttgatccgcatatttgtgcgcccgcatggactggtgccgggaagggccgcggtgaggtcgccgagcgcgagccggatccagggatggtgggggtcgagcgatgtcaccacgatctcgccgacatcgcccggcgccaccggatctccggtacctggcttgacgatctccaggatcaggtcctcgttcacgaccatgccctcgcgcgcctcggtttcgaaggcgatcaggccaagatcggcggtcccgaaggcctggtaggcgttgataccgcgcgccttgatctcggcctggagcgagggcgggaatgcggcgccggaaaccagcgcgcgcttgatcgaggagatgtcacggccggcacttgccgcggcatcgagcaggatcttcaggaaatccggcgtgccgctgtagcccacaggacgataggcttcgatcagctcgaattgctgctcggtgttgccggggcccgctgggatcacggcgcagccaagcgcgcgtgccgacgcatcgaagatgaatcctccgggggtgaggtggtaactgaaggtgttgaggacgatatcgtcggggcggaacccggccgcgaacagcgcccttgcgcctcgccagggatcggcctgccgcccttcgggctcgaagatcggaccgggggaggtgaagagacgtgcgaaagagccgggagggcacgccacgaagcctccgaagggcgcagaggccttgtgcagggcgggcagttccgacttgcgcaacaccggcaggcccgccagagccgctctggaggtcacggaggccggatccaaacccttgagccgctcggcataggccggggcggccatcgccgctcgcagcacctccggaaggcgggcgaacaggtcggcttcccgcgctgctggctcccgcgtctcgcgggcgtcgaaatgagcgatcatggctattgtttccgtgttggcatccgttgcgcgccgccaccggcatggctatcagaccgccatcggctaggtttgaagagggcctga

SEQ ID NO: 615 - DNA, 1155 bp, BradyrhizobiumColbertium
atggcggacgaaggactgactgcggcggacgaggcgacggacgtcgtggcgcgcctgaagcgccgcatgatcgacgaggctctgccgctttggtcgaccgtcggctgggaccacgccgccggcggcttcatcgaccggctgcaccgcgacggcacggcggacgcagcagcgccgcggcgcgtgttcgtgcaggcccggcagatctggtgctatgccaaagccgcacagatgggctggtaccccgaggggcgcgcgatcgcgctgaaggggctggcgcatctgctggccaaagcgaaatcgccagacggacggcccggctatgtgcaccggctgacacccgagggcgcggtgctggacgcccggcgcgatgcctatgatcacgctttcatcctgtttgcgctcgccagcgtctacgcgctcgaccaggatgcgcaggtccgcgccgagatcgaagcgctgctcgccttcctcgacggacacctgcgctcgccccatggtggcgttcacgagggccttccggtttcgctgccgcgccggcagaacccgcacatgcatctgttcgaggcgatgatcgcgtgcttcgaggcgactcacgatctgtcgttccagaaccgggccggagaattcttcgcgctgttcctggccaatctctacgacaagcagaagcgcatcctgacggaatatttcgaggaggactggtcgaagatcgagccggtcagcgtcgagccgggacatcaggcggaatgggtgtggctgttgaagggcttcgagcgcatcaccggctgcccgaccgggcagcggcgcgcggagctgctcgccaccgcgctgcgctatcgcgacgaggcgacagggtgcctgatcgatgaaggcgatgacgtcggcaacatccgccgcagcacgcgccggctgtggccgcagactgagatcgcaaaggcgtggatcgcgcaagccgagtccggcgaggcgggagcggcggatgaggcacgtcgggcgctggtgcggctcgaacggcattatctcagccatcccgtcaagggcggctggttcgaccagttcgatcgcgacggcaagtcgctgatcgacaccattcctgcgtcgtcgttctatcatgttctctgcgcggtcacggaggcggagcaggtgcttgaaaattga

SEQ ID NO: 616 - DNA, 840 bp, BradyrhizobiumColbertium
atgaccgaaatcacggaagcgacccgtccctccgccagcatcgtccctgcgccaccccttctcgccgtgcgcaacatcgaagtcgtctatgacgacgtcatcctggtgctgcgcggtctcagcctggacgtgccgaagggcgcgatcgtggcgctcttgggcgccaacggcgccggaaagtcgacgacgctgaaggcgatctccggattgctcaagaccgaagacggcgaagtcacgcgcggtgagatcctgttcgaaggcgaacggatcaacggcattgaccccgacaagatcgttcgccgcggcatcttccaggtgatggaggggcggcgcatcgtcgccgacatgacatcgctggagaacctcaagctcggcgccttcacccgcagggatcgcgaggtcgaagccgatctcgacatggtcttcaactatttccctcgcctgagggagcggaccggccttgccggctatctctcaggcggcgagcagcagatgctcgccatcggccgcgccctgatggcacgcccgaagatgatcctgatggacgagccttcgatgggcttatcgccgctgctggtgaaagaggtgttctcgatcattcagaagatcaaccgcgacctcggcgttaccatcctgctcgtcgagcagaatgcgcgcgcggcgctctcggtggcaagccacggctacatcatggaacagggaaaggtcgtgctcgacggcagcgcggacgaattgcgcgacaacgaggacgtcaaggaattttacctcggcggcgccggcgaccagcgcaagagcttcaagaacctcaagagcttcaagcggcgcaagcgctggctgtag

SEQ ID NO: 617 - DNA, 1284 bp, BradyrhizobiumColbertium
atgaagacaaagtcacttttgagcacagcatcgctcgctcttgcgatcgcggctttctcggccggcgcgcaggcacagatcgccatcgggcatcttgcggactattccggcggcacttccgacgtcggcacgccctatgggcaggccgtcgccgataccttcgcctgggtcaacaagaacggcggcgtcggaggcaagcagctcaacgtcgataccaacgactacggataccaggtgccgcgcgcgatcgcgctctataagaaatggtcggcgccggacaccaaggtcgccgcgatcatgggctggggcaccgccgacaccgaggcgctgaccggcttcctcgctcaggacaagatccccgacatgtccgggtcctatgccgccgccctcaccgatcccgaaggcatcagcggcaaggccaagcccgcgccctacaacttcttctacggcccgagctattccgacgcgctgcgtgcgatgctgatgtgggcggcggaggactggaaggccaagggcaagtccggcaagccgaaattcgtgcatatgggcgccaatcacccctatcctaacgcgccgaaggctgccggtgaagccatggcgcaggagctcggcttcgaggtgctgccgccgctggtgttcgctctcgcgccgggtgactacagcgcacaatgcctgagcctgaaatcctcgggcgccaactatgcctatctcggcaacaccgctgcatccaacatctcggtgatgaaggcctgcaagaccgccggcgtcgagatccagttcctcggcaacgtttggggcatggacgagaacgctgcgaagacggccggtgacgccgccaacggcgtgatcttcccgctgcggaccgcggtgagctggggcggcgatgcacccggcatgaagatggtgatggagatctccaagatgtccgacccgaccggcaaggtctatcgccccgtgcactacgtcgcggccgtctgctcgtcgctctacatgaaggaggccatcgagtgggccgccaagaacggtggcgcaaccggtgagaacgttgccaagggcttccaccagaagaaggattgggtgccggccggaatggaaggtgtctgcaatccctcgacctggacggagaaggaccatcgcggcacgctgaaggtcgatctctatcgcaccaaggtgtcgggtgcgaccgacggcgatctgaacgatctcatgaccaagggcacgatcaagctcgagaaggtcaagacagtcgagctgccgcgcaagccggaattgctgggctggtga

SEQ ID NO: 618 - DNA, 1074 bp, BradyrhizobiumColbertium
atggccggccctgccctcatccctgctggtgacttccgcacaacctacgcggcggacaccacgatctttccgaccaccaccagccgcaacttcgcgatcgctggcattgctctgctgtgcctcgcgccgcagttattcagcggctactggctcagcatcctgatccagatcggcatcttctcgatcgcggcgctgggcctcaacatcctggtcgggttcaccggccagatttcgatcggacacgccgccttcttcctgctcggtgccttcacctcggcctacatctccaacaacgcgccgatcccggtgttcttcgcgattccgctcgcaggcctcgtcaccgcgcttgtcggactgatcttcggcatcccggccgcgcggctgaaaggcctctacctcgtcatcgcgacgctcgcggcgcaatacatcctgctcgacttcttctctcgtgccgaatggttctccggtggctcggtgccggcgagcgccgagccgttctcgatcttcggctacacattgcgcggcgaccggcaatatttctacgtcgtgctggcctacgtgctggcgagctacgttctggtaaccaatctgatgcgcacgcgcgacggccgcgcgctggtagccatccgcgaccattatctctccgccgagatcatgggcatcaatctcaccaagtatcgtacgctctcgttcgggcttgccgccttcttcgccggcatcgctggtgcgctctacgcacactaccagctcgtggtctcccaggaaggcttcggcatcgagcgctcgatcctgttcctggccatgatcatcatcggcggcaccggatcgatcatgggtacgctgatgggcaccgccttcgtggtgctgctgcccgaggcgatggagttcgccagccactatctcaagggcggcgcgatcgacaaggcgctctcgctcaacaacaacatcacctttctgcgcgagatcgcgatcggggtgatcatcatcgcattcctgatgttcgagcctgacggccttgcgcatcgctggcggcagatcaaggcgtattggaaactctacccgttctcgcattga

SEQ ID NO: 619 - DNA, 894 bp, BradyrhizobiumColbertium
atgaacaccgcctttctcatccagctcctggtcaacggtctcgtggtcggaacgctctatggcgtggtcgcgatgtcgttcgtgctgatctacaaggcgacgcaggtcgtcaatttcgcgcaaggtgaattgctgctggtcggggcctgggtgtgctgggcgctgctggcgaaataccaagtgccgttctggatcggcatgccgatcacgctggtgttcatgtttatgttcggcatcgccgtccaggtcctgattctgcggccgatgataggcgagcccatcatctccgtgatcatggtgacgatcggcctgtccaccgtgctccaggcgacactaaaatggatgttcggcgtcaacccgcagccgtttccgcgcgtgttcgagagccagtccgtcagcctgttcggcctccagatccagaccgtctatgtcatgagcctcgtcgtgtcggtcgcgatgatgatcggcatggcctggttcttccgcgcttcgaagtacggcctcgccatgcgcgccaccgccttcaaccagcaggtcgcccaatcgctcggcatctccgtgaagagcgtattcgcgatggcctgggcgatctcggcaacagtctcggccgtcgccggcgtcgtcgttgcggtcgtgaacggcgtgtcgtcgggccttgccgcctacggcatcaaggtgttcccggcggcaatcctcggcgggctcgactccatcggcggcgccgtgctcggcggcatcatcatcgggctgctcgagaatgtcgcgcagtatgtcgacagcgaatacctgcactggggcaatctctacgagatcgcgccgttctacgtcctcatcattgtgctgatgatcaagccctatggcctgttcggcacccatgacatcgagcggatctga

SEQ ID NO: 620 - DNA, 126 bp, BradyrhizobiumColbertium
gtgacacaaggaatcgccaagcgccggcttgacccgcgcatccatccacttccgaacacgctttcttccgcgtcgatgggttgccgggccaagcccggcaatgacgaattgggtcaattggcatga

SEQ ID NO: 621 - DNA, 1932 bp, BradyrhizobiumColbertium
atgatggactacgcaagccgcgtcgcgcaggctgatacctatcccaagatgctccggctcaacgccagggagcacggcaacgagatcgccctgcgcgagaaggatcttgggctgtggcgcatcttcacgtggagcgactaccagacgcgggtgcgcgacttcgcgctcggtctcgtcgagctcggtctcggccgtggcgatgtcattgggatcatcggcgacaaccggccggactgggtcgccgcggaagtggcgacgcacgccatcgggggtctcagcctcgggctctatcgcgacgtgctggacgaggaagcatcctatctcctcaactatggcgaggcgcagctcgtcttcgccgaagacgaggagcaggtcgacaagctgctcaccctcgccgaccgtgcgccgaagctgaagcacatcatatattccgatccacgcggcatgcggaaatatgacgatcccaggctgatgtcggcggacaagtttgccgagctcggccgggcacgtgcagcgcgcgagccggagctttacgacaagctggtcgatgcgacgaaaggcgaggacgtcgcgatcctctgcacgacgtcaggcaccacctcgcatccgaaacttgcgatgctggcggcgggccgcgtgcttggccactgcgcgacctatctcgccttcgacccgaagggacccgacgacgaatacgtatcggtgctgccgctgccctggatcatggaacaggtgtacgtgctcggcaaaggcctcttgtgccggatgaagatcaacttcgtcgaagagcccgacacgatgatgaacgatctgcgcgagatcgcaccgaccttcgtgctgttcgcgccccgcgtctgggaatcgatcgccgccgacgtgcgcgccaaggtcatggacgccacgccgttcaagcagcgcctgttcgacatcggcatgaagtccggccttgccgcgctcgaacagggcaagcgatccggctttgccgatgcgatcctgttccgcgcgctgcgcgaccgcctcggcttcacccggctgcgctcggcggcaaccggcggcgccgcgctcggccccgaaaccttcaagttcttccaggccatgggcgtgccgctgcgcacgctgtacggccagaccgagttgcttggagcgtacacgctgcatcccgagggcaaggtcgaccccgatacgaccggcgtgccgatggccgatagtgtcgagatccgcatcgataatgccgacgttcacggcgtcggcgagatcgtggtacgccatcccaacatgttcctcggctactacaagaatcccgaggccagcgtcgccgacctcaaggacggctggctgtgctccggtgatgccggctatttcaacgacaaggggcaattggtcgtcatcgaccgcatcaaggatctcgccgaaacctcgcgcggcgaacgcttctcgccgcaattcatcgagaacaagctgaagttctcgccctatatcgccgaagccgtggtgcttggcgccggccgcgacgcgctcgcggcgatgatctgcatccgctattccatcatctcgaaatgggcggagaagaaccgactgtcgtttacgacctacagcgacctcgcctcacggcccgaggtctacgcgctgctccggaaggaagtcgagaccgtcaacgccacgctgccgccggcccagcgcatctcgcgcttcctgctgctgtacaaggagctcgatgccgacgatggcgagctcacccgcacgcgaaaggtccgccgcagcgtcatcaacgagaaatacgagggcatcatcgacgccatctaccgcggcgtctccgacatccccgtcgacaccgcaatccgcttccaggacggcaccacgcagcgggtgcgcaccacgctccgtgtggtggatctcggcgggcatgggcacatggcggaggcagcggagtga

SEQ ID NO: 622 - DNA, 822 bp, BradyrhizobiumColbertium
gtggctaccagtcttgaagtgcgcggcgtgtccttgcgattcggcggcgtccgtgcgctgaccgacgtcagcttcgccatcggggaaggcgagctgttctcgatcatcggccccaacggcgccggcaagacctcgatcgtgaactgtatttccggtcgctacaagccgaccgaaggccagctcttctaccaggaccgcgacatcacgggcttgacgccaaacgcccgagcttcgctcggcatcggccgcaccttccagaacctggcgctgttccaccacatgagcgtgctcgacaacatcatggtcggccgccatcacctgctgaagaacaatttcctcacgggctcgctgtactggctcaccggtgcgcgcaaggaagagctcgagcaccgccgcaaggtcgaggagatcatcgacttcctcgacctccagtcggtgcgaaaagctaccgccggcaccctctcctatggcctgcggaagcgcgtggagcttgcccgcgcaatggcgttggaaccgcgcctcatcctcctcgacgagccgatggccggcatgaatttcgaggaaaaggaagatatggcccgctacatcgtcgatctcaacgaggagttcgggatgacggtggtgatgatcgagcacgacatgggcgtggtgatggacatctcccaccgcgtcatggtgctcgatttcggcaagaagatcgccgagggcgatcccgcggccgtgctcgccgatcctcacgtcaagcgcgcttatctcggcgaggaggacgaggtgctggtcgatccggacgatgcccggccggcgcaggagagcgcggcatga

SEQ ID NO: 623 - DNA, 675 bp, BradyrhizobiumColbertium
atgatttcagaagatcacctgaagcgcgttgccgcctggtcgcgcgagcttgcgccagcggaaatcgaggtcgcgcgtgccggaatcacggagcggtcctacggcaccggcgaaaccgtgttcatgcgcggtgacatctttggctattgggccggcatggtgagcggccttgcccgcatgggcggggtctcgcgcgacggcaaggagaccagccttgccgggctgacggcgggggcctggttcggcgagggcagtgtgctcaagaacgagccgcgccgttacgacgtggtcgcactgcgcgacagccgcgtcgcactgatggaacgcagtgccttcatgtggctgttcgagaacagcgtcggcttcaaccgcttcctggttcgccagcttaatgagcggcttggtcagtttatcggtatgctcgaggtcaaccgcaccctggatgccaccgcgcgcctcgcccgcagcattgcttcgctgttcaacccgatcctctatccggaatcgaccgcgcatctggagatcacccaggaggagatcggggcgctgtccggcatgtcccgccagaacgccaatcgcgcgctcaaccggctggagaaagaggggctgctgcggctggaatatggtggcgtcaccatcctcgacatcgagcgactgcgcgggtacggggactag

SEQ ID NO: 624 - DNA, 1260 bp, BradyrhizobiumColbertium
ttgagcacagcacgaagttctgcgctcgcgccattccgcatccgcaactatcgcttccagtggccctccgacctgctcacctcgtgggcgttcgagatcgagacgttggtgctcggctggtatatcctggttgaaaccggatcggtgctcctgctcaccgtacttgcttcgctccagttcgtcggaacactggttgcgcccgtattcggcatgatcggcgaccgcatcggtcatcgcgatctcctcgtcgcgatgcgtcttgcgtacacggcgctgtcgtcgaccatcatggtcctggccctgaccggtcatttgtcgccgctgagcgtcatgatcattgtcgcgatcatgggcgtgatccgcccgtcggatctcggcgtccggggcgcactgcttgccgagatcatgccggcggagcagctggtcgccgccatcagcgttgggcgcacgacccaggacagcgcgcggatcgccggtgcgttgacgggcgccggcctgtttgccgtcctcggaatcggtctcgtgtatgtggtgatcgcctgcctctacctcgcagccgcacttctcatgctctgcctgacccggccgaaaaggaccctcaccacgaccgatcttccggcaaacagccatttcgtttcccgtttattcggcgacctcaaggaagggatcgtctacgcctggaatgggccgggaatgcgcgcagcgctgtgcgtcgccttccttgccaatctcaccgcatttccctttaccggcggattgttgccctacatcgcgcgggacatctttcataccgaccaggccggcctcggctacctctcggcaagcttcgccatcggatctctgatcggctcgatcacgctcagcctggtcagcggcgtacgcattgcccggcttttgatcggcgcaacgctggcctggtacgccatgctgctggtgttcgtcgaggccgggaccttgccggtagccatggcctgcctcgttcttgccggcattgcccagagcatgtcgatgatttcggccgccgtgatcctgatgcgggcagcgagcgcgcatctgcgcggccgcgtcatgggcgtgcgcatgatggtgatctacggcctgcccatcggactgctcgcggccggcagcctgatcgacatcatcggctattccgcgacgggtgcgctctataccgtcgcagggttcgtcgcgatgttggcgatcgccgtgcgctggcgcgccgacctctggccggtgcacgcccccgccaatgcacgctag

SEQ ID NO: 625 - DNA, 840 bp, BradyrhizobiumColbertium
atggccgaccgcttgaacggttaccgtatcctaatcctggaaacgcgggaggaggcgcagttctcgaagctcctggtcgagcaaggcgccgaggtcgtgcagtgcccgatgttcaccattcacgatgcagcggaccccgccccggtcgaagcctggatccaccgtgcgatcgaccagccatttgacgatctcgtgctgatgacgggcgaaggtctgcgtcggatcatgaagctcgcccgcacccgcgggctcgactccgccctcgtctcggcgcttgccaagacccgcaaattcacccgcggcccgaagccgggcaaggcgctgcgcgagatcggtctcgaggcgcagcagaccaccgagaaaccgaccaccgaaggcgtgatcgacatgcttgccaagctcgacctgaacggacggcgcgtcggccttcagctctatccggacaaggaccacagcgcgctgaccggcgcattggccgcgcaaggggccgaggtcgacaccgtgctgccctatgtctacgattccaaggcggcggatgcaaacatcgtcgccgcgatcgacgacatggccgcaggccggatcgattccattgccctgaccaatctcggccaggttcgccgcctgatcgaggcagcgaaggcgcatggcatcgaggcgcgtcttcgggccgggctcgagcgcacgctgatcgcctcggtcggcccggccgtctccggtgagctcgctgcgcatgctctgcgcactgacatctcgccaccagaggacgcctatttcatgcgtccattgatctcggcaatggccacaacgctggccgagcggaagccggcgaccgacagatag

SEQ ID NO: 626 - DNA, 864 bp, BradyrhizobiumColbertium
atgcccgaccatcaatatgtcctgaccctgtcctgtccggatcgtcccggcatcgtctcggcggtttcgacgttcctcgcccacaatggacagaacatcctcgacgcccagcagttcgacgacgtcgagaccaggaagttcttcatgcgggtggtgttcacagcggccgacctcgccgtggaattgtcggcgctccagaccggctttgccgcgatcgccgagcgcttcggcatggagtggcagatgcgcgaccgcgctacgcatcgcaaggtgatgctgctcgtgtcgaaatccgaccactgcctggtcgacatcctctaccgctggcgcactggcgaattgccgatgattccgaccgcgatcgtgtccaaccatccgcgcgaggtctatgccggactcgatttcggcggcattccgtttcaccacctgcctgtcaccaaggagaccaagcgcgagcaggaggggcagatcatggatctcgtcggcaagacgaagaccgatctcgtcgtgctcgcccgctacatgcagatcctctcggacgatctctcgggaaagctgtcggggcgttgcatcaacatccaccactcgttcctgccgggcttcaagggcgcaaagccctaccaccaggcgcatgagcgcggcgtcaagctgatcggcgcgaccgcacattacgtgacgcgcgacctcgacgaggggccgatcatcgaccaggacgtcgagcgcatcagccatcgcgacacgccggaagatctggttcgcaagggccgtgacatcgagcgccgcgtgctggcacgggccatccgctaccatctcgacgatcgtgtcatccttaacggccgcaagacggtggtgttcgtggattag

SEQ ID NO: 627 - DNA, 192 bp, BradyrhizobiumColbertium
atgggcgactacgtcccgcaatgggccgggggcctgccggccgatgctccgccgcgtccgggcacaccgcagtacgacgcctacatgagggaacgcgaacgcaagcggctgctgccggcggcggagcgcgaaaaggaggagcagtcgcagaagggtgcgacgggcaccacttcgggcaacgagatgcgttga

SEQ ID NO: 628 - DNA, 114 bp, BradyrhizobiumColbertium
atgagacaattgtttgcgttcgaacatcagatgtccctccccttcattcctgactcttgtgcctggaccgagtgcccggtcctttgcctcaaccgttggctctgcgcggagtga

SEQ ID NO: 629 - DNA, 1203 bp, BradyrhizobiumColbertium
atgttcgaacgcaaacaattgtctcatagggcgattggtaaggcgacttgggctgctgccgttacggccattgcaggccttgccggtctcgcgccagtcaaggccgcggacagcgtcaagatcggtctgatcctgccgatgaccggcggccaagcctcgaccggcaagcagatcgagaacgcgatcaagctctacatgcagcagaagggcgacaccgtcgccggcaagaagatcgagatcattgtcaaggacgacgccgcgatcccggacaagaccaagaccgccgcgcaggaattgatcgtcaacgacaaggtcagtttcatcgccgggttcggcgtgacgccggccgcgcttgccgccgcaccgctggccacgcaggccaagattccggaaatcgtgatggcagccggcacctccatcatcaccgagcgttcgccttacatcgttcgcaccagcttcacgctggcgcagtcctcgaccatcatcggtgattgggccgccaagaacggcatcaagaaggtcgcaaccctgacttccgactacgcaccgggcaacgacgcgctgaatttcttcaagcagcacttcacggccggcggaggcgaggtggtcgaagaggtcaaggttcccctgcaaaaccctgacttcgcgccgtttctccagcgcatgaaggacgccaagcccgacgcgatcttcgtcttcgtgccggcgggccagggcggcaacttcatgaaacagtatgccgagcgcgggctcgacaaggccggcatcaaggtgatcgggcccggcgacgtcacggacgacgacctgctcaacaacatgggggatgccgtgctcggcaccgtcacggcgcatctctattccgcggcgcatccctcgcagatgaacaaggatttcgtcgcagcctacaagaaggctttcggcaaccgtccgggcttcatggctgtgggtggctatgacggcatccatctgatctacgaggcattgaagaagacgggcggcgacaccaacggcgacaagctgatcgaagccatgaagggccagaagtgggagagcccgcgcggcccgatctcgatcgatcccgagacccgcgacatcgtgcagaacatctacatccgcaaggtcgagaaggtcgacggcgaactctacaacgtcgaatttgcgacgttcgaagccgtcaaggatctcggcaagaccaagaagtga

SEQ ID NO: 630 - DNA, 870 bp, BradyrhizobiumColbertium
atgaccgcaatcctcaccaacctgttcgatggcgttgcctacggcatgctgctgttcgtgctcgcctgcggacttgcggtcacgctcgggctgatgaacttcgtcaatcttgcccacggcgcgtttgccatggccggcggctacgtctgtatggtgttggtcaacaggatgggctggccgttcttcgcggccctgccgctcgctttcgtctcatctgcagcgattggcattgcgctggagcgtacgctgtaccgccacctctacgcgcgcagccatctcgaccaggtgctgtttaccattggcctgaccttcatgtcggttgcggccgtcgattacatccagggctcgtcccgggtgttcatcaatctgccggccgcgcttcagggccagttcgacctgttcggcgtcggcatcggccgataccggctgatgatcatcgtgatctgcggcttgcttaccatcgcgcttcagctggtgctggcgaagacgcggttcggcagtcgcctgcgcgcagcggttgacgacccccgcgccgcgagcggtctcggcatcaacgtgccgcaggtgttcgcgctcacctttgccttcggttgcggacttgccggcctcggcggcgcgctcagcgccgagattctcggcctcgatccatacttcccgctgaaattcatgatctacttcctgatcgtggtcaccgttggcggctcctcttcgatcaccggcccgttcctggcctcactcctgctcggcatcggcgacgtcgctggcaagtattacgtgccgaagatggggccgttcgtgatctacaccatcatgatcgtgatcctgatctggcgtccgaacggcctgttcggtcgcacggccgcgcgttga

SEQ ID NO: 631 - DNA, 1029 bp, BradyrhizobiumColbertium
atgagcgctgcttccgacgttggttataacgcccagcgccaggcgcgctggcattacggtgaaatcgccttctggctcatcgtgctgtcctgcgggttcctgtttccgtctcgctacctgatcatgaccgatatcctgcggctggcgctgttcacgatgtcgctcgatcttatcttgggttatgccggcatcgtctccctcggccacgccgccttctttggcgtcggcgcctatgcggcgggccttctcgcacttcacggcatcatcaatgagccggtgctcgcgctgatcgccgctggccttgctgccatggtgctcggtttcgccaccagcttcctcgtgatccgcggcgtcgacctgacacgcttgatggtgacgctcggcatcgccctactgctggaggcgctcgccgaacgcttctccaacatcaccggcggcaccgacggcctgcaaggcatcgagatgcagccgattttcggccagatcccgttcgacatgttcggcaaggcgggcttcttctactcgctggccgtgctgttcctgctcttcctgttcgcacgccgcgtcgtgcattcgccgttcggcctgtcactgcgcgcgatcaagaacaatccgctgcgcgccgccgcgatcggcatccccgtcaactgccgcctgatcgcagtttataccctggcagcgttctatgccggcattgcgggggcgctgttcacccagaccaccgcgatcgcctcgctcgatgtctttgccttcgagcgatccgccgacctgatgctggtcctcgtcattggcggcaccggctatctctatggcgggctgatcggcgcggttgtcttccgcctgctccaggaattgttctccaccattaccccgcaatactggcaattctggatcggcctcgtgctggtcgtgatcgtgctggtcggccgccagcgcatgcaccggtgggtactctatgtgcccaatctgatcctcaggatggtcgccgggcgcaaggctgtcgtcgctgtgccggagggcgacgcatga

SEQ ID NO: 632 - DNA, 756 bp, BradyrhizobiumColbertium
atgaccatcgcgctcgaaacgaagaacctcgaaaagcagttcggcggcctgcgcgtcacccgcgatctgtccttgaaggtcgagcagggggcccgccacgcgctgatcggcccgaacggggccggcaagaccacggtcatcaaccagctcaccggagtgctcaagccgaactcgggccgcatcctgctcgagggccaggacatcaccgatctgcccgtgcacaggcgcgtgctgcgtggcttgtcgcgcaccttccagatcaaccagctctatcctgacctgactccgctcgagactatcgggctcgcggtctcggagcgcctcggccatggcggcgactggtggcggcgcatgggcacgcgcaatgacgtcaacgacgaaatcgccgatctgcttacgcgcttccatctgctcgatgccatgaacgagcagaccgtgacgctgccttatggcaagcagcggctgctcgagatcgcggtcgccatcgcaaccaagccgcgcgtcttgctgctcgacgagccggccgccggcgtgcccgagagcgaacggcatgacattcttgccgtggtcggcgcgctgccgcgcgatgtgaccgtactcctgatcgagcacgacatggacctcgtcttctcctttgccgaccgcatctcggtgctggtctcgggcgctctgctcacggaagggccacccgagcaggtcgcgcgcgatccgcaggtgaaggccgtctatctcggcgaggaagcggtcgatgtctga

SEQ ID NO: 633 - DNA, 717 bp, BradyrhizobiumColbertium
atgtctgacctgctcgcgatcgattcacttcgcgccggttatggcgaggcggtggtcctgccgaacatgtcgctgggccttgccgagggacaggtgctggcgctgctcggccgcaacggcaccggcaagacgacgttgatcaactccatcgttggcgtcacccgctgcttctccggctcgattgcgctcgccggcacggatcttaccttgctccggcctgaccagcgggcacgtgccggcatcggctgggtgccgcaggagcgcaacatcttccgctcgctcacggtagaggagaacatgaccgcggtggcgcagccgggtccctggaccttcgagaaggtctacgagatgttcccgcgactgaaggagcggcgaagcaatttcggcaaccagctttccggcggcgagcagcagatgctggcgatcggccgcgcgctgaccctcaatccgaaagtgctgctgctcgatgagccgacggagggtcttgctcccatcatcgtcgaggaactgctgaaggcgatcggcagcatcacgcgggcaggcgggatctgctcgatcatcgtcgagcagaatgcccaaaagattctggggctggccgatcgcgttgtgatattggagcgcggaacgatcgtccatgatgccccaagcgccgcgctgaaggccgacccgtcggtcctggagcgccacctcggcgtcacagggacggcggcccactag

SEQ ID NO: 634 - DNA, 1119 bp, BradyrhizobiumColbertium
atgcagcgaaccagagcccccttccgcgccgacgaggtcggcagtctcctgcgcccggccaagatcaaggaagcccgcactcgtctcgagaagggcgaaatctcggccgacgatctgcgcaagatcgaggacatggagatcgagaaggtcgtgcacaagcaggcctcgatcgggctcaagctcgcgaccgacggcgaattccgccgctcctggtggcacttcgacttcctggcgaagttgaccggctgcgagctgttccaccccgacaccggcattcagttcgcgggcgtgcaaacccgtcacgacgcggtccgcgtgattggcaagctcgactttcccgacgatcatccgatgctcgaccacttccgcttcctgaagaagtgcgccgaccaggcgcatgtcaccgccaagatgacgatcccgtcgccggcggtgctgcacttccgcggcgggcgcaagtcgatttcgaaggacgtctatcccgatctcgacgccttctatgaagacttaggcaagacctaccgcaaggccgtgaaggcgttctacgacgcgggctgccgctatctccagttcgatgacacggtctgggcgtatctctgctcgcaggacgaattgcagaaggcgcgcgagcgcggcgacaatccggacggtctgcagcagatctatgcgcgcatcatcaactatgcgctggccgaaaagcctgccgacatggtggtgacgacgcatgtctgccgcggcaatttccgctcgacctggatctcctcgggtggctacgagccggtcgccgagaccatgctggccggcaccaattatgacggctacttcctcgaatacgacagcgatcgcgccggtggcttcgagccgctgcgcttcctgcctaagggcaacaaggtcgtcgtggtcggcgtcatcacttcgaagttcggcgagctcgagaagaaggacgacatcaagcgccgcctggaagaagccgccaagttcgctcccctggagcagctcgccctctctccgcaatgcggcttcgcctcgacggaagagggcaacatcctctccgaggaagagcaatgggccaagctcagcctcgcggtcgagatcgcgaaggaagtgtgggggaactaa

SEQ ID NO: 635 - DNA, 1356 bp, BradyrhizobiumColbertium
atgaagaacgacgaaatcctgagccagatcaccgagttctgccggaaggcggacatggcggaatcgacgttcggccggcgcgcggtaaacgatgggaagctcgtgcatcgcctgcgcgagggcaagcgcatcaccatcgacacgctcgagcgaatccaggcctatatggcggcgtcgatggccggcggcgctccgccgccgcgggggctccaggtgccgccggaaaagcgtgatccgcgcggaaacttccgcttcttcgagaaccgccaaaaatacctgctgttcgtccacacctgcagcgaaaagcgtgtgatcgcggacagggtcgccctggagcttgcctcgatccatccgcgacctccggcgctgcgcctgtttgacgccggggtcggcgacggcacggtgctggcgcgggtgctgcgcgcgacgcaccagcgcttcccgcatatgccgttctacgttgccgggaaggaactcagtctcgaggacctgcgcctcacgctcgagaaggtgcctgaccgcatttttgagcatccggcgtcggtattcgtctttaccaacatgttctatgcggaagcgccctggctcacgccggcgtcgcctgcagcggcggccgctaccgtgtggcacgaagtcccgcttcgcggcgcttcatcgggcgagttcgagcagcagattgccgagttaaggccgttcctggagcagaattggcgcgcggccatcagcccacggacggccatgccgctctacgagcggccggtcgtcctcgtgctctaccgcgaagaccacaggttcctgctggattcgaccattccgcggccgggccaggccgaagccaatttcgaccttgtcatcgcatctcaaccctatcgggctctgtcctccgtcaatttccgggccaagcggatcatcgcgcctctggcgcgagcgcttcggccgggcggtcggttgatcggaattcactcccatggccaggatccgggcatggaaatgatccaggcgatctggcctggagaaaatcctttctcggtcagccgtcatgagctactgcgtgcagttaagtatgaacttggatcggtgggccgcgacttaaattttaatgcctacgcggataaccgttcgatcttcaggtatgatatggaagcgctgcccaacgaggtcaccggcacaatcggaacctcgacggcctttgcagcgtggaatgcggcggtgtatgtcgctcagattgaggacgaccggttgacggaaatgactcaaaacggccgcaccctggatgccgccagggacgtgctgcgaaaatacaacggactctggtttctcgacgaatcctacgtcatctcgcgccggcgtgattga

SEQ ID NO: 636 - DNA, 1197 bp, BradyrhizobiumColbertium
atgcgcgcgtcctatctcttcaccagcgagtccgtctccgaaggccatccggacaaggtctgtgaccggatttccgatgagatcgtcgacctgttctatcgtgaagggccgaaggccggcatcgatccctggcagatccgcgccgcgtgcgagacgctcgcgaccaccaacaaggtggtgatcgccggtgagacccgtggtccgaagtcggtgaccaacgagcagatcgagagcgtggtccgcaacgcgatcaaggacatcggctacgaacaggaaggcttccactggaagacctgcgacatcgagatcctcctgcatccgcagtcggccgacatcgcgcagggcgtcgatgcgctgcagccgggtgaggtcaaggaagaaggcgcgggcgaccagggtatcatgttcggttacgccaccaacgagacgcctgatctgatgccggcgccgatcttctacgcccacaagatcctgcgcctgatctccgaagcccgccactccggcaaggagaaggtgctgggtccggactccaagagccaggtcaccgtgcagtacgagaacggcaagccggtcggcgtgcgcgagatcgtggtctcgcaccagcacctgatcgaggacatctcgtccaagcagatccgcgacatcgtcgagccctatgtgcgcgaggcgctgcccaaggactggatcacgccgaagacgatctggcacatcaatccgaccggcaagttcttcatcggcggtcccgacggcgataccggcctgaccggccgcaagatcatcgtcgacacctatggcggtgcggctccgcatggcggcggcgcattctccggaaaggaccctacgaaggtcgaccgttcggcggcctatgctgcgcgctacgttgccaagaacatcgttgccgccggtcttgccgaccgctgcacgctgcagcttgcctacgccatcggcgtggcgcgtccgctgtcgatctacattgacacccacggcaccggtaaggtgtcggaggacaagctcgagaaggcggtggcgcaggcgatggatctgacgccccgcgggatccgcacccatctcgacctcaaccgcccgatctacgcacgtacttctgcttacggtcatttcggccgcacgcccgacaacgagggtggcttctcctgggagaagaccgacctcgtcgagcagctcaagcgcgcgctgtag

SEQ ID NO: 637 - DNA, 1422 bp, BradyrhizobiumColbertium
atgaacgcgaagcccggcttcaccgactacatcgtcaaggacatttcgctggccgatttcggccgcaaggagatctcgctcgccgagaccgagatgcccggtctgatggccacccgcgaggagtacggcccgaagcagcccctgaaaggcgcgcgcatcgccggctccctgcacatgaccatccagaccgctgtgctgatcgaaacgcttgcagccctcggcgccgacatccgctgggtgtcctgcaacatctattcgacgcaggaccacgccgcggccgcgatcgccgccgccggcattcccgtgttcgccgtcaagggcgagacgctgaccgactactgggactacaccgcaaagctattcgactggcacggtggcggtcatccgaacatgatcctcgacgacggcggcgacgccaccatgtacgtccatctcggtctgcgcgccgagaacggcgacactgccttcctcgacaagcccggctccgaggaagaggaagtcttcttcgcgcttttgaagaagcagctcaaggagaagccgaagggctacttcgccgggatcgccaagagcatcaagggcgtttccgaagagacgaccacgggcgtgcatcgtctctatgacatgcagaaggcaggcacgctgctgtggccggccatcaacgtcaacgacagcgtgaccaagtcgaagttcgacaacctctatggctgccgtgagtcgctggtcgacggcatccgccgcggcaccgacgtgatgctgtcgggcaaggttgcgatggtcgccggtttcggcgacgtcggcaaaggctcggcggcgtcgctgcgccaggccgggtgccgcgtcatggtgtcggaaatcgacccgatctgcgcgctgcaggcggcgatggagggctacgaggtcgtgaccatggaagacgccgcgccccgcgccgacatcttcgtcaccgccaccggcaacaaggacatcattaccatcgagcacatgcgcgcgatgaaggatcgcgccatcgtgtgcaacatcgggcacttcgacaacgagatccagatcgcggctctccgtaacctgaagtggaccaacatcaaaccgcaggtcgacgagatcgaattccccgacaagcaccgaatcatcatgctatcggaaggccgcctcgtgaatctcggcaacgccatgggtcatccgtccttcgtcatgtcggcgtccttcaccaaccagacgctggcgcagatcgagctgttcgccaacaacaaagacggcaagtacgagaagaaggtctacgtgctgccgaagacgctcgacgagaaggtcgcgcgcctgcacctcgccaagatcggcgtgaagctgaccgaactgcgcaaggaccaggccgactacatcggcgtcaagcaggaaggcccgtacaagtcggaccactaccggtactga

SEQ ID NO: 638 - DNA, 1461 bp, BradyrhizobiumColbertium
atgcaacaagaacacttcgacgtcctgatcgtcggtgccggcttgtccggcatcggcgcgggctatcatttgcagaccaagtgccccggcaagagcttcgtgatcctggaggggcgtgactgcatcggcggcacctgggacctgtttcgctatcccggcatccgctcggacagcgacatgttcacgctcggctattccttcaagccctggaccgatccgaaggcgattgcggacgggccgcagatcctgaactatgtgcgcgagaccgccgtcgagaacggcatcgacaagcacatccgcttccgccatcgcgtcaagcgtgcctgctggtccacggcggatgcgcgctggacggtggaagccgagcgcatctcaggcgaaggcgctgccgagctcgtgcggttcacctgcaatttcctgttcatgtgctcgggctattacaaatacgaggcgggctacaccccggagttcacgggcgtgacggatttcgccggccgcgtcgtacacccgcagaaatggaccgacgatatcgactacgcgggcaaacgcgtcgttgtgatcggttcgggcgcgaccgcggtgacgctggtgcctgagctcgccaagacggcggcgcacgtcaccatgctgcagcgctcgccaacctatgtggtgtcgaggccagcgcaggatcccgttgccaacaagctgcgccgcaatctgccgccgcgccttgcctatcatctgatccgctggcgcaacgtgatgtgggggatgttcttcttccagctcagccggcgccggccggccaaggtgaaggacctcatcctcaagggcgtgcagatggcccttggtcccgattatgacgtcgccacccatttcacgccgcgctacaatccctgggatcagcggttgtgcctggtgcctgacggcgacttgttcaaggctctccgggagcagcgcgcatccgtcgtcaccagcgagatcgatacgttcacgcgcgacggcatccggctcagggatggccgcgagcttgccgccgacatcatcgtcaccgcgaccgggctggtgctccaggtggtcggcggtctcgaggtcagcgtcgacggccgcgccgtcgatttcgcgagcaggctgacctacaagggcatgatgtatgccgacgtgccgaacatggcttccgccttcggctacaccaatgcgtcatggacgttgaaatgcgatctcacctgcgaatatgtctgccggctcatcaactacatggaccggcacaatttccgccaatgcatgccgcacaatgacgacccgaacgtcaccctgcagccatcgctcgacttcacctcgggttatgtacagcgctcgattgcgaagatgccgaagcagggctcgaagcggccgtggcggctgtatcagaactacgcgctcgacattgtctccctgcgcttcggccggatcgacgacggtgtgatgcgatattcgtga

SEQ ID NO: 639 - DNA, 156 bp, BradyrhizobiumColbertium
atggaagcccagaagatcgcggtcgacgccgtcgtcgcgctgaccgattgcgaccgcgaagccgtcattgccttcatccgccggctttacctggcgggcgtcaccgatcccaagcgcctgaccttcaaggggctccaggcgctgtcgcgggcctga

SEQ ID NO: 640 - DNA, 930 bp, BradyrhizobiumColbertium
atgttgaaacagctttttgcaccgcaactcgtcgttctgtatgtgcttgcggcctcgacaatctacgttcactttcgcggcaagcagcggctgcgtttcgcgcgccagctcggcgaccactcgacctatctcgcgccctacaacgtgctgatgtatgcgggctcggccgtgcccaacaagccggtgatctcggtcgagcagtttccggagctcaagccgctgagcgaaaattgggagaccattcgcgacgaggcggtacgcctgttcgacgagggcttcatccgcgccgctgcgaagaacaacgactggggcttctactcgttcttcaagagcggctggaagcggttttacctgaaatggtacgacgacttcctgccttcggcgcgcacgctgtgcccgaagacggttgagctgctcaacgcgatcccgagcgtgcacggcgcgatgttcgcggtgctgcccccgggcggcaagctaggggcccatcgcgatcccttcgccggctccctgcgctatcatctcggcctggttacgccgaactcaaacaagtgccggatcctcgtcgacggcgtcgaatgcgtctggcgcgacggcgaggccttcatgttcgacgagaccttcatccacagcgccgagaacgcgaccgacgtcaaccgcatcatcctgttctgcgacgtcgagcgcccgatgaaatacggcttcatgactgccatcaaccgctgggtcagccatcacatcgtcaaggcatcggcgacgcagaacgttgagggtgagaatgtcggcgtgctcaacaaggtgttcggcaagctctacgagatccatctcgccagccgcaaagtcaaggagtggaatcgcaacgtctactatacgctgaaatactcgctcacggtgctgatcctcggcctcatcgtgtggtcggcgttgcgttga

SEQ ID NO: 641 - DNA, 702 bp, BradyrhizobiumColbertium
atgaacgccgcctcctacgtcatcccgcttccgccccaggcttcgcttcccgtcgttggcgagagcggccggtatccggtgcgccgcatctggtgcgtcggacgcaactatctcgagcacatccgcgagatgggcaatgacgagcgcgccccgccgttcttcttcgccaagcacgccgacatgctggtgcccgacggcgccaccattccctatccgccgctgaccaaggacctgcatcacgaggtcgagttgatcgtggcgatgaagagcggtgggctgaatatccctcccgacaaggcgctggaccacgtctacggctacgccgtcggcatcgatctcacccgccgcgatctccagatcgcctcgcgcaagaaagagcgcccctgggagatcggcaagtcgttcgactattcggcgccctgctccgcggttcagccggcctcgaagatcggccatccctccaagggcaagatctggctgaccgtcaacggcaaggaagcgcaaaagggcgacctcacagagctgatctggaacgtgccggagatcatctggcagctctcgcagcaagtgaagctcgcggccggcgacatcatcatgacgggcacgccagcgggcgtgtcgcagctccagcccggcgacaagctcgaatgcggggtcgacggcgtcggcacgctgaaggtaagcatcggtcagccggaatag

SEQ ID NO: 642 - DNA, 1803 bp, BradyrhizobiumColbertium
atggcgcagtttccaaagagaatcaccgacgatccctacgcggcagtggtcctgatccgccgcctgatcacggaacagggcatcgtctattggcggcgctacctcgtcgccttcgccctgatggcgctcgccgcaggtgcgaccgccggcgcgacctatgtgctcggccaggtcatcaaccaggcctatgttgacaagaacgtcccgggcatcgcgatgttctcgggcatcaccgtgatcctgctcttcatcaagggcgtggcgacctacggccacatggtgatcctgacgaagatttcgaacgccatcctcgccaccaaccagcgccagctcttcgccaagctgatgcgcgagagcgtcggcttcttctcagagcggcactcctccgaattcctggcacggctgacggccggcgccaaatccatcaccgacgtgctcaacatgctggtcaacgccgtcggccgcgacctgttgatgctgcttgccatgatcggcgtgatggtgtggcaggatccgctgatgtccttcatcggcctcgtcgcggtgccgccggcgatgctggtgctgcgcaagctagtcaagcgcatcaaaggcctcgccttcaaccagttcaccggcaccgccgacatcatggagacgatgcaggaatcgctgcagggcatccgcaccgtcaaggcgttcacgctcgaagagaccatgcagaagcgcatcgacgagaacatcgcggtcgtcgaacgcaatgccaacaagatggcccgcgttgccaaccgttccaacccgctgatggagatgttagggggcttcgcggtcgccggctgcctgatgtacggcggctatgccgtggtcgcgctcaatgccacgcccggcgcgttcttctccttcatgaccgcgttcctgatggcgaccgagccggccaagcggctggccaggctcaacatcgacctcaacagccagctcgtcggtgcgcgcatgctgctcgagatcatcgacagcccggcgagcgagtatgccgacgacgacaagccggcactgaagctgtccgatgcccggatcgagctgcgcgacgtcagcttctcgtatcgcgatggcgaaaccgtgctcaaccgcatgagcttcgtcgcagagcccggcaaggtcaccgctttggtcggcccctccggcggcggcaagtctacggtgctggcgctgctcttgcgcttctacgaggtaacgcagggcgacatcgtgatcgacggccagtcgatcggcgcggtctcgcgcaagtcactgcgcgcgcagaccgcctatgtcggccaggacgtctatctgttccgcgacaccatccgcaacaacatcgccttcggccgacccggcgcgggcgaggacgagatcatcggcgccgcgaaggcggcctgcgcgcatgatttcatcatgggcttcccgctcggctacgacacgccagtcggcgagcatggcacgcagctgtccggcggtcagcgccagcgcatcgcggtggcgcgcgcgctcatcaagaacgcaccgatcatcctcctggacgaagccaccgccgcgctcgattctgaatccgagcgccaggtgcaggaagcgatcgagcatctctgccagaaccgcaccaccatcgtgatcgcgcatcgcctgcacaccatcatgcacgcggatgcgattctcgtggtcgagggcggtgagatcgtcgagcagggccggcatgacgaactgctgcgtcgcggtgggcgctatgcgtcgttcttccggctgcaacatcacgattccggtgccctggcgccgatcagcgcaacggcatag

SEQ ID NO: 643 - DNA, 1008 bp, BradyrhizobiumColbertium
gtgctagtcaccggcggcgccggctatattggaagtcacacggtcctggcgctggcggaagccggcgaggatgtcgtcgtgatcgacgatctctccaccggattctccacctatctgccggaaggcgtgccgctgttcatcggcgacgccggcgacgagaacctgctcgagggcgtgatcgcccagcacgacatcgagagcatcattcatttcgcgggctcagtggtcgtgccggactcgatgcgcgatccgctcggctactatcgcaacaacttcacgacggcgcgcaacctgctcaacgtcgcggtcaagcgcggcatcggccgcttcatcttttcctcgacggccgccgtctacggcaatccggaccaggtgccggtgcccgagcacgcgccgacccggccgctatcgccgtacggctcgtcgaagctgatgaccgagatcatgctgcacgacgtcgcggcggcctacggcatgcagtacgtgaccttgcgctatttcaacgtcgccggcgccgatccgcaggcgcgcatcggcctcgccacggtcggcgcgacgcatctgctcaagatcgccgtggaagccgcgaccggccagcgcgccaagatcgacgtgttcggcaccgactatccgaccccggacggaagctgcatccgcgatttcatccacgtcaccgacctgtcgcaggcccatcgctcggcgcttgcctatctgcgcaacggcggcgcctcgatgacgctcaattgcggctatggccgcggctattcggtgctggagacgatcgacgcggtgcgccgcgtttcgggccgcagcttcgccgtgcaatacgcaccgcgccggcctggcgacatcatgaccatggtcgccgacaccagccgcatccgcggcctgctcgactggaagccgcaatacgaggacctcgagaccatcgcagcacacgcgctggcgtgggaggacaagctgttccgcgagcgccacggcgatctccgccacgccgtctcggcctag

SEQ ID NO: 644 - DNA, 1092 bp, BradyrhizobiumColbertium
gtggcgaactcccccggcgacctcgacgtgatcgtgccaaatctgcacaggcgctattccggggtcaccgcgaccaaccggatggtggcgccgcggctggcgaaactctatcgcgcggcgtggttcggctcggatacgccggaggggatcgggcgactcggcattgcggatcttctgaagctgtggcgccgcaggcgaccgttgatctggcatgcgcgccgcaacaacgagatgatcgcaggcgtcgtgctgcgcgcgttcggctggccgctcaaggtggtattcacctcagcggcgcagcggcaccacagctggatcacgcgctggctgatccggcgcatggatgcgatcatcgcgacgtcagatgtctcggcgtcgttcctgaaggtggcggcgacggtgatcccgcacggcgtcgacaccgaggtctatgcaccgccgatggatcgcgctgctgccttcgccgaaagcggcctgccgggccgccatgccatcggctgcttcggccgcgtccgtgcgcagaagggcaccgatctgttcgtcgaggcgatgtgccgcctgctgccgcactatccggatttcaccgccgtcatcgtcgggcaggtcacgcccgagcagatgccctttgccaacgacctgaagacgcgcatcgaagccgccaacctgcaatcgcgaatcgtcatcaccggcgagttgccgatcgaggcggtgcagcgctggtatcagcgcctgacgatctacgcctttacctcgcgcaacgaaggcttcggcctgacgctgatcgaggcgatggcggccggcagcgcgctcgttgccgcacgcgccggcgcggccgaactcgtggtggaggatggcgtcaccggcgtgctgatcccgaccggcgatgccgatgcgctcgccgcggcccttgagccgctgatgcgcgatgtggctgcagccaccgcgatgggcgagcgcgggcgggcgcgggtgctggcaagcttcagcctcgatgccgaagcagcgcggatcgccgaggtctatcggccgctgctctcgggcgattttcgcggagcgcaaacaaaaacacgaaaacaaccccatgcaccgtag

SEQ ID NO: 645 - DNA, 1071 bp, BradyrhizobiumColbertium
atgaatcaagattcggaacttagcggaaatgcagaccggagcgacacccggccgatcctgatcattccctacatgtggatcggcgatttcgtgcgtaatcacacggtcgtgcgtgtcttgaaggagcgctggccaaaccggccggtcgatcttctgaccacctcgctctgcgccccgctggtcgattacatgcccggcgtgcgggaaggcgttgtgtgggacttgccccggggccggctcgccatagcccgccaattccgcctggccaagctcctgcgcgagcggaactacggcaccgcgctggtgctgccccgcacatggaaggcggctattgcgccggccctggcgggtattcctgaacgggtcggctttgtcggcgagttccggttcggcctgatcaaccgctggcgctggggtgagaagaagctgccccgcttcatcgacaagaatgccgctttggcccagcccaacggagcccccttgccgccggaatggccggtgccgcaactccgggtccccgtcgaggagatcgccagctggcgccaagccaacggcctcagcgccggagccgcggtggcgctcgcccccggctcggtaggtgtctcaaaacgctggacctattatcccgaggctgcccggcttctggtcgagcgcggcctggaggtctgggtggttggcggccccgccgagaagggcctcgcccaggagatcgttgcggccggcggtcccggcgtgcgtgacctcaccggcaccgatctgcgcaacggcgtcctcgccatggccgcggccggcgttgcgatctccaacgattccggcctgatgcacatcgcagccgccctgggcacgcccaccatggggattttcggtcccaccagcccctatctgtgggcaccgctcaacggcctcgccgcgaccgttgtgcaggacagggaagtgctgtcctgccagccctgccagagcaccatctgcaagatgaatgatcatcgctgcatggggaatatcgcggccagcgaggtggtgaagattgcggagcgggtgctgggggaagccggggcaagggtgacgagctga

SEQ ID NO: 646 - DNA, 981 bp, BradyrhizobiumColbertium
atgttgctggtgaccggcggagccggttttatcggatcgaatgtcgtggccgcgctcaatgacgcgggtcgcagcgacgtcgtggtctgcgactggctcggcaccgagggcaagtggcgcaatctcgccaagcggcagcttgtggatatcgttcccccggccgagctgatggactggctgaagggccgcaagctggacgcgatggtccatctcggggcgatttccgccacgaccgcgaccgacggcgaccttgtcatcgagaccaatttccgcctgtcgatgcgtcttctggaatggtgcacgatgaacgcagtcccgttcatctatgcctcctcggcagcgacctatggcgatggcatggaaggcttcgacgacgacggctcgctgccggcgctgaagaagttgcggccgatgaatctctacggctggagcaagcacctgttcgatcttgcggtcggcggacgcgtcgcgaacggcgagccgctcccgccgcaatgggccgggctgaagttcttcaacgtgttcggtcccaacgaatatcacaagggctcgatgatgagcgtgctggcgcggcgcttcgacgacgtcaaggctggccgcgtcgtgcagctgttcaggtcgcatcgcgagggcatcgaggacggtgatcagcgccgcgatttcatctatgtcgacgatgtcgtgcgggtcctcatgtggctgctggcgacgccatccgtgtccggcgtgttcaacgtcggcacgggcaaggcgcgcagcttcaaggacctcatgctttctgcctatgccgcgctgggcaccaggcccaacatcgaatacatcgacatgccggagagcatccgcgacagctaccagtacttcaccgagagcaaggtcgatcgcctgtgccgcgctggctataatggcggcttcaccacgctcgaggacgcggtgaaagcctatgtcggggactatctcgaccggcccgatcgctttcgttga

SEQ ID NO: 647 - DNA, 1485 bp, BradyrhizobiumColbertium
atgccgactcccattctcgatttcgatgccctcgcgcaagccatctcgggccgaacggtgctgtgcatcggtgacgtcatgctggacgagttcgtctatggcgaggtgtcacggatctcgccggaggcgccggcgcctgtcatcgccgcccagcgcagcgagatccacatcggcggcgcgggcaacgtcgcgggcaacgtcgcttcgctcggtgcgcgatgcatcttcgtcggcctcatcggcgaggacgatgccggcgcacggctcgcggcggcgctcaaggagcaagccggcatcgaaagcgtgctggtgtgcgatccctcgcggccgaccacgcgaaaggtccgcttcgtctccgagcacttttccacgcatatgctgcgcgcggattgggagcaggcgctgcctgcatctgatgacatcgaaacgaaattgatcgatgcgatcctgccgcagatcgcccttgcggacatcgtgctgctgtccgattacgccaagggcgtgctgaccgcgcgcgtgatccgccataccatcgacgaagcgcgaaagctcggcaagcccgtgatcgtcgatcccaagagcctgaactgggcgatctatcgtggtgccacgctgctgacccccaaccgaaaggaattttcggaggcgacccgcagccgcgccgacacgccccagagcatcgtcgaggcgagcgaggacgtgatgcggctcgccgattgcgaagcaatcctggtcacgcagggcgagcatggcatgacgctggtgccgcgcaacggtgaggccgttcacgttccggctttccctgtgaaggtgcgcgacgtctccggcgccggcgacaccgtcgccgctgcgctcgcggtgtcgctcgcggccggcgcggactgggacacggcgctgcgcgtcgccaatgccgccgcggccgtcgcggtgggtaagcagggcaccgccaacgtgagcacgaccgagctgcgacgcaagatcctgccgcacgccacactcgcggccgaggagaagatcgtgctcgatccggccgcgctcgatgcccagctcgccgaatggagaaggcagggccagcgtgtcggcttcaccaacggctgtttcgacatcctccatcccggtcacgtcaaggtgctgacggcggcgcgcgcggcctgtgaccgcctgatcgtggggctcaacagcgacgcctcggtccggcgcctgaagggtgccgatcgcccggtgcaggacgaacgcgcgcgtgccgaggtgctcgccgcattggaggccgtggatcttgtcgtcatcttcgagcaggacacgccgatcgagctgatcacacggatcaagcccggcgtgctggtgaagggtggcgactacacgcgcgagcaggtggtcggccacgaggttgtcgaggctgcgggcggggtggtcgtgctggtcgacatcctccagggcttcagcacgacggcgctggttcaccgcgcccggggagggagcaagtga

SEQ ID NO: 648 - DNA, 144 bp, BradyrhizobiumColbertium
atgcagctcgaacatcgctatcctgtcaatctgatcgtggacggggtcaatggagaagttcgaagctgcttcaatggcgacaaccgtgcccctggtgttcgggtgttgcgggcccgtcgtggtgaatcgatcctgacgagttga

SEQ ID NO: 649 - DNA, 1098 bp, BradyrhizobiumColbertium
atgcaaccagtttttcttcgcgtccgccaggcgcacggcgcgccggcacgcgttcatattctaagcgatacgaccgcgaagttggcagagcttcatgcgatggtgggcgactgctgtcccgtcaccaccgaacttctagggcgcccgacgatcgaccatcgcgagcacgatgcgctgctggttgccgtcgatctccgacggatggacagcatctgcgcgctcaaggcatcgctggaaactgcggccgggcatgtctctaagagggtctttatcgttggtgcggattctcggctgtcgatcgtgcaagcctacgcgctcggcgcaacgacggtgctgacggctccagtcaaccgccttcgcctgatttctgagttggtcggcgcgagcgcacctgcgcaacccgtcaacgagacgacggcgggtgttgacggggcggcggctgatgccgccggttgcttcacctcaatttttcgcgctgcgctaagcggcgcttccatcgatgtgaacgaagccgcccaaatgagtagtgccattgctgacaacatttcggaatttggcctcgcggcgtggctggactcggtgcgtcatcatcacgagggtacgtaccagcactgcctgctggtcacgggtattgctgttgattttggtctcagcctttgtctcggaaagcaagatgtcaatcggcttggtctcgcggccatgttccacgatattggaaaagcaacgatacccttgtccatcctggacaaggccgggcgcctggacgacgccgagcgggaactgatcaagacgcatccagtcgccggctatgacgttctaaaggcgcatcccggtatctcgcccgaggtgctcgacgccgtcaggcaccaccacgagtatctggatggcagtgggtacccggacggccttggcgccgagagcattcgcgatctgacgcgaatgttgacgatcgccgatgtattcgcggcgcttgtcgaacggcggagttacaagccgacgatgccgcgcgaaaaggcctacgaaatcttgcagtccatgcaagacaagctcgaacggccgttggtctcggcattcagggacgtggccttgacgcgctga

SEQ ID NO: 650 - DNA, 123 bp, BradyrhizobiumColbertium
ttgctcacccatccgaccctcgatcgcctcaacgtcctcggcctccacggcatggccaaggccttcgccgacatcgaagctgccggtgaggcgcgcggccgatcggcctcaaatcccatatga

SEQ ID NO: 651 - DNA, 123 bp, BradyrhizobiumColbertium
atgcaggccgagccggtcgcgttagaaccggcccagatggctcacatgatcgtctatcccgtcccgaccgagccgctcgcgatcggcgtcctgctcaccagcgctccgtggacgatgcgctga

SEQ ID NO: 652 - DNA, 687 bp, BradyrhizobiumColbertium
atgtcggcttgggcctacacgctcatccctgccgtcgcgtcggtgttgggggcggccgtcaccgccgtgcgccaacccggcccgtcgcttgccagcgccatccagcacctcgcggcgggcgttctgtttgctgcggtagcgggcgagatcctgcccgacctcaagcaccagcaatctcccatcgcggtgattgtgggtggagccctcggtgttgccctgatgctcctggtcaagcgtctgggagagacagcgaaaggctcgaccgggctcatcgtgaccgtcgggatcgacatcctggtcgatgggctcgtcctcggtatcggcttcgccgccggagcaaagcaaggtctgctgctcacgggcgcactcacgctcgaggtactgttcctcgggctcgcgcttgcgtccgagctcaagcagacaagcggctcggcggcgcgcgtaatcggtattgtggccggtctcgcggtcttgctgccggtgggcgccctcctgggcacgccggtcggcgcgctgcccggtccctacctcgccggcttctttgccttcgcgctcgtcgcgctgctctatctcgtcacggaagagctgctcgtagaggcgcatgccgtacccgagaaaccctggaccaccgcgatgttcttcgtcggcttcctgggcatgctggtcatcgaggagatcgtcgcctga

SEQ ID NO: 653 - DNA, 129 bp, BradyrhizobiumColbertium
atgaagccgctcgccgcccgtttcagcgacacgttgcgcttgccctacttggagagttgcagcgaaagtatccaccgggcgcgccgtgtcgccgcgcgcccggtctcggcaaggaacgcgcggctctga

SEQ ID NO: 654 - DNA, 141 bp, BradyrhizobiumColbertium
ttggagggacccaatgtaaatgcagtccatgagatgagcagtctcgtcgctgccacaagagcctacgatcaggtcgccaacacgatcttgcgcgaagacgacaagaacgaactcagaaaactggccggtgaggatctgtag

SEQ ID NO: 655 - DNA, 252 bp, BradyrhizobiumColbertium
gtggacgtcgtcaatcgctacggatcatcctcggcgatcgtattgatggacgggaaagactctcaatcgcccgaatggggcttggtggccgatcaccactgtcacggttgcttctcggtgtcggtccccgcaccagcgcagcaggctgaactcgccttggatttgaagatcgcggagttgccaaaatcggcggctcccttgtacggcaatgttagcggtcttgatccgcccccgccgaaatctctgacctga

SEQ ID NO: 656 - DNA, 372 bp, BradyrhizobiumColbertium
atggccatatcgcatcttgcgggcgacgagggtgtgcgggtccacgtggtgtcggagaagctcgccgtagacgcctcattcgtcaccgcccagtcgcagttgcttgagtccaagggactgatctaccgcaagccgagcgcaatcgaccgccgagtcgtcctcctcgcgctctcgagcaaggctcaatggcagatagaagagctgtctggctccatgaacgctgtgaatgcgtatgttgccaataacgcaagcggcaaggcgcaccggcttctcacagaactcggggagctgaagagcgtcctcaagcgcgcggagctcctgacggcttcggacgcgctccgccattggcctcgcggccgcgacaccgcatga

SEQ ID NO: 657 - DNA, 624 bp, BradyrhizobiumColbertium
gtggcgttgcttaagcctctctactaccgcttcgccgctgccatgctgcgcgacacgacatggcaagagccgttgttcgaactggtttcgccgaagagcggagaacgcctgttggccttcgggcctggaagcgcatcgtccgcgacgtccctcgcggaacggttcaccgagctcgacattgtcgttgccgagccgagcgcgagagcggtccggaacgcgaaacgggccgtcgccagcggtgggatccgcaacatcaccttcgtcgatgccgtctccatgatcaatctcccgttccacgcaagctgtttcgactgcgcgatttgcatcatgtcctttcacttgcggccacccgaagaaaaggtcgcgcttgccaaggaggctctgcggatcttgcggcgcgggggcgtgctttacgttgcggactatgatcggccggccaaccgcgaggaacggatcgttctcaaccttgcagcgcaagtgtccagcaggagtgccgttcagtcacatgttgacgggacttggacccaatgtttgaaaaaagccggctttgcgggcgcgagatcgcagtcgtcgcagtcagttaaaatcgggcgggttgcgatcatgttgtttcggaagccatga

SEQ ID NO: 658 - DNA, 339 bp, BradyrhizobiumColbertium
atgaggcgtatccctgcattgcgcggggttgtgtccgtatttctgatcctgacctatctgctgtcgggtgtcctgcatcgctgtctcgaccttgacgtgagcaatccgaccggttccccggtgttttggatggtcgacaccaaagtcgatagcggccctgagagcggtgccatcgtcgaccatcactgccatggctgtttcgcggtttctgtcgcagcgcccccgcagcaggtcatgtccgtgatggaacccaagctggcggacctcatccggtcgacggacccgttaacggatactgtccgccgtctcgatccaccaccgccgaagtccctaacctga

SEQ ID NO: 659 - DNA, 870 bp, BradyrhizobiumColbertium
atgggcgacgagaacggggcccatcacatcggctcgggcgagcagaccacctcgctgctggtgttccgcgccggctcgtcgcagcccaaggcggtcccgctcgggctggtcacgcgcctggaagagctgccggccgacaagatcgagttctcgaacggccgctacatggtgcagtaccgcgagcagctgatgccgctggtggccatggaaggcgtcaccattgcgagccagggtgcccagccgatcctggtgttcgccgacgacggccgctccatgggcctcgtcgtcgacgagatcatcgacatcgtcgaggaacggctcaacatcgaggtcggcggctcgggttcgggcattctgggctcggccgtgatcaagggccaggccaccgaggtgatcgacgtcggccacttcctgcccatggcgttctccgactggttcacccgcaaggagatgacgccgtcattgcattcgcaatcggtgctgctggtcgacgacagcgcgttcttccgcaacatgctggcgcccgtgctcaaggccgccggttaccgcgtccgcaccgcgccgaccgcgcaggagggcctggcggcgctgcgcgcgcagagcttcgacgtgatcctgaccgacatcgagatgcccgacatgaacgggttcgagttcgcggaagtcgtccgttccgacaacaacctcgccgcgacgccgatcatcggcctctccgcactggtgtcgccggcggcgatcgagcgcggccggcaggccggcttccacgactacgtcgccaagttcgaccgtcccggcctgatcgcggcactgaaggagcagaccgcgggcgccgccggcgcctccgagctgagccgggcggcggcggcttga

SEQ ID NO: 660 - DNA, 1173 bp, BradyrhizobiumColbertium
atgaggacggcattttggctggcgggcgcagcggcgctggtgctggcaaatcaggcattcgccggcgacaccatcaagatcggtttcgtttcgacgttcagcggcccgaccgccgtgatcggcaacgatatgcgcaattccttcgagctcgcgctcgaccatctcggccgcaagatggacggcaagccggtcgaggtgatctacgaggacgacggccagaagccggacgtcggcaagcagaagaccgagaagctggtgcagtccgacaaggtcgacttcatcgtgggctatatctggtcgaacgtgctgctcgcctcgctgaagactgcagtggactcgcagacattcctgatctccgccaatgccggcccgtcgcagctcgccggcgagctgtgctcgccctacgtgttctcgacctcgtggcaaaacgatcagacgccggccgccatgggcctctatatgaaccagaagggggtcaagagcgtgttcctgatcgggccgaactatgcggccggcaaggacatgctcgccggcctcaagagcacgttcaagggtgaggtcaagggcgaggagtacacggtctggccgagccagctcgacttctccgccgagctctccaaggcccgcgcctccggcgccgaatcgatcttcgtgttctacccgggagctgccggcgtgcagttcctcaatcaatatgcccaggcgggcttgaagagcacgatgccgctctacaccgctttcaccatcgacgagctgtcgctgccgctccagaaggagaacgcactcggcgttcccggcgcgcaggaatgggtcaacgatctccccaacgagcagaacaagcgtttcgtcgccgactaccgcaagaaatatcccggcctgcgcccgacctattacggcgcgcaatcctacgacgcggcgcagctgatcaatagtgcggtggtcgcggtgaagggcgacaccagcaagaaagatgcgatgaaggccgagatggagaaggccaacttcaagtcgctgcgcggcgccttcaagttcggcaacaaccacattccgattcagagcttctatcttcaggacgtcgtcaaggacgccgaaggccagctcgccctgaagaccgtcgccaccatcgtcgagaacaaccaggatcggttccacgagaagtgcaagatgaagtga

SEQ ID NO: 661 - DNA, 1263 bp, BradyrhizobiumColbertium
atggccgcaactccccatcgcgtcgtcatcgtcggcgccggcttcggcgggctggaggcgacctaccggcttgcgggcgcaccggtgcagatcacgctgatcgaccgccgcaaccatcatctgttccagccgctgctctaccaggtcgcgaccgcctcgctcgcgaccagcgagatcgcctggccgatccgccatctcatgcgggaccgccgcgatgtgacgacgctgtttgccactgtaagcggggtggatacggcacgtcgttgcgtgctgatcgacgacggcagcgaggtgccctacgacacgctggtgctcgccaccggcgcgcggcacgcctatttcggccacgacgaatgggagcaatttgcgcccggtctgaagacgctggaggatgccaccactctgcgccggcacatcctggtggcgttcgagcgcgccgagcgcgagattgatcccgccaagcgcgccgcgcagctgaccttcgtcatcgtcggcggcggcccgaccggcgtcgagcttgcgggcaccatcgccgagatggcgcatcacaccctgcccggcgatttccgcagcatcgacacgcgcaaggcgcgcgtggtgctgatcgaggcaggcccccgcgtgctcgcaggcttccccgacgatctctcggcctatgcccaggcctcgctggaaaagatcggcgtcgaggtcgtgctcgggcaggccgtcaccgagatcaatcgtgacggggtcgtattcggcggcaagctgctcgaggcaaggaccaggatctgggccgccggcgtgcgcgcttcccccgcggccgaatggctgggcgcgccgagcgaccgcgccggccgcgtgcaggtggaggccgatctcaccattcccggccatcccgagatctttgcgatcggcgataccgtcagcatcaacgcctggaatggcaagccggtgccgggcattgcccctgccgccaagcagcagggccgccatgtcgccgagaccatcagagcgcgcctgcgccgtgctgcgaccggccccttccgctacaagcacgccggcagcctcgcccagatcggcaagcgtctcgccgtgatcgatttcggccgcgtcaagctgcgcggcgccatcgcatggtggatctggggcatcgcccacatctacttcctgatcggcctccgccaccgcctgagcgttgcgctcagctggctctggatctacgcccgggatcagcgcgccgcgcgactgatcacgcaggggagcagcaaggtggtgtag

SEQ ID NO: 662 - DNA, 741 bp, BradyrhizobiumColbertium
atgatgtcgcgcggcggcaaggactggtacttcctcacggtcgattatgcgctcggcaagggcatcgaggcggaggcgcagaaatacatcgagggccacggcggcaaggtggtgggctcctccaagcatccgctcggcacctccgacttcgcctccttcctgctgcaggcgcagggctcgaaggcgcaggtgatcggccttgccaacgccggcggcgacaccatcaacgccgtgaagcaggccgccgaattcggcatccagcagaacgggcagaagctcgtcgccttcctgctcttcatcaacgacattcacggcatgggaatcaaggtcgcgcagggcctgcagctgatggaggccttctattgggacatgaacgaggacacccgtgcgttcgccaggcgcttcgccgcgcgtcccggcatgaacggcaagatgccgagcggcaaccaggccggcgtctatgcctccaccctggcctatctcaacgcggttgcggcgaccggcagcgacaacgccaggaacgtcgtgcccgagatgaagaagttcaaaggcagggacaagttgttcggcgacaccaccatccgccaggacggccgcgtcgtgcatcctatgtacctgttcgaggtgaagaagccggaggagtcgaaatatccctacgactattacaagctggtctcgaccattcccgcagaacaggcgttccgcccgctggcggagggcgggtgtgaattggtgaagtag

SEQ ID NO: 663 - DNA, 324 bp, BradyrhizobiumColbertium
atgcctgccatcaccttcatccatcccgacggcaagtccgaccgcgtcgagaccgcgggcggcgagagcgtcatgcaggccgcgacccgtcacggcctcgacggcattctggccgaatgcggcggcaacgcgatgtgcgcgacctgccatgtctatgtcgacgagagctggctcgcgcgactgcctgcgatggccggcgacgaggacgcactgctcgacggcaccgccgctcagcggcgaccgaccagccggctgtcctgccagatcacgatcacgcccgatctcgattggctcgtcgtcaagctgccggagcggcaggtctga

SEQ ID NO: 664 - DNA, 1209 bp, BradyrhizobiumColbertium
atgaccgcatccggcgccgcgggatcgggcgtcccgcatctcgacgtcgatcctttcgacatgaggtttcttgccgacccctatccggcacatgagctgctgcgggaagccgggcccgtggtgtatctcgacaaatggaacgtctacggcgtggcgcgctatgccgaggtccatgccgtcttgaacgaccccgcgaccttctgctccggccgcggtgtcggcctgtccgacttcaagaaggagacgccctggcggccgccgagcctgatcctcgaggccgatccgcccgcgcacacccgcacccgcgccgtcctgtcaaaagtgttgtcgccgaccgtgatgaagcaggtccgtgaccgctttgccgaggcggccgaggcgcgtgtcgatgccctgctgcagatgcgcaacttcgatgcgatcgcggatctcgcggaggcctacccgctctcgatcttcccggatgcgctcggcctgaaaccggaggggcgcgagcacctgattccctatgccagtgtggtgttcaacgcgttcggcccgcccaaccggctgcgccaggaggcgatcgaacggtcggcgccgcatcaggcctacgtcgccgagcagtgccagcgcgagaatctggcgcccggcggcttcggcgcctgcatccatgcgcaggtcgacgagggcgccatcacggccaacgaagcgccgctgctggtgcgctcgctgctgtcggccggcctcgataccaccgtcaacggcatcggcgctgccgtgtactgcctcgcccgcttcccggaccaatggagtcggctgcgcgacgacccgtcgctcgcgcgcggcgcgttcgaagaagccgtgcggttcgaaagcccggtgcagaccttctttcgcaccaccacgcgggaggtcgagctgtcaggtgcgaaaatcggcgagggcgagaaggtgctgatgttccttgccgccgccaaccgcgatccccgccgctgggacaggccggacagctacgacatcacgcgccgcacctctggccatgtcggcttcggctccggcattcacatgtgtgtcgggcagctcgtcgcgcgcctcgaaggcgaggtgatgctgacggcgctggccaggcgcatcgcgaaggtcgagatcacgggtgagccgaagcgccgcttcaacaacacgctgcgcgggctcgacagcctgcctgtgacgatcaccccggcctga

SEQ ID NO: 665 - DNA, 507 bp, BradyrhizobiumColbertium
atgccgccgtcttcgaccagagcccgccacaagcccacgcccacagatgcgggaccgacgctcgatctcgaccgctacgtgccagcgttcatcaccttcatcgccaacaagctttcgaacagcgcgacggcgttctatcagaagcaattcggcgtcaacgtcacggaatggcggatcatgtcgctgcttgcgatcgagcccggcattcccgcctcgcgcatctgccacgtcatcggcttcgacaagggaccggtgagcaggacgctcacggggctcgagaagcgcgggctggtctcgatccgcaccgatccgaacgacggccgcacccattcgatctcgctcaccgcgaagggccgcaccacgcatgacagggtgatcgtcgccgcgctcgaacgtgagcgccgcctgttgtcctgcctcagcaaggacgagcgcgaggtgctgatcgatctcttgcggcggctgcacgaaaatctcggcgcggtcaccggcggcactgggccctga

SEQ ID NO: 666 - DNA, 1854 bp, BradyrhizobiumColbertium
atgacggtcgtcccagacggtgacgttgcaggcctgttcgcaacaccaaggaccgttgcagagcatcgcgccgacggcagtatcgtgctgcgctcgcccgagccactgcgcgcgatcgcgcgttgcatcggcgactggctggagcagtgggcgcggcaaacgccggatacgatcttcctggccgaacgtggcggtgtcgaggcgccctggaccaccgtcacctacgcgcaggcgctgcggcaggtgcgcgcggcggcgtcgtggatgctggcgcagggcctcagcgccgaacgcccgctcgtgatcctctccgacaacagtatcgaccacgcgttgctcgcgcttgccgcccagcacgtgggcgttccctcggccgcgatctcgcccgcctattcgctgatgtcgaaagacttcgacaagctcaagagcatgatcgcattgctcgagccgggcgcgatctatgtttccgcaaccaagcctttcgcagcggcgctggccgcgatcaggccgctgcacacggcccagatcatcagcggccatgacaaggacgccgattcgctgcccttccgcaccattgtggaatcgccagagacgtccgaggtcgcaaaggcccttgccgcggtgacgccggacacgatcgcaaagttcctgttcacctcgggttcgaccggcacgcccaaggcggtcatcaacacccagcgcatgctgacctccagccagcaggccaaggcgcagacctggaccttcctcgaagagagccgcggcaatctcgtcattctcgactggctgccctggagtcacaccttcggcgccaaccacaatttcaatctcgtgctgcgcaacggcggctcactctatatcgacggcggcaagcctgctcctggcctgttcgcgatgtcactcgccaatctgaagagcgtgatgccgacggtctatttcaacgtgccgcgcggcttcgacatgctgatcgcctcgctgcgaagcgacgaggaattgcgccgccgcttcttcggcgaggtgaaattcgccttctatgccggcgcggcgctgccgcaaaatctctgggatgctcttgagcagctttccatcgagaccgtcggccgtgcgttgccgatggtttcggcctggggctcgacggagacctcgccgctcgcgacggactgccatttcctggccgagcgttccggcaatatcggcgtgccgattcccggcaccgagctgaagctggtcacctccggcgacaagctggaggtgcgggtgcgcggtcccaacgtcacgcctggctattggaaggcgccggagttgacgaagcaggcgttcgatgacgaaggcttttatctcatcggcgatgccgtgaaacttgccgatagcgcgcggcccgagcgcggcctgttcttcgacggccgcgtcgcggaggacttcaagctcaattcgggcacctgggtcagcgtcggcacgctgcgcatcgcaggcatcgccgcgctggcgccgctggcgcaggacattgtggtgtccggccacggcggcgacgaggtgcgctttctggtgtttccgaatatcgcggcgtgccgcgcccatgccgggctgccggagacggctgatgtgagtgacgtactggcgcatgaccgggtcagggatgcagtcgcgcaaggcctggcgaaactgcagcagcggggccccaactcctccggccacgccacgcgcgctctgttgctcgccgagccgccatccgtcgatggcggcgagatcaccgacaaaggctatatcaaccagcgcgccgtgctgacgcggcgcgccgatgcggtggtgcggttgaatgacgacgcatcgggcgagtggatcggctgcagctaa

SEQ ID NO: 667 - DNA, 507 bp, BradyrhizobiumColbertium
gtgacagccagcgtagcccgggcggacaatcgcccttcccctcgcaagcgtgccggcaatggtgcggcggctcgcgatgccgccgacggcgtcggcctcgacgcgctggccggccacgccggctatgcggtgcggcgcttccagatctggatcttccaggacttcatcaagacgctcggcgaggtggacatccggccgacgcaatattcggtgctgacgatcatcggcgccaatccaggactgtcgcagatggccgtggcaaagcggctcggcatcgagcgcgcccgactggtgcatctgctcgacagcctcgaacagcggaagctggtgaagcggatcaagtcgaagacgaaccggcgctcccacgccttgcacctcaccgcgcagggcgagaccgcgctggcgaagttcaagcggctcgcggccgagcacgagcgccacgtcgaggcgaagatcggccgggagaaccgacaacacctgctcaggatcctcgccgactttacctga

SEQ ID NO: 668 - DNA, 1806 bp, BradyrhizobiumColbertium
atgggggctgagcagcctgaaacgattgccgcgattgtggccgcgcatcgcgcggggacgcggacgccggcagagacggtagcgcggacctatcagcgcatccgcgaccacggcgacccagcaatcttcatcagcctgcgcgacgagaaggacgcgatcgcggacgccgagagactggccacggcggatgctgcgcgtctgccgctctacggcgtgccggtcgcggtgaaggacaatatcgacgcgctgggctttccgaccacagcggcctgcccggccttctcctactcgccggcacgcgactcgaccgccgtggcgcgcctgcgtgccgccggcgccatcatcatcggcaagaccaatctcgaccagttcgcgaccgggcttgtcggggtgcgctcaccctacggcatcccgagaaacccgatccgtgacgatctcgttcccggcggctcgagctcgggctccgcagtcgccgtcggcgccgggctcgtgccgctttcgctcggcaccgacaccgccggctcgggccgcgtgccggcaatgctcaacaacatcgtcgggctgaagccgagcctcggcatgatctccaatgcgggcctggtgccggcctgccgcacgctcgactgcatctcggtgttcgcactgacggtggacgacgctgccctcgcgctgtcggtgatggccggacctgacccggcggatccgttctcgcgcgaccggccgctcggtgccctcacgccgttgcctgcgagcttgcgtctgggcgtgccgcgcaacggacagctgatcttcttcggcgacaaggaatcggaagccgcttacgccgatgcgctgaagcgatgcactgcgcttggcgccacgctggtcgaattcgacctcgagccgttctacgagaccgcgcggctgctctatgagggaccgtgggtcgcggagcgctatctcgtgatcaaggatctgctcgcctccgcgcccgatgccatccatcccgtgacgcgcgagatcaccgcggccggcgcgcgactgaccgcggcggagaccttttccgcgctataccgcctgcaaggcttgcgcaagatcgccgagcggacgtttgcaggcatcgacgcgctggtgctgccgaccgcgccgacggcctatacgaccgcgcaggtcctggccaatccgatcgagctcaacagccggctcggcacctacaccaatttcgtcaacctgctcgacctctgcggcctcgcggtgccggcggcgatgcgcgcggacggcatcccgttcggcgtcacgctgctcgcgcccgcaggacgcgatgcgatgctggcgagcatcggccgcgtgttccatgccgatacgaagctgaccatcggcgcaaagggtacggcgcagcccccgctcgcagcgctcgccaccagcaccggcgacgacataccgatcgcagtcgtcggcgcgcatctgtccggcatggcgctcaacggcgaattgaccgcactgaacggacgcctgatcgaggcgacgaagacggcccccgactacaagctctacgcactcaagaccacaccgccaaaaccgggcatgctgcgcgtcgcagccggcaagggcgccgccatcgagctggagatctggtcgctgtcgccgtccgccttcggcaggttcgtcagcgcgatccccgcaccgatggcgatcggcacggtgcgccttgcggatgggcgcccggtgaaggggtttctcgtcgagcccgaagcgctgggcgacgcccgcgaaatcaccgcttacggcggctggcgcgcctatatggcggaagccgcgacggcgtag

SEQ ID NO: 669 - DNA, 216 bp, BradyrhizobiumColbertium
atggcgtcgtccgagaaagatccccggcatcacacccagaaaatgaagcaacgtctgcaggagaccgtgacgcatctgcgcgaagacatccgcaaggtcgacgagccgcagctcactgccatgttcgagacgtcggccgaggtgctgtcgggcctcgtcaaggcattcgacgattacgagaagaagaacgaagccgcctggcgcaaatcggcgtga

SEQ ID NO: 670 - DNA, 675 bp, BradyrhizobiumColbertium
gtgccgcgcgtcgaccgggcgttgtcgtcgctgcagaaggtcacgcgcgccgaggaactgcgcctgcagcttgccgacgagatcgtgcggggaacgctggcgccgggcgcgccgctggacgagaccgacatcgcacgccgcttcaacgtctcgcgcacgccggtgcgcgaggcgctgcgccagctggtggcgagcgggctggtcgaggcgcggccccatcgcggcgcggtggtggcgcggccatccatcgcgcggctcaagagcatgttcgaggcgatggccgagctcgaggcattgtgcgcaggccttgccgccgaacgcatgtcggcggccgagcgccacggcctggaagccatccacgaggagctgcgggtgctgagctacgccggcaatcccgatcgcttccacgaggtcaacgaacgcttccacaacgcgatctatgcgggatcgcagaacggctacatcgccgagatcacgttggcgacacgcgtgcgcgtgcagccgttccgccgcgcccaatttcgcaatctcggtcgattggcgaaatcgcaggccgagcacgaccgcgtcgtcgtcgccatcatgcgcggcgacaagcagggtgcggccgccgcgatgcgcgcgcatatcgaactggtgcgcggcgagtatgagatctacgccgtttcggtttga

SEQ ID NO: 671 - DNA, 396 bp, BradyrhizobiumColbertium
atggagattgatctccccgacgtgatcgcggaagtcaaagccgcgttcgaacgctatgagcaggccctcgtcagcaacgacgtcgctgtgctcggtgagctcttccgcaacgatccccgcacgctgcgctatggcatcggcgagaacctttatggctacgaggcgatctcaggcttccgcgccgcccgctcccccgtcgggctgaatcggcgcaccgcaaagaccgtcatcagcagctatggccgcgacacggccgtggcctccaccctgttctatcgcgacacggcgcccggcaaggtcggccggcagatgcagacctggatacgctttccggaaggatggcgcgtcgtcgccgcccatgtcagcatgatcgacgagccgaaagagaccgcatga

SEQ ID NO: 672 - DNA, 1395 bp, BradyrhizobiumColbertium
atgaccacaaagccggaaatgacagcctccgagatcgccagcgcggttgccggcggcaagatgtcggcgctcgacgccaccgaagccgcgcttgcgcgcatcaagcagcatgatggtgtccttaattccttcaccgacgtcactgccgatcgcgcccgcgcgaaggcccgcgcgatcgatgccgacctggctgccggcaaggaagtcggcccgcttgccggcgtgccgttcgcggtgaagaacctgttcgacgtcgctggtctgccgacgagggccggctccaagatcaaccgcgacctcgcgcccgccaagcgcgatgccacgctgatcgagcgcatggaagcggccggcgctgttctcgtcggcgccctcaacatgggcgaatatgcctacgacttcaccggcgagaacatccacgacgggccctcgcgcaacccgcacgacacgacgcggatgagcggcggctcctccggcggttcgggcagcgccgtcggtggcgcgctggtgccgatcgcgctcggatcggacaccaacggctcgatccgcgtgccgtcctccttctgcggcatctttggcctgaagccgacctatggccggctgtcgcgggcgcgctcgttcccgttcgtggcgagcctcgatcatctcggcccgttcgcgcgctcggccgccgatctcgcgctcgcctatgatgcgatgcaagggccggacgcggaggacagcgcctgcacgacgcgcggcctcgagccgacgctgcctttgatcgccaatcccatctcggacttgcgcattgccatcgccggcggccacttccagaagaacgtgtttccggaagcggtggaggcgatcggccgcgttgccaaggcgcttggcgcaacgcaggtggtcgatatcccggaagcttcgcgtgcccgcgcggcggcctatgtcatcaccacgaccgaaggtgcttcgctgcatctcgatcgcctccgcaagcgtccgaacgatttcgatccggcggtacgtgaccggctgatcgcgggcgccatggtgcccgccccaatggtcgatcgcgcgcaaaagtttcgccgctggtatcgcgcgcagcttgccgagatcttcaagtccgtcgacgtgctgcttgcgccggcgacgccctgcaccgcgccgaagctcggccaggtcaatttcaatctcgacggcgtcgagctgccggtgcgtgccaatatcggcatccacacgcagccgatctcgttcgtcggcctccctgtcgtcgccgtgccggtgccgctcgagccgctgccgatcggcgtgcagatcatcgccgcgccctggcgagaggacatcgcgttgcgcgtcgcccacacgctggaaaagatgggcgtagccgccgcgcccgcgccgaggggactttga

SEQ ID NO: 673 - DNA, 180 bp, BradyrhizobiumColbertium
atggccgaacccctggacgactatatcgacgccgtatcgaaagctctggcgcttccgatcgaggaggcctggcggccttcggtgcgcgccaatctcgacgtctcgctgcggctcgcccgcctcgtcgacgaattcgcgctgccggacgagaccgagccggcaccgatcttcacggcctga

SEQ ID NO: 674 - DNA, 1767 bp, BradyrhizobiumColbertium
atgaccgccccgcctctgctcgacgtccaggatctcacggtcgagttcagcacccgccgcggcatcgtcaaggcggtgcagcacgtcaacatttccgtcgccaagggcgagacgctggccatcgtcggcgagtccggctccggcaagtcggtgacgtcctatgcagtgatgcgcatcctcgaccgcgccgggcggatcgccgagggctcggtgatgttttcgggcatcgacgtcaaggcggcgaccgaagaccagatgcgtgacctgcgcgggcgcgaagtctcgatgatcttccagaacccgcgcgccgcgctcaatccgatccggaaggtcggcgaccagatcgaggatgtgctgcgcacccatgtgcagcaggcgatggtttccgatcgcggcgagaaggccatcgaggcgctggagcaggtcaagatagcccgtccgcgcgagcgctaccacgcctatccgttcgagctttcggggggcatgtgccagcgcgtcgtcatcgcgctcgcgctcgcctgcaatccgcagctgctgatcgccgacgagccgaccaccggcctcgacgtcaccacccagaaggcggtgatggacctgatcgtcgagctgaccaagcgacgtgcgatgtcgacaatcctgatcacccacgacctgggcctcgccgccgcctattgcgaccgcgtcgtggtgatggagaagggccgcgtggtcgagaccgccaaggccgtcgacatctttgccaacccgcagcacccctacaccaggaagctgatgcgtgcgacgccgcggctcggcgtgtccttgcgagacttgctgccggaggaggagggcgtagcggcgcaatctccgtctgtcatggccgggcccgaaccggccatcgatcgaacttcgaaagacgcctctccctcgatggggggtgacgagagtgcaaggcccctcctcttcgtcgacaagctcgtgaaggaatacccccgccagggcgcgaccgccgtactgggcaaattgttcagccgcaggccgccggtcgagcctgacgtgttccgcgccgtcgacggcatctcctttgccgtcggccatggcgagagcgtcggcctggtcggcgaatccggctgcggcaaatcgacgacgtcgatgatggtgatgcggctcctggaccagacctccggcctgatccagttcgacggcgaggacatatccgccatcgcaccatcggcctttgcccggatgccgcagcgcagccgcatccagatggtgttccaggaccccaccgacagcctcaacccccgcttcaccgccgcgcgcgcaattgccgatcccattatgcagctcggcgacatcaagggccgcgacgcgctgcgagcgcgctgcgaggaactggccaccatggtcggcctgccgcacaatctgctcgaccgcttcccgcatcaattgtcgggcggccagaaggcccgcgtcggcatcgcccgcgccatcgcgctgcatccaaaactcgtcatcctggacgagccgaccgcagcgctcgacgtctcggtacaggccgtggtgctcaatctgctccaggacctgaagcagcgcctaggtatgagctatctgttcgtctcgcatgatttgaatgtggtgcgcttgttgtgcgatcgtgtcattgtgatgcggacgggacggatcgtcgaggagggctcttccgagcaggtgctcagcgatcccaaggacgattacaccaaggagctgctgacggcgatcccgcatccgccgttgccggtgcactga

SEQ ID NO: 675 - DNA, 900 bp, BradyrhizobiumColbertium
atgagcaccgtttcgcctgccgttgaacctgtcggtcccgcgcggacctcgggatgggtcgcaatcctcgatcagacccgctacgtgctgagcgagaacaaggtcaccggctttgccttcgcgctactggtcctgatcctcgccgccgcgatcctcggcccctacgtggtcccctacgatccgctcgcctccgacaccgccgccgccttgaagccgccatcggcggcgcattggttcggcaccgatcagcttgggcgcgacattttcagccgcgtcatcgtcgcgacacgcctcgatctcttcatcgcggtcgcctcggtcgcgctggtgttcctgatggggggcctcgccggcatcgcggccggctatttcggcggctggaccgatcgcatcgtcggccgcatcgccgataccatcatggccttcccgctgttcgtgctggcgatgggcatcgtcgcggcgctcggcaacaccgtgcagaacatcatccttgccaccgcgatcgtgaattttccgctctatgcccgcgtcgcgcgcgccgaggccaatgtccgccgcaacgccggcttcgtgcaggccgcgcggctgtccggcaacggcgaattccgcatcctcctggtgcacatcctcccgaacatcatgccgatcatgatcgtgcagatgtcgctgaccatgggctacgccatcctcaacgccgcgggcctgtccttcatcggccttggcgtgcgtccgccgactgccgaatggggtatcatggtcgccgaaggcgccggcttcatggtctcaggcgaatggtggatcgcgctgtttccgggccttgccctgatgatcgccgtgttctgcttcaaccttctcggcgacggcctgcgcgacatcgtcgacccgcagcggaggacgtga

SEQ ID NO: 676 - DNA, 1014 bp, BradyrhizobiumColbertium
atgctgaccatgatcgccaagcgcctgatgttcgcgataccctcgctgatcggcgtcgtcatcgtcaccttcctgctgacgcgggcgctgcccggtgaccccgccgcctatttcgccggtcccgccgcaacgaaggaagccgtcgagcagatccgcaagaaactcggcctcgacaagccgctgatcgagcagttcttccgctacaccaatgatctcgcgcacggcgatttcggcaactcgctcaccacgggacaaccggtcgcggccgagatccgcaaccgcctgccggcctctgctgaactcacgctgctcggcctgttcgtctcggtcgcgatcgcgatcccgctcggcgtgctcgccgcgacgcggccggggtcatggatcgatcatctctgccgtgtcacgaccacggccggcgtgtcgctgccggtgttcttcaccggcctcgtgctggtctatgtgttctacttccgcctcggctggtcgccggcgccgctcgggcgcctcgacgtgttctacagcgcgccgccgaccgtcaccggcttctatctgatcgacactctggtcgcgcgcgatgtcgaggcgtttcgctccgcgctgagccagctcatcctgcctgcaaccacgctcgcgatcttctccctggcgccgatcgcgcgcatgacgcgcgcctcgatgctggcggtgctggcttcggagttcgtgcgcaccgcccgcgccagcggcctgtcgccatcgaccgtcatcgtcacctacgccttccgcaatgcgatgctgcccgtgatcaccacgctcagcatggtgttctcgttcctgctcggcgccaatgtgctggtcgagaaggtgttcgcctggcctggcatcggctcctacgccgtcgaagcgttgatctcgtcggatttcgcgccggtgcagggcttcgtgctgaccatggccgtcatgtacgtgctgctcaatctcgtgatcgacattctctacggcgtgattgatccgcgtgtgcgactggaagggtag

SEQ ID NO: 677 - DNA, 2118 bp, BradyrhizobiumColbertium
ttgggtcagcgccggtgcgtcgttgatcccgtcgcccaccatgccgaccttcttgccctcggcctggagctccttcagccgttccgccttctggccgggcagcacttcggcaagcaccgtatcgatgccgagctgcccagcgatgcgttgggcggtttcccggttgtcgccggtgatcatggccacatcgacaccgcgctcgcgcagcttcctgactgcggcggccgaagtggggcgcggggcatcggcgatcgcgatgagcccgacaagctcgccgtcccgcgccacgtggaccaccgtctgacctctgccttgcagccgcccgatctccggtgccagcggcgacagatcgatgttgccttcgtccatgaggcggcggttgccgagcagcacgatgccgccgccaacctcggctcgcgctcctcgtccttcgagcacctcgaaacccttcggatgctcgacggccaggccctccgaccggcgcaagatcgcctgcgccagagggtgatccgatccctgctccacggcagcggccaatgccagaacctcgtcctcgctcgagccgggcgcggcgaccacctccaccacctcgggctgaccgagcgtcagcgttccggtcttgtcgaacacgatcacgtcgagcttggtcgcctcctccagcgccgaggcgttcttgaacaggatgccgttcatggcgccgagccccgtgccgaccattacggccatcggcgtggcaagcccgagcgcatccgggcaggcgatgacgaacaccgtgatggtgagcgtcagggcgaacagcaggggctcgccaatccaccagaaccagaccgcgaaggtcgtgagcccgatcaccatggcgaccagcacgagccactgcgaggccttgtcggccagaagctgggcaggcgccttcgagttctgcgcttcctgcaccagcttcacgatctgagcgagcgcggtgtccgcgccgaccttggtcgcgcggtatttgaaggtgccgctcttgttgatggtggcgccgatcacagcatcgctgggccccttcttcaccggcatcgactcgccggtcagcatcgactgatcgacctgcgactcgccctcgatgacctcgccgtcgaccgggatcttgttgcccgggcggataacgacgacgtcaccgaccagcacctcagcggtgggcagctcgatctcgcgctcagcccgcagcacggtggccatcggcggggcgagatcaagcagggcccggatcgcctccgaagcgccggcgcgggctcgcatctcgagccaatggccgagcaggataaagacgaggaggacggcgaccgcctcgtagaactgtacgccggagaagaagaaggtcgctccgacgctgaacacgtagcgggtgccgaccgacagcacgaccagcaccgccatgttgaggacgccgttcctcagcgcccgccaggcggcgaccaagaacggccagctcggatacacgacggcggcggtggcgagcaggaacagccaccgatcgaggcgaagcccgaagggcggcgccggcggcgtgaacatcccgcccatcggcgagtagacgaagatcgggacggtgaagatcagggcgatccagaagcgattgcgcatgtcgcgcaccatcgcctgcatgtccatgcccgccccgtggcccatctcgtgggccatggtttcccccttcccggaagccgccgcctgctcgccgggcatcgccgctgcctcgtgggcttggtggggcgcgtggccggcgtgggggcggtgcgagtcggccggaggcgctaccgtcaacgcctcgcccggcgggtcgtcgggctcgcagacgtgcttcggcagcacctggccggtgcagtggtaaccgcactcgcgtaccctgctcttgatcgccttgagaccggtgagggtctcgtcataggcgaccgtcgcgctgccggcggcgtagttgacctcagccttctccacgccaggcagacgagcgagctgcttctccacaccgagcgcgctgagcgccgagagcatgccggcgacttcgattgtggctgtcttcatcgtgccatcctccttgcagacgcgccgctggcgctcatgaggcaatcatgccgttcttga

SEQ ID NO: 678 - DNA, 162 bp, BradyrhizobiumColbertium
gtgcgcgccgacgacaagcgcttggcgcgtctcgacctcatcaaggacctcctgtcgcgcttgcactacgacgacaaggacgaggcagcgctggcagtgaacccggacatcatctttgaataccaggaagcatacctcaagaacggcatgattgcctcatga

SEQ ID NO: 679 - DNA, 195 bp, BradyrhizobiumColbertium
gtgtggtactgggtcgcgacgagagatgtaatcggctcgatccagtcgcgctgcaacgtcgcgccaggactgcgcagctcgacgcgcttggccgcgaccgtcttccgttatgctttcggaacgatcagatccgggagtcaccttgccgctgcggatcgctaccagcttgcgcgcagcgagcccatgccagcgtag

SEQ ID NO: 680 - DNA, 612 bp, BradyrhizobiumColbertium
gtgaggcgcccgggttcgcgagccggcgactttctcgctgactgcaactacagtctgaacatcatcatcaacaccgcaggtaccggagaataccgccagctcggacacgagagtgtggtcggcgtccaagaagccgtcttgatctccagtgccgaagaggtcagctgcgtctatccctgcgccttgcggtctctgctgatcggcctgccacgccagtcggtctcggcaatggtccgtaatcctgaaaccatgttgtgtcgcccgctgccgtcatcgggcgcgctgcggctcctcctttcctacgtgcagtccaccgacaagatgagccttgacaccccagggcttgccccggctttcgcgacccacgtgcaggatttggtcgcgcttggaattgtggccacccgcgacggcaagcaattggcgcgcggcagtggcctgcgcgctgctcgtctagcggcaattaacctcgatatcggcaagtccctcggcgatagcgagttctcgatcggcgcacttgcgctgcgccatggcgtgacgccgcgctacatccaaaggctctttgagaacgacggcacgacgtttacccacccctcaccgagcagtgattgctga

SEQ ID NO: 681 - DNA, 480 bp, BradyrhizobiumColbertium
atggatatcgatcccaaaactctgcgcgggcatgtgaatcggctcaaagccaatcgtgtcgcttcgccgatcggcaaggtcaagaccggcgcaaccgaaatcatccgcaagcatttcgacgagcttgagcgcctgcatcatgaagacggcgcgagctggaccgaaatcgcgagcggtctggcggcgcagggcgtcacccaaggggagggacagccgcttacggggcggcggctgacggccttgatgcacaacatccgaacacgggcggagaagctgaagggcaaggcgatcccgcgcgatcggaccaagatgccggccgaaagaccccaacaggatggccggaccgccaggaagaccctcgcgctcagcgcggagatgatgggcccctccggcggttcgctgatggacgagaccattagtgaagacgagatccggcgcaccgagcttgccagacacgcccacctcctccgcaagcgctga

SEQ ID NO: 682 - DNA, 744 bp, BradyrhizobiumColbertium
atgccacgccttttgctcatcgcccaggagaccggcggtgtcggtaagtccacgctcacccgcggggtcgccgaagccgtgcccgacgcgccgatcattgagctggaatccacgccgcggatcctggaatacgaccacggcaaggccaagggcttgaagcgggtctcgcatttcccggtgcgtgccgaccgcgcttcgatcgaccgcaccggcggccaggccgcccgcgccgagttcgacggcccgatcaacgccatggtcggcgccgcattgccgaccatcatcgacgtcggcgccaacaccgcctcctcattgctggcctccttcgacgacgagtacgtcgcaggcatcgccgacagcgggatcgagatggcgctggttgtggtcgtgaccgccgacgcggcggcgttgagcgacggcgccaagctgctggcgtccgccaagcgctgggccaaggcgcgcttcgtcgtcgagaacaagctgcgcggcgacgtcgaccccgcgatgctcaagcgcgtcgccgacggcgcgctggtcacggtgctgccgaagttcgagttcgaaccgcgcacgctcggcttcctgcaggccacgggcctctgtgccatcccgcagttgaagacctccgacttccagaaggagtacggcttcagcgaggcgcggcgcatggtgagcgacctcaaggcctttcgcctggcggtgatggaggcggttcgcccggcggctgtgtggcttgcgtcatga

SEQ ID NO: 683 - DNA, 585 bp, BradyrhizobiumColbertium
atgagccagcgccttgcaaccctgcgcaagcggttcgccagcgcaaaggcggacgccgatgcggcgaaccgcgagatgcgccaggcgagcgccgtcaagctcgccgagcttcgcgctctgccggaccctgccgcacgtctggcagggctgaaggatccagcgctgcttccctatgaccgcgagatgctggagcggacggtcgcggatttgttgccgcggcggcgcatccagcttccgcgcagggtcggcggcttcgcgcgatccgtgcttcggcatgcccgttaccattggcgcggcctggtgatggtcaccatgatctcgatccctgtcatgatgatcggcggttttgcggccaacaacaccggttacacgacggttcatttcgaccgggacctcgacctcatctggacattgccggacgggcataccgaactccatcgactgacgaccggcaccgcggtcgtcgtgatgggtcggactgcggctggagacgttcggctgcggatctggtcgccagcagaaggccacctcgacgccatcatgctggcaaatgcctacgcgcggcttgcaatccccaaggagtaa

SEQ ID NO: 684 - DNA, 1635 bp, BradyrhizobiumColbertium
atgttctggaagatcttcgtgccgctcaccatcctggccttcctgttcggttttcccgtcgcggaatttatggtgcatggctttgacgcctcgctgtggccgaacacgatccagccgccgtccgtctggtttacggcgatgcgggacagttggggatgggattcgctgcttgcctaccgcgacatgacatttggccagaccaaggctttgggctcctatggccggactgctctcgcctggatcctggcgggaccgctgctggccttcgtcgcgtgctttgtgccgaactacggaccgcggcgagatcctcgcggcacctacggcgatgcccggtgggcgagccgcaaacagcgggcgcgcatgcgcatcggcctcgagctcggcctcgatcccgacagccgtcggccgatccgcgtctcgaccgaaagccatctcgtcaccatcgcgccgccgcgcaccggtaagacgtccggactgttgatccccaatctcgccgtccccgacaacaagggctggtgtgggcctgccatcgtcatcgatcccaaaggcgaggcctatcgcgcggtggtcgcacgccgcaaaaccctcgggcgaaccgtgcgctgcctcgacccgatcgggattgtcggcggcaccgatagctggaatccgctggccacgatggacccggcggacatcctgcatctgcagcgtgtcgcccgcgcgttgttgccggagcacgccacaggcgaagcggtgtatttccagaaccgcgcggtcgacgtcatcgtcggcgccttcctggctgcgcacgccatcaagcgcccgatgcccaaatgtgccgcatggctgttgtcggacgtgtcgcgcttcgaaaaggcgcttgcgccattgaaaggagcagccgcggcagccgccaagggtgtgcttgccatggatccgaaagggcgggactcgattctgtcgaccgcagcccaggcgttcagctggtgcgccgacgaaagactgcagcgcctgacggacaagagcaccttctccatgtcggacgtgacgtccggcaacatggacctgttcatcacattgcctgccgaggacatgaagacgctgaccccgctgatgcgatggttgctttgcgagctcttcaccgccgtgcgacgccgccgggcacgggagccgatcatgtgcttcatcgacgaggcggcgacccttggccgcttcgaggaactcctgatcgctgccggcgagcttccgggacaaaatctgcggctctggactttctggcagagccgtagccagatcatcgacatcaacggcgccgacggcgcccgcacgctgctcaacacggcggagttcaccacctattccgatctgcccttgatcgatccggacgagcgcgagtttctctcgcggtcgatcggcgattacacgctgatggacatggtcgagaccaccgacgagaaaaccggtaacacctcgcgagcctttcagcccaaggcggtgcgtttgatgagcgaggatgccatcgggcaggtctcgacgacggacctgatcgtgtttcccaacagcaagcggtacaccaagcggccgatgatcctgcgcaagaccgcccatagcgactcccgcctgactagtcttgtcgtctccgagccgcgctga

SEQ ID NO: 685 - DNA, 135 bp, BradyrhizobiumColbertium
gtgtacgagaatcgtatcgatcgcgaggccgacgactatttgactgtccaagtcgctggcgtcgagcgcagccagtccatcgacaatttcatctggggccccggcccgctgccgcccccagccgctctaaactaa

SEQ ID NO: 686 - DNA, 261 bp, BradyrhizobiumColbertium
atgcctgagagcaagaaggaactggccaacaagctgatgcgggatatcgtgctcatcgacgagcatcgctatccagactggatggctgcaggtcgggactgggccaaaaagctcggggccagccatccctacaacgtcgtgcacttccgccctggcgaggacctctcgacgttcggcgccaaactcaccgaagcggatcatgccaagctcgaagcgcaaggcgccctccttctgaggccgatggtccaaggacgggcatga

SEQ ID NO: 687 - DNA, 1200 bp, BradyrhizobiumColbertium
atgaccgtgatgaccctgacccgcaacgagcagcctgttaccagcggctttcgcgttgatatctcgcgcggcgagcgcgtcggccgcgtgtcttcggagtggttttcccgccccgatgacgagcgttatctcagcctgaccgatcttcatgacgctgtccgccgccgcgcggactgcgcccagacccggaccgtggaaagccgcgccgtgcgggttgaggcaagccgcgacgatgcggagcggctcgccttgatggtgccgggccgcagcgagccagtccttccgacgcattggagctttgggcagttgtgcagccttgtcggtgccccgacctcttacatgcggcagcttcccgcgccgctcgccggcatcaacctgcaacacggtctgctgtcacatcgtggagagctattgaagacattggaagccgatgatgggcgggtcgagcttcgcgcggtgacgggaccggactatggccgcatctgggatcatgaactggcggcagccgtgatgaagatcgccggcaacgggacaggcgacacgagatggaaggtcccgggggtgctggattgggcgaccatgacccacaatccgttcgttgacatcaccaaggacaccacgacgctttacgccagtgaccgcgacgtcttcctgtttctggttgatgataccaacccgatcgaagcgggacggcttccggacggatcgccggatttgttctttcgtggcttctattgctggaatagcgaggtcggcagcaagacgctcggcattgcgagcttctatcttcgcgcggtctgcatgaatcgcaatctctggggtgtcgataatttcgagcaaatcaccatccgtcattccaagttcgcggcgcagcgctttgcgcacgaagcggcgccagctctcacaagctttgccaattcctcggccacaccgttcgtcgcgggaataagagccgcgcgggagcggatcgtggcccggaccgaagaggaccgagacagcttccttcgcaaccgcggtttctccaagtcggagaccgctaagatcatcgaaaccgtcctgcatgaagaaggtcggccgccggaaagcgttttcgatttcgtgcaaggcatcaccgcgctggcccgtgggaaggctcatcaggatgcgcggcttgagattgagggcaaggcaaagcggctgttggagcaggccgccgcttga

SEQ ID NO: 688 - DNA, 114 bp, BradyrhizobiumColbertium
ttgttcccatggctcgacgcgctacaggaagagttgaagaccttcggcaagagcctcgttcatgcttttttaggacgatcgctaagggctccgccctcgcgcgcgcaagggtga

SEQ ID NO: 689 - DNA, 369 bp, BradyrhizobiumColbertium
atgatcgaacggcaattgaccgtcgcagccctcgcgcgggaagcacgtgtcggtcgtaacgcgatctacgccaatcaccgcgatatcctcgccgagctgacccgcgtccgtcagcagcggcgggctcccagtcgggtcgccgccatcacggagaaggtcgccgaacagcgcatcgccgtcgacaccatgcagggtcagcttcgtcagctcgcgaccgagaatgccggactcctgcgtcgcgcgatcgaagcggagcgccgtgccgacagggccgaacaccgcgtcgcgcagttgacgaaggagcttgatcaccatcgtcgccccaggttgctacgatcttcggtaggtgagcacggagacgatagctga

SEQ ID NO: 690 - DNA, 1893 bp, BradyrhizobiumColbertium
atgaccatgcggccacacgctgattccacccgcgatatcgatctacgacagaagatttcggtacgatcgctgtggtcagacccgcaatggcacctcgatggtcggaggtctgacctgcggagatcgcagttccagatcgattgggatttcaaactcccggacggcagccgcttcacagacccttgctgggccggctggctggaagatgcgcgcatctttctgtggtcgcttcgcatcgatccgccgccaggccggcggcacgctcgcgcgagaacgctcgttgcagcggccgtcaagctccgcatcctgatccgatggatggccggcgaggcgatgcaaagctttggcgaactcgatcgcgatgccgccgcccgattcatgcacgacattgccgagcgacgaagacacaatggcgcgctgatcagacctggaacccgtcacgcctacgctaatcttttgctcgccctctaccagcagaggcgcaagctcgcatacccaccatcagagcgcccgttcgacgaaggccgcgcgagcgcctattccgggttcagtcgccacaccgtacagcgcttgccattcacgcccgacgctattgccgttccgctcatctcggcagcaatccggttaatcgggcagccagccgacgacgtcattgcgctgcgcgaccaggccgtgccgtttcgcatggatgatcggggtcgctcctttttcgttcatcggcaggccgtccgaacgctcgtttcttcatttcgcttttacacgatcgagggcgagaatacgccttggcatccgccgctgacgcgaacgaggcacctgcgggcgttgatcaacaggatccaagaggcttgcttcgtcaccgttgcctatctggtcggcgcaagagtctcggagattctgacgcttgatgctgactgcgtcgaggagcatctgtccgcagataagacggaagcctttgcttatctccgtgggcggatattcaagaccgccgcaaatgaagccggcacgccacatctctggccagcgccgccgcccgttctgcgcgccatcgacgtcttgcggcgcctgtcagagcccctgcgtgctcggactggccggtcggacctgtggctctccatcgccgggaacggcatcatcgatcgccgcgtgccggaggtcgcaaccggcagttctctcgttattcgcctaaacgagagattcgcggctttcatcgacatgccgcgcaatgacgatggaacgccctggcgtctgaccacacatcaaggccgcaaaaccttcgcccgtttcgtcggcaagcgcgaccgcaccggccttcacgccttgcagcaccatttcgggcacgtgacacgcatcatgaccgacggcgcctatgtcggaacggatttcgatctcggcgaactcgtcgatgcacaaacgctcgaggagacgcgatccgcgctcgaggagttgctcaccgcgtcgcgtctcggcggcaaggcggcacgcatgttgtcgtcgcggtcgcgctttcgcggccgtacccacgacggcgaactcacagcttatgtcgatttcctcatcgaggagagcggcatgcggctcggcgtctgcgactgggggtattgtgtctatcgcgccgagtccgccgcctgcatgggggacgaccgtggtccgaacccacagtggcgcaccgagagcacttgcatgagctgcgccaacttcgcggtcaccgagcggcatcgcccggtctggcaagcgcgccttgaccgcaatctcgctttgctcgccgacgatcgactcgatggatcgagcatcgctctcgccaagacgcgcatcgccgagtgcgagcgtgtcctttccgatctttccgccacaggagaagcccgtgccgaagatgacggccgcaaacccacttga

SEQ ID NO: 691 - DNA, 1827 bp, BradyrhizobiumColbertium
atggccgtgcgtaaaaggaagccgatcaatcggcgcatcacagttgcgacgccaaagaatgcggcaactgatcttgtcgccgatacggtcatattctccgatgccggaggccggccaatccaacggttcgatcctgagcagctttccggcctgcctgccgatctgcgcgggctcatggtccaggctttccgggagcatggcgtcggccagatgcctgcgacgcgccgaacgacctgggcagcgatccaccgttttgcccgctacgtcgtcgacgatgggacgatcaagacagcgggtgatgtcaataccgccgcgctcggccgctacgtgctctggctcagaacacaggcggcctcccgcgcgccgcgcggtgcgcacgccacggcctttgatgtgcttcggccgttgctattgtggtgccagcgcaatcgaccaggagcgctcgcgcgtgatcttgagattccctggaatccgtttcccggcagacgaatgcatcagcaaccgcgccggcggctgccgcccgatcagatcaaggcgatcctcagcgcctgctacgaggagatcgatgaggtttgggcccggtttcaacacgggcaggatgtcatccggcgcaccgagcttccgcccaagatactgcgaggtcagggactcgatcgatggatatggcggatcagccgcatcgagggcggtcgcatgcccgacagggctgttctcgaagaacacgggataaagtccgccatgctcgtgaagtcttggggcggctatcgcaccatcgcgcagtatcttcacatcacaaccgatacgctcgttccgttttttctggcgatcgctatccagacggccgccaatcccgagccgttgcgccacattcggcgagactgcctcgttccgcatccgctcgacgaacatcgcgttatcattgactggaacaaggccaagaccggcgcccggcttcagaaggcgcagcgccggtcgttcgatcggcgccgacgatacgcggcgccgaacctgatcgagatgatgctggccttgaccgaaccgctcctcgtggacgcaccgcccagccagcaggatcgggtgttcctgacgcgtagcatctattccggccccacccgtcgttcgctccgcaatcgcacggaggtgatcgagcactctgtcctcagacgggcgatcctcagattcacgaagcgcgccaaccatcgcatcgatgagtggaatgcagcacattccgacagcccgcgtttgcggatcgccagctttgcgcccgctctgtttcgtggcacggtcgcaaccgagcactatcgcgcctccggcggcgatattctcgtggcccaatcgatcctcaatcatgccaacgccgccacgaccgagacgtacctcaagagcgaggagacgacgcgctttcagcgccagacgatcgctcgcttgcaagacctgatggtcgcatgggttcgcgggttcaagcctatcgtcccgtcgccagagcctgaccagcttcgcggtaccgtttccttcggccatgattgtctcgcgccggtcgctgccgaccgagatggcgccgagcgtctgtgcccgcatttcggcggatgccttgcgtgtcccggcctcgtaatcccaatcgacagggaacgtctggcgcgcgtcctcgccgccatcgatcggttcgagcaagcccgcagccggctcgatccccgacgctggaacctcctctatgcgccgtcgtggcggattctcacgcaggacatccttccggacttcccggcggcgatgcacgaggctgcgcgtgcgctcgccaacggcatgcccgccttgccggagttggaatga

SEQ ID NO: 692 - DNA, 1161 bp, BradyrhizobiumColbertium
atggtttcgattgtgcgggccgtgcccggtgttgaagggattccggcaggctttcccattctgctcgacgcgcagatgtcgattgtcgagcctgccttcggctatctgatcgaactcgccaccattcccggccgctcgcatgcgatggagacgttgaggacgtatagcgagcacctgcacgactggttcgatagcctggagcagagcgagctggattggcgcctcgccgatgaggaaacgatcgccacctaccggaaccggatgctggcaacgccgagccctcatacggggcggccctatgcccggtccactgtgaacgatcgtgtccggacgatctgccgcttttattcttgggcccatcggcgcggtctgatcgaggcattgcccttcgactacgtcgacatatcccttcgctcagtgcatcgacaaggcatgctggcgcatctggatcatcggcctgcgacggtgatggcgaacattctgacggtttcggaggttgaacgtctgccgcgaccgctacgcgtcgatcagctccaatccctgtttcggcatctttcgtcgccctatgacctgatagccgagtgggctttggccaccggcatgcgccgcaaggagctgtgcggcttgcagctacatcaggtgccggacgtcgctcacctggatatcgacgtggacccacttgtgggagtgccgctgaccgttaccaagggcgaccggccgcgcaccgtttatccgccgctgcggctgatcgacaggacccactggtatgctggagagcagcgtgcggcgctggtgaagctccgacgcagaacgcgccccggttaccgtccgtcatcggcgctgttcctcaacagcaacggcgatcccgtctcgagagcgaggttttccgctgcgttcggtgcggcctttcaagcggcagggctgacaggatctggccattggttgcgccatacattcgcaatgaccatgctcgtgcgcctgcagaagcaggcggcaacgacgcccgacctcaacccgctgaagatcgtacaagtcctgctcggacacgcctcgattcaatcgacggcaatctatctgcgttgcgtcgagcttcatgcggacacgctcgccgagagcctggcctatctctacggcgagttggtgcctcatggccgtgcgtaa

SEQ ID NO: 693 - DNA, 192 bp, BradyrhizobiumColbertium
ttgcgggaaggcgatcgaggcacttgccgtccctcgggcctgttccgtccattcgaggttgcagaggacgcggcacatcaacgaactgatcgaaatatcatggctgcgatcatccgaccgtcacaaggaaacggcctcactgaggacaaggacgttcgctggcgcatcaatgatgacaaagctccgagatga

SEQ ID NO: 694 - DNA, 1980 bp, BradyrhizobiumColbertium
atgtctgccaagaaatttcaaacactcgccgcaagcggcgcggaagtcctgattccgctcaacaaactgaagaagtccccgaaaaatgcgcgcaagacgccgcacagcgaagcgtccatcgaagcctatgcggccagcatcgccgtaaaaggcattctgcaaaatcttgtcgttgaaccggaattggatagcgagggcgcggccaccgggttttatttcgtcaccatcggcgaaggccgcaggcttgctcaactcttgcgcctcaggcgcaaggagatcaagaagaccgagccgatccgctgcgtcatcgataccgccaatgatccgcacgagatcagcctcgatgaaaatgtcacccgcgaaagcatgcatcccgccgaccagttcgaggccttcaagaagctcgcggacgaacgggggttcggtgcggaagaaatcgccgcccggttcggcgtcacgccgcatctggtccggcagcggctgcggctgagtagcgtgtcgccgcgtttgatcgatgcctaccgcaacggcgacatgggttttgagcagctggtcgcattcgccctgatcgacgatcatgacaggcaggaggaaatctatagccgtctgacctatagccgcgatcccgctacgatccgacggatgctgacagagaccaatgtcgccgccgccgaccggcgcgcgatcttcgtcgggcatgaggcctacattgaggcgggcgggaccatcctgcgcgatctctttaccgaggatcgcggcggttatttcgaggatgcggtgctgctggaccggcttgcgctggaaaagctgcaacaggtcgcagccaccttgcagacgaatgaggggtggaagtgggtagaagccaacctcgattttccgcacggtcacggtctgcggcgggtctatccccgggaagccgaactttcgccggagaatcaagccgcctatgaggccgcccagacggaattcgacctcctcaccaagcagcacgagagctttgaggaactgcccgacgatgtcgatatccgcttcggcgaacttgaggccgagatcgagcgctttgaagtcctgcgcaaggcctacaacgccgatgacatcgcatgtagcggtgcgttcgtggttctcaaccatgacggtggcgtccgcatcgagcgcggctttattcgccccgaagacgatatcaggcagaaggccacggccagaggcgccgcacaagacgatgaggaggatgcggccgaatgcgaagacgatatggaaaccggcctttcggacaatctggttgccgacctcacggcgcaccggacccttggccttcgtctcgccttgtcggggcaacccgacgtcgcccttatcgctgtcacccacgcgatggtcgcccagacgttctatcggggagccgaggctaatgtcctcgatattcgtccgggcagcttgttcctgggctctcatgcaaacggcatcggggataccgcagcgggccgatcttggttggatcgccatgcgcgctgggcggcgcagttgccgcgagatgtcgccgatctctgggcgttcgtcgttgccctcgattacgacagtcgcatggcgatctttgcgcattgcgtggctttgaccgccaacgcggtcaaattgccgcgcggtcatcgcccgcgtgcgctggcaaccgccgacagactggccgaagccgtagctctcgacatgaccggctattggcgaccgacagtgcgaacctatctcgggcgcatcaccaaagcgcgaatcctcgaagcggtgcgggaagccgtcggcgctgaggcagcggaccgcatggccgacatgaagaagccggacatggcggacgctgccgaacaattgctggctgcaacggactggctgcctgcgctgctgcggacaccgcaagccggccagcaggacgtgacagcatcagcggtggatgctcccaccgacgggtctgcgaacgcctgtgccaacgcggccgagtga

SEQ ID NO: 695 - DNA, 546 bp, BradyrhizobiumColbertium
atgctcgcccggtatccgcattgctatctggtcaaagcggactatccgagccttccgcgtatcgaattggccgaatacagaacgtgccgctttgatgacgtaccgctgatccgcgtcagcgagagggctgcgggcgggctgatcgggggtcgccaagcgtacatgacgacttttctagagcatggtgcgacgttggttgagggcgatggcgaaatgccgttcgcgacggggcgggacgtgatccgttccctcgtgaacaacggttggcatttcttgacggtcgatgacgcacggcacgttctcgatggccgcgaaatcgccaacacggtgggcgcctatctcacaacgaacggcgactggctgtccgatgtggagaaggacgctgacgcaatcgggatcgccggaagtctgttcccgttctgcgagcaggtgatcgcgagccgggctgcgatcctcgtgatctatacgccggggctgccgaggccgctgaggctgtggcgtctgagcctgaagtggatcatgccgccgcttccgccggtcgcctag

SEQ ID NO: 696 - DNA, 1548 bp, BradyrhizobiumColbertium
gtgcgacagaagatcaaattttattcaaaactgcggagcgcgtttcgccgacctgtaatgtccgctcggctaatccgcatcgtcactttagttggcagaggaagcaatatgctctttggaaggcctgatatttttggacatcgcgacagcgcgcgaatttacctggacgcagaccatttggcgaatatgggcgaagagcgcccggacgttgcaattcatgtgatccacgatcgattcggcctcagccgggttccgatcgtttactacaatgcgaagttcggcgttccgccgattcccagcaatccaggcgttctcgcagagtggcgcgcgaaagactttcaagcggtcacagaatttcagctacacgcccgtggcgtgagacttgaaatagctcagggacagggatttcaacggggggattggatcgccatcgttccggcgcatgacgacgaaggtgtagtaggcaatccggaccaaggattgattaccgagatcctgaggacggcgctccacgctcaatgtgtgcgagcgaaccgcgtgcttcagatggcgcaatttagagcggcgcgggaaagagacccgcacacgcagttcaacacaactgatcgggatcagttgaagaactcggaacttgcagaagtcgagagcgtctttcgaggcatcagcgatctatatgatacgcccgaactgcgtgaagatcgtgagcgcaacgtgaccatgggccacgtcgaaacgcaaggacgagaccacgtcaagacctggttcaagcagattccgaccggcatcagggcgcaggccaacgtggaaattctttgctatgagcagatttacggtcccttcagctaccaggcggtcgccgaccgggagctacctgtcattagcgtactgcgccgagcccacctgagagcactaacggtgcatcgtatcgcgcgggaaactgccgaatttcaagtggcgaacggcgcagccgtgagtgccggaataaaggcgcgcctggattacggcgaagaattcgatcttaacctctggggctgctttattgcggcgctctatggcggcatcaacccgactgcactgtacggtgaattcgaatcgctgaccgacctctttgaccttgccgcgtggctcggctatttcgcccgtggcgattatgatgaactgccgcccgaaatcgctgtgactttgatcaattgcctctcatcgaagccgaggtttgcggtcattgaagatgatattgagcatctcgaaaagatctatacagagatccactatctggccgatctgctcgtcggagaagaaagtctccgagaggcggcacaacaggcccttgcaacgcgaacttctgtcccagtacgtccactattttacaacgtcgtcattacgccaagaacggcaaaacctgaccatccggacaccaggatcgatccgcgtttcaaggtcggaaaaggccacgaaggcatcaacctttccgtggattacgagaattttccgcagatgacgaaaggcgaaaagcttcgcgtgcggtgtttccgtcctctgttgtggtga

SEQ ID NO: 697 - DNA, 2667 bp, BradyrhizobiumColbertium
gtggtagcgacgatcgcggctggaacgaccgcccgatattacagcaagcaatccgagtactatctcgggggcggcgagcctgccggtcgttggatctcctcgaccaatgatttcggcgtcaggcatggcgccgaagtcgacaatgctctcttcgaacgcctccacgcttcccttgatgtggatggacaaccccttctgtccaacagcggcgacaccgcaaagcgcgtcggtggcatcgacctgacgctgtcggccccgaaatcggtttctgttgcttttgcactcgctgatgccgagacacgtcgcgccatcgagaaagctcagcatgaagcttgcgaagcaactatcgcatttctggagaggaatgcggcgttttgccgtcgcggcaaggatggtcatcgtctcgaacgcgccacgctcaccgttgcggcgtttcagcacggagaagcgcgccccgtcgagcatgacgacggcaaggtctacgccgaccccaatctccacacgcacgcagttctattaaacttttcacgtcgtcaggatggcaccgtcggcgctctcgacgcgcgccatctgttcgctcacaaaatggcggccggcgcgatctaccatctcgcactgtcgtcaaatttgcagagaattggtttcgcaatcggcgaaatcggccgcaacggggtattcgagctgatcgtcccgcaggcgggtgaccaatcggcggcgctcgcgaagagttttgcggccttgcagcgccactattcgggacggcgcaaggaaatcgaagaggccatcgcggctgaaggactgtcgacagcggaagcgccgacactggcggctgcgatcgctcttggaacacgctcgacgaagcaagaggcgcgcacggcggatcgattcgaactgtgggccgaggaagccgcgccgtttctggacgtcgaacggctcgtgacgaatctgcgcatcccccggacattgagccaggccgagcaggaaaagctcatcgccgagcgcgtggcagctgtccctacggaactgaccgagcacgagagtgtttttgagcggcgtcacctctacgcagccgtcgcgacggccttggtgggaacaggtgccgccgcgaagcgcgtcgagcacgaagtggaccgcctggtagaggcaggccgcatcgtcgagctcggacgggacgccctccagcagccggtctattcgacgccggagcagatcgcaatcgagcgcgagctggtcgcggtggccgatcggctgacccgcgagcgccgcgcggcgcccgatccggaatacgtgctgcggctttgccgtgagcgggggctctccgcggagcaaacccacgcggcgcaaatggcgacgagttcggccgccatcgttgtcattgagggcgccgccgggtcgggaaagtcgacaaccttggccgctatcgtggcggcgtacgcccgagacaacggtaccggacttccctttgcaggcgctgcgcggcgcatcattggcacgagtcaatcctggaaggtcgcccgggagttgcagaaactcggaatcgaggcaatggccactgacgcgtggcttgcccgaaccaaggagccatttctcgatgccaacaccgtgctcgtcgtcgatgaggccgggcttttatcctcgcgccaaatgttggcgatcgtgaagagggcggaagaggccggcgccaaaattatcgcaacgggcgatcgggagcaactggttgcgttgggggcgggcccggggctctccatcctcgccagcgtcacgggggcgacccgcgttgacaccatcgtgcggcagcgtgaagcctggatgcgtaccgcagtgacggattttgccaaaggccgcgcggcgcagggcttggccgccttcgaggagcgcggcctcttgcaatttgcgagcggtgagaaggcgacggtcacgcgcgttgtcgatgcgtgggagaacgcccagcgcgctgggccgaacgcgtcggtgttgttgatcgccaagaccaacgtccaggtgcgcgccatcaatgacgaggtccgcgtccggctgaagcgcgacgggcgcatcatcggcgaggatatcgaggtggccgccgtgacgccgtccggccacggccagacgcttgccttcgccattggcgatgagatccggtttctggaccggcacgaccgccttgccgtcatcaacggcaccacggctactatcaggggcattgacgatcgcgacacgcaggatccagccgtccacgtagacatcagcgggcgtcgggcgagctttcgggtgtcggagcttgctgacgaacacggccgagcgcggctcggccacgcctacagtacgacgatctatggatcccaaggtctgaccaccgatcgagccttcgtctgggccggaccgtcaatgacaagaaacgaggcatacgtcgcattctcgcgtgcccgtgatcatcttgagatctttgcagacgtccgcgagatcgacgcgcaaatccgactcgatctgccgctgtcggagcggctgcaggccacgattgcgccggagcggagaatcgagtggctctccgcacggctgtcgcgacggcaggtcaaggcctgcacgctcgaccccatgctcgaccaagccgtgcgcgcctatgaacgattgacggagcggggcctggcggcggggtatgagcgtagctaa

SEQ ID NO: 698 - DNA, 960 bp, BradyrhizobiumColbertium
gtgatccgcattaatccagtttccgacctgcatgtcgacatcgagcgcaatgggctcgacagcatgccgcagatcgacgccgacgtgaccgtggtcgccggcgacgccgccgcgcccggcacgttggcattgcggcgtgtccgcgagctgtatcccgatcgcgaccggccgctcatctacgtccccggaaaccacgatttctattcctttcacgacaagcacaatgccgaacttaagaccacgtgggaggagcagcgcgcacggatgccagaggtcgcggaggatctcgggatcatcttgctcgatgatgcctccgtcgagattgggggcgtcgttttcatcggcgctacgctgtggacggatttcatgacccggtctccgtacgtgatgttcggcgacgcggtgcgcgcggccacgaagcagatgaacgattaccgtttgataaagaccggcgccggccggtcgaaggaccggctccgccccggccagacgatcgacgcccacaaggtctcagtcacgtacatcgagaaggctctcgccaagcgtccggcgggccaggacgcagtcgtcatcacgcacatggctccctcgccgcggtcgctgctccactggccgacgatcacggacctggactggtgctacgccagcgatgtcgagcgactgatgacgtgcgacgccgcgccggcgctgtggctgcacggtcatgtgcacggcaaccgtgactattgcgtcggcgaaacgcgtgtcgtctgcaacccgcgtggatatccggcgcccggcggcaagcgcgagaatccagatttcgatgcgggcatggtcgtcgaggtcgatgggaggccttcccttcagaccgaggtcgtgaacggtagccagcatgtggcagacatcgcagccaagcgaactgcaggcaacgtctggcaggcgcgcgcgcaaaaaatcagcgcggcagcggaaatgtag

SEQ ID NO: 699 - DNA, 471 bp, BradyrhizobiumColbertium
atgaacgaggccatggctgcgtcgtggcgcgccgtcgtgcggccggacgacgagatcatcgtcgtcggagacttcgctcacagggccgatcctgctgcgctccgcaacctgttcgacagcctacccggacgcaagcatttggtagcaggcaatcacgacggcgaggccacaaagagtctcggttgggaatcgatccgcgatgtcgcgtatgagacgatcgagagcaccaaatgcgtcatctgccactatcgatgggcgagctggcccgcctctcgcaagccgaccacgttgatgttgtatgggcaccaccacggcaagatgccaggcaaccagcagtccgcggacatcggcgtcgacgtcatgggcatcgctccggtccgcctcgctaccatcaaggcttacatggcgagactgccgccacgcgtggatccagaacacggcgttatcgagaacaatggagtgacgccgtga

SEQ ID NO: 700 - DNA, 1143 bp, BradyrhizobiumColbertium
atggcgccgaaccaacgcctcgatatctcctaccagacgctctattcggagctcgtccagcggagcctggatgagagcttcacgtccgaattctccgccaacggtcggttcgtggccgttgaggtcaagggcaaaaaatactggtacttcgacatgcccaaacctgaaggaggtgcccaggatcgccgctatgtcggtccggtggatgaccccgaaatcaccaagagggttgaagcgttcaaggatctgaaggccgatcttaaaggccgtcgccgtctcgtttccacgctgacgcgcgaggcctatctgccgcgtcctctgccgatggctggccaagtggtggaagaactggcgaaggcgggcttcttccgcatgagaggtgtgctcgtcggcaccgttgcctaccaatgctatccggccgtgcttggtcgacgcttggatgcggtcgccatgcagaccggcgacgccgactttgcgcacttccacgaaatctcggttgcgatcaaggattccatgcctccaatcctggaggtgcttcgacatgtcgatccgacattccgcgaggttccgagccaagccgacggcagggtttccacgcaattcgtgtcgagagacaacttcaaggtggaattcctgacgccgaacctgtggtccgatgaccaggccggcaaaccagtcccaatgccggcgctgggtggggcggccgcacttccgctctgcttcctcgattacctgatataccagcccatccgcgccgtgctgctgcatggtgcgggcgtgtcagtcctcattccatcgcccgaacgctatgccatccacaagctcatcatcggttctcgccgcagggaggatcgcgacgcaaccgcaaagagttcgaaggatcggcttcaggcccgatcgatcactgaggcgatgattgcaaatcggcagcacgctgatcttgcctccgccttcatggaggcatgggatcgtggcgataagtggagagccgcgatccgcactaaaattgcgacctacgacgacgacttcccgaagttgctcaaagccgaacttgcgaagggtgtatccgagctcggctccgatccagccgattacgatctggtagataagctcaccgacgagctggctcccccgccaaaatga

SEQ ID NO: 701 - DNA, 138 bp, BradyrhizobiumColbertium
atgctgacgctcaacagcggacggttcgccctgatcgagcgatcccatgaattcgtgcgggtgccgtggcggccggtgctggagcgagcgcgcgggcaattggtcaccggtcaggtcggcgtggagggcatatcctga

SEQ ID NO: 702 - DNA, 144 bp, BradyrhizobiumColbertium
atgccttttgcgcggaacatgctcgatacgctcgaggctcgcgagctggcgcggaccgcggcggatatttccgcgcgcaccggccttgatcatgtcggtgccgaggccggcgacaagatcgaaggctctaccggcgcatgctga

SEQ ID NO: 703 - DNA, 276 bp, BradyrhizobiumColbertium
gtgccgccggcgatcggcgcgagcacgaccgcgcaagttcgtgtcggttctgcccggctgcggccatcggaccccgagttttggaccgtgatcaatgagatcgcggatcccgcccccatcgcgcccgccgagctcgacgccatcgagcgcttcttttcggccgtgctcgatgacgtcttcgcttcttccggcagagatcttccgcgaagtcgggaaaatccagatggcagtgaagacgtctccttaacccaacgagaggactacgacgatgactga

SEQ ID NO: 704 - DNA, 324 bp, BradyrhizobiumColbertium
atggacgctgagcgctttgccgagttcgctatcgaggccgcgctctggctggtgcgggaatcgatggatgccatcgccaaaaagacggacttcgatccggacccggcgaactgcttccgggtgctgggccggctgcccgccatccgtgagctgaaggatctgacggaagagcagcgtcacgacctgttcgtggaaggcttccgtcgggttcacaacggcgcccaggaagcgttcgagctgctgctcactcagtccaaggagctcttgtgggaggccttccggaagcggtggaatgtggtcgccaacgaggtcccgctcccctga

SEQ ID NO: 705 - DNA, 82 bp, BradyrhizobiumColbertium
gcccctgtggcggaactggtagacgcgctcgactcaaaatcgagttccgcaaggagtgctggttcgattccggccaggggca

SEQ ID NO: 706 - DNA, 540 bp, BradyrhizobiumColbertium
gtgacgacccagagtgccgcaatacctgcattcaagccggccagcgccggtcccgcgctgaccgcctcgctgcttgtcacgctgatcgccgcagccgcgctcgcaggtgcctggttcttccagctcgtcttggagatactgccctgcccactctgcctggagcagcgctatgcctattacctcgcgattccgctcggtgcgctcacggtgctggcggcgaggagcggcgcgccgcgaccgctgctgctgggggggctcgcgattttggccctggcgacgctcgccaatgcagggctgggcgcctatcattccggcgtcgaatgggggttctggaaggggccgaccgactgctccggtcccgtcgtcaatctcggcagcgcggctgatctgctctcgaagctcgacaccgtgaaggtggtgcgctgcgacgaggtgcagtggcgcttcctgggtctctcgctcgccggctacaacgtgctgatctcgctgctgatggctgcgatcgccgcctggggatttgtgcgcacggcgaagcggtag

SEQ ID NO: 707 - DNA, 1086 bp, BradyrhizobiumColbertium
gtgaagcaaatcaccgcctcgctgacgttcggatggccgagccgtgccgtgatcctgagcacgctggagacgctcgtcatcggcaccgccggcggcctggtgtttctcgccgccaaccttccgggcggcctgatctcgggttcgatgatcgcggtcgggatggctgcaatcgccggccgccagctgacgctgccgccgatcctgacccagaccgtgctggtgctgctcggcatctcgctgggctcggtcgtctcgcgccatctgctgcagcaggtcggcgcctatcccctcaccatcgggctgcttgcgctcgccactttctgctcgacgttcggctcgagctattacctccagcgcatccatggctgggaccgcacctcggctttcctggccggcagccccggcgcgctgtcgcagatcaccatcctggcggtcgagcgcggcgccgacctgccgggcatcgcggtggtgcagaccatgcgcgtcatcatcctgaccgccgcgctgccgatggtgctggcgattgcggacgtcgcgccctctgcctcaccattgctgacgacgaccatcgcgtcgccgctcgacctgctcgaactggccgccgcgtcgctggccgcagcgctcgtcttgcggctgatcaaatttccggcgagctggatgttcggcgcgatgatcgcctccagcgtgctgcatggtgccggatgggtcgagggcggcctgccggactgggtgcgcggcgtggcgctgatcgggatcggcgccctgatcggcagccgtttcgcgcgaatgcgggtcaagacgctcgccggccacctcggcgcggcactgggctcgttcgccgtggccatcgtcgtctccgccatcttcgtcggcatcgtggcgttgaccacgcaggtgaagctctccgacgtcgtcgtcgccttcgcgcctggcgcgatggatgcgatgctggctttggcgctgacgctgcacatcgacccgattttcgtcggcgcccatcacctgtcgcgcttcgtgttcgtgacgatcgcaacgccgggcatcgtgcatctgttcggacgcacgcaggacgacgtggacgattga

SEQ ID NO: 708 - DNA, 282 bp, BradyrhizobiumColbertium
atgatcttttcctttcgcctcgccgtcatcgctctcgcctccttgctgatcaccggcgccgcgtctgcgcagacggccgcgcccgctgccaaaaccgatgccgctgtcaccaccgagaagaagacggcgatggagcgctcggccgagtcgctcgaatgctccaagcaggcggacaccaagggactgaagggcaaggagcgcaagaaattccgccgcgagtgcaagaaggaggcgaaggcccgcactgtcgctccagccgctcctgcggcagacaagaagtaa

SEQ ID NO: 709 - DNA, 471 bp, BradyrhizobiumColbertium
atgaccattcagacgaaattgttgtgcgcgattgcagcgtcgggtgtcgcgacattgctggccggcgcgccagcgcaggcgctgaccgcgcaggagtgcagcgcgaaataccaggccgccaagaaggacggctcgctcgggaccatgaagtggaatgatttccgcaaggcccagtgcggggcagacgcaacgtctgccgcggctactccggctgctcctgcggagccgaagcaggcaaagaaggatggggagcctgccgccgcgccgacgctgccggctggccctgcgatctatccgaacgcggtcgatccgaaatatgccaaggagacccccggcaaggcgcgtctgcacacctgcgtcgaccagtacaatgccaacaaggccaacaacggcaatggcggcttgaagtggatccagaagggcggcggctattacagcgaatgcaccaagaagctgaagggcgcggcctga

SEQ ID NO: 710 - DNA, 549 bp, BradyrhizobiumColbertium
atgagggacggcaagggtgatgtctgggtcgaggccggatttgccgagctcgcccgttcaggagttgaaggcgtgcgggtcgaggtgctcgccaagaacctcggcgtcaccaagggcggcttctaccgacgcttcgccgaccgcgccgcgctgctcaacgccatgctggaggtctggcgcgaggggcgcgtcgccgcaatcgcgcagcagacaagtctcgacgggcaagcgccccgcgagcggctaagcgcgatcatccagctttactccgagcggctcaatccggaagggatggcaatcgagcttgcgatccggcaatgggctcgctcggacgagaacgctgcggccgcggtggcgagcgtggacgcagctcggctcaagcacgtggccgagctctattgcgcaaccggccttgcagccgagcaggccgaggcgcaggccttcctgttctactgcttcatcttcggccagagcctattgttcgtcgagcacggtccgcgcaggcggtcgcagctggtggcgagatcggccgagaagctgctcgactga

SEQ ID NO: 711 - DNA, 459 bp, BradyrhizobiumColbertium
atggaggagatggccgcgttcgagccgaaaaaccctgagtgcctcaccgccgcgacggcgatgtttgccgcccaaccggcgatgcgcacgctgggcctgtcgatcgtggatctgtcgccgggtcgggtcgaactggcgatgccctatgcaaccgccttcacccagcagaacggctttgtccatgccggcatcatcaccgcaggcctggacaatgcctgcggcgtcgccgcctttaccttgatgccgcgcgaggccgacatcctcaccgtcgagttcaagacgacgctgctcgcgccggcccggggcgagcgcttcgtcttcagggccgaagtcatcaagcccggccgcacgctgaccttctgcgaagccaaggcctttgcccagcatgacggcaaaaccaagctgattgcggccatgaccgggaccctgatggcgatcatgcctcgcccggcagcttag

SEQ ID NO: 712 - DNA, 630 bp, BradyrhizobiumColbertium
atgccgacgcggcgcgccgccttgacgctgatcggagcaggcagcttggcggcgggcggcatcacgttggcgcgcgccgcgagcgacgatgaggtgctgaccgaagccaaggtgttgcgcgatccggacacgcccgtcgccggcaatcccaacggaaacgtcaccattgtcgaatggtccgattacaattgtccctattgccgcaagctcgagcccgaactgcgtcaggtcgtccaggacgatggcaaggtgcggctcgtgatgaaggattggccgatcctcgggccggtctcggtcacggccgcgcggaccgcgctcgcggcgaaattccaggacaagtaccatcaggcccacgacgccatgatgggcgtcagctcgcgcctgaccgaggcgcgcatcaacgagctgctggcggctgccggtgtcgacatggaccggttgaagcgggatcttgccggtcacgccaaggacatcgacgccatcctcaagcgcaacaacgagcaggccgaagccttcggcttccgcggcaccccgtcgttcatcgtcggcaagtatcgcgtgcccggtgtgctcaccatggcccagttcgagcaggtcatcgccgacgcgcgcaaggccaagatgaactga

SEQ ID NO: 713 - DNA, 207 bp, BradyrhizobiumColbertium
atgcagacttttttcggaatgattttgggcgcgctgctgcttgcgggcggcgtctacgtctatgactccatgcagacgtcgtcggtcgccaacggcgaggtggcgaccaccaatcgcaccatcgtgaactgggatgttgcgaaggccgactttgacgcgctgcgtgaccgcgcgcacaaggactgggtccggatctcgtcgaaataa

SEQ ID NO: 714 - DNA, 1071 bp, BradyrhizobiumColbertium
atgaccgaggccgtggtggacgacatcgtggccgtgctgccgccgctgctcaatgcgctggaagcgctcggcttcctccagcggcatttgcacccgccggctttcgcctccgtgatgaacgcaatcggcacaccggacgaggcgctgcgagcggcccgtgcggcgatcggcgactggccggagcaattcgccggcatccgcgagcggctcgacgccgcctgcaacgagacgctcgccgcctttgccggaattcgcgaggtcgagcgtggcaatggcgatctcgtcgccgtctttcgcgcgcttcgccatgtcccgcgcgcgcaggaggcgctctatccgctggcggtgcagtttccgccggtgagcagcttctttctgaacgacgccaatcgggagaaccatgatgtgctgtcgcgcctggaagtcggcgcgggcgagcacaccggcatcttccacgatcacaatgagcccggcagccgcggcggcttctcggtctatgtccccgaatattacgtgcccgatcgcgccatgccgctggtgatggcgctgcatggcggcagcggcaacgggcgcggctttctgtggagctggctgcgcgacgcgcgcagccttggcgcgatcctcgtggcgccgacagcgaccggcccgacctgggcgctgatgggcgacgacaccgacacgccgaacctcatgcgcgtcctcgagacggtacgtggacgctggagcatcgatcccacgcgcatgctgctcaccggcatgagcgatggcggcactttctgttacgtgagcgggctcgaaagcgcttcgcccttcactcacctcgcgccggttgcggcgaccttccatccgctgctggcggagatggcggacgcaacgcgcctgcaaggcctgccggtcttcatcactcacggcaagctcgactggatgtttccggtgcagaccgcacgccagacgcaggcgacgctctccgccgcgggcgcggatgtcacctatcgcgagatcggtgatctcagccacacctatccgcgcgagatcaacgcggagctgatggcctggctgaataggacgtga

SEQ ID NO: 715 - DNA, 972 bp, BradyrhizobiumColbertium
atgcccgctctgacagaatggagagtgccgccggcgaaccagccgcgcgcgagcgactatggtttcgatctcgaccgcgcgctcgcatccgtcgtcggcctgcacgccatcatcccgccggacgccttcagcgccgaaacgctgggcaccgagcgcgccggcaacggcgtcgtgatcgacgacgggctggtgctcacgatcggttatctcatcactgaggcagagtcggtctggctgcaccgcgccgacggacgcgtggtggaaggccatgtgctcggcttcgattccgagaccggtttcgggctggtgcaggcgctcggccggctcgacgtcgaccccttgccgctcggcaactcggccgaaacccggatcggcgaccgcgtcgtggtcggcggcgccggcggccgcacacgctcggtcgccagccagatcgtggccaagcaggaattcgccggttattgggaatatctgctggatgaagccatcttcacctatcccgcgcatccgaactggggcggcaccgcgttgctcaacgagcgcggcgagttgatcggcatcggctccctccagctggagcgcgaacgcgacggcaaggccgagcacgtgaacatgatcgtgccgatcgatctgttgaagcccatcctggaggacttgcgcaaattcggccgcgtcaacaagccggcgcggccctggctcgggctcttctcgaccgagatcgacaaccgcgtggtggtgatcgggatctccgccaacggcccggccgcccgcgccgagctcaagaccggcgatgtcatcctcgccgtggacggcgagaaagtcacgagccagagcgccttctacaggaagatgtgggcgctcggccccgccggcgtcgacgtgccgctgaccgttcaccacgagggcgtcaccttcgacgtcgcggtgacctcgaccgaccgcttcaagctcctgaaggcgccgaagctgcactga

SEQ ID NO: 716 - DNA, 1419 bp, BradyrhizobiumColbertium
atggacaaccgcagcgacatctggcgtggcatcgatacgatcaaggggcgtttcatcgatctcagcgacagggtctggggcatgcccgaggtctgctacaccgaggcgcggtccgccgccgagcatcttgccgagctgcgccatcagggcttccggatcaccgagaacgtcgccggcattccaactgcgctgatgggggagtggggcgagggcggtccggtcatcgccttcatgggtgaatacgacgcgctgccgggcctcagccaggaggcgggtgtcgccgagcatcgcccggtcgagaccggcggtcacggtcacggctgcggtcacaatctgctcggttccgccgcgctgctcgctgcaaccgcggtgaaggactggctggccgagaacaaggtgcccggccgcgtgcgctattacggctgccccgcggaagaaggcggcgcggcaaaagccttcatggtgcgctccggcgcgttcgagggcgcggacatcgccatcacctggcatccgcacagcttctgggaggtcgcggtcacgccgtcgctcgccaatacgcgcgccgacttcatctttaccggccgcacgtcgcatgccgcggcctcaccgcatctcggccgctcggcgctcgatgcggtcgagctgatgaatgtcggcgtgaactacatgcgcgagcacatgccgagcgacgcgcgcgtgcactatgcactgctcgacaccggcggcatcgcgccgaacgtggtgcaggcccatgcgcgcgtgcgatattcgatccgcgcccgcgatcttcccggcatgaacgaactggtcgagcgcgtgtccaagatcgcgcagggcgcggcgctgatgacagagaccaaggtcgagatgaagatcatctccgcggtctccaatatcctgccgaacgcgccgctggaacgggcgctgcaccaggtgatggaagagctcggaccgccgcattttgacgacgcggacaagaggtttgctggccagatccgcgcaacgctgagcgacaaggatatcgactctgtctattacgcgatcggcatggagccgacggaccgcccgctggccgactttctggtgccgctcgatgccaagcgcaacccgctggtcggctcgaccgatgtcggcgacgtgagctgggtggtgccgacggtgcaggtgcatgcaccgaccgttgccatcgggacgcccttccacacctggcaggtggtggcgcagggcaagagtccgcatgcccacaaggcgatggtgcaggcggcgaaggctatggcgggtctcggcatcagggcactgacggaaccggagctgatcaaggcggccaaggcagatcttcagaagcggacggccaagacgccttacgtctgtccgttgccggatcacgtcgccccgccgctcgacatgtccaagatctag

SEQ ID NO: 717 - DNA, 1791 bp, BradyrhizobiumColbertium
atgctggataaagaactgcgttcgatgatcggccaggtgaaggatgggcggatggatcgccgcgccttcatccagcgcatggccgctgtcggtcttaccgcaccattggccaaccagattctcgcgctcggcggtgtcgccatggcgcagagtcctgctgtctataagccgaccaagcgcgggggcggcggccctctcaagctgttgtggtggcaggggccgacgctgctgaatccgcatttcgcgaccggcaccaaggaccaggacgggtcgcggctgttctacgagccgctcgcaagctgggacgccgacggcaatctcaatccgattctggccgcagagattccctcggttgcaaacggtggtctcgccgccgatgccaaatcggtggtttggaaaatcaagccgggtgtcaaatggcacgacggcaaaccgctcaccgccgacgatttcgtgttcacatggcaatatgccagcgatcccgcaacggccgccgtcagcatcagcacctacggtcagatcacggtcgagaaggtgagcgatctttcgattcgcatcctgttcaagactccgacgccgttctgggcaaatgccttcgtcggcgcatatggctgcgttctcccgaagcatctgttcgcggactacaagggctcgaagtcccgtgaggcgccgaacaatctggcccccgtgggcaccggcccctacaaattcgtggagttcaagccgggcgatgtggtccgcgggcagctcaatcccgactaccatatgcccaaccggccgcatttcgacacgatcgaaatgaagggcggcggtgatgcagtctccgctgcgcgcgcggtgatccagaccggcgaattcgatttcgcctggaacatgcaggtcgaggacgacgtcctgttgcgcctcgagaagggcggcaagggcaagactgtctacgccaccggcggcgacatcgagttcattgcgatcaacttcaccgacccgcacaccgaggtcgatggcgaacggtcgtcgatgaagaccaagcacccgatcctctcggatccgaatgtgcggaaggcacttgccttgctggtcgaccgcgagtccgtcaagaaggcgatctacggtcgtgcaggccgcaccaccgccaactacctcaacggtcccgagaaattcgtttccaagaacacctcgtgggagttcaacatcgagaaggcctcgaagatgctcgacgatgctggatggaaggtcggatcggacggcatccgcgagaaagacggaaagaagttcaaacttctataccagacatcgaccaacggtccgcgccagaagacccaggcgatcgtcaagcaggcctgccagaaggccggcatcgatgtggagctgaagtcggtcgttgcctcggtgttcttctcgtcggacgttgccaatcccgacacctaccccaaattctatgccgacatcgaggagttccagatcccgatgacgcagccggatccggcgttgcacatgcgccgctacatctccgccaacgtggccaccaaggagaacaaatggcaggggcagaatttcccgcgatacgtcaacaaagactatgatgccgccattgcggcggccgagaccgaaaccgatccggtcaagcgcgccgcgctctacatcaagtgcaacgacctgctttggcaggacacggtgttcattccggtgatgcatcgccttaaggtggaagccgcggccaacaccctgaggccagcgctgagcggctgggcgaacgagactgacaacatccaggactggtaccgggaggcttga

SEQ ID NO: 718 - DNA, 933 bp, BradyrhizobiumColbertium
ttgatcgccattccgagcctgctggccatctcgcttgtgctgttcgtcgtgctcgcgctcgcccccggcgatccgttctcggaattggcgaccaatccgaacgttccgcccgaagtgcaggccgcacttcgggccaagttcgggctcgacgatccgatctaccttcgttacctgcactggctcaacgccatgctgcacggcgactggggtttctccttcgtcagccggatggacgtcgacacgttgatcctccaacgccttccggccacgctctacgtgatcggttcggcgcagatcctggcgctcctgatcgcgattcccgtcggcgtctatgccgccaccaagccgtattcgctgttcgaccagatcgcgaatacgctcgccttcgtcggcttctcgctgccgaccttcttcaccggcattctgttcatcctgatcttctcggtcacgctggactggctgcctttcgtctataccaccgacatcaaggcgaccggcattcattgggtgctagagatgatccggcaggcgatcatgccggtggcggtgctcggcctgttccaggcggcgtcgatgacgcgcttcgtacgttcggcgatgctcgacgtgatccggctcgactatgtcaccacggcccgtgccaagggccttggtcaggccaccgtcatcgtcaagcatgtgatgcgcaacgccatgatcccggtcgtcacgctcatcgcgttgcagatgcccgcggtgttcggcggcgccatcgtcaccgagcagatcttccgcatcccaggcatcggctcgcttctgatcacctccatcctttccaacgacacaccggtggtgatggccgtcaccttcgtcttcgcgtgcctcgtcgtgctgttcaatctcatcgcggacgtcctctatggcttgcttgaccctcgcatctccctccgctga

SEQ ID NO: 719 - DNA, 918 bp, BradyrhizobiumColbertium
atggcttgcttgaccctcgcatctccctccgctgagcggcgggtctactcgccctggcgcgagacgtggcgacgctacagccgccacaagcttgccgttgtcagcgctttcctgctcctggttcttgtcctggcggtggtgttcggtccgttcgtttggcgggtcaagatcgatgagatcgacattgtggcgggtctgcaggggccgtcgctggcccatccgttcggtactgacgacctcgggcaggacatcctcgcccgcatgatctatggcgggcgcatctcgctcgcggtcggtctggccgcgatgctggtctcggtctttatcggcgtgctgatcggcgcgctggccggtatgtcgcgcggcgcgctcggacacggcctgatgtggctgacggatctgttcctgtcgctgccgcaattgccgctgctcttgctgctgatctatctcttccgcgacgggctgaagcaggtgttcgggcccgaaggcggcatcttcatcctgatcgtgctggtgatcggggggctccgctggatgccggtcgcgcgcctcgtgcgcgcgcagttcctgtcgatccgcgaaaaggaattcgtggaggctgcacgtgcgctcggtgcaagtccgctgcggcaggtgataaagcacattctgcccaatgcgcttggtccggtgatcatcgcgggcaccatcgacgtcgccgccgccatcatcgcggaatcgacgctgtcgttcctcggactcggctttccgccggataccccgacctggggccgactgctgtacgatgccaaggatttcctcgatatcggcccgcattgggcgttgtttccgggcggcgcgatcttcatcgcggtggtcgccatcaacttcatcggcgacggcctgcgtgacgcgctcgatgcgcggcgggtgatctga

SEQ ID NO: 720 - DNA, 261 bp, BradyrhizobiumColbertium
atgatctggcccgccgcgatccggcccggcggcatcgcgatcagcttcaggatcgacattgcggtgacggtcttgccgcagccggactcgccgacgacgcagagcgtctcccccttgttgatggtgatgtcgacgccgtcgacggcctggaggatgccgtcgtcggtggagaagtgggtcttgaggcccttgatctcgagcagcggcgccatcagatcacccgccgcgcatcgagcgcgtcacgcaggccgtcgccgatga

SEQ ID NO: 721 - DNA, 495 bp, BradyrhizobiumColbertium
atggcgctcgcctgcaagccgaagctgatcatcgccgacgagccgaccaccgctctcgacgtcaccatccaggcgcagatcctcgacctgctccaggacatgaaggaccgcttcggcatggcggtgatgctgatcacccatgccatgggcgtcgtcgcggagacggcgcagcgcgtggtcgtgatgtatgccggcaagggggtggaggaggcgctcgtcgacgacctcttcggcgacccccgccatccctatacgcaaggcttgatccgctcgatcccgcgcatcgacctcgacgccgagcacaagacgcggctcgaggcgatcggcggctcggtgccgatcctgatcaatccgccggtcggctgtcgcttcgcgccgcgctgcaagttcgccatgaacgtctgcaccgagagggagccgctgttgcgcgagattgcgcccggccatcgcatggcctgtcacttgggagataccggcctcggaggcgcagcatga

SEQ ID NO: 722 - DNA, 969 bp, BradyrhizobiumColbertium
atgagcgaccagctcctgacgccgatcgagattggcctcaccgccgcgatcgtcgcgatcgagaaccacgagccgctgatcctgaccgcacgaggcgccgacgggcttgccggcctgccgttcggccctttcgatgcggttagccaccgcaccttcgagattggcctgcgcgcctgggtcgaggaacagacgggcctgcggctcggctacgtcgagcagctctacaacttcggcgatcgcggccgccatgccgaggccggcgacaccggggcacatatggtgtcgatcggctatctcgcgctgacgcgacctgtggacggcgagcttgctgcaaacgcggcgggcttcgcgccatggtaccgcttcttcccctgggaagactggcgggacgagccgccggggatcatctcccgcgacatcatcccggcgctgacgaagtgggccgaggaagaaacgccggagacgacacgcgcgctgccgcggaaggatcgcgtgcggttctatttcggtctcgacggcgcgccctgggacgaggagcgcgtgctcgaccgctacgaactgctgtacgaggccgggctgatcgaggaggcgcggcgtgatggacgccctgcggcattggcgcgcaaggcgattcccccgctcgggacctcgatgcggttcgaccatcgccggatcctcgccacggcgatcgcgcgtttacgtgcaaaactgaagtatcgccctgtcgtctttgaactattgccggctgaattcacacttacggaactgcagtatacggtcgaggcgatctccggccggcatctgcacaagcagaacttccgccgcctggtcgaaatggaggccttggtcgaaccgaccggggtcatgtcgacacagacgggcggacggccggcggcactctatcgcttccgccgcgaggtgctccaggagcggcccgcgccgggcttgcgcgtgcggtcccggcgctag

SEQ ID NO: 723 - DNA, 507 bp, BradyrhizobiumColbertium
atgatccacgtctgttccctcgccgcgcttcccgagactgtccgaattacgggcgcgagccatgtgctcaccgtgatggccaatgtcgagcaggtggcacgtccggtgtcggtgctgccggccaaccacctcaaggtgtcgatggatgacatcaccgaggagatggacggtttcgtcgcgccatcggagacgcatatcgagcaggtgctgaatttcgtgcgcggctgggatcgctgcgcgcctctggtggtgcattgctatgccggcatcagccgctccaccgcaagcgcgttcgcagccgtctgcgcgctgaatccggatcgtgacgaggtcgagatcgcgaggaagattcgcgcggcgtcgccgatcgcctcgccgaaccggcgcatcgtcagccttgccgatcgtgcactggggcgcaacggccgcatgctgcgcgcgctcgacgagatgggccccggcgcgatgatggtggaaggccgccccttcgtgatcgagctcgaatga

SEQ ID NO: 724 - DNA, 615 bp, BradyrhizobiumColbertium
atgacggcgaagaagaccgcgcgcgatgcgccgtcccgcgcctggcagcgcatgctgtcgggcagacggctcgatctgctcgatccctccccgctcgacatcgagatcgccgacatcgcgcacggccttgcccgcgtcgcgcgctggaatgggcagaccataggcgcgcatatcttctcagtcgcgcagcacacgttgctggtagaaaccgtgctgcggcatgagatgccgcgggccgatcagcgcatgcggctcgccgccctgctgcacgatgcgccggaatatgtgatcggtgacatgatctcgccgttcaaggccgtgctcgatggtcattacaaggcggtcgagaagcggttgctcggcgccatccatatccgcttcggcctcccagcggagctgcctgaggaaatcacgctggcgatcaaagccgccgaccgcggcgccgcttacctcgaggcaaccgagctcgccggcttcggcgagagcgaggccaagcgcctgttcggcaaggatccaggcctgtccgacagcgtccggcgcgactacttgacaccctggacggcggctcgcgcagagaagcagtttctggagcggttcggcgccgtgtttgcgtag

SEQ ID NO: 725 - DNA, 627 bp, BradyrhizobiumColbertium
atgagccgcgccgcccgcctgcatcccgatggaaagacacgctgtccctggcccggcgaagatccgctttatgtcgcctatcacgacaccgaatggggcgtgcccgagtacgacgaccgcgcattgtacgaaaagctgatgctcgacggcttccaggccgggctgtcgtggatcacgatcctgcgcaaacgcgataatttccgcgaagccttcgacgatttccagccggagaagatcgcgcgctacaacgccaagaaggttcatgcgctgatgaacgatgtcggcatcgtgcgcaacaaggcgaagatcgacggcgcgatcctgagcgcgaagtcgtatctcgacatcatggagaagggcccgggcttctcgaagctgctgtgggacttcatggacgggaagccgctggtcaatcatttcaagaccaccgcgagcgtgccggcctcgacgccgctatcggtacagatctccaaggagctgtcctcgcgcggtttcaaattcgtcggcccgaccatcgtctatgccttcatgcaggccaccggcatggtcaacgatcatctcgtcgactgccattgtcacgcgatctgcggcaagacccggcgcaagccgcgcctcaaggccaaatga

SEQ ID NO: 726 - DNA, 882 bp, BradyrhizobiumColbertium
atgaaatcggcgtttcttccggaccggggcgtggtcaaggtcgcgggcgaggatgcgcgcaacttcctcaacggcctcatcaccaccgacctcgacaggctgaaaccgggcctggggcgattcggcgcgctgctgacgccgcagggcaagatcattgtggatttcctgatcacggaggtgccggccggccatggcggcgggttcctgatcgattgccccaaagcgctggcggacaccctcgtcaccaagctgaaattctacaagctgcgcgccaaggccacggtggacaacctctccggcgatctcggcgtgctcgcagcctgggacggccagcccacggcccaaccggacctcgccttcgccgatccgcgcaacgacgggctcggctatcgcatcctgattccggaagacctcaagacgaagctgtctgatctcatcggcgccgagctggtcgatcccgccgaatacgaggcacaccgtattgcgctcggcgtgccccgcggcgggctcgatttcatgtacagcgatgcgttcccgcacgagaccaacatggatcgtcttgccggtgtcgatttcgacaagggctgctatgtcggccaggaggtcgtctcgcgcatgcagcatcgcggcaccgcgcgcacgcgcagcgtgaaggtgctgctcgacggcgcgtcgcccgagccgggcgcgaccattctcgccggcgacaagccggtcggcaccatcggctcgagcgccggcggcaagggcattgccctggtgcgcatcgaccgcgtcgccgaagcgctcgatgcaggccagccgctcaccgctggtgggctgcctctgacgctcgctgaacctgacgtcgttcgaatcccagccaagcagcccatcacatga

SEQ ID NO: 727 - DNA, 1335 bp, BradyrhizobiumColbertium
atgagccagcgtttcgatgtgattctcaggggcggcaccgtggtcaaccaggacggcgagggtgttcgcgatatcggcatcaaggaaggtcgcatcgccgagctgggcccgctgtcgcaaggcagcgccgcggaggtgatcgattgcaagggcctgcacatcctacccggcgtgatggacacgcaggtgcatttccgcgagcccgggctgacgcacaaggaagacctcgagaccggctcgcgcagcgccgtgatgggcggcgtcaccgccgtgttcgaaatgcccaacacggcgccgctgacggtgacggacgccgaattcaccgataaggtgaatcgcgcccatcatcgcatgcattgcgatttcgcctttttcatcggcggcacccgcgagaacgtgcaggacctgccggtgctcgagcgcgcgccgggctgcgccggcgtcaaggtgttcatcggctcctcgaccggcgcgctcctggtggaggacgacgaaagcctgcgtcgcatattccaggtgatccagcgccgcgccgctttccacgccgaagacgaatatcgcctcaacgatcgcaaatcgcagcgcatcgaaggcgatgcgcgttcgcatccggtctggcgcgacgagaccgcggcgttgattgcgacacagcgcctggtcaagctcgcgcacgagaccggcaagcgcatccacgtgctgcacatctcgaccaaggaagagatcgagttcctgcgcgaccacaaggacgtcgcgtcttgcgaggcgacgccgcatcacctcacactggtcgcccccgaatgctacgagcagctcggcacgctggcgcagatgaacccgccggtgcgcggcgccgatcaccgcgccggcatttggcgcggcatagagcagggcatcatcgacgtgctgggctccgaccatgcgccgcatacgctggaagagaagcagaagacctatccggcctcgccctcgggcatgacgggcgtgcagacgctggtgccgctcatgctcgatcacgtcaatgccggccgcctgtcgctggcgagattcgtcgacctcaccagcgccggtcctgcgcgaatctacaacatggcctgcaagggccgcatcgccgccggctacgatgccgacttcaccatcgtcgatctgaagcgcagcgagaccatcaccaacaaatgggttgcatccaaggccggctggacgccttacgacggcgtccgcgtcaccggctggcccgtcggcaccttcatccgcggccggcgcgtgatgtggcagggcgagctcgtgaccccctcgcagggcgaggcggtgcggtttctggagacgctgaagccgtag

SEQ ID NO: 728 - DNA, 1467 bp, BradyrhizobiumColbertium
gtgggcggagcgcaggcagccgatctccccgtgaaggccaaggcggtcgaatacgtgaagatctgctcgctgtacggtgcgggcttctactacatcccgggcactgacacctgcatcaagctgggtggttatctccgcgctgaagtcgcgctgggcaccaacagcgtctacaatggcgcgttcaacggcgctgctggcgctcacaaccgcctcagcaactactacacgatgcgggctcgtcaggatctcaacatcgatacccgcaccgcgaccgaatacggcgtggttcgcacgttcttcgatgcgaccttctcgtggacgaccggcggatacaccggtggcggtacgaccgcatacgactcggctccggcgggtacctcgggcaacggctcggtggccggtggttcgctcggcgtgtactacgccttcatccagttcgctggcttcacgatgggtaaggcggtctcccagttctcagctccctggaccaactatcccggtaacaacttcgacggtctcgtcggcggcggcggcacggttaccggcgtcaaccagttcacctacaccgctgacttcggtcagggcatcacggcatcgttctcggcgcaggatcaggtccagtactatcaggctggtatcaacaacctcgctgttccgggcaccttcggctacggcaccaacaacaccgccggctcgcgctcgccggacctcgtcgccatggttcgcgtggaccaggcttggggtctgttccaggcgtcggttgcggcgcatgagaaccatgcgggctactacggagcgaccgaacccaccggtcaccccggcgacaagtggggttgggcggctcagctggctttgtcgatcaagaacatcccgacgggtgcgggtgacacgatcaacatccagggcgtctataccgacggtgcgacccgctacaacatccaggacctcgccggtggcaccggtgcctggacgagctatggcagcaccggcctggccggcgcatatcagagcatcggcatcggtttcgcacctgacgcggtgcacgtgaccggtggcggcctggagctggtccagacctggggtatgcgcggtgcgtacacccacaactgggatccgtactggaacacggctctctacggtgcgtacgctggagttcgctacactggcgcagcgaagaccgcgatgtgcggcgtgggcggcaccgtgtcggttgcactcggcattgcttcggctgcctgtaaccccgactacaacatcgctcagctgggtctcatcacccgctggacgccggtcaagaacctgaccttctcggccgacttcaactggacccatctggaccagaagtacgcagccggaacggtcaccgctgctggcgccagtgcggcgttggctaagcccgtcgcggcttacgagctcaaggatcaggactcgttcaccctgctcctccgcgctcagcgcaactggtaa

SEQ ID NO: 729 - DNA, 2409 bp, BradyrhizobiumColbertium
atggcagggctgtcggtcggttgcgctgccttggccaagtccaatgacacgaccgcggaggccagcaagaactccgtgaagccggctgggaaggactcgtccaagggaaccggcaaggaaacgccgaaggatacggccaagggcgcgagtaaaggggcggccaaggacgccaccaagaacgcaggcagggaagcggcgaagggcaagtccaagcccgcggcagcgcttacgcccgcggcagccaccaaacccgcggccgctgccaatcccgcggcggcatcgaaaccagcagcgcccaagcctgcggccgcgccaaagacgcatccagctgccagcagttcagcccccaaagccgcggccgctccggcttcgacggcgaccatcagaccgaccgccccggcggcggttgccaaaccgctcgcggctcccgtgctggcccctgcgacccgccagcacgcagcaccgcgcaagccggccatgccggccgcggtcgcagcgacctcgtcgacgtcgcaagccgacaaggacacgctggagaacgtcatcgagctcgtgcgcaagcgcaaggccgccgacgccaccaaccatgccgcctcgatcgcggatccggttgcgcggaagctcgcggaatggatcatcctgcgcagcgacgacaatggcgcgacggtggaacgctatcgggccttcctctccgccaatccgagctggccgtcgcaaaccttcctgcgccggcgcctcgaggctgcgatgtgggacgacaggcgcgacgcttcggtcgcatggtcgtggttcgagaacgagtccccgatctccgccaagggccgcttcatgctcgccaaggcgatgctgttacgtggcgaccgcgccaatgccgagcggctggtgcgcgatgcctggcgcagcgatccgatgtcggaggacaccgagaacaatgcgctcgaccagttcggcgccctgctcacgccgggcgatcagaaagcgcggatggacaccctgctctacggcagcgagaccgaggcggcgctccgcgccgcaaagcgcctcggggcaggctatgtggcgcttgcaagggcccgcatcgccgccgtcaagaaagcgccgaacgcgcgggcgctgctcgacgcggtgccgcgtgagctgcacaatgacaccggctacatcttcagcaagatccagctcctgcgccgcgaagagaagttcactgaagccgcccagctgatgctgtccgcgccgaaggatccgggccgcctccgcaatctcgacgaatggtggatcgagcggcgccttctggcgcgcaagatgatcgacaccgaggaattccgcagcgcgtacctgatcgcgcgcgatgcggcactgccctcgcgcgacatctacaagacggagcaggagttcaccgcgggctggatcgcgctgcgcttcctcaacgatcccgcgaccgccgcccagcactttgcgcggatcggggtcggcagcgtcaatccgaccgcgctggcgcgcgccggctattggcagggccgcgccgcggaagcaatgggccgtcatcaagaggcgcgcaacgcctatgcgagagccgccgagcagtcgaccagctattacggccagctcgcccgcgccaagctcggcctgccgcagatcgagctcaacagccagccgcgcgggcgcggcgccgagcggctggagatcgtgcgcgctgcgcagttgctctatgagctcgacgagcgcgagctggcggtgcccatgctcgccgacatgggggagaatggcgacccggaggcgctcgccggcctcggcgagctcgcccagcgctacagcgacgcgcgcggcatgctgctgctcggcaaggctgcgctcaatcgcggcctgccattcgacttctacgcctatcccgtcaacggcattccgcagttcacgccgatcggccccgaggtcgagcgcagcatcatctacgcgatcgcgcggcaggagagcgcgttcaatccgcgtgtggtttcgccggcgcaggcctatggactgatgcaggtgaccccggacgccgcccgctacgtgtgcaaacgccacggcgcgacatacgacctggggcggctgaagaacgattcggtctacaacgccacgctcggctcggccgagctcggcgggctgctcgaggactatcgcggctcctatatcatgaccttcgccgcctataatgccggccgcggcagcgtgaagaagtgggtcgagcgttacggcgatccgcgcaacccgaaggtggacgcggtcgactgggtcgagctgattccgttctccgagacgcgcaactacgtgcagcggatcatggaaaaccttcaggtctaccgcgcccgcttcggcgggggcacgcgcctgcagatcgaggccgatctgcgccgcggcgcggtcagcctggaatag

SEQ ID NO: 730 - DNA, 891 bp, BradyrhizobiumColbertium
atggcagccaagacgaagttccgggggtcgttcaccgccttggttacgccgttcaagaacggctcactggacgaggcggcgttccgctctctggtcaactggcagatttcggaggggaccaatggcctcgtcccggtcggtaccaccggcgagagcccgacgctcagccatgacgagcacaagaaggtcgtggaatggtgcatcgctgaagccaagggccgcgtgcccgtgatcgcgggcgccggctccaactcgacccaggaggcgatcgaactgtcgcagcacgccgagaaggcgggcgcggatgccgtgttgatcgtcacgccctactacaacaagccgacccaggaagggatgtaccagcacttcaaggcgatcaacgacgcgatcggcattccgatcatcatctacaacatccccccgcgctcggtgatcgacatgtcggtcgataccatgaagcggctttgggaattaaagaacatcgccggcgtcaaggacgccaccgccagcatggtccgcgtgtcgcagcagcgtgcggccatgggcgaggacttcaaccagctctcgggcgaggacgccaccatcatcggctacatggcccatggcggccatggctgcatctcggtgacctcgaacgtcgcgccgcgcctgtgctccgaattccacgcagcctggcagaagggcgacaccaaggctgcgcttgcgatccacgacaagctgatgccgctgcacaacaacctcttcatcgagagcaatccggcgccggtcaagtacgcgatgtcgctgctcggcaagctggaggagacgctgcggctgccgatggtaccggtgtccgagccgacccgcgttgccgtgcgcagcgcgatggtgcacgcggggctgatcaactga

SEQ ID NO: 731 - DNA, 414 bp, BradyrhizobiumColbertium
atgctcaaggagttccgagagttcgccatgaagggcaacgtcgtcgacctggcggtcggcgtcatcatcggcgcggccttcggtgccatcgtcaactcgctggtcggcgacgtcatcatgccgatcatcggcgccgtgaccggcggcctcgacttctcgaactatttcacccccttgtcgaaggcggtcaccgccaccaacttagctgatgccaaaaagcaaggcgccgtgctggcttgggggagcttcctcacgctgacgctcaacttcgtcattgtcgccttcgtgctgttcctggtgatccgtgccgtgaacacgctgaagcgcaacgaagaggcggcacccgccgctcccccgaagccgaccgccgaggtcgagcttctgaccgagatccgcgatctcctcaagaagtga

SEQ ID NO: 732 - DNA, 474 bp, BradyrhizobiumColbertium
atggccgataagaacgaacgtccaatcaaggtcatggcggaaaatcgcaaggcccgcttcaactatgccatcgaggacacgatcgaggcgggcattgcgctgaccggcaccgaggtgaagtcgatccgcaacggcaagagcacgatcgcggagtcctatgccgattccaagaacggcgagatctggctgatcaatgcgaccattcccgaatatcttcaggggaaccggttcaaccacgagcccaagcggccgcgcaaactgctgctccaccgccgacagatcaacaagttgatgggcgcggtcgaccgcgagggcatgacgctgatcccgctcaagctttatttcaacgagcgcgggcgtgccaagctgcagctggcggttgcaaaaggcaagaagctgcacgacaagcgcgagtccgagaagaagcgcgactggagccgggagaagggacggctgatgcgggcgaggggatga

SEQ ID NO: 733 - DNA, 591 bp, BradyrhizobiumColbertium
atgaatcaacggaacctgctcgaagttgattggagccagattcccgcgccctccgacgacggcggcgccgcgcatctgaagggtatgccgctgccgccgatcgacctgctcgcgaccgacgacacatcggtcagcctatcggcgctgcgcggccgcaccgtcgtgttcgcctatccccgcaccggcgagccgggcaagatcgcgctggtcgacgattgggacatgatcccaggggcgcgcggttgcacgccgcagacgtgcgcatttcgcgatctctacgccgagctgaaagccgccggtgccgcacacgtgttcggcctctcgacccagagcaaccaatatcagaccgagatggcctcgcgcctgcatctgccctttccggtgctgtcggacgagaagctggcgctcacgcgcgccttgaacctgccgaccatggaggttgcaggcctgacgctgatcaagcgcctggcgctgatcatcgacgacgccaggatcacgcatgtcttctatccggtgtttccgcccgaccggaacgccgcggacgtgctggactggctgagggccaatccagccgacggcatcaaagcctaa

SEQ ID NO: 734 - DNA, 675 bp, BradyrhizobiumColbertium
atgacgacttcgaggagtgaggcggcacggtcagccccccagcctctcgaggtcgttcccgaccgtgactgcccgctctgtccgcgcctgctcgcctttcgcgaggcgaaccgcgcgcgcgagccatcctggcacaatgcaccggttgcccccttcggcgacatcaaggcgcgtcttttgatcgtcggcctcgcgccggggatgcagggcgccaatcgcaccggacggccgttcaccggcgactatgccggcgacctgctctacgcgacgctgctcgaatacggctttgcaaggggtacctatcgggcgcgtccagatgacggcctgaagctggtcgattgccggatcgccaatgcggtgcattgcgtgccgccgcagaacaagccgctgccgatcgagatcaacacctgccgccggtttcttgtggcgaatctcgcgtcgatgccgaaccttcgcgcgatcatcgcgctcgggcggatcgcgcacgacagcgtgctcaagccgctgaacctgaagggctcgcaggccccgttcggccacggcgcggtgcatcaggccggcgggctcaggctctatgacagctatcattgctcgcgctacaacacgaacaccggcgtgctgacgccggacatgttccggcgcgtgttcgcgaaggtgaaggcggacctcgattag

SEQ ID NO: 735 - DNA, 645 bp, BradyrhizobiumColbertium
atgtcaccttcttcgaccaacaagatcgcgctcttcatcgatggggccaatctctacgcaaccgcgaaaactctgggcttcgacatcgattacaagcgcctgttgaaggagtttcagagtcgcgggacgttgttgcgggcgttctactacaccgcgatcatcgaggaccaggaatactcctccatccgccccttgatcgactggctggactacaacggctacaccgtcgttaccaaggcgaccaaggaattcatcgacgcttccggccggcgcaaggtcaaaggcaacatggacatcgaactcgctgtggatgccatggagctcgccgagcatatcgaccagatggtgctgttctccggtgacggcgacttccgctcccttgtcgaggccgtgcagcgccgcggcgtgcgcgtcaccgtggtctcaaccatcgccagccagcctccgatgatcgccgacgagctgcggcgtcaggccgacgtcttcaccgaccttgtcgagctgcaatccaagctcggccgcgacccgtccgagcgccccgccccgcgtgaccgcggcgagcgtggcgaacgccaccatgccccgcaattcctccagcgcgcgaccacgatggcgccgaggggcgatgacgacttcgaggagtga

SEQ ID NO: 736 - DNA, 393 bp, BradyrhizobiumColbertium
atggctcgcgtcaccgtagaagattgtatcgacaaggtcgacaaccggtttgacttggtcctgctggccgcccaccgcgcccgcatgatctcatccggttcacaactaacggttgaccgcgataacgacaagaaccctgttgtgtctttgcgcgaaattgccgagacgacgatctcgccggaggacctccgcgaggagctggtgcactcgctgcagaagttcgtcgaggtggatgagccggagccggatgcggtgccgctgatcggttccgcgggtgccagcgtcgatgcggacgataccgaagtcgccgtggagcgcatgaccgaagaggagctcctgaagggtctggaaggccttgcgcctcccgaggagcagcccgaggaagacgagtaa

SEQ ID NO: 737 - DNA, 201 bp, BradyrhizobiumColbertium
ttgacgcatcatgcgcgcgcggggcctggccgggcgcgcgaccggcgcagtcggggccactgcaaccgattcggttgcggcctgcatctgcgtggatctgcggcgccgatataccatcccatcctgccttcaacggaccgtgccccgacccgttgcacacatcctagctccgatcgcccgcgtgtccgatcaattcagtga

SEQ ID NO: 738 - DNA, 2175 bp, BradyrhizobiumColbertium
atgcgtcaatatgacctcgtcgagcgcgtcagatcctacaatcccaacaccgacgaagacctgctgaatcgggcctatgtctacgccatgaaggcgcacggctcgcagacccgggcctcgggcgatccttatttctcgcacccgctcgaagtggcggcgattctcaccgacatgaagctcgacgacgccaccatcgtggccgcgctgcttcacgacacgatcgaggacaccgaggcgacgagggccgagatcgatcagattttcgggccggagatcggcgcactcgtggagggactgaccaagctgaagcgcctcgagctggtctcgcgcgaggccaagcaggccgagaacctgcggaaattgttgctggccattgccgacgatgtccgtgtcctcctggtgaagcttgccgaccgcctgcacaacatgcgcacgctggatttcgtgccgacggaatcgcgccggcgcatcgccgaggagacgctcgacatctacgcgccgctggccgggcgcatgggcatgcaggaaatgcgcgaggagctggaggatctgtccttccgcactctcgatcccgaagcctattcggtcgtgatgcagcggctcgacgcgctcgccgagcgcaaccgcaacctgatcggcgagatcgaggatcaactctccaacaatctgcgccacaggggcttgggggcgcgggtctatggccgccgcaagaagccgttctcgatctggaccaagatggagcgcaagtcggtcggcttcgagcaattgtcggacatcttcggcttccgcctcgtcgtcaacgacgtcgaggcctgctatcgcgcgctcgggatcgtccacaccacctggccggtcgtgccggggcgcttcaaggactacatctcgacgccgaagcagaacgactatcgctcgatccacaccaccgtgatcggccccggcaaccagcgcgtcgagctccagatccgcaccgaggcgatggaccagatcgccgagcgcggcatcgccgcgcacgtgttctacaaggaaggcgtgggctcgccgaccgaatacctcaagcgcgagtcgaacgcgttcgcctggctgcgccacacaatcggcatcctctccgagagcgccaatccggaggaattcctcgaacacaccaagctcgagctgttccacgaccaggtgttctgcttcacccccaagggcaagctgatcgcgctgccgcgccacgccaacgtgatcgacttcgcctatgcggtgcataccgacgtcggcaacagcgccgtgggctgcaagatcaacggcaagttcgcaccgctgtcctccgagctccagaacggcgacgaagtcgaggtgctgacctcggaggcgcaatccgcgccgccgtcggcctgggagacgctcgcggtcaccggcaaggcccgcgccgcgatccgccgcgccacgcgcaccgcagtgcgcgatcaatatgtcggcctcggccggcgcatcgtcgagcgcctgttcgaacgcgccaagatcgaatatgccgacgataagctcaaaggcgcgctgccgcggctcgcgcgcacctcgatcgaggacgtcatggcggcggtgggccgcggtgagatcaaggcgtcgcacgtcgcacgtgcgatgtacccggactacaaggaggagcgcatcgcgcgctacggggtcaagaagggccttgcggccaagctcaaggagaaatcctcggagccgcgcagcccggttgcgatcccgatccgcggtatcaattccgaccttccggtgaagttcgcgccgaacggcggcgccgtgccaggggatcgcatcgtcggcatcgtcacgccgggcgagggcatcacgatctatccgatccaggcgcccgcgctgaaggatttcgaggaggagccggagcgctggctcgacgtccgctgggacatcgaagactccgcgccgcagcgctttccggcccgcatcagggtggagaacgtcaatgagcccggcgcgctggcgcagatcgcgaccgtgatcgccgagcacgacggcaacatcgacaacatcagcatgcagcgccgctcgcctgactttacggagacgacgatcgatctcgaagtctacgatctgaagcatctgagcgcgatcctggcccagctgcgcgcaaaggctgtcgttgcccgcgtcgaacgtgttaatggatga

SEQ ID NO: 739 - DNA, 765 bp, BradyrhizobiumColbertium
gtgagtcctgaaatgcccgcagctccgctccgcctcggtgtcaatgtcgaccatgtcgcgaccctccgtaacgcgcgcggcggccgcaatccggatccggtgcgcgccgcgttgctggcgatcgaggccggcgccgacggcatcaccgcgcacctgcgcgaagatcgccggcacatccgcgacgaggacatggcccggctgaaggccgagatctcggggccactcaatttcgagatggctgcgaccgaggacatgttgcgcatatcactcgccaccaagccgcacgcggtgtgcctggtgccggagcgacgccaggaggtgacgaccgagggcgggctggatgtggtcggccagcacaacgcgctcgcaccctatatcgcgcggctgaccgatgcgggcatccgggtctcgctgttcatcgcggccgatcccgcccagatcgagatggcggcacggctgcgcgcgcccgtgatcgagatccataccggcgcctggtgcgacgccgtcgccgagagccgcacggacaaggccgaggccgaatggcggcggatcgtcgccggtgcgagactggcgaagtccgccgggctcgaggtccatgccgggcacgggctggactatgccacggcggagacgatcgcggcgctgcctgagatcatggagctcaatatcggccactacatgatgggcgaggcgctcttcgtgggtctggcagagaccgtgcgcagcatgcgggcggcgatggaccgcggccggagccgggcatga

SEQ ID NO: 740 - DNA, 420 bp, BradyrhizobiumColbertium
atgatcatcggcatcggctccgatctgatcgacatcacccgcgtggccggggtgatcgagcgccacggcgagcgcttcctcgaccgcatcttcaccgcggccgagcgggccaaggcggagcggcgcgccaagaacgagaagatggtggtggcgacctacgccaagcgcttcgccgccaaggaggcctgctccaaggcgctcggtaccggcatcaggcgcggtgtctggtggcgcgacatgggggtggtcaacctgcccggcgggcggccgaccatgcaactgaccggcggcgctctggcccggcttcaggccctgacgccggaggggttcgaggcgcggatcgacctttcgatcaccgacgactggccgctggcgcaggccttcgtcatcatttccgccgtgccgctggcaaagccctga

SEQ ID NO: 741 - DNA, 765 bp, BradyrhizobiumColbertium
atgagcgtgacttcaggaacgaaaactgagagcggcgtcggtgaaacaatccgggtcgtgattcacgctctcctgatcgcgctggtgatccgcaccttcctgtttcagcctttcaacatcccatccggctcgatgaaggcgacattgctggtcggcgactatctgttcgtctcgaaatattcctacggctacagccactattcgatcccgttctcgccgaacctgttctcgggccggatctggggctcggatcccaaccgcggcgacatcgtggtgtttcgcctgcccaaggacgattccaccgattacatcaagcgcgtgatcggtcttcccggcgaccgcatccagatgcgggacggtctgctctacatcaacgacgcgcccgtcgagcggcagcgaatgagcgaatatgtcggggaagacccttgcggttcggaaggcggcggcatctcccgggtgaagcgctggaaggagacgctgccgaacggggtgtcctacgagacgctggactgtgccgacaacggctacatggacaacaccaacgtctataacgtgccgccgggccacttcttcatgatgggcgacaaccgcgacaactccaccgacagccgcttcctcggccaggtcggctacgtgccgcaggagaatctgatcggccgcgcccagatgatcttcttctccatcgccgaaggcgagcatgcctggatgttctggcgctggccctgggccgtgcgctggaatcgcttcttcaaaatcgtccgatga

SEQ ID NO: 742 - DNA, 837 bp, BradyrhizobiumColbertium
atgaaagatgaagccaaggacatcgtgagccaaccggtcgaggcgcaagctggccccgagggggaagctgcgaccaggacggctgcaaacaagacgcccgcgaagaagaagcgggcgcggagcagcaaggccaagagcacggatgcgagcgcattgctcgaggcgcgcatcggccacagcttcactgacccgaacctgttgatgcaggcgatcacgcatgtctcggcgctgaagtccggacgcaagcgcggcgacagctatcagcggctggaattcctcggcgaccacgtgctggggcttgtcgtctccgacatgctctatcatgcattcccgaacgccgacgagggcgagctgtccaagcgccttgccgagctcgtgcgcaaggaaagctgcgccgaagtcgccaagtcgctcggtctgctcgacgacatcaagctcggctcggtcggctccagcgccgacgcgcgcctgcgcaagtccatcctcggcgacatctgcgaggccgtgatcggcgccatcttcctcgacggcggtcatgcggcggcagccgaattcgtcaggcgcaactggaccgagcgcatgcacaagccgcgtcgtcccttgcgagaccccaagaccgtcctccaggaatgggcgcaaggcaaagggctgccgacgccggtctatcgcgaggtcgagcgcaccggcccgcatcacgatccgcagttccgcgtcgctgtcgatctgccgggactggccccggccgaaggcatcggcggcagcaagcgggcggcagagaaggtggcggcttcagtcatgatcgaacgcgaaggcgttggcggcagcaatgacggctga

SEQ ID NO: 743 - DNA, 927 bp, BradyrhizobiumColbertium
atgacggctgaagcaagcggcgaggcccccaccgcgacgcgctgcggcttcgttgcgctgatcggcgcgccgaacgtcggcaagtccacgctcgtcaatgcgctggtcggagccaaggtcacgatcgtctcgcgcaaggtgcagaccacgcgcgcgctgatccgcggcatcgtcatcgagaacaatgcacagatcatcctggtcgacacgcctggcatcttcctgcccaagcgccggctcgaccgcgccatggtctccaccgcctggagcggggcgcacgacgccgatctcgtctgcgtgctgctcgacgccaagaccgggatcgacgaggaggccgaggcgatcctcgccaaggcgtccagcgtcaatcacgagaagatcctcgtcatcaacaaggtggacctggtccagcgcgagaagctgctggccctggcgcaagccgccaatgagcgcatgaagttcgtgcggaccttcatgatctcggcgatctcgggcgacggcgtcgacgacatccgcaagacgctcgcggaaatggtgccgccgggcccgttcctctaccccgaggaccagatgtcggacgcgccgatgcggcagctggcggccgaaatcacgcgcgagaagatctatcagaagctgcaccaggagttgccctaccagtccacggtcgagaccgacaagtgggaggagcgcaaggacaagtcggtgcgcatcgagcagacgatcttcgtcgagcgcgagagccagcgcaagatcgtgctcggcaagggtggcgccaccatcaagtcgatcggcgcggattctcggaaggaattgatgcagatcctggacgtcccggtgcatctgttcctgttcgtcaaggtgcgcgagaactggggcgacgaccccgatcgctatcgcgagatgggcctggacttcccgagggaataa

SEQ ID NO: 744 - DNA, 381 bp, BradyrhizobiumColbertium
atgagcgtgcccagcaatgtccggcgcttcgaagcgctgctctatgcatctttgatgctggatgccctgtcggtcgcggtgcatgaccgcacgcccaacgccggaatgaccgagcagatgatcatgaccgagactctgcttgccggtggcatgatcctgctgctggtctatttcgtccgtctggctgcgcatgggcgcaagaactggccacgctgggtgctcacggcagcgcttgtgctgtcggtgatctcgctcggtcagatcatcggcgaaaagggcctggcactggacagcgcgatcgagatcgtctcctgcgcgctgacgacgatgggcctctatttctccttcaccggcgacgcgcagggctggttcaacgcctag

SEQ ID NO: 745 - DNA, 753 bp, BradyrhizobiumColbertium
atggaatggaccgacgaagggatcgtgctgggcgtgcggcggcatggcgagagcagcgccatcgtcgagctcttgacgcgcgggcacggccggcatctcggcctggtccgcggcggcgccagttcgcggatgcggccgctgctgcaacccgggaacagcgtcagcgcggtgtggcgggcgcggctcgacgagcacctcggcacctacaccattgaagggctgaagctgcgcgcggcgaacctgctgacaacctcgcacggtgtctacggcatcacccatctcgcctcgattgcgcgcctccttccggagcgcgatccacacgaggagatcttcgcgctgctcgaacattcgctcgacgatttcgacgacatcggcggcgccgccgtgcacgtcatccatttcgagctggcgatgcttgccgagctcggcttcggcctggcgctggagaattgtgcggtgaccggcgaaaccacggacctgatctatgtctcgccgaaatccggcggtgcggtgtcgcgcggcgcgggcgagccgtggcgcgaccggctgttgcgcctgcccccattcctgcgtcagggcgaagctgcgagcgatctcaccgagcaggatctccaggacggctttcggctcaccggcctgttcctgctgcgccacgtgctggagccgcggggacagggccattccgatgcgcgcgccggcttcatcaatgccctgatccggcagcaggcaagggcatcgctgccggcaccctag

SEQ ID NO: 746 - DNA, 2259 bp, BradyrhizobiumColbertium
atgggaaaacgaatcgttccgccggaggaaccggccgaaattcacgaggtgccgctgcgtgaagcgctggaagagcgctatctcgcctatgcgctctccaccatcatgcatcgcgcgctgccggatgcgcgcgatggcctgaagccggtgcaccggcgcatcctctacggcatgcgcctgctgaggctcgacccgggcacggcgttcaaaaagtcagccaagatcgtcggcgacgtgatgggctcgttccatccgcacggcgaccaggcgatctacgacgccatggtgcgcctcgcgcaggatttctcctcgcgctaccccctggtggacggccagggcaatttcggcaacatcgacggcgacaatcccgccgcctaccgttacaccgaagcgcgcatgaccgacgtcgcgcggcttctgctcgacggcatcgatgaggacggtgtcgagttccgcgccaattatgacggccagtcgaaagaacccgtcgtgctgcccggcggcttcccgaacctgctcgccaacggcgcacagggcatcgcggtcggcatggccacctcgatcccgccgcacaacgccgcagagctttgcgatgccgcgctgcatctgatcgagaagcccgacgcgaaatccaaggcgttgctgaaatgggtcaagggaccggacttcccgaccggcggcatcatcgtcgattccaagcaggcgatcgcggaggcctatacgacggggcgcggctcgttccgcgtccgcgcgcgatggcagcaggaagagggtgcgcgcggcacctgggtggtcgtcgtcaccgagatcccattcctggtgcagaagtcgcggatggtcgagaagatcgccgaactgctcgaccagaagaagctgccgctggttggtgaagtccgcgacgaatccgccgaggacgtccgcctcgtcatcgagcccaagtccaagaacgtcgatcccgcgctgatgatggaatcgctgttccggctgaccgagctcgagaacaagatcccgctgaatctcaacgtcctgatcaaggggcgcatccccaaggtggtcggcctcgcggaagccttgcgcgaatggctggatcatctgcgcgacgtcctgatccgccgcaccaactaccgcaagggcgagatcgagcaccggctcgaaatcctcggtggtctgctgatcgcctatctcaacatcgacgaggtgatccggatcatccgcaacgaggacgagccgaagccggccttgatcaaggcgttcaagctcaccgagttgcaggccgactccatccttaacatgcggctgcgcaatctgcgcaagctcgaggaaatggagatccgcaccgaggacaaggatctgcggaaggagctgaagggcatccaggccctgctggcctccgagcccgagcagtggaagaaggtcagcgagcaggtcggcaaggtccgagagatgttcggaccgaagacgccgctcggcaagcgccgcaccacatttgcagatgcgcccgagcacgatctcgccgcgatcgaggaggccttcgtcgaacgcgagccggtgacggtcgtcgtctccgacaagggctggatccgcaccatgaaggggcatgtcgaggatctctcgggccttgccttcaagcaggacgacaggctcggctttgccttctttgccgagaccacttcgaagctgctgctgtttgccaccaacggcaagttctactcgctcgacgtcgcaaagctcccgggcggccgtggccatggcgagccgatccgcctgttcatcgacctcgagcaggaggccgcgcccgtcgcgctgttcgtccacaagggcggacgcaagttcctggtcgcgagccatgagggccagggcttcgtcgtcaacgaggacgattgcgtcggcaccaccaagaagggcaagcaggtcctcaacgtcgacatgccgaacgaggcgcgtgcgatcaccgaggtgaccggcgacaccgtcgcggtgatcggcgagaatcgcaagatgctggtcttcccgctcgaccaggtgccggagatggcccgcggccgcggcgtgcgcctgcagaagtacaaggacggcggcctttcggatgttgcggtattcgattccaagacgggcctgacctggaaggattcggcgggccgtgaattctcggcgaccatgaaggaactcgccgagtggcagggcacccgcgccgatgccggccgcctgccgccgaagggttttccgaagtcgaacaagttcggtcgggggatcgggtag

SEQ ID NO: 747 - DNA, 1593 bp, BradyrhizobiumColbertium
ttgctggcgaccgtaaccgtgtcgcgagaaggcaagaagaaaccgatgttcagactcaagtccctcatcccggcgctgctcgctttggcgctggcggcgcctgcgcatgcggcgggcaatctcgtcgccgtgctggaagcggagatcgtgacgctcgatccgcatttctccacggcctatatttcgcgcacgtttggctacatggtgttcgacacgctgtttgcgaaggactccaagggcgacgtcaggccgcaaatggtgcaggactggaaggtctcgcccgatggactgacctacagtttcacgctgcgcgacggcctgaagtggcatgatggccagccggtcacatcagccgattgcgtggcctcgctgcgtcggtggggcacccgcagcgcgctcggtcgccgcatctttgcgatcaccgtgtcgctggagccgatcgatgccaagaccttcgtgctgacgctgaaggagccatccgggctcgtcatcgacgcgctcggcaatcccgtcagccccgtcgcgttcatgatgcccgagcgcatcgccaagacaccgggcgaccaacgcatcaccgagatcatcggctccggcccgttcgtctacagcaaggccgatcaccgcaccggcgaccgcatgatcctgaagaaattcgccgactatgtgccgcgtccagagccggccgacttcctcgccggcggcaagcgcgtgaacgtcgatagcctggagatccgcgtcattcccgatggtgcaaccgcagcctctgcgctccaggccggcgaagtcgatttcatgcaatacgcgccgttcgatctgttgccgcaattggagaagaactcgcgcgtgaagctgctcaatttcaccggcggcaacatgtttgcgggcgcctaccgcctcaacgccgcgtcgaaaccgttcgacgaccccgagatccggcgcgtgctgtggaagctggtcgaccagcgcgaagtgcttgatgcgctcgggctcgatgccaaatatgccacgccatgcgcgacattcttcacctgcggcacgacctatgagagcaaagcgggcaccgaggccgcggcgaagccgtcgatcgatgcggcgaaggctgcgctgaaggccaccaaatatgccggcgagcccgtcgtcgtcatgcaggccaatgatctcgaagccccgcgcgtctcggcacaggtgctggccgagcgcttgaaggccgccggcttcaatgtcgatctgcaggtaatggactgggcgagcgtgctggcgcggcgtgccaagaaggagggctggagcgtctatggcgttcacgccggcggttttgatctcggctccccgttgacgaacgtcatggtcgccttcaactgcgcagacttcaccggctggcaatgcgatgcgcgcatcacgccattgctggaagccttcgccaaggcgcccgccgaggaggaccgcaagaagatcgcggccgagatccaggccgtcatgtacgaacaggctcccggaatcccgtggggccagttcgcgcagcccgccgcctatcgcgcgaccttgcgcggtctgataccgtccgccatcccggtgttctggaacgttgagaagtaa

SEQ ID NO: 748 - DNA, 1545 bp, BradyrhizobiumColbertium
atgtacgatgtcattgttgtcggcggcggttccgccggcgccgccgtggccgcaaggctctccgaagatcccgcacgccgcgtgctgctgctcgaagccggcctcgactggcgcgccgacgaagcgccctgggaggtgaggacgccaaatcccatcccgatcatccacaagcgcgagtatcaagagaaatggcagtggcccgatctgctgacgcgccgcgtggccgggcaggagccgcgcttctactggcgcggcaagggcctcggcggctcgtcgatgatgaacggccagatcgccatccgcggcgttgccgatgccttcgacgaatgggccgccaatggctgcaccggctggtcggccaaggaggtgatgccgctgttctcggtgatcgaggacgatctggagttcggtgacgccgcgggccacggccgcggcgggccgttgccagtgtatcgcgcgcccaccgagaaatggggcccgatcgaccgcggcttgcgcgacgcggcgctggcgagcggctatccctggtgtgccgacgtcaacggcccggacggcgagggcgtggcctgctatcccatcaacagccgcgacggccgccgcatcaccaccaatgagggctatctcgagcccgcgcgcggccgcgccaatctggagatccgcgggcatgcgctggtcgagcgcgtgctgatcagcgacggaagggcgaccggcgtccgcgtccgcatcgaggggcagggtaccagcgacatcagcgcgcgccagatcgtgctgtgcgccggcgccatccacagcccggcgatcctgctgcgctccggcatcggacccgccggggaattgaaggcgatggggatcgcggtcgcgcgcgatctgccggtcggcaagcatttcttcgaccatccgctgtttcgcgccacgatccagctccgggaggagcttcgtcccaccgatcccgacacgcgccacaccaattgctgtgtgacctattcgtcgggcctcgccgatggcggcaagcgcgacatgatcctgatcgcgttcaaccatcgcggcattggcaacgccggcgcgatcggcgcgggcctgttcaacgcttattcgcgcggcacgctcaagctggcctcgaccgatccttcgatcgatcctgtcgtcgaggagaacatgctggccgacccccgcgacatgctccgcatgatcgatgcggtgagacgcctcgctgtgatcacctcgcaaccggcgctgtcaggcatcgccgaatggatccggctcgccgacacggacctcacgctgccgcaggccgcggcactgccggatcacgagctcgatgcggtgctgagacgtgagaccggcgacatacagcatgccgcaggcagctgccgcatgagcggcgttggtgatgccgacggcgtggtcaatcctgatgggacggtgaaaggcctcagcggcctgcgtgtcgccgacgcctcgatcatgccgtcggactgccgtgccaacacgcacttcacgacggtggtgattggggaagcgatcgctcggatgatgatgcgatag

SEQ ID NO: 749 - DNA, 1215 bp, BradyrhizobiumColbertium
atgaccgatctttccatcgatgcccggctcctcgctcccgacaatgatcggcaccgcgccaatctcccgatcgccgccattgcagcggcaattctcttcgggggagcgatggcgctgtcgggcacgatctcctggcagcagggattgttgtttctcctcggcggcggccttggcctgacgctctatcatgcgctgttcgggttcacctcggcctggcgcgtcttcatcgtctcacgcagaggagcgggactgcgcgcacaaatggtcatgcttgcgctggcgacagccctgttctttccagcgctggcgcacggctcgctgttcggcaacgccgtccgtggcgagctcggcgcggtcggggtgggcatgttgagcggagcgttcctgttcggccttggaatgcagctcggcggcggctgcgcctccggaacgctgtacacggccggtggcggcaacacgcgcatgctggtgacgttggcggccttcatcgccggttcgacgatcggtgcaatgcatttgccgtggtggagcgagctgccgaacgtcggctcggtatcgctgatcgaccagctcgggtggctcccggcactgctgctctgctgggccgcaatggccgcaatccatctgttcaccgtcagggccgagctccggcggcatggagagctggagccgggagcgcggacgaaactgcgcggagcacgccgctttctccaagggccgtggcccctcctgtggggcgcggtcctgctcgcgatcggcaatttcgccacgttgtacctcgccgggcggccatggggcatcacctcagctttcgccctttggggatcgaagatcctgatgggccttggcatcgacgccgcgtcatggccgtactggcaaggcgcgcgcgccgcctcgctcaaccaaagcatcttcgccgacatcacctccgtcatggatttcggtatcatcctgggagcgttgctggccgcgggtctcgccggcaagttcagccccacctggcgtatctcgccccgctcgctgctcgctgccgtcgtcggcggcctgctgctcggatacggcgcgcgcctcgcctatggctgcaacatcggcgcctatttcagcggaatcgcttccggcagtctgcacggctggtgctggctggtcgcggctttcgtcggcaacatcctgggaacgcagcttcggccgctgttcggcctcgctgtcgaacgctag

SEQ ID NO: 750 - DNA, 756 bp, BradyrhizobiumColbertium
atggctaaaatcgcaatcgtcaccggcgcgagccgcggacttggtcgcaacatggcggtcaacatcgcgcgcaaggggagcgatgtcatcatcacataccggagccgcgcagatctcgcggagagcgccgtttccgagatcaaagcgctgggacgccgggccgtggccttccagttggacagtgccaatgtcgccaaatttcccgatttcgcgcgagcactgagccagacgctgaaggagacattcgggcgcgagaccttcgactacctcgtgcacaatgccggcgacggccttttcgctacgctcggcgagacaaccgtggctcagttcgatcagcagatgaacctgcacgtcaaaggcgtattcttcctgacgcaggctctcttgccattgatggccgacggtggctcgatcgtgaccatcggcagtggcctgacgcgtgtcacctacccgggcttcgccgtctataccatcgcgaaagccgccgccgacatgatggcggtctgcatggccaaggaactcggaccgcgcggcatccgcgtcaacagcgttgcgccgggtgcgatcgaaaccgactttggtggcggtctggtgcgtgacaatccggacgtgaacaagcagtttgcaggcatgacggcgctgggccgcgtcggcgtccccgacgatatcggtccgatggtcgcgagcctgttgagcgaagacaatcggtgggttacggggcaacggatcgaagtatcgggcggtcagatgatctga

SEQ ID NO: 751 - DNA, 945 bp, BradyrhizobiumColbertium
ttgctcgacgttgttcgccgctacgcgcatttgcattccgatcaaaacggtgccgccaagaccccgatcccgggcctcacggccattcgagctacgacgcagggtcagctccagcacgcaatcaacaggccgctcgttgcgctcgtcctgcagggtcgcaaacgcgtgacgatgggatcgcataccttcgatttcggggcgggggagtcgctcttgatctcggccgatgtgccgacggtaagccagataacccgcgccagcgcaaaggctccctatttttccctgatcgtcgagctcgagccggcggtgatcgcgaatctgatcgtggagatgaatctggctcccgagcagcgaggcgcccctgtgagcgtcgatccgactgagtcggaggttgccgatgccgcgctgcgactgatgcggctgctcgatcgcccgtcttctctgccggttctgcaatcccagttcgtccgcgaaatccattactggctgctggcggggcggcacggcgcgtcgatacgagctctgggggtggccgacagccacgcgcaacgcatcgcgcgcgctgtcgcaatcattcgatccgaatacgcaaggccgttgcgcatcgagcgcctggcggacgcggctgccatgagtccttcctcgtttcaccagcacttccgcgcgatcacatcgctcagtcccctgcaatttcagaagcagctgcggctcatcgaggcgcgcaggatgatgctcgaggagggctccgaggtgagcagcgccgcctttgcagtaggctacgagagcgtcccgcaattcaccagagaatatggacgcatgttcggcctgccgccggccagggatatcaaggccgccctcggtcaaatggacactgcgcctgaggccatgccagtctgcgctcggaacgtacgagcccggacagcgcagtgcgccgctcttccctag

SEQ ID NO: 752 - DNA, 1386 bp, BradyrhizobiumColbertium
atggatatccgcaacgttcaagcggaggctgacgccggtcacggcgtcagcttcggggaggcctttcgagtctggctgcgtgtcgcgtccttgagcttcggcgggcccgcgggccagatcgcggtgatgcatcgcatcctggtcgaggagaagaggtggatctccgagggccgtttcctgcatgcgctgaactactgcatgctgctgccggggcccgaggcgcagcagcttgcgacctatgtcggctggctgatgcatcgcaccgccggcgggctgatggcgggcgggctgttcatcctgcccggcgtcgtcgccatcatgggcctcagctacatctatgcggcattcggcaatgtcagcttcgtcgaggcactgttcttcgggctcaaggctgccgtgctcgccatcgtcgtcgaggccgtcgtgcgtgtcggcaagcgcgcgctgaagaaccgtatcatggtcgcgctcgcggccgcggccttcatcgcgatcttcttcttcgcagtccccttcccgatcatcatcatcgcggcaggtatcatcggctatgtcggcgcgcgcagcggccgctctgaattcgccccggccggtcacggccatggcgacagcagcgccgcggtcgacagcatgctcggcgaggccatgcccgaccacgtcaagcccgacacagcgcgcgcgatccggctcagcgcgttgtggctggcgctctggctggtgccggtgatcggactgctcctggccttcggtcaaggcaacgtcttcagccagatcgcgctgttcttctcgaagatggcgctcgtcactttcggcggggcctatgccgtgctggcctatgtcgcccagcaggcggtcgagcattatcactggctgaagccgcacgagatgctcgatggcctcggcatggccgagaccacgccggggccgctgatcatggtgttgcagttcgtcggcttcatggctgcctatcgcgatccgagcggcttgtcaccaatgctggcggccacgctcggcggcctgctcgcgacctgggtcaccttcacgccctgctttctgtggatcttcctcggcgcgccctatatcgagcgcctgcgcggcaacaccgggctcgccggcgcgctcagtgcgatcactgcggccgtggtcggcgtgatcctcaacctctcgatctggttcgcactgcacacgctgttccgcgaaaccgtgccggtgcatgcgtgtccgctcgacttcgacatgccggtgccgaggagcgtcgacctgccggcgctgttgctcgcggtcgcggcggcgactgcgatcttccggttcaagctcggcatgctgaccgtgctggcgggaagctgcgcggcgggcctggcactgaggctggcggcggtgatctag

SEQ ID NO: 753 - DNA, 819 bp, BradyrhizobiumColbertium
atgtctacattcaccaccatctcatccgacaaactggcacggctgatcggcacggcgaacgcgcctgcgctgatcgatgtgcgcaccgaggaggattttgctgccgaccggaggctgatccccggctccatcaagttcggccacgacaatgtgacggactggggcggcgcgttcgccgggcgccgtgccgtcgtatcctgcctgcgcggagagaagctcgcgcagggcaccgcagcctggctgcgccagctcggcgtgcaagccgaaacgctggagggcggcttcgagggctggaaggcggccaggctgccgctggtcgatgtccgcaagctgccgccacgcgatgccagggggcgcaccgtctgggtgacgcgggcgcggcctaaggtcgatcgcatcgcctgcccctggctgatccgccgcttcgtcgatcccgacgcggtgttcctgtatgtggcaccgtcggaggtcgtcggcgtcggcgagcggttcaatgcagcacccttcgacatcgagaacgtgttctggagccaccgtggcgagctctgcaccttcgacgtcatgatcgaggagttcgggatcgccttcccgcccctgctccggctcgcaacgctggtgcgcggcgccgacaccgcgcggccggatctcgcgccggaggcgcccggcctgctggcggcctcgctcgggctgtcgcgcatgtatgacgacgacctcgatcagctcgaggccggcatgctgctctacgatgccttcttccgctggtgccgcgacgccaccgccgagacccacaactggcccaccaacaaggtgaaggcgtaa

SEQ ID NO: 754 - DNA, 966 bp, BradyrhizobiumColbertium
atgcattcccactccatcgaacaatggacccacgaccacgccttcctcggcgagaagcacgaagacaacgagcgccgcacctggctggtggtcgtcctgacgctggtcatgatggtcggcgagatcgttgccggctcggtgttcggctcgatggcgcttctcgccgacggctggcacatggggacgcacgcggcggcgctgggcattgcggccttcgcctatcgcttcgcgcggcggcacctggggaatgcgcatttcaccttcgggaccgggaagttcggggatcttgccgcctttgccagtgccgtcatcctcggccttgttgcggtggagatcgcctatgagagcgtgctgcggctgatcacgccggtgccgatcgtctacggcgaggccatggccgtggctgccctcggcttgtgcgtcaatctcgtcagcgcctggttgctgcgcgacggccatgatcatcaccatcacggtcacgaccatggccatgcgcatgatgaccacgacgatcgtgaccgcgatcatcggggccatcatcaccacgacaacaaccttcgcgcggcctatgtccatgtcatgacggatgccgcaacttctgtgctggcgatcgccgcgctcgccgtcgccatgtattcgggctgggtctgggccgatccggcggtcggcctgatcggaagcgccgtaatcgcgagctgggcgttcggcctgatcaagtcgtcgggtgcggtgctgctcgacgcgcgcgccgacgagaagctggagcgggtgatccgggcccgcatggaagtcggcgacgatcgggtgacagacctccatctgtggcaggtcggccccggccattgtgccgtgctgctctcggtggtgtctgacaagccgaacgagccgtccgtctacaagcgccggctcgcggggttgaagggcctcagccatgtcacggtcgaggtcgagacctgcccgcattaa

SEQ ID NO: 755 - DNA, 1278 bp, BradyrhizobiumColbertium
atgtccgcacgctcgcaagtctcccgcccgcagcagggcgaatatgccgcagacgctgttgacgcactctcgcggcaagccgcaaatgcacgagatgacaaagaccaaaagcacaaggacatgagccagcgtcggcttccgatcatcctggcgctcggcaccacgcagaccctggcctgggcttccagctattatctgccggcgcttctcgccgatccaatggcgcacgaactcggcatctcctccaactggattttcggcgcattctcgaccgcgctggtgctctcggcgatgctcggcccgcgcatcggacggcagatcgatctcttcggtggcaggcaggtgctctcggcctcgaacctgatcatggccgccggacttgtcctgctcggtctgtcacagtcggtggcggtgatggcgatcgcctggctcgtgctcggcatcggcatggcgatgggtctctacgacgccgccttcgccgctctggggcgcatctacggcaccgaggcgcgcgggcccatcaccggcatcacgctgatggcgggctttgcctccacggtcggctggccgctcaccgcctggggcctgtcccatatcggctggcgcgaaacctgctttgcctgggccgccgccaacgtcctgatcggactgccgctcaacttcttcatgttgccggtgatcaagggcgcgaaacaggcggcggccacggccgagaagccgcatgtgccgctcgaccgcaccatgctcctgctggctttcgtctttgcggcggtctggaccgtgaccggcgcgatggccgcgcacttcccgcgcatcctggagacgacgggagccacgccggcagaggcgatcgcggccggcgcactgatcggccctgcgcaggtcggtgcgcgcatgctggaggccggctttctcagccgcttccacccgctttggtcgacgcggctcgccagcctcacccacccgatcggagccgtgatcgtggcaatcttcggcggcgctgcggcaagcgcctttgcgctgttccacggctcgggcaacggcattctgacgatcgcgcgcggcacgctgccgctgtcgatcttcggcccgaaggatttcggctatcgcctcggcatcatcggtgccccggcgcgaatggcgcaggcggtagcgccgctcgccttcggcctgctgatcgatctcatgggcgccaaggtgctgatcgtgtcctccgcgctcagcctctcggcgcttgcagcgctgttcctgatccgcacgggcccgcgcccggattga

SEQ ID NO: 756 - DNA, 1260 bp, BradyrhizobiumColbertium
atgcaactgacttcgcgccttgcgctgatgaactggctggccggccaggggctcacgggcctgcctgaaagcgagctgctccgcggcttctgcgagcgttgctgcgccgaggggctggaactgtcgcgtgggctcgtcgtcatcgacacgctgcatccaatctatgagggccgcggcttccgctggagcgaccggtccagcaacgagagcgatgcgttcgaatacggctcgaccgccgacggggacgcggccaagaactggcgccgctccgtgttcttccacatgctcgagaacggccacgacgagatggtgatcgatctcgcggaggcgccgtcgctcgatttttcgcagatcggcgaactcgccgacaagggccacaagcactatctcgccttcgtgcatcgcttcggcgagaatggtgcgctcggcctgatggattgcctctattcctgctggaccacccgccgcgagggcggcttctccggattggaactggaggcgctgcgcgatctcgtgccggtgctcggcctcgccatcaagtcggcgcagcaagtcgatatcgtgcgtaccctcggcagggtctatctcgggcgcgatgcctccgagcaggtcttgcgcgggcgcatctcgcgcggcgtcaccgagcgcatcaacgccgtgctctggtattcggacttgcgcggctcgaccgggatcagcgagagcatcggcccagacgagatcattccgttcctcaacgactacgcgcaggcggtgatcgacgcgatccacgacgcgggtggggacgtgctgaagctgatcggcgacggcgtgctcgcgatgttctggggcgaggatatggcggatgcgcggcgagcagcactgcgggccgagcacctgttccgcaagaacctcgccgcactgaatgagcggcgcgcggcggagggccgtccgatcacgtcggcctatatcggccttcatgtcggcgaggtcttttacggcaacatcggaagcgaggaccggcttgatttcaccgtggtcggcccgaccgtgaacgaggtcagccgcatcgcctcgatgagccgctcggtggaccgggagctgctggcctcatccgagttctacaagggtctcgatgcagccggccgccgctatctcgtctcgaccggccgctacgcgctgcgcggcatcggccgcgcgcaggatctctatacgctggatccggaggtcgatgcgaacgagccggtgatggggagctacgagcgttacctggcgggttag

SEQ ID NO: 757 - DNA, 1245 bp, BradyrhizobiumColbertium
atgtcaatgccagctcgcctcccggacacgttcaaccgcctcgcctggtccaacctcgcggcgcagtcggccgagcagatcgcattggctgcggcccccatcgtcgcggtgctcacgctcggtgtggcggaaggccggaccggcctgttgcagaccgcactgaccctgcccttcgttatcttcgccattccggccggcctgctcgccgaccgtatctcccgccgcgcgctgatggcggcagccgaggcgctgcgggcggcggcccttgcggccatagtgctgctgctcgcgctcggcgcgctcaatctcccgctgctcgcgctgctcggcttcgctgccgtgtgcggcaccgttgtctacagcgtagccgcgccggcgctggtgccttcgctggtgagctcggacctcctgccggcggccaatgctcgcatcgagctcgcgcgcaccatcgccttcgccagcggccccgcactcggcggcgcactggtgggatggtggggcgcgagcccggccttcggtttcgctgcggcgctgtcggcgattgccgtcgtgctcctctccggcatctacgagccggcccgcgcgcctgcgccgcggcgccatcccttacaggacatccgcgagggcgcggcgttcgtgtttcgccacccgctgctgcggccggtgttcatcacccagttcatcttcaacaccggctggttcctgcagatcgccgtattcgtgccctacgctgtacgccatctcggcctcacggctttgggcgtcggcaccgtgctgaccatgtacggcgtcggcatggtgatcggcgcgctggttgccacgcgtgtgatgcggcgcctctccttcggcaccgtcgtcggcctcggaccggtaaccggcttcgtcgcggcgttggtgatggcgctgacggtgccgctcccctcgccctggctcgcggccttcagcttcttcctgctcggcgtcggtccgatcctgtgggtgatctcgaccaccacgctgcgccagtccgtgacgccgtcgcgcctgctcggccgcgtctccgccatcaacatcatgagctacggcgcccgtccgctcggctcggcgctgggcgccggcgtcggcgggctctggagcgcggaagcctgcctctatctcgccgccgccgtgttcggcgtgcaggcgctggtgatcctgctgtcgccggcagtgtcgctcgatcggcagccggacatggtcggggacgaagcggcggtgcggtgctag

SEQ ID NO: 758 - DNA, 1365 bp, BradyrhizobiumColbertium
atggatgcccgatcacccgacctgaccgaagccttgagccagcccgccagcggctggcgttctgatgcgcccaccacgaagagccttgccgaggtcaattccacggtctcgatcccggttgccggccactggtcgcggcggctgctggcctttgtcggtcccggctatctcgtctccgtcggctacatggaccccggcaactgggcgacggacctcgccggaggctcgaagttcggctacacgctgctctccgtcatcctgctctcgaacctgatggcgattctgctgcagtcgctggcagcgcggctcggcatcgtcaccgaccgcgaccttgctcaggcctgccgcgcctcctatccgccggcggtgaacttcctgctctggctcgcctgcgaggcggcgatcatcgcctgcgatctcgccgaggtgatcggcaccgcgatcgcgctcaaactgctgttcggcatccccctgatcggcggcgcgctgctcgccgcgctcgacgccttcctgctgctgctcctgatgaaccgcggcttccgttttctcgaggctttcgtcatcgcgctgctcgtggtgatcgcggtctgcttcgcggtccagatcgcagctgcggccccgcctgtcgcggaggttctgcgcggctttgtgccgacgagcgagatcttcaccaactccgacatgctctacatcgcgatcggcatcatcggcgcgaccgtgatgccgcacaacctgtacctgcactcctcgattgtgcagacgcgggcctatgagcgcaacgataccggccggcgcgaagcgatcaaatgggctacgacggactccacgatcgccctgatgcttgcgctgttcatcaacgccgcgatcctcgtggtcgctgccgcgaccttccacaagagcggccattccgacgtggccgagatcggccaggcattcgagctgctctcgccgttgcttggtctcggcattgcctcgacgctgtttgcggtggcgctgcttgcttccggcctgaattcgacggtgacggcgacgctcgccggccagatcgtgatggaaggcttcctcgacctgcgccttccgagctgggcgcgccgcctgctcacgcgcggcatcgccatcatcccggtgatcgtggtcacggcgatctatggcgagcgcggcacggctgatctgcttgtgttcagccaggtcgtgctctcgatgcagctgcccttcgccgtcatcccgctggtccgtttcgtctccgatcgccgcaagatgggcaagttcgcgatcccgatgtcagtcgccgcggtcgcgtggatcgtcgcgagcgtcatcgtgattttgaacgtcaagctgctggcagatacgctgttcgggtga

SEQ ID NO: 759 - DNA, 129 bp, BradyrhizobiumColbertium
ttgatcgcctgcgcgatcatcgaacgacggcaggtttactgcttgtatcagggctacccgcgcgcaatctgccccgcgcagcaatgtgtgaaagacgtcgatctcgacgtcaatccgctcggcccctag

SEQ ID NO: 760 - DNA, 690 bp, BradyrhizobiumColbertium
gtgtttacgcacctggtaggggaccgcgccggcgacctcaacgacctcctcacccatggcggcttccgccgcagccagtcgatcgcctaccggccggcctgcgaccagtgccgcgcctgcgtctcggtccgcgtcatcgccaatgagttccggccttcgcgcaacttccgcaaggtcatgacgcgcaatgccgacatcatcggcgagcagcgcagcgcggttcccacgtccgagcaatattcggtgttccgcgcctatctggacgcgcgccatcgacatggcggcatggcggacatgaccgtgctcgactacgccatgatggtcgaggacagccacgttgagacccgcatcatcgaatatcgcaagcgcggccccgatagtggcctgaccggccgcggtgaagagctgatcgcggtggcgctcaccgacgtgctcagcgacggcctgtcgatggtctattccttcttcgagccgagccaggtcagccgctcgatgggcaccttcatgatcctcgaccacatcgcgcgcgcccgccgccaaggcctgccttacgtctatctcggctactggatcgagggctccaagaagatggactacaaggcccgcttcctgccgcagcaacgcctcgcgccttcgggctggctgcgtatcgatgcacagggagatgttgcgtccgagccgcaggactga

SEQ ID NO: 761 - DNA, 543 bp, BradyrhizobiumColbertium
atgtcgtatgatccgggcaattcaggcgcttggcgcaatgacggcggggtgcagccgcatgcctacgaccctgacctgcatccggaactgtttcgtggcgtcgcgacacggcgggtcttcgccttttttatcgacatgggcgtgatctccgtgccggtgatcctcggctacatcttcatcgcattgttcggcgtggtcacgctcgggatcggctgggccctgttctggatcgcgtggccggcctccgttgtctgggcgatcgtctactacggcgccagcatcggcggaccctcgtccgcgacggtcggaatgcgcctgatggacctggaattgcgcacctggtacggcgcacccggctatttcgtgctcggcgccacccacgccgtgctgttctgggtgacggtctcgttcctgacgcccttcgtggtgctggtcggcctgttcaacggccgccgtcgcctgctgcacgacttcttgctgggaacggtggtgatcaacaattccgttcgcgtgcccgcgcctcagacggcgcggacctggtga

SEQ ID NO: 762 - DNA, 1062 bp, BradyrhizobiumColbertium
atggcgatcaaatacggacgtccgatcgaactgcgggaagtgtcgcgccgggacagcacggcagttcctcatgccctcgatctgacggtccgtccgcgccgcaaccgcaaggccgagtgggccagacgcatggtgcgcgagaacgtcctcaccaccgacgatctgatctggccgctgttcctgatcgacggtcacaacaagcgcgagcaggtcgcctccatgccgggcgtcgaccggctcagcgtcgaccaggccgtgcgcgaggccgagcgcgccatgaagctgaccattccctgcctcgcgctgtttccgtacactgacccttccctgcgcgacgaggcaggctcggaagccaccaacccggataacctggtctgccaggcggtgcgggcgatcaagaaggagtttccggagatcggcattctctgcgacgtcgcgctcgatcccttcaccagccatggccatgacgggctgatttccgacggcaagatcctgaacgacgagaccgtcgccgtgctggtacgtcaggcgctggtgcaggctgaagccggctgcgacatcattgcgccctccgatatgatggacggccgcgtcgccgcgatccgccagggactggatcgcgccggtctgctcgacgtgcagatcatggcctatgccgcgaaatacgcctccgccttctacggcccgttccgtgacgccatcggctccgccaagaccctcaccggcgacaagcgcacctaccagatggacagcgccaacacggacgaagcgctgcgcgaggtcgagctcgacatcgccgagggcgccgacatggtgatggtgaagcccggcatgccctatctcgacgtggtccgccgcgtgaaggacaccttcacgatgccgaccttcgcctatcaggtctccggcgaatacgcgatgatcgcagccgccgccaacaacggctggctcgacggcgaacgggcgatgatggaaagcctgctcgccttcaagcgcgctggcgccgacggcgtgctgagctattttgcgccgaaagcggcggagaagctgcgggcgcaaacgtag

SEQ ID NO: 763 - DNA, 501 bp, BradyrhizobiumColbertium
atgtccgagatctccacccgcgacgcggcccgcgacagcgcccatgccagggacgcccgagacaatgccagagagagcgcactctcggtggcggcgatctcgtcggagcgcgccgagtccgacgacagtgtctggacgcgccggctggtgctgttcctgcgggtgatggcgctgctgtcgatcctgaaaggtctctatcactgggcgcaagtgacgggtttcgtcggcggtgaggacgaagcgttcgagaaccagtcgatggcctggcaggccgccaccgtctacttcgccgtgatcgagctcgtcgcggccgtcggcctctggctggcaacgccttggggcgcggtcgtgtggctgacgaccgtcgtgtcgatggcggtgatcgagttgatgttccccggcatctacggcggcagcctcgtcgtggtcggcgtcgaggtcttcatgcttgccgcctatctcgcgctcgcctggatggccgcgcgcgaacggccgccgtag

SEQ ID NO: 764 - DNA, 519 bp, BradyrhizobiumColbertium
atgatgaaagccgtcgcaactgcggcagataccgcagagcgcgtctccggccagcagggttcggtgcaggcgctctatctggaagctttgactctggtggagcggctgcatcgccggctcctcgacgtgatcaaggatgagttcgatcgccgcggccgtgcggacatcaattcggtgcaggctctcctgctctacaacatcggcgacaaggagctgactgcgggcgagctgcgcacgcgcggttactatctcgggtccaacgtctcctacaacctgaagaagctcgtcgaactcggcttcctcgatcatcagcgttcgcgcgttgatcgccgttcggtgcgcatccgcctgactccgcaaggtcaggaagtccgccgcatcgtcgatgcgctctaccagaagcacgtcaagacggtggagcaggtcggtggcatctccggcgacgagtttgcgaccctcaacaagtcgctgcaccgcctcgagcggttctggaccgaccagatcctctatcgcctctga

SEQ ID NO: 765 - DNA, 1011 bp, BradyrhizobiumColbertium
atgtccacccccattccggtgctgcatttcgacaccagcaatttccccgagaccgagagattcgacatttggcgctcgggcatcgccacgcaccagatcacccgagccggcccggccgacggccccttcgaggccgtcgtggatgcctggactctcggcgacatggtcgtgacgcattcccgtttcggcccggtcaggatggtgcgaaccgcggagatggcgcgggccgatggcatcgacatgatccaggtcgttttcgtcaaggccggagcggtgaccttcaccaccgaggacgagccctccccgcgcacgatgcgacaaggcgagctggccgccttcgatacgcgccggaccctggtgaccgaggggacggcgctggattgcatcacctgcaccatagcgcgacgcgccttcgagcgagcgggatatgatccctccacccacggcgtcatcatcgacggtgcatggggccgcctcgtcgccgacttcctgttgtcgttcgtgcaacaactcgaggagatgaccgtccaggacgccgccagcctgtcggcggcctttgtcgggctgctggcgacggtgctgggcgcacggccgccaggcagcgagcccgcgtcccgcagcccggtggccacgctgcgcgagcgcgcggaagcctatatcgaccagaacctttcgtccgaccggctcgacatcgcggccatgagccgggctctggcaacctcgaaatccaatctctatcgtgccttcgccaatgcaggcggcgtcacggcctatgttcgaaagcggcggctggagacgatccacgcccgcctcaatgccggcgaaggcctcgcaatcggcgacgttgcgcgcgaatacggttttccgagcgctgcgcatttcagccgggcctttcgcaagcaattcggattcagtccgcggcgtgcgcgcctcggcggcctgtcagacccggtcgttgtggccgacgatgaggtcgccctgtttcgccactgggaggagcgcttgcgctga

SEQ ID NO: 766 - DNA, 2622 bp, BradyrhizobiumColbertium
ttgatcgcaagtgatttgacgctcaaggcccatgcaatgcccacttccgacttgtcgcgcgtagcttcccgtctgtcgtcgcgtgcgttcgggatccgtagcgcgctgccggccggcttcggatcgcgcggctggatatctccggttcgctgcctcgccatggtcgccgcagcttctgccgccatgacgctgctctcggcgccggctcaggcgacctgcacgcccgttgctgccaacgatgcctcggcgacctgcaccggggtcaccacggatcagaatggaacgaacggttacggctccggcgcgatcgacaatctcagcgtcaccgtcgtccagggggcgtccgtgaccgggacgagctacggcatcaggttcaacaccggaacggtcgtgaactcgggcacgatcactgggatcaacgaccgcggtatcttcggcgcgaccagcgcgaacgtgaccaatttcgggacgatcagcggctatctcggggtggatacgggtggaaacggcgtcgtgacgaattttggagccatctccggcaccacgagcgatggcgtccgcggcactaccatcaccgtcgtgaattccgggacgatcacggcggcctatgacggcgtctttgccatcggcacgagcacggtcgtcaattcgggcagcatcaccggaaactcgcacggcgtctatgcccttgccgatatcagcgtcgacaattccggctcgattgcctcggtgggcggcgccatctatgcgccgaacggcagcgcaaccgtggtcaattcaggcaccatcgcgatgaccgatacattcggcagcgtcatgtatgcgctgacgaacctgacgctgatcaattcggggatcgtcacttcgacgtcggtgggaccttcttccagcggcacgatcgacgtgacgaattcagggtccattctcaacaatggattcggcccggccatttccggcacggttgcgaaggtgacgaattccggcatcatcatcgccgttgatggcgcggcggtcagcgcctcgaacgtcaccgtcaccaattccgggttgatccgcggctattgggagggcattggttcccagtacgccacagtcaccaattctggcacgatcatcggtgagcattcggcaggcgtgcaggcctcgttcgatgtgatcgtcacgaattcgggcgcgatcacagggagcggcgcgggcattcgcaccttcaacggcagcatcaacacggtcaacttcgggacgatcacgggcaaagggccttccggcatcggcattttgtccgggacgacgggcaccgtggtcaattccggcacgatcatcggcgagggcgggacggcgatccagttcggcgcgacgacgccagcgcaatccgacagcctgaccgtgctgcccggcgcacgcttcggcggcgtggtcgatttcaccgggggcgccgacactgtcactttcggtctcggaagctggatcctgaacaccgccaattttgacaagacgctctcgaccgtgaccaccgccggcaatccttacgtcgtcacgtcgaaccagatcatcgtcgccgacctctccagcttcggcgcgcagaaccgcgcgatcatggacatcaccggatggatcggctcggtcctgcctgatgcgcccgtgttcgcgacgggtgcggccaccgccagtgcgtttgccgcacccgaaccggcggcgtcgccgttcgatgcattcgccagttttccctcgggcgccctgggatatgccccgacgcctgcgttcaagggggcaagcacaaattacggcgacgggaatgtggtctgggccaaggcctttggcggccagcgcctgcaggacaacagcggcgcgttgatcggtgggaccacgaccggctatggcggcgcggtcggctacgagcggctgatcagttccgacctcaggttagggatgctcgcgggcggcagcagcaacaagacgaatctgtatttcaacgccggaagcaccagcaccgacgccgtgttcggcggcgcctatggccgcaagacctggggcggcacattcctggatctctccgtgatcggcggaagcctcgacaattccagcgtgcgcaacatcggcggcggtctcgcctttgcgacggcaacggcgtcctatggcggctggttcgtcaatccggcgctgatgttcgggcgccgcctgggtgtagatgggcgcggcttcacggtcacgccggcggtgaaggtgcgctacgtggccgcgcattttggcggctatgccgagacgggcgcgggcgctgccaacttgagcgccgccggacgcgactttcaggcctgggaggagcgggccgagatcacgttcgccaacaccaggacgctggccaacggaaaccgggtcacgacccgagttgctgcgggggcgcttgcccagcagcgcagcgcgggtggtctgctcgatgtcgttttgctggggcagaacttcatcgtagcgacccccgagcgcagcagcgtggcaggcgggtacagcagcgcaggggtcgactggcaaatgggccgcctgaccttgtttgccgccggagaggccacctacaccaacgatgtgtcgcgcacctactcgggcaaggccggcgcgcgggtgagctggtag

SEQ ID NO: 767 - DNA, 237 bp, BradyrhizobiumColbertium
atgttggtcgagcgcgggctgcaggcgatgaacgtggaactcgtaagcgaggcctacgcgatcgctgcgaactaccttcgccggtccggggcgattcccgattctctcgtcaccgacgaacgcctgctcgggattgtcgtcaagctgatccagcacggcgaattcaacaagatcaggctcgccaacaaggcgatcacttggttcgagacgcagtccgaggcccgcgcggttgcctga

SEQ ID NO: 768 - DNA, 222 bp, BradyrhizobiumColbertium
atggaagccgccatcgaccgcatcatgcagacctacgacctgctcgccaaccgcactgcggcggccagcgtggaggcgcgggccaaggtcacgaactacctcaacatcctgatggaggccggcgaaacggacacccacaggttgacagtgtgcggcctgacatacttgcgccagctcgacggcagtgtggacccggttaaggcgggttatacggggctgtaa

SEQ ID NO: 769 - DNA, 144 bp, BradyrhizobiumColbertium
gtggcgatcggaagcggcgagcgcgatctaccacattgcccgcccccggccaagcatttgcgggtcgggcctgatatttatgcaagatatggtgggattggaggactttcgctgcggagcggtcctatggaaccgctcgtctga

SEQ ID NO: 770 - DNA, 1299 bp, BradyrhizobiumColbertium
atgaccgcacccaagaccgcctccgcgcccgattcgtttttctccgcctcgctggagcaggcggaccctgagatcgccgccgccatcaggggcgaactcggccgtcagcgccacgaggtcgaactgatcgcctccgagaacatcgtcagccgggccgtgctggaagcgcagggttcggtgatgaccaacaaatatgcggaaggttatccgggcgcgcgctattacggcggttgtgagtgggtcgacgtcgccgaaaaccttgcgattgatcgtgccaagaagctgttcggcgcgaacttcgccaacgtgcagccgaactccggcagccagatgaaccaggcggtgttcctggcgctgctgcagcccggcgacaccttcatgggtctcgatctcgcggccggcggtcatctcacccacggctcgcccgtcaacatgagcggcaagtggttcaaggccgcacactacaccgtgcgccgcgaggaccagatcatcgacatggatgcggtggccaagcaggccgagcaggtgaagccgaagctgatcatcgccggcggctcggcctattcgcgtgcctgggatttcaagcgcttccgcgagatcgcggacagcgtcggcgcgtatctgctggtcgacatggcgcatttcgccgggctcgtcgccggcggcgtccatgcttcgcccgtgccgtacgcgcacgtcaccaccaccacgacgcacaagtcgctgcgcggtccgcgcggcggcctcatgctgtggaatgacgaaaccctgaccaagaagctcaactctgccatcttcccgggcctgcagggcggcccactcatgcacgtgatcgccgccaaggcggtggctttcggcgaagccctccgaccggacttcaaggtctatgccaagaacgtcgtcgagaacgccaaagcattggccgagaccctgaagggccacggcctcgatatcgtctcgggcggcacagacaatcacctgatgctggtcgatttgcggccgaagggcctgaagggcaatgtctcggagaaggcgctggtccgcgcggccatcacctgcaacaagaacggcattccgttcgatccggaatctcccttcgtcacgtcgggcattcggctcggcacgccggccgcgaccagccgcgggttcggggtagccgaattccagcaggtcggcggcatgatcgccgaggtcctcaacgcgatcgcgcagtcttccgacggcaaggcgccgctggtggaagccgcgatcaaggagcgggtcaaggcgctcaccgaccgcttcccgatctaccagtag

SEQ ID NO: 771 - DNA, 396 bp, BradyrhizobiumColbertium
gtgtgcgtcgcctgcaacttccgcttcaccaccttcgaacgcgtgcagctgcgcgagctcacggtgatcaagcgcaacggccgtcgcgtgccgttcgaccgcgacaagctgatgcgctcggttcagatctcgctgcgcaagcggcaggtcgagccggagcgggtggaaaagatggtctccaccatcgtacgcgaactcgagaccgggggcgaggccgagatctcgtcggaggtgatcggtgagaccgtgatggagcatctgcgcacgctcgatgacgtcgcctatgtgcggtttgcgtccgtctaccgcaattttcgcgaggccaaggatttcgccgacgtgctcggcgagctctccggcgaggaggaagcgcggctcgccgcgatccgcaaatga

SEQ ID NO: 772 - DNA, 1149 bp, BradyrhizobiumColbertium
atgatcttccgcatcctggaagatcagttcgcgcagaaggcccgcgaggccaaggacgccgatcgcagattcatggagctggcactctcgctgggtaagcgcgggcagggacggacctggcccaatccggccgtgggcgccgtcattgtcaaggacggcgtcatcgtcggccgcggctggacgcagcccggaggacggccgcatggcgagcccgaggcgcttcggcgcgcgggcgagtcggcgcgcggcgccacgctctacgtcaccctggagccgtgctcgcatttcggcaagtcgccgccttgcgccgatgcggtgatcgcagcgggcatcaagcgggtggtggcggcgatcgaggatcccaatcccgaggtcgcaggccaggggcatgcgcgtctgcgcgccgccggcatcaatgtggatgtgggtctttgcgcggcggaggctgccttcgaccatgccggccatttccgtcgcatccgggacaagcgtccgcatgtgatcctcaagctcgcggtttcgcccgacggcaagatcggcgctgctggcggcaagccggtcgcgatcacgggcgaggcggcacgcgaccgcgtgcatctcctccgcgcgcagagcgatgcgatcctggtcggtatcggcaccgtgctggcggacgatccgctcctcaactgccgcctgccgggcatggcggcgcgctcaccggtgcgggtggtgctcgatcagagcctgcgcattccggcgtcgagccggctcgttcgtaccgcgcgcgaaacgccgctttgggtgatcggttcagaactcgccgaagctgcggccgcaacgcgcctcggcgcggcaggcgcgcagatcatgcgcatgccgtccggcagcgcatcgggacttggcctgccggccgtgctgaatgcgctggcggagaaaggcatcacccgtctgatggtcgagggcggcagccgcgttgcgtcgtcattcattgcggccgatctcgtcgacgagatctggctgttccgcggcgcggaagaggtaggccctggcggcgtggatgcgctcgatgcattgcccctgtcgaaaatcacgcagtcgcaggcctacaaggttcatgctagcgagacattcggcaaggatattctcaccatctatgagcgcgcgtaa

SEQ ID NO: 773 - DNA, 609 bp, BradyrhizobiumColbertium
atgttcaccggcattgtcaccgatatcggcgagatcatccgcttcacgccaacggcgcaggggcagctgcatcgattgcgcattgcctgccgctatgaccggaccaccatcgcggacggcgcctcgatcgcctgtaacggcgtctgcctgacggtggttgcctccggcgttgccgacggcaggacgtggttcgacgtcgatgcggctgccgagacgctggcgctgaccacggcaaagcactggaaggtcggtacaaagctcaacctcgagcgcgcgctgaagatcggcgatgagctcggcgggcatatcgttgccggccacgcggacggcatcgcgaccatcgtgagccggcaggacctgcccgatatggcgcggttcgagctctcgaccacgcgcgagctggcgcggttcatcgccaccaagggctcgatcacgcttgatggcgtgtccctgacgatcaatacggttgcagacgtgacgttttcggtgctgatcatcccgcacacactgacggtcacgacgatcggcgcctggaaggcgggggacgaggtcaatatcgaggtcgacctgatggcccgttacgcggcgcggctgacggaaatgaagtga

SEQ ID NO: 774 - DNA, 492 bp, BradyrhizobiumColbertium
atggcagacgcgcggcgcgcacccctgaaggaccagaccgacatttccggcgcccgcgcgctgatcgtcgaggcgcggttctacgacgatctccaggatgcactgctggacggcgcggtggccgagctgaaggcggccggcctgacccatgacgtgatcacggttcccggtgcgcttgaaatcccggctgcaatcgccatcgcggtcgatgccgctgcagcgagcggcagggcctatgatgcagtgatcgcgctcggctgcgtgatccgcggcgacaccattcacttcgagatcgtctcgcaggaatcctcgcgggccctgatggatcttgccgtggcgcgaaaactgccgctcggcaacggcatcctcacggtcaataccgaggcgcaggcctgggcgcgggcgcgcgccagcgaactgaacaagggcggcgatgccgcgcgtgccgccctggcgatgctgcgcatcaaacgccgcctggcgcaggcctga

SEQ ID NO: 775 - DNA, 498 bp, BradyrhizobiumColbertium
atggccgacaacagcaagaagccggcaggcactcaggagaagaaggcgaaccggcgcggtgcggcgcggctcgccgccgtgcaggcgctgtaccagatggatatcgccggtgccggcatcaacgacatctttgccgagttcgagagccactggctcggcaacgaggtcgagggcgacacttacctcccggcggaagctgcgttcttccgcgacgtcgtttccggcgtcgtgcgcgaccagaagaagcttgatccgctgatcgacgaggcgctgtcgaagggctggcccttgaagcggatcgaagccatcctgcgcgccgtgctgcgtgcgggagcctatgaactccagaatcgcaaggacgtaccggcccgcgtcgtcgtgtccgaatatgtcgacgtcgccaatgccttcgtcgaccgcgaggagaccggcatggtgaacgccgtgctggaccagattggccgccagttccgcggtgacgagtttgggcgggggtag

SEQ ID NO: 776 - DNA, 999 bp, BradyrhizobiumColbertium
atgaccactccacaaagtccctccgccgaggactccctcatcgcgcgctatttcaagccgatcgcgaccgaccccggcgcgctcgggctggtcgatgacgccgcagtcctgtcctcatcgggcgaggacatcgtcgtcaccaccgacgccgtcgtcgagggcgtgcattatctcgccgacgatccgcctgaaaccatcgcccgcaaggcgctacgggtgaacctgtccgatcttgccgccaaaggcgcgcggcctgcaggtttcgtcctgacgctggcgctgcgcagccaagaggatgcctggctccgtccctttgcggacgcgctgggcgaggacgcgaggaacttcgtctgtcctctgctcggcggcgacacggtatcgacgccgggcccgcagatgatctcgatcaccgccttcggccgcgtaccgcggggacggatggttggtcgcaccggtgccaggccgggagaccgcatcctggtgacgggaacgatcggcgacgccgcgctcggcctcgacgtgctcaagagcggcgccgctgccgcggtgctcacgtctgatgccgctgcaagggaagctctggtctcacgctatcgggtaccgcagccgcggaatttgctggcgcaggccgtgctcgatttcgcgaccgcagcgatggacgtctctgacggcctcgcgggcgatctcacgaaactctgcgcagcatccggagtctcggcttcggtggacgtggcaagcgtgccgctctcggctgcagcggtcggcctgctcgcccgcaacatcatttgcgtcgagacgctgcttgcggggggcgacgactacgaggtgctgtgcaccgttccgtcggcgcaaagcgatgcgttgatcgccgcagggcgggccgtcggggttgccgtgactgcgatcggcacgatcattgaggggcacgagcggccgcgcttcctggacgagcagggccaggaactgtccttggcgcgtctatcctacagccacttctag

SEQ ID NO: 777 - DNA, 2088 bp, BradyrhizobiumColbertium
gtgctttccgttgcctacgcggtttgggcgacgtcttcggtgttgagcgcggatgcggggtcgccgcgcatgcaggagatcgcaggagccgtgcgcgaaggcgcacaggcgtacctgcggcgccagtacaccacgatcggtctcgtcggcatcgtcatcttcgtgctgcttgcctatttcctcgggctctatgtcgcgattggcttcgccatcggcgcgatcctgtccggcgccgccggcttcatcggcatgaacgtctcggtccgcgccaatgtgcgcacggcccaggccgccacgacgtcgcttgccggcggcctcgagcttgcattcaaggcgggtgccatcaccgggcttctggtggcgggtctggcgctgctcggtgtgaccatctatttcgccttcctggtccattggctgaagcttgcgcccgacagccgtctcgtcgtcgacgcgctggtggccctcggcttcggcgcctcgctcatctcgatcttcgcccgtctcggcggcggcatcttcaccaagggtgctgacgtcggcggcgacctcgtcggcaaggtcgaagccggtattcccgaggatgatccgcgcaacccggccaccatcgccgacaacgtcggcgacaacgttggcgactgcgccggcatggccgccgacctgttcgagacctatgcggtgaccgcggtcgccaccatggtgctcgcggcgatcttcttcgccaagaccccgatcctcgccagcatgatgacgctgccgctcgcgatcggcggcatctgcatcatcacctcgatcatcggcactttcttcgtcaagctcgggccgagccagtcgatcatgggggcgctctacaaggggctgatcgcaaccggcatcctgtcgctgatcggtatcgcgctggtgatctattatctgatcggcttcggcaagctcgagggcgtcgattacaccggcatggcgctgttcgaatgcggcgtcgtcggcctcatcgtcaccgcgctgatcatctggatcaccgaatactacacgggtacggactatcgtccggtgaagtcgatcgcccaggcctcggtgaccggccacggcaccaacgtgatccagggcctcgccatctcgatggaagcgaccgcgctgcctgcgatcgtcatcatcgccggcatcctggtgacctacagcctcgccgggctgttcggcatcgcgatcgcgaccgccaccatgctggcgctggccggcatgatcgtcgccctcgacgccttcggtcccgtcaccgacaacgccggcggcattgccgagatggcgggactgcccaaggaggtgcgcaaatcgaccgacgcactcgatgcggtcggcaacaccaccaaggccgtgaccaagggttacgcgatcggatccgccggcctcggtgctctcgtgctgttcgcggcctacaacgaggacctcaagtacttcgttgccggctccgcgcagcatccgtacttcgccggcgtcaatccggacttctcgctcaacaacccctacgtcgtggtgggcctgctgttcggcggcctcttgccgtatctgttcggcgcaatgggtatgacggccgtgggccgcgcagccagcgcgatcgtcgaggaggttcggcgtcagttccgcgaaaagccgggcatcatgcagggcaccgacaagcctgactacggcaaggcggtcgacctgctcaccaaggcggcgatcaaggagatgatcatcccctcgctgcttccggtgttgtcgccgatcgtcgtctatttcgtgatctacgcgatcgcgggcggcggcgcggccggcaagtcggcggcgttctcggcggtgggcgcgatgctgctcggcgtgatcgtcacgggcctgttcgtcgcgatctcgatgacctcgggcggcggcgcctgggacaacgccaagaagtacatcgaggatggccatttcggcggcaagggctctgatgcgcacaagtcggccgtcacgggcgacaccgtcggcgatccctacaaggacactgcgggccccgcggtgaatccgatgatcaagatcaccaacatcgtggccttgctgctgttggcgatcctggcgcactga

SEQ ID NO: 778 - DNA, 1014 bp, BradyrhizobiumColbertium
gtgcccaagaaacgtcagaacactttgttgtcccgccgtcgcgtgctcaccggtgctgcaggccttgcagccgcagcgatactgccgcgatcgagccttgccgactggaagcctaccgaaaacgtgcgtctcatcgtgccggcggcggccggcggctcgaccgacgtgatgggtcggcttctggccgcgcatctgcagacggcttggggccagtccgcggtcgtggaaaaccgctccggtggtggcggcacgatcggcacggccgaggccgtgcgcgccaagcccgacggtcacaccatcctgatcggcaaccccggtccgaacgcgattgcctacagtatcttcaagaacctcagctacaagccggaccagctccagccggtctcgaacatgatccggatcccgaatatcgtctcggcacatcccaagaccggcatcaagtcgatcccggagctgattgcctacttgaaggccaatccggacaagctcagctacgcctcatcaggcgtcggccagagccctcacctcaccggcgcctggttcctgcagctcaccgggctgaagatgacgcacatcccgttccgcggtgccggaccggcgctccaggcagccctcgccggcgacattcagatcctgttcgacaatctgtatccgagcctgccgcaggtgcagaatggcacgctgaacggtctctgcgtcacgacgcccgagcgcagcgagcttgcgaaagacctgccgaccatgcgcgagagcgcgcccgagctggcgaacttcgacgtctcgtcgtggttctcggtgttcctgccgaagggcgtttcgcccgaagtgctcaacgcgctcaatctccaggtcaaggcgatgctggaacgcgacgacgtcaagaagcagatcgccgccatgggcgcccgcgccgattacggcacgccgcagcaattcgccgccttcttggacgccgagacgaagaagttcgccggcatcatccagaaggaagggctgcagatggacgtgcagtag

SEQ ID NO: 779 - DNA, 141 bp, BradyrhizobiumColbertium
gtgcgaccgcaagtcgcgcgcgagcgcaagcgctgcgcggagagcggcaggacgccgcaggcctgcgttatttaccttgcggtggaattaggccggctgttgagcctcttttcggacgcgcacccttttgcgaagcgctag

SEQ ID NO: 780 - DNA, 486 bp, BradyrhizobiumColbertium
atgacgacaatgaaccagaccagcctgcgcgcgaacaagcggcacggcctccatgcatgctcgcgcggcctgcgcatattcgcggctgcggctctcgttggcgtcgcgcttgccggctgcaccggtgagcaattccagaagggttacatcctgccgcccggcgcgctcgagcagatcccgatcggcgcgagccaggatcaggtgctgatcgtgatgggcactccctccaccgtcgcgacccttgacggcgaagttttttactacatctcgcagcggtcggagcgccctgttgccttcatgaaccagaaggtcgtcgaccaacgcgtcatcgcgatctatttcgacaagaaccggcgcgtgcgccggcttgcgaactacggtctccaggacggcaagatctttgacttcatcagccgcaccacgcccacgtcgggccaggagatgagctaccttacgccgctgttcaagctgctcagcttcaactga

SEQ ID NO: 781 - DNA, 552 bp, BradyrhizobiumColbertium
atgctttggccgttcaatcacttcaggaaaccccggctaaccccgccgggcaccattgaagccatctatggcatgatcgtgacgcaggcgcgagaacccatattttaccgggacttgggcgtgcccgatacggttaacgggcgtttcgacctgttgctgctgcatctgtggttgctgctgcgtcgcctgcgcacagcccagggcggcaccgagctgtctcaggcgctattcgaccgcttctgtgaggacatggacgacaacctgcgcgagatgggggtgggcgaccagactgtgccgaagcggatgcgggcctttggcgaggccttctacggccgcgtccaagcctacgatacagccatggaaagcggcggcgaggcgctggcatcggcgatctgcaagaatatcttgaatgggaccggcatggatcgggcgcacaggctctcggcctatgcccaagccacggaagccgatctcggccggaccgacgaggccgcgctgctgcgcgcaagcttcaaattccctccggcgcttccagaggatgtcacgccatga

SEQ ID NO: 782 - DNA, 570 bp, BradyrhizobiumColbertium
atgagccgaccgaatgccggatccccgcccgatccctggcgatcgcccgtcatcgttgcgcagatccctgacgggggcctgcatcgtgagcttgtggcatcagctgccgagcggcaggccatggccgagctcgcgggcctccgcgagatactgtcggcccatgccagtttcgatgtggtgccgaaaagcggtgggcgggtccaggtcacggggctggtccgcggccgaatcggccagacctgcgtcgtctcgctggagccgatcgagagcgagatcgaggaggaggtcgacctgatgttcgcccctgaggcggaggcgcgccgcttggccgacctaatcgaggaggggcaggacgaccggcaggcgccggaggtcgccgatcctcccgagccgattacgggcggcatcatcgacctcggccgactcgccaccgacgccctgttcctgacgatcgatccctatccgcgcaaggaaggggccgtgttcgaggcggaggtcagcgcccccgatccggaggaccatcccttcgcggcgctgaaggcgctccaggacaagaagaagggcaaatag

SEQ ID NO: 783 - DNA, 1062 bp, BradyrhizobiumColbertium
atgccaagcaaggttcgcatcgcgctggacgccatggggggcgatgtcggccctgccgtggtcgttcccggcgccgccatctcgcttggcaggcatcccgatatcgagttcctgctggtcggaaaccgcgccaagatcgagcccgagctcgacaggcacccgaagctgaaagccgcctccaaggttatccataccgacgtcgccatcagcatggaggacaagccgagccaggcgttgcggcgcggccgcaagacctcctcgatgtggctcgcgatcgatgcggtcaagaagggcgaggcggatgtcgcgatttccgccggcaataccggcgcgctgatggcgatggcccgcttccacctgcggacgctgccgggcatcgaccggccggccatctccgcgatctggccgaccaagcgcggggcgtccgtcgtgctcgacctcggcgccacgctcggcggcgatgcccaccacctggtgtcgatggcggtgatgggggcggccaaggcgagcgtgctgttcaacaagaagcggcccacggtcggtctgctcaatatcggcgccgaggaaatcaaggggcacgaggagatccgcgaagccagcgaaatcctgcgcgcgaggaacctgccggagctcgactatatcggcttcgtcgagggcgacggcatcggcaagggcctcgccgacgtcatcgtcaccgagggcttcagcggtaacatcgcgctcaaggccgccgagggaaccgcgcggcagatggcggaattgctccgtaatgagatgcagcggagctggctatccaagctcggctatctcttcgcccgcagcgccttccaagccctgcgcgacaagatggaccccaacaagtccaatggcggcgtgctgctgggactgaggggggtggtggtcaagagccacggcggaaccaacgccgaaggctttgcctatgcgatcgatgttggctatgagatggctcactacgatctcctgaacaagatcaatcagatgctcaaccgcgagggcggtgcactcagttcggtgcaggccgcgcaggaggctgtttcgtga

SEQ ID NO: 784 - DNA, 981 bp, BradyrhizobiumColbertium
gtgactcaaattcgttcggtcgtgctcggctgcggctcctatctgccggagcaggtggtgaccaacgcccaattggcggcgcgcatcgacacctccgacgagtggatcgtgcaacgcaccggcattcgcgagcggcacatcgcggccgagggcgagttcacctcgcatctggcgctcaaggcggcgcaggccgcgctcagcgatgccggccttgacgcgcagtcgatcgagctgatcgtgctggcgacctcgacgcccgacaacacgttccctgcaacggcggtcgccgtgcagcacggcctcggcatcaatcacggcgcggccttcgacctacaggccgtgtgctcgggcttcgtgtttgcgctcgccaccgccgacaacttcctccgcaccggcgcctacaagcgcgcgctggtgatcggcgccgagacgttctcgcgcatcctcgactggaatgatcgtggcacctgcgtcctgttcggcgacggcgccggagccgtggtgctggaggcgcaggagcagccgggcgatcccgcgaccgaccgcggcgtcgtcaccacgcacttgcgctccgacggccgccacaagtcaaagctgttcgtcgatggcgggccgtcctcgacccagaccgtcggtcatctgcgcatggagggccgcgaggtcttcaagcatgcggtcggcatgatcaccgatgtgatcgtcgacgccttcgaggcgaccgggctgaatgccgacagcatcgactggttcgtgccgcaccaggccaacaagcgaatcatcgacgcctccgcgcacaagctgcacatcgcaccggagaaggtggtgctgaccgtggaccgccacggcaacacgtcggcggcctcgatcccgctggcgctatcggtggcgcgcaaggacgggcgcatcaagaagggcgacatggttctgctggaggccatgggcggcggcttcacctggggctccgccctcgtgcgctggtag

SEQ ID NO: 785 - DNA, 342 bp, BradyrhizobiumColbertium
atgaccgagaccagcaaaaccgtaacgcgagttgatctgtgcgaagccgtctaccagaaggtgggcctttcgcgcacggaatcgtccgccttcgtggaactcgtgctgaaggagatcaccgactgcctggagaagggcgagacggtgaaactgtcctcgttcggctccttcatggtgcgcaagaagggccagcggatcggccgcaacccgaagaccggcaccgaggtgccgatctcgccgcgccgtgtcatggtgttcaagccgtcggcgattctgaaacagcggatcaacaaccagcaccgcaccaacggcgacgccagcaaggctaaagaagaggcgtaa

SEQ ID NO: 786 - DNA, 579 bp, BradyrhizobiumColbertium
ttggacaaggcgccggatgcgttccgaaccatcagcgaggtagcgcaggaactcgacattccgcagcatgtgctgcggttctgggagacccgcttctcgcagatcaagccgatgaagcgcagcggcgggcgccgctattaccgtcccgacgacgtcgacctgctcaagggcatccgccggctgctctacggcgagggctacaccattcgcggcgtgcagcggatcctgaaggagcacggcgtcaaatcggtgcagggcctcgccgacagcgccgccgcggtctcgttcggcgccatcgaggatgccattggcgcgagcctgatggagcccgacgacgaggcgccgatcaaggggattaccgacaccgacgatgacgatttccagggggacgaagaagaaggcatcgacttccgcttctcggagatcgacgacgaggagatcctcaccaccttccgcaagggcggcgccaccgctgcggccgccggccccagcgcgctggaccgggagcggctgggccgcgcgctcgccgatctcgtcgcctgccgcgagatgctggatcaggcgctgaaggacgggtag

SEQ ID NO: 787 - DNA, 75 bp, BradyrhizobiumColbertium
cggagcgtggcgcagcccggttagcgcactagtctgggagactaggggtcggaggttcaaatcctctcgctccga

SEQ ID NO: 788 - DNA, 123 bp, BradyrhizobiumColbertium
atggggtttgtttcggtttggtggctgaccgccgaagcgctggcgctgctgatcgcgcacgcatccggctcgggcgggagcacgccccacgccgatcgtccatccacccgacagatgctttga

SEQ ID NO: 789 - DNA, 240 bp, BradyrhizobiumColbertium
atgttcgtgaccgtcgttgccgtactctgccggctcggtgcagccagttcaggcagttgcgtcgaggaaatcgtgaccgacagcaacatgacgcccgagatttcgatgatgcagtgtgcggtcggagcacaggccccgctcgcgaaatggatgggcgagcatccgatctatcgcgccaactggcgtctcgagcgctacaaatgcgtgccgggtcactacgagatcaagggccacgcctga

SEQ ID NO: 790 - DNA, 972 bp, BradyrhizobiumColbertium
atgaaggattttgctggaaagatcgcggtcatcaccggcggcggcacgggaatggggcgcgagctcgcgcgtcagctcgtggccgaaggctgcaacgtcgcgatgtgcgacgtctcggaggctgcgatggccgagaccaaacggctctgtgaggccgagaagctgccgcagggcctgcgcgtcacgacgcatgtcgccgatgtcgcgatagaggaccacctgaagcgttttcgcgacgaactcgccgagcagcagcagacggacagggttcatctgctgttcaacaatgccggcatcggtggcggcggcagccttttcaccaatacgcgcgagcagtgggagcgaaccttcaacatctgctggggcggcgtctatctcggcgtgcgcacctttctgccgatgctggtcgccgcggacgaggcccacatcgtcaacaccgcgagcgtcaacggcttctgggcttcgatcggcatgaaccaggcgcacaccgcctatagctcggccaagttcgcggtaaagggattcaccgaagcgctgatcaacgaccttcgcctgcacgcgccccacgtcaagtgctcggtggtgatgcccggtcacatcggcacctcgatcgtctcgaactcgcgcaaggtgcagagcgccgacggctcggagcggcttaatgccgacgaggtggcgttgactcgcaaacgcatggtcgcggccggcgtgccggatgccgacaagatgtcggacgaggacatccaggcggtattcgccgagcgcgcccgcagcttcctggaggatgcgccgacgacggccgcggaggccgcgaagatcattctcgatggggtcaaggccgagcgctggcgcattctcgtcggcgaggacgccaagcgcctcgacgagcgcgtgcgcgccacgccggagcaggcctacgaccgcgccttctatgaaagctttactcaggaggtcggctggcggcttggttga

SEQ ID NO: 791 - DNA, 1110 bp, BradyrhizobiumColbertium
atgcccgcatgcctctccgacgactggaccttctgcccggaacgagaggacgtttccgctgagttcacgcggctgctcacggcggcccaggagggcggcgccacgatcgcagagtgcctgatgatcgcccggcagctgaagcgcggcgacgaccggtcctggcaccgcgaatggaagaagctggcgcaaaccaaccggcagcgtgccgagacggcgtttgcggagggccatctggcgagcgcgcagcgcaactggctgcgcgcgatgaactactatggtgccgcggcgatgccgctcgaccccgcggatgagcgccgctgggttgctgtgctggcgatgcaggaatgcgctcgccgttatctcgccgcgcgcagcccggccggcgaagtggtgaccataccctggctcgaggggcattcgttgcagggctacttccttcctgcgccctcggcagacgggtcggctccgaccgtcatctgcatcggcgagcccggccaccgcaaggaagagtttctgttcaagctcgtgccgcatgcccgcgagcgcggcttctcgatgctggcgctcgatctcttcggcgaccagcgcgacgactatctcgatgcgctgttgcagcgccgggatctcgagagcgcgatccccggggtcatggactatctggagacgcgtgctgacgtcgacttcgcgcgcatcgggatcatcgccgatggctggggctcatccttcgtggcacgcgcggtgttgcaggagccgcggctggccgccgccgtctgcgacggcggcctgtgggacctgcacgagcgggccttttttgccagtcgcttcgcggtgagcgacgtcagcatcgtcccggtgccccatgcgccgctgatggcttccagcgccgactgcccggtgctgatcaccccgagcgaggacggttggttgaaggctgatcgggcgcgtcagatcgtccagagcgcccggctcggaagtgcggacgtcatgctgaaggtgttcactgcggccgagaccggcgcggcgcaggcccatgcggacaatccgagcctggccaacgaatacatcttcgactggctcgaatcgcggctcggcgccgccaggcgcatctag

SEQ ID NO: 792 - DNA, 507 bp, BradyrhizobiumColbertium
gtgtccgcgacgagaaaagaaggagcgcgcctgcgcaccatcggcaatctggacatcatcaggcgcttcacttgggaaatatcttcgatcaacatgtatcttgaggagctgcgtcagttctgggcccgaacgctcggcatcagcgggccgcaatggctaatcctgatggccatctccgacctcgacaaggacgagggcatcccggtcaacgtcgtctccaagctcctccacgtcgacccgtctttcgtgaccacccagtccaagctgctcgaaaagaagggcctgctgcgccgtcgcccgtcgccgaccgacgccagggtggtcaggctgtccctgacagagaagacgcagaagcacctggcgagcctccacgagcagtacaagaccatccgggaattcgtcttccaggaattcgacgaggccgagcttaccgaattcacggccaagctcgcgacgctgaagacccgtctcgaaaaggcctgcgtccgcctgagcctggacttttga

SEQ ID NO: 793 - DNA, 1248 bp, BradyrhizobiumColbertium
atgcggtctcgcgcggacctcaacatcgacacgcgcaccgcgaccgagtacggcgtcgtccgtacttatttcgatgcggtgttcacctggacctcgggcagctacagcggtaccggcactggattgaccggcggctcgaccgcctatgattcggctccgtccggaacgagcggttcgggctccgtcgccggcggcgcactcggcgtctactacgccttcatccagttcgcaggctttacgatgggtaaggcggtgtcgcagttcgatgcgccgtggacgaactatccgggcaacaacttcgaccagctggtcggcggcggtggcaccgttaccggcgtgaaccagttcacttacactgcggactttggccagggcatcacggcctcgatttcggcacaggatcagaccgcctactaccagaccaacatctggaacacttcgggagcgacggctgccggaatcctcggtggcgcgtacggtctcaatgacatcggcggttcgcgttcacctgatatcgtcggtatggtgcgcgtcgatcaggcttggggtctgttccaggcttcggtggcggcccacaacaaccacgccggatattatggcggcaacgaaacgaccggcgggccgtccgacaaatgggggggggccgctgcactggctctgtcgatcaagaacatcccgaccggcgcaggtgacgtggtcaacatccagggcgtctacaccgagggtgccagccgctacaacttccagagccttgcggcgaccagctactcgatgttcagcggcagcggcaacggcgcttaccagagcgtcggtttcgctggcgtttcagatgcagtcttcggagccggcaccggccttgaactcacgaagacgtacggtatgcgcggcgcattcacgcacaactggaatccgtactggaacacggcgctttacggtgcgtacggtgccgtccgttacggcagcaccgccaaggggctgatctgtggcagtgcaggcatggcggctttggctctgaccggtacctgcaatccggactttgacattgcccaggttggcgtgatcacccgctggactccggtcaagaacctgactttctcgggcgacttcaactggagccggatcgaccagaagtactcgggcacggtcgcctacggcgggaacgcagccactgccaagccggcggctgtctacgagctgaaggatcaggacagcttcacgctgctgctccgcgctcagcgcaactggtaa

SEQ ID NO: 794 - DNA, 516 bp, BradyrhizobiumColbertium
atggccgatatctccaacctgggaccgttacacatgcctgctctctcaccgacctggaccgacgaacgaatcgagcttctgaaacggcacttcgaggccggcctctcctgccgcgagatcgccgccgacatcggggtcagccgcaacgccgtaatcgggaagctgtcccggctgaatctgacacgcggccggacggccgacgaccgcaaggtccaggacagaggcttcgggccgcagcgtgcaccgcgggcggtcccgcggctgcaatatgagatgctcgcgacgatctatggcgagaccgacgcagccgcggttgcaggtccgatcgacgaggccaatcgctgctcgctgctggagttgtccgagaaccgctgccgatggccgatctcgacgccgggcgaagacgatttctgcttctgcggcaacagcgctcccgacggccagccctactgcgcgggtcatagccgcctcgcctaccggccgcatgcgcgcgcccgcatgatgatgcgcggctga

SEQ ID NO: 795 - DNA, 198 bp, BradyrhizobiumColbertium
atggccaccgaaaaagccgagactgaccgcattcccgtgaccttggcgctctcgaccatcgcctacctggagaagctggtgagacagggcacccacggcaccagcgttcccggcgtcgcacggacattgatcgaggaaggcatccgtctcgccatcaaggacgggcttttgtcgatccgcgacaatggcaggacgtaa

SEQ ID NO: 796 - DNA, 942 bp, BradyrhizobiumColbertium
atgacccatcatcacctgcattcgagccccgaaacctgccattggggcttcttcgaagctgcgctcaggcccgtcctcaccgtcaagagcggcgacgaggtgacggtcgacaccatcagcggcggtccggacatgctgcccgaccagagcaagtttcacattccacccgagatgcacgaggttcatgcgaagaacgagcggatgctgcccggtcacatcctcaccggcccgatcgcggtcgagggtgccgagcccggcgacgtgctcgcggtcgagatcctcgaggtccagatccggcaggactggggctggaacatgatcaagccgctggccggcaccctgcccgacgatttccacgagacgcgcatcctcaacatcccgctcgaccggacgcggatggtcggccgcatgccgtgggggctggacctgccgctcaagccgttcttcggcgtaatgggcgtttcgccgccgccagcctggggccgcatctcctcgctgatcccgcgtgcgatgggcggcaatctcgacaacaaggagctgggtgcgggtgcgacgctgtacctgccggtctttgtgccaggcgcgatgttttcctgcggcgacggtcatggcgtgcagggcgacggcgaagtctgcgttactgcgatcgagaccgcgctgcagggccgcttccgcctgacgctccgcaaggacctgaagctcgactatccccgcgccgagacagcgacgcactacatgaccatggcgatggatcccgatctcgaccagtgcgtggtgcgcgcgctgcgtgacatgatcgcgctgctcggcgagaggcggaatctgtcgcgcgaggatgcctacatgctgtgcagcctggccgccgatctcagggtgacccagaccgtcaacggcgccaagggtatccactgcatgatcgaaaaggcgatcgtgcacggctga

SEQ ID NO: 797 - DNA, 129 bp, BradyrhizobiumColbertium
atgggtcatttgccgcgtccggttggtttcatcggccgcgggcttgacccggcgatcgatcctctttcaagaagatttctgaagatggcagggccggtcaagcccgcaccggcaggccgtgtgaattag

SEQ ID NO: 798 - DNA, 819 bp, BradyrhizobiumColbertium
ttgagcgaggctccactgtttttcgtcctttccaagaccttgggcaccgcgctgctaccgatcaacctgctggtcgagcttggcatcctgtccgtcgtgctgatggcgacgcgctttgccacgctcggccgccggcttgccgtgaccacgctggtgctgttggcgctcgctgcgttctcgccgctcggcaatctcctgatctacccgctggagtcacgctttccgtcgtgggacccgtcgcgaggcgcgcccgacggcatcatcgtgctcggcggctcggtcgacaccgacctctcggcggcgcaccgcacgccggtcgtcgcgcacgcggccgatcgcctgtttgcgccggccgagctcgcccgccgctatcccaacgcacgaatcgtcttcaccgggggcacagcgaacctggtttcgaccgaggcgagggaggccgactattccgcgcccatccttgagaatctcggcatcgcgaaggaacgcctgatcctcgagcgcgactcccgcaacacctgggagaatgcgatcttcaccaggaaactggtatcgccaatgccgggcgagcgctggcttctggtgacgtcggccttccacatgccgcgctcgatggggatcttccgcaaggccggctttgacgtcgaggcgtatccggtggactggcggatggggggacgcgacgacctgctctcgttcacaaacatgggcacggacggtcttcgtcgaaccgatgtcgccgtccgcgagtggatcggcctcgtggcttaccgtttgatgggaaggaccggcgagttgcttccgggaccgggcaaggactag

SEQ ID NO: 799 - DNA, 783 bp, BradyrhizobiumColbertium
atgcaacagcagagcgcagacagcatcgatcttgccggcctcgtcgccgatctcaacagcctgctgcggctgaagacgaacgtgatcgggatgaagctgtttgcaacggtcgcagagatggaggcgatcccgaagatccgccgcccgagcgcaattcacaccaccgaccagatcgtgagcatggccgcgcgcctgggatggaccgtcggcatcaccgcagacgatctcgtcggcgcacagtgccgcgcagtcattggccttgcgccgcaggacgagaagtggctcgccggcgaaaattatgtcggggtctggcacggcacggccgaggacgcgcgcaggcgccaggaggcactggatgtggttccgttcgggcaatatcaggcgctcgccgtcagtccgctggcgggcggccggctggatccgccggacatctgtctcgtctacgcgacgcccgggcagatgatcatcctgatcaacgggctgcaatataccggctacaagaagttcgaatggggcgtggtgggcgagaccgcttgcgccgattcctgggggcgggcgctcaagaccggggagcccagcctgtccttgccatgctatgccgaacggcgctatggcggcgtgccggatgaggagatgctgatggccttgaagccgtcgcatctcgccaaggcgatcgaaggcatgaaggcgctggccaagaacggcctgcgctatccgatcccgccctatggcattcaaagcgacgtccgcgccggcatgggcgtgagttacgcgaagaagtaa

SEQ ID NO: 800 - DNA, 1179 bp, BradyrhizobiumColbertium
atgagctctgcgaaattcgacatcgtcgtctatggcgcgaccggcttcaccggccagctcgtcgcggaatatctggcgacgcattacaaggacgacaaggcgctcaaatgggcgatggcgggccgcagcctcgacaagctgaagtcggtacgtgacgccatcggcgcgcctgccgatacgccgctgctcgtggccgacgcatctgacgctacatcgctcaaggcaatggtggcgcagaccaggtcggtgatcacgacggtcgggccgtaccaattctacggcgaggatctgctcgcggcctgtgtcgctgcgggtgtggattatttcgatctctgcggcgagccggtctggatgcggcagatgatcgacaagtacgaggcggcggccaaggcgagcggcgcgcgcatcgtattctcatgcggctacgattccgtgccgttcgagctcggcacgttcttcgtgcaggaggaggccaagcgcgtgttcggcgcgccggccgcgcgcgtgaagggccgcgtgcgggacatgcgcggcacgctgtccggcggcaccgcggcgagcgcgaaggcgaccttcgatgcggtcgccaaggatctcagcctcgtcgccatcctcaacgatcatttcgcgctgacgccgggattcaccggcccgaagcagcccaagggcaacagggcagcttacgaggaggatctgcaatcctgggccgcaccgttcatgatggcgttgatcaacacccgcaacgtccaccgctccaacatgctgatgggctttccctacggcaaggacttcgtctacgacgagatggtcctgaccggtccgggcgaaaaaggcgaggctaacgccaagcgcgtgatggcggccaatgccgagaagaccggcccgaatgcgcccaagcccggcgaggggccgtcgaaggaagagcgcgagaacggcctgttcgatctgctttacctcgcgatcgcgcccgacggccgccaggtgcgcgcgggcgtcaccggcgaccgcgatcccgggtacggctcaacctccaagatgatctccgaatgcgcgatctgcctcctgcgtgactcaaccgacgttccgggcggcttctggacgccgggagcggcaatgcagcacaagctgatcaaacggctgcaggaccatgcagggctgacgttcaaggtggagaaatag

SEQ ID NO: 801 - DNA, 1269 bp, BradyrhizobiumColbertium
gtgatggcgtatgcggcgacagccggcgagatgaatacagcagtccgcgctgcgcccggcgtgctggctctccagcgcgcgatggtgtggctggtgggcgcctccggcgcgatcgttttcatcgagccgagtccctacgagatcgcaacgctgctggcggcggtcgtcttcttcgccaccggcctgcggctgaagctcgttctgatgccgctggtgctgatgctggttctactcaatgtcggctacacgatcagcgcgatcccgctattcgataagcccgcggtggtgacctggatcgcgacctcgtggtacatggcggtgaccgtgctgttcttcgcgatggtcatctcggaagacacgacggcgcggctggacatgctccgccgcggcctcgtggtcggcgctttggtcgcctcgctgttggcgatcgcgggctacttccacctgatccccggcggcaatgatctcctcacgctctacggacgcgcgcgtggcacgttcaaggacccgaacgtgctcggcgccttcctgatcctgccggcgctgtttgcgctccagagcgtggtctcagacaagttcggcaaggcgttccgcaacgtcatcgccttcggcatcatgtcgcttgcgatcctgctcgccttctcccgcgccgcctggggcggcttggtgctgacctccggcttcatgctggcattgatggtgctgaccagccgcaccaatgcgcagcgctcgcgcatcatcatcatggcgatcgtcgcggccgtgctggggctggcgttgattgcggtgctgctgtcgttcgacgccaccgccgaaatgttcaagcagcgcgcgagcttcgaccagagctacgatgagggccgcttcggccggttcggccggcacatcctgggggcggagatggcgctcgacctgccgttcggcatcggcccgctgcaattccaccgcttcttccccgaggacacccacaactcctacctcaacgccttcatgtccggcggctggctctccggcgtgtgctatcccgcgctggtcttcaccaccgtcatcatgggcttcaggcacatcttcgtccgtgtgccgtggcagcgcgcctatctcgcggtgtttgccgccttcctcggcacggtcggcgaaaacttcgtgatcgacacggaccactggcggcacttctggatgatgctgggcgcgatgtggggcatgatcgccgccgcgcaggcctacaagatcagggccgtcgaagacgcctgtcctatttctccaccttga

SEQ ID NO: 802 - DNA, 1551 bp, BradyrhizobiumColbertium
gtggaaccgctcaacgcacgctcgatgctcgacgccgcgaccagcgccgcggcgaagcctgctgaccagcccttcgtggaacgccgccggcggctctcacccgccgcgctcgaagtcgtgaaccagaaggtcgcccgcgcctattcaccgatcgtgatcgccggcttcgtccgtctcgccgacttcgcgctgctgagcctcgtcggcattgcgctttatgtcggttacgtcatgccgcttgccggcgccttcagctgggtctatcccgcccaggttattgcggtcgccgtcgccgccgtggtctgcttccaggccgcagacatctatcaggtgcagctgttccgcggacagctccggcagatgacgcggatgatctcgtcctggtcgttcgtcttcctgctcttcatcggcatctcgttcttcgccaagttcggcaacgacgtgtcccgactctggcttgccgcgttctatttcctcgggctcgcggcgctgatcgccgaacgcctggtgctgcgctcgctggtgcgccgctgggcgcgccagggccggctcgaccgccgcaccatcatcgtcggctccgatagcaacggcgagcagctggtggaagcgctgaaggcgcaggaagattccgacattcacgtgctcggcgtgttcgacgaccgcaacgacagccgagcgctcgacacctgcgccggcgcgcgcaagctcggcaaggtcgacgacatcgtcgaattcgcccgccgcacccgcgtcgatctcgtgctgttcgcgctgccgatctcggcggaaacgcgcatcctggagatgctgaagaagctgtgggtgctgccggttgacattcgcctgtccgcgcacaccaacaagctgcgcttccgtccccgctcctattcctatctcggcgaggtgccgacgctcgacgtgttcgaggcgccgatcaccgactgggacctggtgatgaaatggctgttcgaccgcgtcgtcggcagcctggcgctgcttgccgccctgccggtgatgggcctcgtcgcgctggcggtgaagctcgacagcccaggcccggtgctgttccgccaaaagcggttcggcttcaataacgagcgtatcgacgtctacaaattccgctcgatgtaccatcatcaggcggatccgaccgccgccaaggtcgtgaccaagaacgatccgcgcgtcacgcgcgtcggccgcttcatccgcaagaccagcctcgacgagttgccgcagctcttcaacgtggtcttcgccggcaacctctcgctggtcggcccgcgtccgcatgcggtgcagggcaagctccagagccgtctgttcgacgaagccgtcgacggctatttcgcccgccaccgtgtcaagcccggcatcaccggttgggcccagatcaacggctggcgcggcgagatcgacaacgaagagaagattcagaagcgcgtcgagttcgacctatattacatcgagaactggtcggtgctgttcgacctgtacattctcctgaaaacgccgatctcgctgctgaccaagaacgagaacgcgtattga

SEQ ID NO: 803 - DNA, 1140 bp, BradyrhizobiumColbertium
ttgatcatgcccccctctccagaccggccgcttcgcatcctgcacgccgtgcgtgctccggtcggcggaatcttccgccatattctcgacgtcgccaatggccaggtcgaccgcggccatcatgtcggcatcctcgccgacagccttacaggcggcgagcgcgccgacaaggcgctggccgagctcgcgcctcggttgaagctcggcgtgcatcggctcgcgatccgccgcgagccttcgccggacgatttgctggtctggctgcggatgaggcgccttatcgccaagctcaagcccgacgtgatgcacggccacggcgccaaggccggcgccttcatccgcatgcggcggcgctcggacgataccattcgcatctacacgccgcatggcggctcgctgcactatccgttgaacaccatcaaaggcgagttctacgcgcgcctggaacgcgcgctgatggattcgacggatctgttcctgttcgagagcgcctttgcccgcgacacgtatcaacgcatcgtcggtacgcccaagggcgtggtgcgttgcgtcttcaatggtgtcacgccggaggagttcgagcccgtggtaacggccgacgatgccaccgacctctgctatgtcggcgagttcaggcacatcaagggcgcggacctgttggtcgacgccctcgcacgactgcacgaaggcggcaagaaggtgacgctgacgctcggcggcgacggcgaggagacagcggcgctgaaagcgcaggtcgagaggctcggcctcaccaatgcgatccgcttcatcggccacgtcaaggcgcgctacggcttttccaaggggcggttgctcgtcgtgccctcgcgcggcgattccatgccctatgtcgtgatcgaggcgggtgccgcgggcattcccatgatcgcgtcccgcatcggcggtatccctgaaatcttcggtgccgacagccctgcgctgttcgcgccgagcaatcccgacgcgatggccgaggcgatcgccgcggcgctggacgatccacagacgaccgcgcagcgcgcactctcgttgcgcgagcgcatctcgatgcatttctcccagcaggcgatggtcgagggcgtgctcgccggctatcgcgacgccttcatcaatcattaa

SEQ ID NO: 804 - DNA, 2310 bp, BradyrhizobiumColbertium
atgcgtttagcgttctggcgtgccggcaaggacaaggcggtgatcgcgcgcgcggtctcgaagtcgaagcccgcagccgcgcccaaaatcgaagccgagatcgaagccgagatcgaagccgacaaggttgaagcgaatcccgcgcccttcgtcgtgaagcaggcgcaggtcgagtccggcgatatcgacctgcatgcgcttggcgcggtcttggcgcgcaagcgcggctggatcgtcgtgccgacggtcgtggcgctcgtcgcatcgctcggcgtcgtcaatctcatcacgccgcgctacaagtccgaagcccgcatcctgatcgacggccgcgagaacgtgttcctgcgcccgaacagcgatcgcgccgaggagcggcaggcactcgacgccgaggccgtcaccagccaggtgcagctcgttctgtcacgcgatctcgcgcgagagatcatcaagaagaataagctcgccgagcgacccgaattcgacccggtgctgcagggcatctcgccgctgaaatcgcttgccgcgctcatcggtatcggtcgcgatccgttcgcgatgacgccggaagaacgcgtgctcgatgcctattacgagcgcctccaggcctacgcggtcgacaagtcgcgcgtgatcgtggtcgaattccagtcggccgatcccgagcttgccgcccgcgtcgcaaattcgatcgccgacggctatctcgtgctgcagcaggccgtgcgccaggagcaggccaagaacgccagccagtggctcgccggcgagatcgagagcctgcgcaagaaggtctccgaggccgaggccaaggttgaggacttccgttcaaagtccagcctgttcgtcgggaccaataacacgacgttgtcgaaccagcagatgggcgaggtcaacacccagctcaacaatgcgcggtcgatgaaggcggacgcggaatccaaggcgcggctgatcaaggaaatgctccagagcggcaagccgatcgaggcatccgaggtcgtgaactccgaattgatgcgccggctgtcggagcagagggtgacgctgcgcgcacaacttgcggagcagtcgtccacgctgctcggcaatcatccgcggatcaaggagctgaaggcgcagcttggcgacctcgacaaccagatccgcgacgaagccgccaagatctcgcgctcgctcgaaaacgacgcccggatcgccagcgggcgggtcgatggtctgaccacgagcctcgagcaactgaagaagcaggcggcatccaccaacggccaggacgtccagctccgcgcgctggagcgtgaggccaaggcgcagcgcgacctgctggaaacctatctcgccaagtaccgcgaagccaacacccgcgaaaccatcgacaccgctccgaccgatggccgcatcatctcgcgcgccatcgtctcgaacacgccggcctatccgaagaagctgccgatcgtgctcattgcgacgatcgcgacgctgctgctgtcgtccggcaccgtcgtcaccggcgagctgctgcgtcagaccgcgccgcggacgttggccgcgattgcgccggcgcgggcgccggtgcggcgggagccatcggtccagccgcccgtcgctgctgccgtcgatgctgccatcgacccgatcgtcgagcctgctttgcccgagcccgcgccgttgcagcccgagattgggagcgacaaggatgtcagcgagttcgacgagatcgaacgtctggccgacaaattgcgcagggcgggtgctgaggccaggaaggtcaccgtgctcggcaccgcgcccggcgcagcgatcactctatcgacattgacacttgcccggcacctttcgcgcgacgcgcgcgtcgtcgtggtcgatctcgcggcgtcctcgccgagccttgccgcggcgtccgtcgatgcttcggctccggggcttgccgagctgatgcagggcgaggcgtcgttcgcgcaaatcatcacccgggacaagctgtcgcggctgcatctggtcatggccggccgtcccggcttcgaccgcagcttgctgcaatccccgcgcgtggcgcttgccatcgacgcgctgctgcgcgcctatgatcacgtgctgatcgatgccggtagtgcctccgatcttccggccgagctgctgacggcgcatgcccgcgccgtcgtggtgccggatgcgtcgatggtaccggacgcgcgcgcgctgatgtgcgagcagctgagggcggtcggcttcagcgacgtgacgatgctgagcaagccggtgcagccgtccgatgcggtggagacgccgcgcgtcgtggcggcgtag

SEQ ID NO: 805 - DNA, 1182 bp, BradyrhizobiumColbertium
atgaccatggctgcggcgatgcaaagccggacggcagaagcgccatcgcggtcaaaagcgagacgtatcgctcatgtcgatatcgtcatcgatctcgccgaggccgaggccgtctggcgcgccttcgaggagcccggccatctcttcacgccctatcagcgcttcgacctgctcagcgcctggcaacgactggtcggcgagcgcgagggcgcgcgacccttcatcgtgattgcccgcgacgccgagcaccggccgctcctgctgctcccgctctgcctgcgccagagccatggcgtccgcacggcctgcttcatgggcggcaagcacacgaccttcaatatgggcctgtgggatgccgaattggcggcgcaggccggcgtcgccgatctcgacgccctgcttgcggcgctgcgcgagcgtgtcgacgtgctcgtgctgacgcagcagccgcagcgctggcacgaccggacgaacccgtttgcgttgctgccgcggcagagcgcgatcaacggctgcccgctgctgacgatggagcccggcggcccggcggcatcgcggatcagcaattcgttccgccgccgtctcaagagcaaggaaaagaagctacaggccctcaccggctatcgctatcacctggccacatcagatgccgacgtcacccgcctgctcgactggttcttccgcgtcaagccggcgcggatggccgagcagaagctgccgaacgtcttcgccgagcctggcgtcgaacagttcatccgcagcgcctgtcttgcgccacgtggcgaaggccgcgtcatcgacattcacgcgctcgaatgcgacgatgaggtgatcgcgatcttcgccggcgtcgccgatggccagcgcttctcgatgatgttcaacacctacacgatgtcggagcacgcccgctacagccccggcctcatcctgatgcgctacatcatcgatcgctacgccgagcgcggctaccgctcgctcgacctcggcatcggctcggacgactacaaaaggatgttctgcaaggacgacgaggacatcttcgacagcttcgtgcccctgacctcgcgcggcaggctcgccgcgatggcaatgtcctcactcagccacggcaagcggctggtgaagcagaaccaaatgctgttcgacctggcccgccggctgcggcaggcgttcggatag

SEQ ID NO: 806 - DNA, 1050 bp, BradyrhizobiumColbertium
ttggtatccgacgacagatggctggagcgtctgcgcctcgagctggcctggttcaccggccaagccgtgctgcgcagtcgcggggccggcgccattctgcgctttcagcacgtgcggccgcggcggcggggcgggtttcagccatcgcgcgcgagcgagatcacgccgcaatttctcgatcgcgccattcgcgcgctgaagcggtggaggtacgatttcctcggcatggacgaggtatgccaccgcgccgtgacgctgccggagaaggggcgctttgtggcgctgaccttcgatggcgccagcaaggacctcatcaacttcgcctatcccgtgctggtgcgccacgccgtgcccttcacgatctatgtgccgaccgcgtttccagacggcgtcggcgaggcctggtggtcagggctggagcaggtgatcgcgcgcgagagccgcatcagcctgatgatgggcgagaaggagcagcgtttcaccgtaaccgacaatgccgagaagcaggcgctgttttcgcatctggagagttggctccgctcgctgccgccggcggatctgtcggccgccattgccgatctctgcacgcgctaccgggtcgacctcgcggcgctctcgcgcgcagcgtcgatggattgggaggatctgacgaaattggctgcggatccgctcgtcacgatcggcagcgcgacggtgaattaccccgtcttggcgaacatgaaggacgcagctgcactgcgagagatgatgatggggaaggccgttgcggaagccgctttccgccgcgaagtcacgcatttcgcctttccgttcggcgatcgcgcctcgtttcggcgcagccacgtcgtgatggcggaggaggccggttttgccagtgccgtgacggcgatcccgggtgtcgtggaagcggagggacgcaccaatctgcgcgcgctgccgcggatttcctgggacggccgggtgcggtcgctgcgcatgctgcgtgtcctggcatcgggcgtcgcctttgcgacggtgaagccgacgcggagcgctaggagccagacttga

SEQ ID NO: 807 - DNA, 222 bp, BradyrhizobiumColbertium
atgacgatccgcacccgaaagttcctcggcgccatcctgctcctggtgctggccaccgtctgggccctgctcggcatggcgctggcgcagatgccgtggatcgccgagtctggctggcggcaggcgatctattacgtcgtggtcgggctgggctgggtcttgccggcgatgcctatcgtgagctggatgcagcgtcccgaccgtatcaagtctggctcctag

SEQ ID NO: 808 - DNA, 1077 bp, BradyrhizobiumColbertium
atgatgtccgcaccgtccgaaccgcatcgcgccgtgcgcgcgtggctgatcgccgtggccgggctgatcgcgctgatggtgctggtcggcggcgcgacgcggctcacggagtcgggcctttcgatcgtcgaatggaagccggtgacgggcagtgttccgccgctcaccgagacgcaatggattgaggcgttcgaagcctacaagaaaatccctcaatatcgcgagctcaatgcagggatgagcctctcggagttcaaggagatcttctggtgggaatggagccaccggctgctcggacgtttcatcggtgtcgcttatctcttgccgttcctgtttttcctgtggcgcggcggcctgtccggtgaattgaagcgtcggctgtggctcctgttcgcgctcggtggtcttcagggcgcggtcggctggtggatggtggcctcgggcctgacggaacgcacggaagtgtcgcaatatcggcttgcgacgcatctggtgctggcgctcgtgatcttcgccggcatcgtctggacggtgcggcggctcaacgagcggccacgggccgcagcgcctgcacggctgcgcttcaccagcgcgctgctcctcgtcgtaacgttcgtacagatctatttcggcgcgctggtcgcgggcctgcgcgccgggcgtgcctacaacacctggcccgagatcgacggcgccttcattccctccgccgagcggctgtggttcgagacgccgtggtggcgcaacatgttcgacaacgtgctgacggttcagttcgagcaccgcatgaccgcctacctattgttcgcactggcggcgttgcacgcaatcgacgcggtgcgctcgcgtgcaggcgcggctgcgagcggcgcgttgtggctgtttgcggcggtgaccctgcaggcggtgctcggcatccttacactgctccaccaggttccgatcggtctcgcgctcgcgcatcaggcggtcgcgatcgtggtgctggcgctttccgtgatccaattggagcgtctggcctggcggcaatccgccgaagcgcagccgcgggcggttcccatcggccagcctggctga

SEQ ID NO: 809 - DNA, 345 bp, BradyrhizobiumColbertium
atgctgcgctggatggtgcctgcccttgcgacgatgctgacggtttcgagcgcgctcgctgccgacctgccggccacgccgaagcggcgcgcggccatgccgccgcaggatccgccgcaggtctacgtcgaaaccgatccggatgcgctgatctcgcccgcctatggcatcggcagctacatccgcaacctgccggggacaccgctgctgcccggctcccacacgttgccgggctattacggccgcccgtggagctacgattatcagggctcgtattacggtggaaagcaggtcgactatttctggcgcctgccctatgcgtgcggcgtctacggctattgctga

SEQ ID NO: 810 - DNA, 1350 bp, BradyrhizobiumColbertium
ttgacggcaggcgcggcgccgatcagcatgccgcccgattttcaggccaccaagaacaggacgccctcaatgagcgatcgccttccgggattttcaacgcttgccgtgcatgccggtgcacagcccgatcctaccaccggggcgcgcgcaactccgatctatcaaacgacgtccttcgtcttcaacgatgccgaccacgccgcttcgctcttcggcttgcaggcgttcggcaacatctatacccgcatcggcaacccgaccaatgccgtcctggaagaacgtgtcgccgcgctcgaaggcggcacggctgcgcttgccgtggcctcgggccacgccgcacaagtcgtggtgttgcagcaattgctgcagccgggtgacgagttcatcgccgcgcgaaagctctatggcggctcgatcaaccagttcacacacgcattcaagagctttggctggaacgtggtgtgggccgatcccgatgacatttcaagctttgagcgggcggtgacgccgcgcacgaaagcgatcttcatcgagtccatcgccaatcccgccggcagcatcaccgacatcgaggcgatctcgacggtggcgcgcaaggcaggcgtgcctttgatcgtggacaacacgctggcctcgccctacctcatccggccgatcgatcatggcgccgacatcgtcgtgcactcgctgaccaagttcctgggcggccacggcaactccctcggcggcatcatcgtcgatgccggcaccttcgactggtccacgggcggcaaatatccgatgctctcggagccgcgccccgaatatcacggtatccggcttcaggagacctttggcaatttcgccttcgcgatcgcctgccgcgtgctcggcttgcgcgatctcggccccgcgctttcgccgttcaacgccttcatgatcctgaccggcatcgagacgctgccgctgcgcatgcagaaacattgcgataatgcaaaggccgtcgccgaattccttgccggccatccggcggtggcctcggtgaactatgcaggtctgccgagcgacaagtatcaccagctcgcacgcaaatacgctccaaggggcgcgggcgcggtgttcactttcagcctgaagggcggctatgacgctggcgtcaatctggtgtcgaagctgcagctgttctcgcacctcgccaatgtcggcgacccccgctcgctggtgatccaccccgcctcgaccacccacagccagctcgacgatgccgccaagatcaaatccggcgccggccccgacgtggtgcggctctcggtcggcatcgaggacaaggaagacctgatcgctgatctggagcaggcgctggcggcgtag

SEQ ID NO: 811 - DNA, 585 bp, BradyrhizobiumColbertium
atgaaccacgacgcctatcccgacaattacatccgcggcatcctcaacagcgtgaagtcgatcgcgatggtcggcgcctcgccggtcaatgtgcggccgagctatttcgctttcaagtatctggcgcagcgcggttatgacatgattccggtcaatcctggccatgtcggcaaggaattgcttggaaagccgttcgtcgcctcgctctccgacttcggccgccccatcgacatgatcgacatttttcgcaactccagccacatcatgcctgtggtcgaagaggcactcacgctcgacccgctgccgaaggtgatctggatgcagcttggcgcgcgcgacgatgccgcagcggcgaaagcggaatcggtcggtatcaaggtggtgatgaaccgctgccccaagatcgaatatggccgcctgtcgtccgagatctcctggatgggcgtgaattcacgcacgctcagctccaagcgccccccggcgccgacccagggcatgcgcctgtccctcaatcgaatgagcgtcggcggcggcgacaccgcggcatccgatcgtgcggcgaaaaacaagagcgagcaaagctga

SEQ ID NO: 812 - DNA, 825 bp, BradyrhizobiumColbertium
atgtccgtccaggtcgcccgcgccccctccccacaaccgcagatcctgctgcgcgagacgatcggcagcatcgcggtcctgacgctcaaccgtccggccgcgcgcaacagcctgtctgaggcgatgatcgccggcctgcatgccgagctcaacgagatcggcaatgacaaggcgatccgcggcgtcgtgatcgcggccaacggtcctgctttctcggccggccacgacatgaaggaactcaccgcgcaccgcgccgaccccgatcgcggccgcgctttctttgccgagatgatgaatgcctgcagcgcgatgatgcaggcgatcgtgcacctgccaaagccggtggtcgctgccgtccagggcatcgctaccgctgccggctgccagctcgtggcgagctgcgatctcgcgatcgcgtccgacgcagcaacttttgcgacgcccggcgtcgacatcggcctgttctgctcgacccccatggtggcgctgtcgcgcaacgtgccccgcaagcaagcaatggagatgctgctgacgggcgagccgatcccggccgcacgcgcccgcgagatcgggctgatcaatcgcatcgtcgacgtgggcagcgagcgcgatgcggcaatcgcgctggcgcagaaggtcgcgctcaaatccgcctacacgatcaagctcggcaaggaggcgttctatcgccaggccgagatgagccttgcagacgcctatcgctatgcggcagaggtgatgaccgagaacatgatggcacgcgacgccgaggaaggcatcggcgcgttcatcgagaagcgcacgcccacatggcgggatgagtga

SEQ ID NO: 813 - DNA, 408 bp, BradyrhizobiumColbertium
gtggcggagctggagcggttcctccgtgacgaatttccccaggccttcagcggtgacgacatcaccatcgagagcgcggacggccagaccagccttctgcgccagcgctacagcgaacgaatgctgcggccgggcggaaccgtgtcaggcccgacgctgatggcgcttgccgatttcgcgatgtacgtggtgctgctctccgcgatcggaccgatcgggctcgccgtcaccaccaatctcaacatcaatttcctgcggaagggccagccggggcaggacgtgctggccgaggcgcggctgctcaagctcggcaagcgtctggcggtcggcgaagtgaacctgttatccggaacgtcacccgatccgatcgcgcatgtcacctcgacctattccattccaaatgtttga

SEQ ID NO: 814 - DNA, 465 bp, BradyrhizobiumColbertium
atgaaaaccttttcggcaaagccggctgaggtgacgaagaagtgggtgctgatcgacgccaagggtctggtcgtcggccgtctcgccaccatcgtcgccatgcgcctgcgcggcaagcacctcccgacctacaccccgcacgttgattgcggcgacaacgtcatcatcatcaacgcgcagcatgcagtcctcaccggtcgcaagcgcgagcagaagacctactacaagcacaccggttacgtcggccacgtgaaggagcgcaccgcgcgccagatcctcgagggccgtcatcccgagcgcgtgctcgagaaggccgtcgagcgcatgatcccgcgtggtccgctcggtcgcgtgcagatgggtaacctacgtgtctatggcggggccgatcatccgcacgaggcgcagcagcccgagaagatcgacatcgccaagttgaaccgcaagaacacgagggccgcataa

SEQ ID NO: 815 - DNA, 480 bp, BradyrhizobiumColbertium
atggccgaatccatccaatcgctcgaccagctctcgcagctcaagacggcggccgcgcctgaggcgcccaagcacgagaagaaggtcgacaagttcaaccgcgcctacgccaccggcaagcgcaaggacgcggtcgcacgcgtgtggatcaagccgggcgccggcaaggtcaccgtcaactcgcgcgaggtcgaagtctatttcgcccgtcccgtgctgcgcatgatgatcgagcagccattctcggtagcccagcgttcgggccagtacgacgtgatctgcaccgtcgccggcggcggcctctccggccaggccggcgcggtccgtcacggcatctccaaggcgctcacctatttcgagccggagctgcgcagcgtgctcaagaagggcggcttcctcacccgcgactcgcgcgtggtggagcgcaagaagtacggcaaggccaaggcccgccggtccttccagttctcgaagcgttaa

SEQ ID NO: 816 - DNA, 1221 bp, BradyrhizobiumColbertium
atgatgtcgctcgatagcatcacgctctatttggtcgcgaccatggttgccgcgctgctcggcgccatgatggtgtttttcggcaggcaggagaacagcccggcgctgagatggtggggcaccgcctatcttctcggtgccgccgccgtcgcgctatggactgcggctggcgacaggctgggcccgcacatttacctggcgctgaacgccgtcggcttcgtcgcctgcggcatggtgtggaacgccgcgcgcgtcttccacggccgcaagccgaactggcccggtctcgtgctcggcgcgctcgcctgggtcgctgctgcgacgctgctcgatccggctgcatccatgctgcgcatgctcgtcggcgccggcatcgtctcggtgtatgcagcgctgaccgccagcgagctctggaccgaacgtcgcaagagcgttcaacgacgctggccggccttggtgatgccggtgatgcatggttgcgtattgatgctgccgatcctgatcggcagcttcctgcgcccgcacgatgcaagcttctcccagagcatctgggtcacagtgttcgcggtcgagcttatcctctatgccgtcggcaccgtgttcgtcatcttcatgctcgtgtccgagcgccccgtgaccgcgcaccggaccgcagcttccaccgatccgctcacgggcatgctcaaccgccgcggcttctcggaagcctgcgcgcgcgtgatcgagcgcgaggccaaggccgggcgtccggtgaccgtgatgatcttcgacatcgaccacttcaagtcgatcaacgaccgcttcggccatcccgccggggacgagatgctgaagctgttctcgaccgtcgtggtcagcagcctgcgcatctcggacctctcgggccgcatcggcggcgaggagttcgcagcgctgttgccctgctcgctggaggagggcgtgctggtcgccgagcgcgtgcgcgaggcgttcgaaaactccggcgtcgttgtcgatgaaggcccggtcgataccaccgtcagcatcggtgtcgccggaggtcccgccggcaccgagctcgaggtgctgcttgcctcggccgataccgcgctctaccaggccaagcgcggcggccgtaaccgcgtcgaggcggcggaggagctgccgctgtcgctggagaactggcgccgccagagcgccgcgcgaaccggtgcatcgcagccacgtccagcaacggcgtga

SEQ ID NO: 817 - DNA, 297 bp, BradyrhizobiumColbertium
atgatcaccgagatcgcgcaaatcgacgtcaagccgggcagcgagaaggactttgaagctgccgtggccaaggccaaggcggccttcggccgctccaagggctttcacggcttcgagctgcacaaatcgatcgagaagccgcagcgctaccggctgatggtgaagtgggcgacgctggagaaccacaccgtcgatttccgcggttcggagaatttcaccgagtggcgcggccttgtcggccagtattttgctgcacctccggaggtcgagcacacagaggtcgttctgacgacctga

SEQ ID NO: 818 - DNA, 1197 bp, BradyrhizobiumColbertium
ttgtcgaaagagtgccggacgcaggcctgcgcgaaaggacacgacgtgacgattctcagagatgaacgccccccgacccgcagtgacctcgcccgagatcaggcttgggcgattgcggtcggaggcatcggcgtcgtgcttttcacggcgctgctcgctttcagctggtatttcgcggccaccctgctcctgatcttcaccggcatgctgctcggcctcggcctcaacgcgctggtcaatgcgctcggccgccgggttcgcctgccccacaccgtccggcttgcgatcgtctgtgtcgcgctcgccctggtgcttgccggcatcgcctatctcggcggcgcgaccatcgccgagcaggcctcgctgctgagcaagaccatcaagtcgcagatcgcgaatgtgaggtccttcctcgagacccacggcatcgacaccagcttcttcgatttcggcaatgccacctcggatgcctcggccacgacttcgtcggaggcgaccgccgcgccagcggctccctcgcgcgctcccctgcccagtgccggcgcgctggcttccggcggcggcgcgatcgtgagccagaccttcaagctgctgctcggcaccattcacggcgtgggcaacgtcttcatcgtgctgtttctcggccttgccttcgcggcccagccccgcgtctatcacgacggcctgctgttcctggcgccggtgaggcaccgcacgcgtgtcgccctcgtcatcgaccgcatagcggagacgctggagcgctggctgaccgcgcagttcatcgtcatgatagcggtcggtgtcgtgacctggatcgggcttgccatcatcggcattcccggcgcgttcatcctgggaatccaggcgggcctgctcgccttcatacccaccgtcggagccatcatcggcggcgtcatcgtggtgctggcaagccttgcctcgggctggatccccgccttgtcggcctttctcctcttcatgggcgtgcatgccatggagagctacctgctgacgccgatcatgcagcggcaggcgctcgatatcccgccggccacgctattcgcgttccagatcctgctcggcgtcgtgttcggaatctggggcctggcgctggccctgccgctggtcgccatagccaaggttatcatcgaccacttcaagacctatgaggcgccggccctcgccgaggcggcctga

SEQ ID NO: 819 - DNA, 705 bp, BradyrhizobiumColbertium
ttgggtttcatcagcaaatgggcaggtctgctcgggcttctggctttgctcgtcggcggcgaccagatccggatcaaccggccggaccacaagtttcgcctgacggtcgaagtgacgacgccagacgggatcaagaccgggtcgggcattctcgccgtcgtgcccgatcgcaactacaaccgcagcggccgcaccacgacgcgcggggaggctgtgttcgtcgacctcggccaaggcaagaacctcgtggcattgctggcgcaccagcaaggcgccaagcttgatttcgacgacatcaactatttggcgctccgcgcctacggtgccgcacgcggcagccgcgtgtcgttcaaggacatgagccggcagaccggaatcgtcccggtacagggggagttgatccccgtgctcgtgagcttcggtgatctcaaggaccctgcgagcgcgcgcctcgtcgatggccgccacgcagaggcagtcctgggcgatggctacgcgatccgcggtttctccgccgaggtcgtgcccaatgggttctggccgatcgacatcggtggtgctctcggagagcccgtgacacgcggacttcacgcgaaattgccctggttggccgtgccggatgcccctgcggcggtcgccctgcaggctgctgggttgccggcgatggagccgagcgtagcccgggaggcctttgcgcgaaaatag

SEQ ID NO: 820 - DNA, 774 bp, BradyrhizobiumColbertium
atgagaaagccggtcgtcggcgtgatcgggaatgcccatcgcgtcgaaaatcgatttcaggtccagatggtcggcgagcgaaacctgcgcgctgttgccgaagtctccggcggcttgccgctgatgttcgctggctcccctgatatcaccgatatcccggcgctgctcgacaccgtggacggcatcatcctgaccggggcccgggccaacgtgcatccgacccgtttcaacgtcgacccctgcgagaagcacgagccctacgacatccaccgggacgaggtggcgctggcgctctcggttgcctgtgtcgcccgcagcatccccctgttcggcatctgccgtggcctgcaggagatgaacgtcgccttcggcggctcgctgcatcccgagattcgcgagataccgggccgcatgaaccaccgcatgcccaggctcgagaacggcgagattcatcccgatccgaccgtggtgttcgccgaccgccatgacgtcgacctcacgccagccggcgcgttcgccaaaattctcggctgtgagaagatccgggtcaattcgctgcatggccagggcatcctggagcccggcaaacgcgtgctgatcgagggcatcgccgaggacggcaccatcgaggcgatccgcatcgccgaagctccgacctttgcgctcggcgtgcaatggcatgcggaatacgatccgcagcacaatccggtcaaccgcaagctgttcgaggccttcggcgaggcgctggtcgcgcggcagaaggcggcggcgtag

SEQ ID NO: 821 - DNA, 1410 bp, BradyrhizobiumColbertium
atgaagaccgccaaagacgtcctgaaatcgatcaaggacaacgacgtcaagtacgtcgacctgcgcttcactgatccgcgcggcaagtggcagcacgtcacgttcgacgtcagcatgatcgatgaagacatcttcgccgaaggcacgatgttcgacggctcctcgatcgctggctggaaggcgatcaacgaatccgacatgtgcctgatgcccgatccggtgaccgcgacgatcgatccgttcttcgccgagaccaccatggtcatcacttgcgacgtgctcgagccgaccaccggcgagccctataaccgcgacccccgcggcatcgccaagaaggcggaagccatggtgaagtcgatgggtgtgggcgacagcgtgttcgtcggccccgaagccgagttcttcgtgttcgacgacgtgcgctattcggccgacccgtacaagaccggtttccggctcgactcctcggaactgccgacaaattccgataccgaatatgaaggcggcaatctcggtcaccgcatccgcaccaagggcggctatttcccggttccgccgcaggactcggtgcaggacatgcgctcggagatgctcggcgccatggccaagatgggcgtcaaggtcgagaagcatcaccacgaggtcgcttccgcccagcacgaactcggcatgaagttcgacacgctgactctgatggccgaccacatgcagatctacaagtactgcatccaccaggtcgcgcatatctacggcaagaccgccaccttcatgccgaagccgatctatggcgacaacggctcgggcatgcacgtgcaccagtcgatctggaaggacggcaagccggtgttcgccggcaacaaatatgcggacctgtcggagacctgcctccactacatcggcggcatcatcaagcacgccaaggcaatcaacgccttcaccaacccctcgaccaactcctacaagcgtctggtcccgggctatgaggcccccgtgctgctcgcctattccgcgcgcaaccgctcggcctcctgccgcatcccctacaccgcttcgccgaaggccaagcgcgtggaggtgcgcttccccgatccgatggccaacccctatctcggcttcgccgcgatgctgatggccggcctcgacggcatcaagaacaagatcgatccgggtccggcgatggacaaggacctctacgacctgccgaaggaagagctgaagcagatcccgaccgtctgcggctcgctccgcgaggcgctggagaatctcgacaaggaccgcggcttcctcaaggctggcggcgtgttcgacgacgacttcatcgacgcctatatcgagctgaagatgaccgaagtcgcgcgcttcgagatgaccccgcatccggtcgagttcgagatgtactattcgggctga

SEQ ID NO: 822 - DNA, 339 bp, BradyrhizobiumColbertium
gtgaagaaaatcgaagccatcatcaagccattcaagctcgacgaggtgaaggaagcgcttcaggaagtcggccttcagggcatcaccgtcaccgaggccaaaggctttggccggcagaagggccacgccgaactctaccgcggcgcagaatacatcgtcgacttcctgccgaaggtaaaaatcgagatcgtgatcggcgacgatctggtcgagcgcgccatcgacgcgatccgccgcgcggcgcagaccggccgcatcggtgacggcaagatcttcgtgtccaacatcgaagaggcgatccgtatccggaccggcgaatccgggctggacgctatctga

SEQ ID NO: 823 - DNA, 1500 bp, BradyrhizobiumColbertium
atggaagttctgaccaacgctgagatgcagcgcgccgaccagctcgccattgcggccggcacgcccggtttcgagctgatgctgagcgcggggcaggcggtcgcggaggccgcccatgcgctggtggaggaggggccgatcctcatcgtggccggccccggcaacaacggcggcgacgggttcgtggcagccgccgagctcgccgctcaggggcgcgaagtctcggtgatctcgatgagcgagcgtgaccagctccagggcgatgcggcgtccgcagcgcgcggctggaagcacccggtgctaccgttcaatccgcaggcgatcggaaggccggcgctgatcgtcgatgcgttgttcggcgctggcctcagccgtcccgtcgaaggcgaggcgcgtgcgatgatcgaggcgatcaacgccaacggcgccccggtgctcgccgtggatctgccgagcggcatcaacggcaccagcgcagccgtgatgggcgcggcagtgaacgccaccgagagcgtcaccttctttcgcaagaagcctgcgcatctgcttctccccggccggatccattgtggccgcgtgcgcgtggccgagatcggcatcgacgcgcaggtgctgaatgagatcgcacctcagaccttcgagaacgatccggatttctggggcgccgcctttcccgtgccgcgcatcgacggccacaaatacgcgcgcggccacgtgctggccgtttccggcgatgcggccgcgaccggcgcggcgcggcttgccgcgcgcggggcactgcgcgcgggcgccggcctcgtgacgctggcgagcccgcgcgatgcactcgccatcaatgcggccgcgctgacggcggtgatggtccgcgccgtcgacagcgcggtcgagtttggcgagctgctcggcgacaagcgttacaacacctgtgtcatcggccccggcgttggcatcggtgagcgcacctgcgacctcgttcacaccgcgcttggcgcgcagcgtcacctggtgctcgatgccgatgcgctgacgagctttgcagcgacccccgagcgcctgttcgaatcgatcaagtcctcgcagaacagtgcggtggtgctgacgccgcacgagggcgagtttccgcgcctgttctccgatctcagcaacaagcatcccggccgctccaagctcgagcgcgtgcgcgccgcagccgagcgctccggcgccgtcgtgctcctgaagggcccggataccaccatcgccgctccggacggtcgcgccaccatcgccgtcaatgcgccgccctggctcgccacggccggcgccggcgacgtgctgtccggcattatcgcagggctcctggcgcagggcgtgcctgccttcgaagctgccagcatcggcgtctggatgcacggcgcagcggcaagcgaggccggaccgggcctgatcgcggaggacctgaccgagacgctgccggccgtgcatcggcgcatctatgacgcgctcggcatcgaatattga

SEQ ID NO: 824 - DNA, 1170 bp, BradyrhizobiumColbertium
ttggccctcaggcccggccaatcggcgactccgatatgggaactggccgcagcaagccagctcggagacgtccgtctcaagcggggcgatcgctgcgagctggtgtttcggaacgaccttcctgtcccgcttgcgccggtctggtacggcctcaacagcggggccgcatcggactcgctgcgaggacacacccccgccgcgcccaattcggccgaaacatcaactgtttcaatacccaatgctgggacgctcgtagccgacttccgcctcttcgaggacggcctgaagctgccggcacggtcgcttgcgatcgtcgccggcgagactggccccattgccgttgatcgtgacgagatcctgttgatcgaggaatggcgcctgcggccggatggcaccgcggttccgccgggccaggatccgaaggatgccgcatcgctctacaccgtcaatggcagatcctcattcgaactctcagctgtggccggcgagcggctccggctgcgcttcatcaacggctcgcaacgttctgttatagcggtcaaattggagagccatgaggttcaggtcatggccctcgacggtcagccagccgagccgtttccggcgcggaatggtgctctggtgctcgccgcgggcggacgggccgacgccttcgtggatgtcgccagatcggcccccttcctgctgcacgacggcaaggaggcgcgccaggtcggtagcctcaccgtctccggcagccagggccggcgcgcgcgtctggggccgccgcagccactcccttcaaacgaccttcccgagaagctcgacctgcggggatccctgcggttcgatgtcgcgctcggtgcagcggacgccggttggacgcggccggcaagcttctcgaccgagtcttcccccgccttccgcgccaaggccggacgaaccgtcgtgctggcgctgaaaaaccccgcgccgatcacgaccgtcttccacctgcacggccaccccttccgcctgctcgacaagcttgacgatggctggaagccttactggctcgacacgctcgcgatcgagcccggccaaacccagcgcattgcgttcgccgcaagctcccccggacgatggctgatcgaatccgtcatggctgactggtccgcgccgcggctggtgcggtggtacgcggtggactag

SEQ ID NO: 825 - DNA, 82 bp, BradyrhizobiumColbertium
gcgggcgtggcggaactggtagacgcgctggatttaggttccagtgacgaaagttgtgggggttcgagtccctccgcccgca

SEQ ID NO: 826 - DNA, 1371 bp, BradyrhizobiumColbertium
ttggacgccatgcaggtcacagaaaccctctcggaaggcttgaagcacgagttcaagatcagcgttcccgcgtctgatctcgatgccaaggccggcgccaagctcgtcgacctcaaggacaaggtccggatcaacggcttccgtccgggcaaggtgcccgtggcgcacctgaagaaggtctatggccgctccgtgatggccgaaaccatcgaccagaccatccgcgacaccaacacgcagctcttctccgaacgcggcttccgcctcgcgaccgagccgaagatcaccatgccgacggagcagaaggacgtcgaggagttgctgagcggcaagaccgatctgacctacaccgtcgccatcgaggtggtgccggcgatcgcactcgccgacttcaagagcttccaggtcgagaagcctgtcgccgatgtcaccgacgccgatgtcgacgacgcgatcaagcgcatcgccgattccaaccgcacctacgccgccaagggcgagggcgccaaggcggagtcgggcgaccgcgtcaccatcaacttcaagggcagcatcaacggcgaagtcttcgagggtggcaccggcgagggcatccaggtcgtgatcggctccaacaccttcatcccgggcttcgaggagcagctcatcgggatcggcgccaacgagacgcgcacgctgaaggtgtcgttcccgaagaactacatgaacgagaagctggccggccagccggcggagttcgagaccaccgcgaccctgatcgaggcgccgcaggatctggcgatcgacgacgagttcgccaagtcgctcggcctggaatcgctggacaagctgaaggaagccgcgcgcgagcggctgaccgccgagttcgcgactgcgacgcgccagcgggtcaagcgcgcgctgctggaccgcctggacgaggcgcatcgcttcgaggcgccgccttcgctggtcgatgaggagttcaatctgatgtggaactcggtcaaggccgagatggactccgccggcaagacctttgccgacgaggacaccaccgaggacaaggcgaaggaagagtatcgcaagatcgcggaccgccgcgtgcggctcggtctcgtgctctccgagatcggcgagaagaacaagatcaccgtgaccgacgacgaggtcggccgcgccgtgatcgagcgcgcgcgctcgatgcccggccgcgagaaggaggtctgggacttctaccgcaacaatgcccaggcgctggcccagcttcgtgcacccatctacgaggacaaggtcgtcgacttcatcctggagctcgccaacgtgaccgagaagaaggtctcgcgtgaggacctctacaaggacgacgacgcggaaaagaccgcagcctga

SEQ ID NO: 827 - DNA, 636 bp, BradyrhizobiumColbertium
atgcgcgatccggttgaaacctacatgaacctcgtgcccatggtggtcgagcagaccaaccgtggcgagcgcgcctacgacattttctcgcgcctgctgaaagagcgcatcatcttcgtgaccggccccgtcgaggacggcatgtcgacgctgatcgtcgcgcagctcttgttccttgaggcggaaaatccgaagaaggaaatctcgatgtacatcaactcgccgggcggcgtggtgacgtcgggccttgcgatctacgacaccatgcagttcatccgcccaccggtctcgacgctctgcaccggccaagcggcttcgatgggctcgctgctgctcgccgccggcgagaaggacatgcgcttctccctgccgaatgcgcggatcatggtgcatcagccctcgggcgggttccaaggccaggccacggacatcatgctgcacgcccaggaaattctgaatctgaagaagcggctcaacgagatctacgtgaagcacaccggtcaaacctacaagtcgatcgaggatgcgctggaacgagacaagttcctgaccgcgaacgatgccaaggagttcggcttggtcgacagggtgatcgacaagcgcgccgaggagccggcggcgacgaaatccccgtag

SEQ ID NO: 828 - DNA, 1272 bp, BradyrhizobiumColbertium
atgagtaaggtcggcacgagcgactccaagaacacgctgtattgctcgttctgcggcaagagccagcacgaagtccgcaaactgatcgcgggtcccacggtcttcatctgcgacgagtgcgtcgagctctgcatggacatcatccgcgaggagaacaagtcctcgctggtcaagtcgcgcgacggcatcccgacgccgaaggaaatctgcaaggtgctggacgactacgtgatcggccagagccatgcgaagaaggtcctgtcggtcgcggtgcacaaccactacaagcgcctcaaccatcagaccaagcacaacgacgtcgagctcgcgaagtcgaacatcctgctgataggtccgaccggttcgggcaagacgctgcttgcccagacgctcgcgcgcatcctggacgtgccgttcaccatggcggacgcgacgacgctgaccgaagcgggctacgtcggcgaggacgtcgagaacatcatcctgaagctgctccaggccgccgactacaatgtcgagcgcgcccagcgcggcatcgtctacatcgacgagatcgacaagatcagccgcaagtccgacaatccctcgatcacgcgcgacgtgtcgggtgagggcgtgcagcaggcgttgctcaagatcatggaaggcacggtggcttcggtcccgccgcagggcggtcgcaagcatccgcagcaggagttcctgcaggtggataccaccaacatcctgtttatctgcggtggcgccttcgccggcctcgagaagatcatctcggcgcgcggtcggtcgacctcgatcggtttcggcgcccaagtgctcgcgccggaggaccgccgtaccggcgagatcttccgtcacgtcgagcccgaggacctcctgaagtacggcctcatccccgagttcgtcggccgtctgcccgtcgtggcgacgctcgaagatctcgatgagacctcgctgaagaagattctcacagagccgaagaacgcgctggtgaaacagtaccagcgcctgttcgagatggagaacatcgagctgaccttcgccgacgaggcgcttggcgcggtcgcccgtaaggcgatcgagcgcaagaccggcgcgcgcgggctacgctcgatcctcgaagcgatcctcctcgagaccatgttcgacctgccgggcctggaaggtgtggaagaagtcgtgatttcccgcgaagtcgtggaaggaacggcgcgtccgctctacatctacgccgatcggtccgatcgcgcggtcgagaacgccagcgcctga

SEQ ID NO: 829 - DNA, 123 bp, BradyrhizobiumColbertium
gtgcgtttcgccatggacgatggttggccggggtttgggattggtcatggccttttccttttgctttgccccctcgcacgcagcccgctgatcatgcgcaaccgccacaaggtgccgaggtga

SEQ ID NO: 830 - DNA, 2424 bp, BradyrhizobiumColbertium
atgaccaatcccaaaccccggccaaccatcgtccatggcgaaacgcacgcttatcccgtgttgccgctgcgcgacatcgtcgtcttcccgcacatgatcgttccgctcttcgtcggccgcgagaagtcgatccgcgcgctggaagaggtgatgaagaacgacgcgctgatcatgctcgcgacgcagaagaacgcgtctgacgatgatccggcgcccgacgccatctacgagaccgggacgctcgccagcgtgctccagctcttgaagcttccggacggcaccgtgaaggtgctggtcgaagggctcgagcgtgcgcgcgtggcgaaatataccgatcgcgccgactattacgaggcgactgccgtcgcgctcgccgataccgatgcgaagtcggtcgaggcggaagcgctggcgcgttcggtcgtgtccgacttcgagagctacgtgaagctcaacaagaagatctcggccgaggtcgtcggcgtcgtgcaggcgatcaccgatttcgccaagctcgccgacaccgtggcttcgcatctcgccgtcaagattgccgatcgtcagggcatcctggagacgctgtccgtgaccacgcgcctggagaaggtgctggggctgatggagagcgagatttcggtgctgcaggtcgagaagcgcatccgctcgcgcgtcaagcgccagatggagaagacccagcgcgagtactatctcaacgagcagatgaaggcgatccagaaggaactcggcgacgacgacggtcgcgacgagctcgccgatctcgaagagaagatctccaagaccaagctttccaaggaagcgcgcgagaaggcgcagcatgaattgaagaagctgcgccagatgtcgccgatgtccgcggaagcgactgtcgtgcgcaattatctggattggttgctgtcgatcccgtggaacaagaagtccaaggtgaagaaggatctggagcaggcgcaagccatactggattccgatcactacgggctggagaaggtcaaggaacgtatcgtcgagtatcttgcggtgcagtcgcgcgccaacaagctgacgggtccgatcctgtgcctcgtcggccctcccggcgtcggcaagacctcgctcggcaagtcgatcgcgaaggcgaccgggcgcgaattcgtgcgcgtctcgctcggcggcgtgcgcgacgaagccgagatccgcggccatcgccgcacctatatcggctcgatgcccggcaagatcatccagtcgatgcggaaggcgaagtcgtccaatccgctgttcctgctggacgagatcgacaagatgggcgccgatttccgcggcgatccgtcctcggcgctgctcgaggttctcgatcccgagcagaacgggacgttcaacgaccactatctcgaggtcgactacgatctgtccaacgtgatgttcatcacgaccgcgaatacgctcaatattcccgggccgctgatggaccgcatggagatcatccggatcgcgggctacaccgagaatgagaaggtcgagatctcgcgcaagcatctgatcccgaacgcggtgtccaagcatggcctggactccaaggagttctcgatcgacgacgacgcgctgctgctgctgatccgccgctacacccgcgaagcgggcgtgcgcaacctggagcgtgagctctccacactcgcccgcaaggcggtgaaggagctgatgatctccaagaagaagtcggtcaaggtcaccgagaaaactctggaagagttcctcggcgtgccgaagtaccgcttcggcgagatcgagagcgagccccaggtcggcatcgtcaccggccttgcctggaccgatgtcggcggcgagctgctgaccatcgaaggcgtcatgatgcccggcaagggcaagatgacggtcacgggcaatctgcgcgacgtgatgaaggagtcgatctccgcggcggcttcctatgtccgctcgcgcgcgatcaactatggcgtcgagccgccgctgttcgacaagcgcgacatccacgtgcacgtgcctgagggcgcgacgccgaaggacggcccgtccgccggcgttgccatggccaccgcgatcatctcggtcatgaccggcatcccggtccgccacgatgtcgcgatgaccggcgagatcacgctgcgcgggcgcgtgctgccgatcggcggcctcaaggagaagctgctggctgcggcccgcggcggcatcaagacggtgctgatccccgaggacaacgccaaggatctcacggagatttccgatgcgatcaagggcggcatggagatagtcccggtctctcgcctcgacgacgtcgtcgccaaggctctggtgaagaagcccacaccgatcgtctgggaagaggacaccaaggtgacggtgaagccggacggggatgaagccgccggcggcctgaccgctcactga

SEQ ID NO: 831 - DNA, 405 bp, BradyrhizobiumColbertium
atgcacatcgacggccaatgccattgcgggaagatcacgtatgaggccgagatcgatccggagcaggtctcggtgtgccattgcaccgattgccaggcgttgaccggctcgccgttccgcgtgaccgcgatctgtgccaaggccgacgtgaagctgaccgccggcacgcccaaggtctacggcaagcgcggcgacaacggccggatgcgcttccagcatttttgcggcgagtgcggttccccgctgttcaccagcggcgagggcgaccaggtcgacgattggggcatccgctggggcagcatccgtcagcgtgaccagttgcggccggtgcggcagatctggtgccagtcggctgcggtgtggatcgacgccgtgccgttgctgccgggcaggccgcaggattga

SEQ ID NO: 832 - DNA, 74 bp, BradyrhizobiumColbertium
gggcggttagctcagctggttagagcatctcgtttacaccgagagggtccgcggttcgaatccgtgaccgccca

SEQ ID NO: 833 - DNA, 861 bp, BradyrhizobiumColbertium
atgcaacagcccagcggacacgagcagaacgccgaccagatcgcctattggaacggcccgagcggacagcgctgggccgatcgccatacagcgcaggagagcctgcttggccccattgccgacgtgctgatcgagcgcgcgaggccgaagccgggtgagcgcgtcctcgatgtcggttgcggctccggcgcgacgaccttcgccttcgcgaaggcggtggcacccgacggattcgcgctcggcctcgatgtgtccgaaccgatgctggcgcaggcgcgcgcgcttacgccaaagagcctgccgctcgacttcgtgctggcggatgcgacggtgtatccgttcgagtcggcgagcttcgatctgctcgcctcgcgcttcggcgtgatgttcttcgccgatcccatcgcgtccttcaccaatctgcgtcgcgcactgaagccgtccgggcgcctcgcgtttgcctgctggcgcgagccgaaggagaacccgtggatgatggcgccgctgatggcggtctacaagcatgtgccgaaaatgccgccggttggtcccgaagagccgggcccgttcgccttcgcatcggaggagcgcgtgatgcgcatccttaaaggcgcgggcttcgtggatgtggcaatggagccgcgcaatcttccgatggatatcgcgatcggcggcggcctcgatgccgccgtggacggctcgctgcagatcggccccgccagccgcgcgcttcagggccatccgccggagacctacgaggccgccaaggcctcgatccgcgagacgctcgcgccgttcctgaaggaccggtcggttgagttgcagggtgcgatctggatcgtgacggcgaaggccgcgtag

SEQ ID NO: 834 - DNA, 963 bp, BradyrhizobiumColbertium
gtggccgatcacgaccatcacgggcatcaccaacataatcatgcaagccattcgcatggtcatggccaagctcatgggcacgtccatacgcccgcgagcttcggcaaggcgttcgcgatcggcattacgctcaacatcgcgctggtggtggccgaggcgacttacggctatatcggcaactccaccgctttgctggcggacgccggccataatctgtccgacgtgcttggcctggtcgtggcctggggcgcctcgatcgcggcgaagcgcgcgccgagcggccgcttcacctatggcctgcgcgcctccaccatcctcgcggcgctggcgaacgcggtcttcctgctggtcgcgaccggcgcaatcggctgggaggcgatcctgcgcctgcaacaccccgagccggttgcgggcatcacggtgatggtggtcgcgggcatcggcatcctcatcaacggttttaccgccctgctgttcgcgcgcggccgcaaggacgacatcaacatcgagggcgcgtacctgcacatggccgcggacgccgcggtctcgctcggcgtcgtggtctcggcggcgctgatcatctggaccggctggctgtggctcgaccccgtcaccagcctcgtcatctgcgccaccatcctctggagcacgacgagcctcttgcggggctccatcgacatgtcgatggcagccgcacccaggggcaccgacctcgccgcgatcagggcgtttttgctcgcgcgtcccggcgtctcagggatccacgatctccacgtctggccgatctcgaccaccgagacggcgctgacctgccatctcgtcatgcccgcaggcagcggcgacgcattcctggtggagacggcgcagatcctgaagacgacctatcgcatcggccacaccacgcttcaggtcgagacgcaccccgaaaatggctgcgcgctggcgccggatgatgtggtgtga

SEQ ID NO: 835 - DNA, 984 bp, BradyrhizobiumColbertium
gtgcagggcatcgtcgagatcgcggtgggcggcaagtcggccggcaagctgttcgagggcgatcgccgcttcgagatcgtggtccgcctgcccgagcacctgcgcggcaatctcgaggcgataagggccatcccgattccgctgccgcccggtgaggacgccggctccggcacggccattcgtaccgcgctggccgcttcgcccctcacgcagatgcgctatgtgccgctctcgtcggtcgcaacagtcgatgcgacgccggggcccaaccagatcagccgagagaacggcaaacggcgcatcgtcttgaccgccaatgtccgtgcccgcgatctcggctccttcgtcgccgaggccgaggcggccgtggccgagaaggtcaagctgccgccgggctacttcatcggctggggcggacagttcgagcagcttgtctccgcgaccaagcggctggcgatcgtcgtgccggtggccttgttgctggtgttcctgctgttattcatgggcatggggtcggcggcggatgcggcgctggtgttctccggcgtaccgctggcactgacgggtggtgtcgccgcactcctgctgcgcgacattcccttgtccatcagcgccggggtcggcttcatcgcactgtcgggtgtcgccgtgctcaacggcctcgtcatcatcgtcttcatcgagcggctgcgcggcgaggggcggtccgtcgtggatgccgtgcgtgagggcgcgctgacgcggttgcggccggtgctgatgaccgctctcgtggcctccctcggcttcgtgccgatggcgctcgccaccggcgccggcgccgaggtgcagcggccgctcgcgaccgtggtgatcggcggcatcatctcatcgactgtgctgacgctcctggtgcttccggcgctctacgtgctgttccgccgtgacgtcgcaggcgaaacgcctacaatggcgcctgatttggcagcatccgcggagcgctag

SEQ ID NO: 836 - DNA, 978 bp, BradyrhizobiumColbertium
atgaggacgttctcgaccatcgtcgttgccatcgttgcggccgcactcggcgcttacggctattccctgctcgcaccgggcaagctcgctcacaccgaaccggccgaacattccgaacacaagcaaccgaacgaccgtgtcgagcaggacgagcacggcgccgaccgcatccgcatctccgacgtcaagcttgcagccgcaggcgtcacgctggccgaagccgccggcgccacgctgaccgacaccctcgctttcaatggcatcctgcgcgccaaccaggaagccgtggtgcaggtgaccccgcgctttccgggcgtggtcaaatccatcctgaagcgcatcggcgacagggtcgccaaggacgatctgctcgccgcgatcgagagcaaccagagcctcaccgtctacgagctgaaggcgccgatcgccggcacgatcatcgaacggcagatctcgctcggcgagtatgcctccgagcagaagccggccttcgtcgtcgcggacctctccaccatctgggtcgatctgtcgatctaccggcaggacttgaggcgcgtccgcctcaatgacgaggtgctgatcgatcccgatgacggccgcggcgagatcaagggcacgatctcctacatggcgccgatcggcagcagcgagacccagacggcgctggcgcgcgtcgtgctgcaaaatcctgacggacgcttgcggcccggcctgttcgtcacggcgcggctgatcctcgccgaacgcaacgtcgcggttgccgtgcgccgcagcgcgatccagacgctggacaacaagaccatcgtgttcgtccgcgaggacggcgacaagatcgaggcacgccccgtcgaaacaggggattcagatccgcgacacgttgagatcaaggccggcctcgcggccggcgagcactacgttgcggagaacagcttcgtcgtgaaggcggagatgggcaagggcgaggccgagcatgattga

SEQ ID NO: 837 - DNA, 1260 bp, BradyrhizobiumColbertium
atggccgcgcgcgtggcgctcgcggcggcgtgtctgatcgttggatcggcacttgcaccgtctcacgcccagactttgacgatgcgcagcgcgctgtcgcgcgcgctggccgcgagcccgcggctgaccgcggctgagcgcgacatcggcattgccaccggccagcgcatccaggccggtgccctgctcaatccggaactgtcctatgaacaggacgattcattcggctccggcaggtatcgcggaacgcggtcggcggagaccacactgcagatcagccaggctttcgagctgttcggcaagcgcgaagcgcggattgcggccggagtagctggcgtcgaggtcgccgcgatacagcgcaaggcgatccggctggaggtgctgtcggagaccgcgatcgccttcctcagcgtgcttggcgcacagcggcgcatccagatcctcgatgagcagattgccgcaatcgaccggctgacgccgctgctgcgccgccgcgtcgaggccggcgcctcctcgccggccgagaccgggcgcgccgaggtcgcctccgccctcgtgaaggccgatcgcgagcgcttcaaggcgagtctggccagcgcccggcgcgagcttgcggtgctgatgggcgatcccgccgccaagttcggcgaggtctccggccgactcgacaccaccggacggccgcccgcgttccaggcggtgatcgccgccatcgacgccaacccgcagctggtgcgctggaccgcggtttacgcacagcgcaatgccgagctgctgctggcgcgcctcaggccctatccggacgtgcgcatcggggccggctggcgccacttccacgaaacgggcgacgatgcagcgcggctgacactctcggtgccgatccccgtgttcgaccagaaccagggcaacatcctttcggcacaggaaagcctcgccaagaccagggccgagcgcgaggccaatcgcaacacgctgatcgtgatcgccggccgcgcctatgactcgcttcacggctcgctgcgcgagctcgcggtgctgcgcgagaccgccattcccaaggcggtcgaagcctccgaggcgatctcgcaaggctacggccagggccgcttcaccctgctcgaggtgctcgacgcccaggccagcgtcacccaggcccggctgcgcgagcaggaggcgctgcagaatttccatgccggcgttgcgatcatcgagggcctcgtcggcaatccattcacgctggcgcgggagagcgcacgatga

SEQ ID NO: 838 - DNA, 300 bp, BradyrhizobiumColbertium
gtgctgatcgcggttgtctatctgctcgcaggggcgctgcatggcgcacacgacatcgacgtcaccacgccggggggcggttcggagatcgcggcggtcctagatgacgccacgggcggcagcgatcacaaggccatcggcggacatcattgccatggctgcttctccctggcggtaacacagccggtgccaccgaccacatcgacgctgcttgtgtcggcaactcgcccgcaacatgcatcccggctggccggcatcatccccgataccgactctccccctcccaagcagattgcctga

SEQ ID NO: 839 - DNA, 243 bp, BradyrhizobiumColbertium
gtggatcgcagaacggcgtgcctgcaccaggcgaatgcattccgggagaaggccattgccgatcccgagcaccacgatcaatggatcgacgaagcgatcaaatggctcgaacgggccatggaggcgagctgtcgcgccgtcattaccgtgccggcagacgatggcggcgccgtagccgagccggtcgccaccgaagtcacggatgccatgccctcacagcggcgcgtcattgcccgccagtga

SEQ ID NO: 840 - DNA, 891 bp, BradyrhizobiumColbertium
atgacggttgaaactctcatgcgcgaagagatcatggaaggcggcctggtgagtgagacgcctcgtgcaatccagtggagttcggtcttcgctggtgctctcgcggctggcgctatgtccttcatcctgatcggcttcggagtggccgtcggcctgggtgtcagttcggcctcgccgacatggcgcgacgcctcggccgcgctcgcgttgctctccggactgtatctgatcattcaggcgatcgtcagcttcggcttcggcggttacatcgctggccggacgacccgtccggcgcccgcgctcgcaacgatcgaagacgatggcgagcggcgagacggcctgcacgggctgaccgcctgggccctggcggtgctggctggcgccgctctgctcgctcttctcggggccgccgcgatcgaccgttcgccgatgcgcagctcagcgagcaacgcttccgcggccgagcctttgttgagctatgagctcgacaagctgttccgcgccccgcgtcgcgccccaaacctcgatctcagggacgcgcgggcggaagcgggacgcattctgatgacgtcgtcaagccacagcggcgtgagcgccgatgaccgcacctaccttgtgcaacaggtcgcagctgcgacgggactggcggccccggacgccgagcggcgggtcgatgcggtgatcgcagactccaggaccgccatcaaccgtgcacggcgcaattcgatcatcgtggcgttctcgatcgcagccgcgacccttatcggtgccgcggtcgcctgggctgcagccgtcgccggcggacggcatcgtgatggagacccgctgccgaactggatggcgagctccaatcgcttccaccgcaatccgcgggcgatgccggtgccgtaa

SEQ ID NO: 841 - DNA, 1251 bp, BradyrhizobiumColbertium
atgtcctccctctcctttacgcacaccgtgaccgagcgcttcctgcgctacgtcaccatcgatacccagtccgatccggaatcccccacctcgccatccaccgagaaacagaaggatctcggccgcgtgctcgctgccgagctgaaggccatgggcgttgaggacgcgcatctcgacgaatacggctatgtctacgcaacgatcccggcgaacaccgacaagaaggtgccggtgatctgcttctgctcgcacatggacacttcgccggatgtcaccggcaaggacgtcaagccgcaggtcgtgaagaattatcgcggcggcgacatcacgctgccgggggacagcagccaggtgatccgcttcgccgagcaccccgcactgaagaaccagatcggcaacgacatcatcaccaccgacggcacgacgcttttgggggccgacaacaaggccggcgtcgccgagatcatggatgccgcgcatttcttcatcaacaatcccgacgtgaagcacggcaccatcaagatcctgttcacgccggacgaggagatcggccgcggcgtcgacaatgtcgacctgaagaagctgggcgccgatttcggttacaccatggacggcgagagtgcgggctgcgtcgaggacgagaccttctcggccgacggcgccaccatcaccatcaatggcgtcagcgcccatcccggctacgccaaaggcaagatggagcacgcaatcaagatcgcggcggccatcatcgaacgcctgccgaaggaaggctgctcgccggagacgacctcgggcaagcagggctttctgcaccccatcggcatcgagggcgcgctcgaacaggcgacgctctccttcatcgtgcgcgacttcaccgaggaaggtctcaaggagaaggaggtcctgctcgagaccatcgtcaaggacgtgatgaaggattatccgcgctcgacctacaagttcgaggtcaaggagcagtaccgcaacatgaagcaggtgatcgaccgtcacccgcacgttctcgaatacgccatcgaagccatccgccgcgccggcctgcgcccgatgcgcacagcgatccgcggcggtaccgacggctcgcggctgtccttcatgggcctgccctgccccaacattttcgccggcgagcatgcgtttcattcgcggctcgaatgggtcagccggcaggacatggaaaaggcggtgcagaccatcgtgcatctggcgatgatctgggaggagcgggcctga

SEQ ID NO: 842 - DNA, 114 bp, BradyrhizobiumColbertium
gtgcgtaaaggagagggaggacatttctggtcaaccgccgggtctttggggaagctggcggtatatcagaaaagcgagccggatgcggccggacggaggtttgatcagccttaa

SEQ ID NO: 843 - DNA, 315 bp, BradyrhizobiumColbertium
atggccaagaaggattcggcaaagaagacagccgcgcctgccaccgtcacgctcaagcagctcgccgctgacatcgcggagcgccgggacctgtcgaaaaagcacgccgaggccgtgctgacggacatggtcgagctgatcgtgaagcacctcaagaagggcgaccgggtccgcatcgtcggcctcggcatcttccaggtccgcaagcgcgccgcccgcaccggccgcaatcctgccaccggcgaagcgatccacatcaaggcaaccaggaaggtcgcctttcgtccggtcaaggagctgaaagaggcgatctga

SEQ ID NO: 844 - DNA, 234 bp, BradyrhizobiumColbertium
atgatagaaagcaccgtctacgaccccaccaccttcctgccgccgaacccagaggcggtctatccgctcgattgcgagtctcgccgaacggaggacaagacccgccagatgcagctcacggtgctgatggcctgccagaagaacgggacgcgggccggcttccttgagcggcagatcgggatcgtcaagtcgcaccgctacggtgtggctgccaagcgcgaggtggtgtcgtga

SEQ ID NO: 845 - DNA, 294 bp, BradyrhizobiumColbertium
atgggcatctgcgattgcggttttactgccgatgagtgcggcacaaatcattgcatgcgcaagaagatacatttggccggcatgacgccgggcagcaagtggccggaaggagcacccatcagtaaggatttcaagacaaccggggacgggaccggaaacggccgcaccaccaaacctgaattgacaggttcacccagcgggacgccgcaaggggccggtaatttttcagagcgatgggagatcggcaagaacggctgggatgcctccgacgaagccacgcgggaggacatctaa

SEQ ID NO: 846 - DNA, 333 bp, BradyrhizobiumColbertium
atgatcgttggagacaacgattccgctggcgtcgtgccctatagcgcaaacgaggctttggcagagattgatcggctccgcgaagaactgtctcaggcccgcgcactggtcgaggaattgaagagcaaactcgccggcagcttcacgcatgatcagtaccatgccgggcttgattgtatccgcaaggagcgtgaccgggctctgaatcaggtcgaggaactgacggccaccattaagcggatcgacgcgatcaacgacaatccggcctgcttcaacgtcgagatcgatcaagtctgccgtccgttcacatcgactgtgggagagccaaaatga

SEQ ID NO: 847 - DNA, 114 bp, BradyrhizobiumColbertium
atgagggtctattacaacgaaatcgatcacttcaattgcgattggctgcagaagcttatggaccgcggactgatgggtccaggctgcttcgcatcaaccggaggtacgagatga

SEQ ID NO: 848 - DNA, 228 bp, BradyrhizobiumColbertium
atgacgctgagtggagatgaagcctactacgccaagcagacatacgatcgaatccaggaccgctggagcgattgcttggcgacgatcaattccgtcagcgccaacccggcgcggtccggacagcatctcgacatccgaattgtcgggcccggatgttctatcactctgcttagcctggacgacttgcgtgatctcatcgcgcgggctcgatcagccccgctcacatga

SEQ ID NO: 849 - DNA, 195 bp, BradyrhizobiumColbertium
atgagaaagccagacattcgttgcgtaaccagcgtggtcaaggacgcggctgagtgccaggcaggcttgccggacggccgctgggtgccggctcgatcctacggctggaatcaactgcggttcttcggccgcttcatggccgcgtggcttgtcttcactggccgcgctgacgccgtcacttacccaggccaatag

SEQ ID NO: 850 - DNA, 225 bp, BradyrhizobiumColbertium
atgcaaaaactcgatccggaagacattcgagacgagatgcgggagatgggccaacaagcagatcctacccgcgagatgctacgccgcatggtggcggagttctgtgactatcactacggcacctgcccggcggatattggcagcggcgagtgcaattgctttgctggtgccctactgatccaggctagggctacgctctcgaatggagagcgcgatgccggctga

SEQ ID NO: 851 - DNA, 243 bp, BradyrhizobiumColbertium
atgccggctgatcacatcaacattcagcacccggagaagcgcggcgtcgagagccgctactatcgcgaccagctcgaaaacgaaaagctccgcgtcgaactgaagcagctccgcgcctggtacgacacggtcagcaaggatctcgaatcgatcttcaaccggattgaggacgggaagtcggcagagctgcactaccctgacggccgggtgttcatcattaccggaacaccaagaagctcttga

SEQ ID NO: 852 - DNA, 237 bp, BradyrhizobiumColbertium
atggccgtaactaaagaaaaggatcggatgacgatccgccagcaggttgaaatcacctttccggcggaagacgtcgagcacatcatccgctgctgggtggatcacaacatggccgcccatgtgccaaagcctaaggacctcagcaagatcgaagtgcggttctctaccggcgaggatacggtatacagtgcgcgcgtgacctatgagccggtcgagcacactgccgcacctaaatag

SEQ ID NO: 853 - DNA, 282 bp, BradyrhizobiumColbertium
atgcccgacaaactgagcgtcaaaaagtcctacagagacggctgcgttgcgctgcgcttctcggtgaagggaggctacagtctcaaggtggaaggcggcactgatctgaccaccgcagatgcgcgagctttggcgaaagcgatgattgaggaggctgaccgcgtggatgcacgccaagccgcaaaaagagcagccgaggagcgccgtcagaaatggcgagaacgggagatcgccgccggccggttgaaggtgatgcccttgacttcactattcaggcaatga

SEQ ID NO: 854 - DNA, 231 bp, BradyrhizobiumColbertium
atgccgctgatctatgagggcatcgattacagcgcctgccggcgcggccatgaggagttcgagatggaggacggggaaacactactctggccccgctgcgagatcacgggttgcgaggccatgatttgcgtgggcatgagcaagagcctctgctacccgcacggcattgagttcggcgccttcaccaaggaacagttcgaggccgaccgcgcagccagaagcaccccctga

SEQ ID NO: 855 - DNA, 402 bp, BradyrhizobiumColbertium
ttgaatcgctgtaagttctcgatcgtcaacaaggctatcgcctacgactgcgaggcaattgacctcaatgtggatgaagagttcgttggcagcaccgccaaggccgccagctttggccgaaccacccgcgtctctgccgcaaccgttaagcaaatcatggacgaggctgggtttgagcgcgccggcctcgtctgcgatatcgagggtatagagatcgacattatcgatcgggaagcagaccttctagccagccgcatagagttcattgtggcggagatgcaccccgcaatttcgggagaagcggatgttgtccgcgctatcgccaagcttgaagctgtcggcttcactctcaaggaaactctcggaacgtgcgtctacatgcagaaacccgtcagttcgtaa

SEQ ID NO: 856 - DNA, 615 bp, BradyrhizobiumColbertium
atgatcatcatggaggagagctacgagatttccgagccgtcgatcgacggccacatcgtcaagatcaaggccgccaatcccgacgtgctcctgatctacaccacgccgaagttcgcggcccagaccatcaagaagaccgccgagctcaactggaagccgctccagatcctcaccaacgtgtcgatctcggtcggcagcgtgatgaagccggccggtttcgagaacgcgcagggcgtgttgtcggctgcctatgccaaggactccaccgacccgcagtgggccaacgatcccggcatgaagaggtggcacgagttcgtcgacaagtacatgccgggtgccgacaagtccgacaccagcatggtctatggctacggcgccgcgtcgaccctcgccaaggtgctggaaatgtgcggtgacgatctcacccgcgccaacctcatgaagcaggccgcgagcctgaaggacttcgcgccggacaccctgctgcccggcgtcaagatcaacaccaacccgaccgacttcgccccgattgcgcagcttcagatgatgcgcttcaagggcgagaggtgggaactgttcggggagatcatcagcggcgacatcgcctcccagtga

SEQ ID NO: 857 - DNA, 114 bp, BradyrhizobiumColbertium
atgcggaaacgtatcgacgctttctggagcagctatcagcaagcttccgtgtcgtcgcgtccgacgcgcgtggacatggacgcaccacattgccagcaattccggaaaggctaa

SEQ ID NO: 858 - DNA, 114 bp, BradyrhizobiumColbertium
gtgatgtcgatgcgaagaagattgtcgaacttgcacctcaaactcgcgtattcaattttccggagaatagccattttcttccaatggaacggccagaagcactatctcggctga

SEQ ID NO: 859 - DNA, 114 bp, BradyrhizobiumColbertium
atggaatggcgccgcatgttttccgctgaacaaccgatgcttggcgccacgatccagtcgcgcgcaatcacgttgggcggcctcatggcaatcgtcgcgccggcgcaacagtaa

SEQ ID NO: 860 - DNA, 1749 bp, BradyrhizobiumColbertium
atgattgccgacaacacaacgcgacaagagcgcccaggcgaaatgggagcggttttcgacgctgttatcgtgggtgcgggctttgccgggatgtacatgctgcatcgcctgcgcgggcttagcttctcggcacgggtcttcgaggccggcagtggcgtgggtggcacctggtattggaaccgctatccaggtgcacgctgcgacgtcgagagtatgcagtactcattctccttctccgaggagctggaccaggagtggaactggtcggagaaatacgcgccgcaggccgagatcctttcctacgccaaccacgttgccgatcgtttcgacctgcgccgggatatcgtgttcgacacgcgtgtcaccgcggcgacgttcgacgaagacgccgggtgctggctgatcgagaccaaccgcggcgacagggttttggccagattctgcatcatggcggtcggctgcctgtcggcaccgaaccggccaaacttcaggggcatgaagaactttcgcggtccgatctaccacaccggcgaatggccgcatgaaggcgtcgactttacaggattgcgggtcggcgtgatcggcaccggctcctcggcgattcagtcgatcccaatcatcgcgcagcaggcggcgcacctcacggtattccagcgcacggcgacgtggtccgtgccggcgcgcaacgagagcctgacgtctgaatatttgcaggcggccaaggcggattatccggcgttgcgggccaaggcacgcggacgcccgaccggcttctattttcctttcaacatgaagccggcgctggaggctgcacccgaagagcgcgaacggcaatacgaggaagcctggacccgcggcggcctgcccttcctcggcgccttcggcgatctgctgttcgagaaggccgccaacgacaccatcgccgacttcgcccgccgcaagattcgcggcatcgtgaaggacccggcgacggccgacctgctgtgtccggacaacgtgttcggctgcaagcggctctgcgtcgatacttcctacttcgagacctacaatctggagcacgtcaaactggtcgacgtgtccaagacgccgatcgaacgcttcacgcctgacggcatcgaggtcgacggggtcgcgtatccactggacaccgccgtctgcgccaccggctttgccgcgatgacgggttcgttcgacaagattgcgatcaccggccgcaaaggtttgacgctggccgagaagtggcgcgccggcccgcgcgcctacctcgggatcgcctccgccggcttccccaatttgttcacgatcaccggtcccggtagtccctcagtgctcgccagcatgatccaggcgattgagcagcatgtcgactggctggccgactgcatggcccacatgcgcgacgtcggggccgcgaccatcgagccgaagcgcgaggacgaggacgcctgggtcgagcacgtcactgacgtatcgactgtttcgctgcgatcgacctgcagctcctggtatgtcggcaccaacatccccggccggccgcgcgtcttcatgccgtatatcggcggcttcccggtctatgtgcagaaatgcaacgaggtgatgagtgccggcttcgatggctttgtgctggaaggcgcaccggccagcaacgcggcgccccaggtgcgctacaccgagcgctggcgggtgccgatcgacatcgacgtcatttcaccggccgccgtcgccgccaaacgtgtcccagtagtctga

SEQ ID NO: 861 - DNA, 1215 bp, BradyrhizobiumColbertium
ttggcgctgctcaacgtcgtgccggcagccgcggccgatcctgtgcgcttcgcgctgtgctatgacctgagcaaggcctatacgttcgtcacgccgcagattgcccaagctgtgcgcgactatgccgaccttctcaatgcgaagggaggtctcgaaggccatccgatcgaaattatcgtgcaggaccacggcaacgagccgcagcgcggcatcgaatgctacgaacgcttgaagcgcgaaggcgtgatggtgttcgacatgttgtcgacgccggtatcgcgcgcggtccttccgcgcattatgaaggatggcaacatcctgatccagtcactggtcggtcgaggggatgcggtcgatggcaacgtgttcaaatgggtatttccgatcgggccgacctactggggtcaggccgccaatgacattgaatacatcaaacaaaagtccggcggaaatctgaagggcgtcaaggtcgcgttcttttatatcgattatccgttcggacaggaaccgatcggtattctgaagacgctggcgcagaaggagggtttcgagttgcagctcgtgccgtatccgctgccgggcaacgatcaggcctcggcatggacgcagatccgtcgtcttaaccccgactggattgtgagctggagcctgtcgaatatgcatgtgatcgcatcgcgcgagatgaagcgcaatgggatctcgattgaaaagtatatcgctgttaattggctcaacgaggtcgatatcaagaatattggacccgatgtcgctaagggattgaaacgcggcaccaacgtcgccggcggctcatatcagccgttggttcagcagattatcaaggagctttacgacaggggcaaaggcaacggtgatcgcaaatttaccgaggacgtctattacaacactggtcttgcgatctactcgatcgcattcgaaggcgcacggcttgcgatcaagaatggcggctggccgctaacacccgataaaattaagactggtcttgagagtctgaaaaattacgatgctaacgggctgattgcacctattacagtcacggcacaggatcatggcggcggcggcaagacacgcattgaaatgtgggatggagagaaatgggttgcacaaaccgattggatcgctggctttcaagacgaggtttggagcgtagtgaaggaacagtcggcggacttcgccaaatctgagacgcaaaaatga

SEQ ID NO: 862 - DNA, 807 bp, BradyrhizobiumColbertium
atgaatgcacccattgccgctaagatactgtccctcaacaatattgaggtcgtctacgaccacgtttcgcttgcgatcaaaggtgtttcgatcgatgtgcccgagggcggaatggtggccctgctcggcgccaatggcgcgggaaagagtacgacgctgaaatcgatcagcggtttgctcacggccgagcggggcgaggtgcggcggggcgaattgcagttccgcggccaaagccttggcggcctgatgccgcaggaccgcgtcaagctggggatcgcccacgtgctcgaagggcgtcgggtgttcgaacatctcacgcccgacgaaaacttgatcgcggcttcggcgttgcatagccgccaggacatgaaccgcaacaaggaccgggtttacagttatttcccacgtctgcacgagcgccggaccgtcgcgtcgggttatctctccggcggcgaacagcaaatgctcgcaatcggccgtgctctgatgacccagccaaaactattgatgctcgacgaacccagcctgggactggctccttttctcgtggctgagatcttccagatcctcggccgcatcaaccgcgatgaaggactttcgatattgctggttgagcagaacgccattgccgcgctcgaaattgtctcccacggctatctgatcgaaagcggtcgcatcgtgatgcacgacagtgcggctgcattgaagaaaaatcccgacattcaggaattttacctgggaggcgcgcaaaacaagaattttcgtgacatcaaacattatagccggcggaaacgttggctgacctga

SEQ ID NO: 863 - DNA, 1074 bp, BradyrhizobiumColbertium
atgctattccgtcaagccgggatttttcatacggattacagcgccgaccgcgcactgtttccgacccccgccgatcgatggatgattggtattctgctattgctggcgctggccgcgccgatctacatgaacacgctttatctcagcagttacttgctgccttggcttgtctggactgcgggcgcgctcggtctcaatttgatcctcggatgggcggggcaatttcatttgggctacgcagcggtgatgggaatcggcgcctacgccgcggttcatgccacaagggcgggcataccgtgggagattgccatcgtcctcgcgggaataacagcagcggttatcggaagtgtgttcgcttttgccgcactgcgcgtgaaaggcctgtatctggcgctcagcacgctcgccttgcagttcgtgatggactggacgatttcgcacgtacccgcgatcagcggcggcacacaggccacgttgcaggcacctgacatccgcctgctgggctgggctgtcacctccgatgcaggactctattacgtcgccctcgtctggtgcgtgctggttacgtccttcatgctcaatctgcggcgcaccgcgctcggccgcgctctggtcgctgttcgggagaaagattacgcagccgcggtcatcggcgtgaacagcttctacttcaaactggtggcgttcgcgacatcctcgttcatcggtggcgtgagcggagccatcctgatcggtacattttaccatgccgtaacccccgagcagttttccgtcgacgtctcaattcaggcgttggcgatggtcatcgtgggcgggctgggcagcatcatcggcagttatttcggcgccgcgttcattctgctgatgccgggcgttatgaacagtttcatctcctgggcggcaaccaagttcgggttctcgctgggtatcgaaactctggctcatctaccccaagctttctatggcgcgcttattatcgggtttctcctgattgaaccgctggggcttgggaagatctacaacaacattcgggactatcttctggtatggcctttcggctacacgaagaaatag

SEQ ID NO: 864 - DNA, 888 bp, BradyrhizobiumColbertium
atggacgcgatatcgttgatggaatctgctgccaacggcgcgcttattggcttgatgtattcacttgtcgcgatgggaatcgtcctgatctacaaatcgtcatcggtgcctaatcttgcacagggctcgatgacgatgctggccgcttatgtcctgctcgcgttcgccaacagcgcgggcgcaccgatctgggccgcgatttcgctggcgatcataacaatgttcatcatcggaatggccatcgaacgggtggcgctgcggcgcctcgccggccgccccatcatcatgatcctgatgatgacgcttggcctggagattttcctgcgagccggctcgatgaccatttggggcggtaccacgcgacccatgaatctgggcatcagcgatgccccgctttttctcggtccattattgatcaatcgtgcttacgcttttggagcggtggtcacaattgcgatgttcggttttttcgtgctgttcttccggagccggatgggtgtggttttgcgtgcgatttccgatgattatacggcggcctggtcggtcggcatttcggtcgagcgcggcgtcgcgctgtcttgggccatgtcggcggtggtcgcgacgattgccggtgtgctctggagttcggtacagggcgtcgatcaatcgctcgcgcaactgctgctcaagggcgtgaccgtagccgttttgggcggactggacagtataggaggcgcgttgctcgccggcgtcctgctcggcgtcgtcgagggaattgcatccagcgttctcgatcccctgttgggtggcgcgagtcgcgatcttgtcgatgcggcaatgctgatcctgaccatcttgatccgaccgcacggacttttcggtcgccacgacatcgagagggtctag

SEQ ID NO: 865 - DNA, 1905 bp, BradyrhizobiumColbertium
ttggcctggaatttcgaaaccgataccacgctgatccgcgttctggcgcagaatgccgaagtctttcccgatcgtgtcgcgatgcgcgagaaagacaagggcatctggaatcagacgacgtggcagcagctgctcgagatcgtgctttgctgcgccgctggtctcgaagaactggatttcaaggcgggcgacgtcatgctggtgctgggcgacaaccgccctcggctctacgcggggatgctggccgctggcgccctcggtgggtacgcgatgccggccttccccgatgcaaccctcgatgaaattcgccacttcgttcatgaggcgggcgcgcgtttcgcgctggccgaagaccaggaacaagtggacaaaatactcgatctgcgcgagcaaggcgcgacgatcgagcatattatctacgacgatccgcgtggactggccgcttacgccaatccaggcctgatctcatgggacacgcttcaggcaaagggcgcggagctagtcatccgcaaccccaatctccgaaacgagctgatcgcccgcgcgcagcccgagggcccggccgtgttcgtgcattcctccgggagcaccggcaagcccaagggggtggtgctgtcgcatcgtaacctgttggccggcgttcgaaatgcctatcgaggcggagcgttccagttcggcgagagcattctggcctatctgccgatggcctgggttggcgacttcgcggtgacgatgggcgccggaatcgccctgcacttcacgatcaatattccagagcggcaggagaccgtgctgcaaaacctgcgcgagattgcgccgactttctatctggccgcaccgcgcagctgggacaatctattgaccaccatccaggtgcgcatggaagattcctcgtggctgaagaggctggtctacaagttttttatggcgttggccatttcagccgaaaaacgcaagctcgaaggcggtcagccgacactcaagcagtggttgttgagcccaataggcgagtggctggtctatggaccgatcaaggaccaattcggcctgacccggctgcgtggcgccttcaccggcggtgaagcgatgggcgaggatacgttcgtcttttaccgcgcgctcggcatcaaattgcgccaactctatggccagactgaaaccagtgcctacaatgccatccaggatctcaacgaggtaaggctccacaccgtcggacgtcccctgccgggcgtcgatatccggataagcgacgccggcgaaatcctggtccgctcgggcagcgtgttcagcggatacttcaagcaggacgaggccacgcgcgaaagcctcgaagacggctggttacacaccggagatgcaggttacctcgaacctgacgggcacctcgtggtgctggggcgcctgtcggacatcgtgcacaccgcgaagggcgagcgctatattcccaactatattgagaaccggctcaagttcagtccgtacattaaggatgctgcggtactcggaagcggccgcgatacgctgtcagccattatttgcatcgacaaggaagctgtcggcctttgggccgaactgcgcggcatttcctacatctcctatgccgacctgtcgcagaagccgcaggtcatcgccctgatcgccgccgcggtgaagcacgttaacagtgcactgccgcacggcttgcagttgcggaaattcgtctgcctgcacaaggaattcgatgccgacgacggcgaaatcaccagaacccgaaagattcgacgtaacgtcgtggaggagcgctacaaaccgatcatcgacgccatctacgggcatcaaaacacagtgctgatgaaggcaaaggtcagctacgagtcaggcgaagtcggcgtcatcgaacgcacactgtcggtacaggaggcctga

SEQ ID NO: 866 - DNA, 705 bp, BradyrhizobiumColbertium
atgcggatcgagcgcggcgagatattcggccttgtcggccccaacggatgcggcaagaccaccctcaccaacgcaatcaccggattttatccgccacagcgtggacatattctgctgaacggccgggacatcacgggcctggcgccacactatgtcgcgacgttgggagttgcccgcaccttccagaacctggcgctcttcaatggtatgagcgtactcgataacatccttctgggccgtcacattcacatgaaacccagtgtaggacgtacggcgctctattggtggcttgcccgcagcgacgagacgttgaaccgcgccgcggtcgaagacgtgatcgattttctgcagcttgaaggcgtacgcgacgaactggtcgacgggattccgatcggcctgaagaagcgggtcgaattggcgcgcgctttggccgccgagcccagcttccttatcctcgacgagccgatggcggggatgaaccaggaagaaaaggaatacatggcgcgcttcatcctggatgcacgcgatgaacgcaatgtcaccgtgctgctgatcgagcaccacatggacgtcatcacgggcatttgcgatcgcatgctggcgttgaactatggcgaaatgatcggcagcggcgtgccggccgacgtcgtcgccgacccaagggtgatcgaggcatacatcgggggtgcgcatgtcgcgcgctga

SEQ ID NO: 867 - DNA, 423 bp, BradyrhizobiumColbertium
gtgaatgagactggcccccccaacgaagagactattgctgaatttcaaaaggcgttgatgatttcgccgttccaccggtggctgggattgaaagccatcatggtcgctcgtgaacaaatcgaaatttctctaccttggcgcgaggaatttgttgccaatactgcaatcgaagcaactcacggtggaatcctggcagccctgatcgatttaacgggcctttacgccgttcgcgcagccgggggtattgtaagtgctacggcagatcttcgggtcgattatcatcggccggccacccgcgggacagttctcgctcgcggcatggtggtcaaactggggcgccggataagcactgccgacgtacgcgtgaccgataccagccgagttctcttagccagtgggcggggcgcatatctcgcacaatga

SEQ ID NO: 868 - DNA, 123 bp, BradyrhizobiumColbertium
gtggtcgaagccatgaagatgcagaacgtgctccgcgctgagcaggacggcactgtgaagaagatccacgccgctgtgggcgccacgctggcggtcgatgcgtttatcctggagttcgcgtag

SEQ ID NO: 869 - DNA, 624 bp, BradyrhizobiumColbertium
gtgaagagcaacaaggccgaaggaatgatgattgacgttattgaggccgtcagcaaggagcttggcttcaagatcgagatccagccgatgcaattctcggcactgatccccgctcttacgtcggacaagatcgacatcatcgcggccgctataacggctacgccagaacgggcgaagatcgtggacttcagcgaggaagcttactcttacggcgatggacttgtcgttccggcctccgacaagcgagattatgctggcgtggcagatctcaagggtaagaaggtgggagctcagataggaacgcggtacatcgaatacttgaaggcgcagagtggcgccgaggacgtgaaggcctacgatgccttgccggacgtacttcgagaagttgcaaatggtcggctcgatgcaggtgtgggcgattttccaatcttcgcctacaacttgtcgcaggatcgcttccctcaggtgcgcctggtccgaacgtacaaatccgggctgacgggaggtatcaatctcgcggtcaaaaagggtaacgttgaacttctgaacaagatcaacgcaagcctctcggccatgaagcaggatgggcgtcttaaggctatcctgaacaagtggcagctctaa

SEQ ID NO: 870 - DNA, 606 bp, BradyrhizobiumColbertium
ttgatgcagggcgtatcctacacgatactggtgacgctctgcgccttcgtcattgcaacaggactcggtctggttcttgcgttcatgcgagtcagcggcgttccgccgctagcctggacggcacgtacagtgatcgtcatcgtgcgtggcattcccggcctcgtgacattgtactacatctacttcgtggctccagagtttgggctgtcgctgacgtccgtccaggcgtccataatcggacttggaatcgcctatgccccctatatggccgaggtgttccgctcaggcatcgaagcaatcgatcgtggtcaaacggaagcggcgctctcaatcgggatgggctgggggacgctaatgcgccgggtcttgctgccgcaggcagtgcgggtggctctaccaccttatggcagcacgatggtgatgcttcttaaggactcgtcgctcgcttcgacgatcacggtcgccgagctctcacttcagggcaagctacttgccgcctcgacttttgaaaacacgaccatcttcactctcgtggctttaatctatcttgcgatgagccttccgcttacggccttcaatgcgtggctcgaacgaaaattgaggtaa

SEQ ID NO: 871 - DNA, 393 bp, BradyrhizobiumColbertium
ttggccgcaaagatcgatgcctatccgggacagctttcgggtgggcagcagcagagggttgcgatcgctcgggcgctaggaatgaagccaaacgccatcctgttcgatgagccgacctcggctctcgatccagagcttgtgggcgaggtgctttcggtgatgcgctcgctcgccgacgaaggaatgaccatggtcgtggtcacacacgagatgggcttcgcgcgccaagtggcagatcgcgttctattccttgacggcggcgttcttgtcgaacagggaaagccggatgaagtgctcgttcgtccgaaaaacttgcgaacgcaggacttcctgagacgcgtgctaacgccgagtgatcctcttagcccgatagagtgtagccttcgtctctag

SEQ ID NO: 872 - DNA, 1410 bp, BradyrhizobiumColbertium
ttgttgatccgacgcgttcgaattcaacactatttcaccaagaccagatgcttcaagccaatggagtcagagacgatgccagttcaattggatcaagttgagaacagcggtgattttccgcgtaaagtagacgtggtggtcatcggcgggggcatcattggaacgtgtgccgcttacgaactcgctcgaaagggagtttccgtcgcacttgtcgaaaagggggtcgtcggcggagagcaatcgagccgcaattggggctatgtgaggcaacagaaccgagacctgttcgaattgcctctcgctatgttttcaaacaggcgatgggaagaactaggttccgaaatcggagcggacctcgggttcagacgcacgggcatgatttattccacgcttgacgtgcaggacgttgcccgttggcaaaagtgggggcaattggcgagcgaacagggctttcgtagcgaaattctcaacgctgatcaaaccaaggcgcgcctgcctggcagctcgtcgaagtgggtcggtggcgtgtactcgcccacagaagggcgagccgagccgagcttggccgcgccggcaattgctgaaggagcaaaaaggaatggtctttctttgcatcaaaactgtgcggcgcgaggcctcgatatttccgggggacaagtcagcggtgtttggacggaacgcgggctgatcaaagcaacgacagttgttgcagcgggcggcgcctggaattcccgcttctgtcgacaccacggaatagaactgcctatcctaaatattcacggcacggcgatgcgaaccgagcccgtcccggatgtcctgaccgtcggaaattttaacgcaggacatttggcgctgcggcgcagaatggacggaggctacacacttaccgttccgggtcatggcactctaaacctcgcgccgaacggaatgcgctacatcacgaaattctatcagatgtatcgggcgaaggtggcaaagaaattgaaataccgtatcaatagcagcttttggaacggacctgaggcgttcggaagttggcagaacgatcaggtttctcccttcgaaaagatacgtgttctggatccgccggccgacgatggcttggtgaagatcgcactggaaaatcttgcacgcgaatttcccgttttgaaaaacgcaaagcttgcggcgacgtggggagggatgattgatactgcgccggacctcatacctgtcatttcgcgtgtggaccaattgccgggcctaattatcgcttcaggctttagcggacatggtttcggggtagccccgggcgcgggtcggctagtcagtgacctatgctgcaatgatactccgattgttgacctggctccttacagactttgccggtttagcgacggctctgagatacggcggcccgaaatgatgtga

SEQ ID NO: 873 - DNA, 132 bp, BradyrhizobiumColbertium
atgccctttgccgccgagcaggatcgtccgacatcaatgtggcagtcgttcttggggcgcaaatcaacaaatgaagggcgaacagggctgctgctcgcgcatgtcattcgctctgaccagatcggatcgtga

SEQ ID NO: 874 - DNA, 150 bp, BradyrhizobiumColbertium
gtggctccgaccgcggcggcgtggatccacaagcttggctcgccgacgtcctggcacgcatcgctgcacatcccgtacaacggctcgacgaacttttgccctggaattggcgcgaccgaaataagcaagtcaaccaagcagcctgagtga

SEQ ID NO: 875 - DNA, 795 bp, BradyrhizobiumColbertium
atggtgctgttcgagaagttcggccagcaccagccgctgaaccgtcaggccgaacgctatggcaaggaaggcgtgccgatcagcctgtcgaccctcgccgaccaggttggtggctgcactgttgcgctgacgcccttgttccggcgcctcgaggcccatgtgctgagtgccgagcgattgcacggggatgacacgacggtgccggtcctggccaaaggcaagaccgacaccggccgcatctgggtctatgtacgcgacgacaagccttttggcgggcaggccccgctgggagcagtgttttattactcgcgcgatcgcgccggcgagcatccccaggcccatctggccggctacaacggcatcttccaggccgatgcctatggcggctatggcaagctttacgaggtgggccgcaacgcaggtccgatcctggaagcggcgtgttgggtccatgcccgacgaccgttcttcgtgatggctgatctggcggagaatgcgcgccgcaaggtacaaggcaaaaagccagcggtgatctcgcctctggcactggaagcagtccgtcggatcgacgccttgttcgagatcgagcgaggcatcaacggcgagacgcccgaacggcgccgggccgtccgccaggagctgagcgcgccgctgattgccgatctgaaagtctggatgcgtgaacaacgcgccaagctatcccggcgcaacgacgttgccaaggcgatggactgcatgctcaagcgctgggatgcgtttacccgcttcctcgacgatggccgcatctgcctgtag

SEQ ID NO: 876 - DNA, 258 bp, BradyrhizobiumColbertium
ttgaggccggacagtctctatctcagcaccggcggcggctgggcgccggcaactgtcgtggcgatccagcaactggccgcgccgcgggataagcagcttgttgccgcgactgacaataacaagcagggcgacgtttacgctggccgtcttgaagcgatcgcgttggaggtgggatgcgcgttcgagcggcttcggccgctggccgacgattggaacgagggcctgcgcgcagttcatgctgagtgcggatcgtcttga

SEQ ID NO: 877 - DNA, 447 bp, BradyrhizobiumColbertium
ttgcgaccggttgccgcgcttggcgcggacgtcacgattgcgctcggagaggacgagagcaaattggaggagctcttcaaagagcagtttggcagcgacgtctccgtcgtcatcgattatctctggggcaagagcgccgagcgtcgtctgatcgcaagtgtcaaagccggagcggaagccgccccgattcggttcgtccaggtcggctccgtcagcggggcggatatcacgcggccaagcatcgcgctgcgttcgtcggcgatcgcgctgatgggaagcggtatcggcagcatcacccgggagagcctcgtggccgcgatcgcatcactgctcaaggcggttggtcccgccggcatcgcgacgaagacggtcccgctcgccgcagtcgaacaagcgtgggacggcactgatagatcggagcgcacgatgttcacaatgggtagttga

SEQ ID NO: 878 - DNA, 564 bp, BradyrhizobiumColbertium
gtgcccgaggcacggctcttggtgacctggatcagcgcggccgcagagaccgtgatgcacttctcgttggaggatgcagtgccgccaagaaagagcgttcaaaatacccatatagttgatcagctccgccagctccatggtgcggttctcgacatcgtagccgtcatgaaccgaccgcagcgcgacgacctgctgatcaaagcggccggaataccgctcgatcgcgcaccgtttccgctgcttgtcggcgtcgagcgcttcggcccgattggcgtggtcgagatcgcggaccatgtcggtcgcgactacacgaccgtcagccggcaggttgcaaagcttgaaagcctcggcttggtcgaacgccggggcagcgccgtcgacggccgcgcccgtgaggctgtcatcaccgccaggggtgaggcgatgaccgaccgggccgacgccgcccgcgagaagatcgaacgcgccatcttcgagacctggaatccgcgtgacgttgacgaactcgtccgtctgatgcggaaatttgcggatgcgatcgtcagcgagccgcccacgaattga

SEQ ID NO: 879 - DNA, 540 bp, BradyrhizobiumColbertium
atgttcaaccgccatcgcggagatcctgcccattccgcaggcgatgcctcgcatctgtttgccggcgagtggttcgaaatcgctgagagcgagtatgactatatgctggaaatcctgccgccgctgtggatgcgcggcgagacgttcgcgatgcgcgaattcatgacggacaacgtcacaagcgtcttctccgcgctgatcatcgatggccgcaaacgcttcttccacgcctattgcgacctctcggacaagggctcacccgatcgcatgcgggctgcaattatcgaccgagagtcgcggccggtaaaggcgatgacgcgtgaggagcgcctcgagcacatctggtcgagcacccatgacgactatcgcggctacgccggcgagcgctgggcggggcatttgcgcgacgtgcgaacggtgctgtcctatgacggttcgcgcggaacggtgctgaagctgctcgaccgactgaccggcgcggaaatcgcggcgaagctgcccgtgcatctgcgccatctgcctgacgctatcgcggcataa

SEQ ID NO: 880 - DNA, 363 bp, BradyrhizobiumColbertium
ttgaacctgatcgccaatgtcctggtggcgctggtcgcggcactgcacgtcttcttcctgatcctggagatgtttctctgggacaggccgcagggcctcaaggtgtttcgcaacacgccggagaaggccgagatcacgaaggtgctggccgccaatcagggcctctataacggcttcctcgccgccggcctgatctgggggcttgcgcagggcaacccgaccttcgcattccagatcaaggtcttcttcctgctttgcgtgatcgtggccggtgcttatggcgccgcgaccgtcagcacgcggattctgatcgtgcaggcgctgcccgcggccgtcgccctggtcgcattgtttctcgcctga

SEQ ID NO: 881 - DNA, 531 bp, BradyrhizobiumColbertium
atgcccgctcgttcaaccaactcgcccgaccgcttcggcctcgatcgcgtgacgacgccgatcggtaccgcgctgctcgtcaccgatgccgaaggcgtgttgcgcgcgctcgactgggaagactacgagcagcgcatgcgtgaactgttgcgcctccactacggcacggtggatctgcgcgagcagcctgcgccgacggcgatgcggattgcgctggagcgctatttcgacggcgatctcggtcagatcgcaggcattgcgtggcgcatcgccggcacgccgttccagcagaaggtctggactgcgctcgcgcagattcctgccggcaccaccatgagctatggcgcgctcgcggcaaagatcgccatgcccagggcgatccgcgccgttggtcatgccaacggctcaaatccgatcagcgtggtgctgccctgccatcgcttgatcggtgcgaacggttcgttggtgaagtacggcggcggactggagcgcaagcgctggctgttgcggcatgagggcgtggaggtttag

SEQ ID NO: 882 - DNA, 2790 bp, BradyrhizobiumColbertium
atggacagcatcgcgactgagcagaaggccggggcggacgatcgcttcgataccgcgcggatcaccgccgcggtcgatgcgcttgccgaaaagcatcagggacgcgaggacgcgttccgcacggcgatggcgcaactgctcaaggcggagctgatcgccgcgcgcgccgccgcacaggcgatcctcctgaaggaccgccacggccgccgctgcgccgagcggctgtgccacgtgcaggacgagatcatccgtatcctgtactctgccgcgacgcgccatctgtaccgctcgccgatcccgagcggcgccgagcgcatggcggtggtggcgaccggcggctacggccgcggcctgatggcgccggaatcggacatcgatctgctcttcatcctgccctacaagcagaccgcctggggcgagcaggtcgccgaagcgattctctattgtctctgggacatggggctgaaggtcggacacgccacgcgctcggtcgatgaatcgatccggcaggcgcgcggcgacatgacgatccgcaccgcgatcctggagacgcgcttcctcaccggcgacaagccgctctatgacgagctggtcgagcgtttcgacaaggaggtcgtgcagggcaccgcgtctgaattcgtcaccgcaaagctcgccgagcgcgaagagcggcaccgccgcggcggccagtcacgctatctggtcgagcccaatgtcaaggacggcaaggggggtttgcgcgacctgcacacgctgttctggatcgccaagtacgtctaccgcgtccgcgatacgaacgagctggtcgtgcgcggcgtgttcgatgcgcaggaatatcgctccttccgtcgctgcgcggatttcctctggtcggtgcgctgcaatctgcatttccattgcaaccgcgccgaagagcgcctctccttcgacctccagcgcgagatcgcggtgcgcctcggctacacctcgcatcccgggatgcaggacgtcgagcgcttcatgaagcactacttcctggtggccaaggaggtcggcaacctcaccgccatcctctgcgccaagctcgaggaccagcaggccaagcctgcgccggtgctgagccggatgatggcgcggctgcgccccagcaccgtgaagcggcgcgtccccgacagcgacgacttcatcgtcgacaacaaccgcatcaacgtcgccgcgcccgacatcttcaagcacgatccggtcaatctgatccgcatcttccgcttggcgcaaaagaacaacctcgccttccacccggatgccatgcgcgacgtgacgcgctcgctcggcctgatcaacgcccagcttcgcgagaatcccgaggccaaccggctgttcatggagatcctgacctcggacaacgcggagatcgtgctgcggcggatgaacgagaccggcgtgctcggccacttcatccgcgccttcggcaagatcgtctcgatgatgcaattcaacatgtatcatcactacaccgtcgacgagcacctgatccgctgcatcggcttcctgcaggacatcgagcgcggcggcatcgaggagttcgcgctcgccagcgacctcttccgcaagatccggcccgagcaccgcgccgtgatctacatcgcgaccttgctgcacgacgtcgccaagggcaggcccgaggatcactcgatcgctggcgccaaggtggcccgccggctgtgcccgcggctcggcttcagtccggccgacaccgagctcgtggcctggctgatcgaggagcatctgacgatgtccacggtcgcgcagtcgcgcgatctttcggaccgcaagaccatcgagaatttcgccgccgtggtgcagtcggtcgagcagatgaagctcctgaccatcctgaccacggccgacatccggggtgtcggcccaggcgtgtggaacggctggaaggcgcagcttctgcgctcgctctattatgaaaccgagccggtgctcacgggcggcttctcggaagtcgatcgcggcaagcgcctcacggccgcctatgccgaattccgcaacgcctttgccgaatggccggcggaagagctcgatgcctatatcggacggcactatccggcctattggctcaaggtcgagctgccgcgcaagatccgccacgcccgcttcgtccgctccagcgagcaggccggccacaagctcgcgatcaatgtcggcttcgacgaggtgcgcggcgtcaccgagctgacgatcttcgccgccgaccatccctggctgctgtcgatcatcgccggcgcctgtgcctcggccggcgccaacatcgtggacgcccagatctacaccacgaccgacggccgcgcgctcgacacgatctcgatctcccgggaatacgatcgcgacgaggacgagggaaggcgcgccacgcgcatcggcgagatgatcgaggacgtgctggagggcaagttgcgcctgcccgaagccgtcgcgcggcgcaccgtgcgcagcaaggcgaggccgttcgtgatcgagccggaagtgaccatcaacaaccaatggtccgaccgctacaccgtggtcgaggtctccggcctcgaccggcccggcctgctctacgagctgaccacggcgatctccaagctaaacctcaatattgcgtcggcccatgtcgcgaccttcggcgagcgcgcgcgcgacgtgttctacgtcaccgacctcctgggcgcgcagatcaacgcgccgacgcggcaggccgcgatcaagagcgcgctgactcatgtgatggctagcgacaaggcggttcagccggcggcgtga

SEQ ID NO: 883 - DNA, 972 bp, BradyrhizobiumColbertium
gtgaccaggattacacgacgcattctgttggcaggcgcggtggcgctcgccgtgacccccgcggcacgggcggcggatccgctcaaggagatccgcatcgattgggcgacctacaatccggtatcgatggtcctgaagcaaaagggtcttctggagaaagagttcgccaaggacggcatcaaggtcacctgggttcagtcggccggatccaacaaggcgctcgaattcctcaacgccggctcgatcgatttcggctcgaccgcgggctcggcggcgcttgtcgcccgcatcaacggcaatccgatcaagtcgatctatgtctattcacgccccgaatggaccgcgctggtgacaggcaaggactccaggatcgctgctgttgccgatctcaagggcaagcgcgtcgcggtgacgcgcggcaccgatccgcacatctttctggtgcgtgcgctgctcggcgccggcctgacggagaaagacatcacgcccgtgctccttcagcatgccgatggcaagaccgcgctgatccgcggcgacgtcgacgcctgggccggtctcgatcccgtgatggcgcaagcggaggtcgaggagggcgcaaggctgttccaccgcaaggccgacgccaacacctggggcatcctcaatgtgcgcgagcagttcttgaaggattatcccgaggccgtccgccgcgtcctctcgatttacgaggaagcgcggaagtactcgctggcgaactacgacgagctgaagaggaccttcatcgccgtcacgaaactccccgaggcggtcgtcgacaagcagttgaaggaccgcaccgagctcacccacagccgcattggcgccccccagcgcgagtcgatcctcgccgccggtctcgcactccagcaagccggcgtcgtcgatcccaaggtcgacgtcaaggcgacgctggacgccctgatcgacgaccaggtcccgctgccgacgaattga

SEQ ID NO: 884 - DNA, 240 bp, BradyrhizobiumColbertium
ttgaggtcggcagagaagaggcggacaagcgcagcagtctccgctgtcgtcccgggcaagcgtgagcgcagacccgggacccgtaatcaaggggactcgtttggcgcggaagacgtcactccgggtccccgtaaccacatcgtcctggggttatgggcctcgatctgcgcttcgcttgtccggggcgacggcggagaatgtcgcgcgcccttgcattccttcaccagacacgcttgctaa

SEQ ID NO: 885 - DNA, 852 bp, BradyrhizobiumColbertium
atggccatgatctccgacgcgccagttcttcgacaatcctctgatacagccgagcgtgccgccgcaacatcggcgctgtcgcgctttgggcggcccatgctgggtgtgctgctgccggcctcgctggcgcttggctgggagctcgtggtctggtttggctggtccaacggccggctggtgccgccgccctcgcgcgtcctggtcgaaatcgccgagctcgcccactccggggagctggtccgccacatcacggcgacgctctggcgcgtcggcctcggcttcctgttcggcgtggttgcgggcacgctgctcggcgccatctccggctattggtcgctggcgcgccggctgctcgatccgaccgtgcaggcactgcgtgcgattccctcgctcgcctgggtgccgctgttcattctctggctcggtatcttggagacctcgaagaacgcactgatcgcggtcggtgtgttctttccggtctacctgggcgtgatgggcgcgatcctgtcggtcgatcgcaagatcgtcgaggtcggtcgcacctttcgcctgtccgggttcgccatgatccgccgcatcctgttgcctgcggtgctgcccgcctatgtcgtgtccttgcgcgtcggacttgggctcggctggatgttcgtggtcgcggccgagctgatcggcgccgccgaaggcctcggctatctcctgctcgatggccagcagctcggcaaaccatcgcagatcctcgccgccatcgtgatcttcgccgtcctcggcaagctcacggactggctgatcgagatcgggtccgcgcccttcctgcgctggcaggacgccttctcgcgcgcggcgggagcttga

SEQ ID NO: 886 - DNA, 786 bp, BradyrhizobiumColbertium
atgctggcgctcgaccgggtcagcaagacctatcccaacggcgtcgaggcgctggcgcgcttctcggccgaaatcaggcaaggcgagattatcgccatcatcggcggctccggctgcggcaaatccacattgttgcgcgccatcgccggcctcgaccgtgccagctcaggctcggtgacgctcgacgatgaggtcatcacctcgccgcacgccaagataggcatcatcttccaggagcctcggctgctgccgtggctcagcgtcgccgacaacatcggctttgggctcgccgatttgcccgcgatccagcgtcgcgagaaggtggcgcgcgcgctcgagcgcgtcgggctcgccgacaaggcgcaggcctggccgcgcgagctctccggcgggcaggcgcagcgggttgcgattgcgcgggcgctggtgccgcagccggaggtgctgctgctcgacgagccgttctccgcgctcgacgctttcacccgcagggatctccaggatcatctgctcgacctctgggccgacacgcggccgaccttgatcctcgtcactcacgacgtcgacgaggccgtggtgctggccgaccgcgtgctggtaatgcgaccgcgaccgggcaggctgttcgaccagatcgggatcaatctcggccggccccgcgaccgcaactcgcccctgttcgagaatttcaagcgcagcgtgctgacctcactcgaccgatcgctcgaccgcagcgtgcccgaccgcgacgcaacagagggtcccgggcgggccatgtggtggtga

SEQ ID NO: 887 - DNA, 510 bp, BradyrhizobiumColbertium
atggacgctgtgcaactgcgccagatgcaagccccaatcaaggagcgctacaagaccgatcccaaggctgcgttgatcacgctgaaggccaagggctccaccgccagcgaaggcatcgcctgcaagatcgagacagggcgcgccatcgcgatggccggcctgcatccgggcaccggcggctccggcctcgagctctgctccggcgacatgctgcttgaagccctggttgcctgtgctggcgtcacgttgaaatcggttgcgacggcgatcgaggtgccgctcaagactggcaacgtctatgccgagggcgatctcgacttccgcggcacgctcggcatcgacaaggaagcgccggtcggctttgccgagatccgtttgcgcttcgaggtcgacaccgacgcgccgcaggacaagctcgatctcctgctcaagctcaccgagcgctattgcgtggtctatcagaccatcaagaacggcccgaaggtgtcagtgtcgatgcagcggatgtaa

SEQ ID NO: 888 - DNA, 780 bp, BradyrhizobiumColbertium
atgtccctcgacctccacttccttctctttcttctcctgcgcatggcggttgcggcggctttcgtggtgacggcgtcggtcgtcgccgagcgcttcggtcctgtgatcggcgcgctggtcgcgaccctgccggtttcggccggtccctcctacgttttcctcgcgctcgatcacgacgcggccttcatcgcgcagagtgcgctggcgagcctgccggtcaatgccgcgacgatcgttctcgcactcacctatgtcgtgctggcgcagcgacatggccttctcgtcagttgtggatgcgcagtcgcggtctggatcgtgcttgcatcgatcatccgccaattcgactggtccctcgccgcggggcttgcggccaatctgatcgcgttcggcgtctgcataccgctgctcgcgggctatcgtcatgtgaagatgccgctggtgacgcgccgttggtacgatgtgccgatgcgcgctgcgctggtcgcaactctcgttgccatcgtggtctcgacatcgagctgggttggtccccgcatcagcggcatcatcgcactgtatccagtggtgttctccagtatcatggtgatcctgcatccgcgcatcggcggacggccgaccgccgccgtgcttgccaactccgcctggggcctgctcggattcggcatggccatcgctgtgctgcacgttgcagtcgtatggttcggctccgccgtcgggttgtgcctcgcgctcgcgacctgcgtcatctggaatttgacgctgtgggcgaggagtcgctga

SEQ ID NO: 889 - DNA, 1083 bp, BradyrhizobiumColbertium
atgttcaagcgcaagtcgaattccgacgcattgacgttgatggcgaccaaggtggtgagtgccaatgtgatggtcgcggataacgacctcaacatcgtctacatgaacaatgccgtcacggatttgctccgcgaggcggagacagatctcaagaaggagctgccgcatttcaatgtgaacacgctcgtcggcaccaacatcgacgtgttccacaagaacccccaacatcagcgccggatgctcgcgagcctcagcacggcgcatcgtgcgatgatccagatcggtgaacggaagttcgatctcgtcgcaacgcccgtgaagaacgacgacggcagccgcgccggaatcgtggtggaatggtccgatgcctcgatccgcctccggaacctcgactttggcgcgcaggtggcagctgcgagccgttcgcaggcggtcatcgagttcaacatggacggcacgatcatcaccgccaacgccaatttcctcggcgcgctcggctattcgctggccgagatcaagggcaagcatcacagcatgttcgtcgaggcctcagagcgcgacggttcccgctatcgcgagttctgggccgcactcaatcgcggcgagtaccaggcggccgaatacaagcgcatcggcaagggcggcaaggaggtctacatccaggcctcctacaatccgatcctcgatctcaacggcaagccgttcaaggtggtgaaatacgccaccgacgtgaccaaacaggtccttgtccgcatgggcaacgaacgcgtccgcggcatgatggaatcggttgctgccggctccgaggagctcaatgcgtcggtacgggagatttccgaggcgatgaccaaatcgcgcgaaaccgcgatgagcgcggtcgagcaggtgtcttcggccgatgcgcaggcccagcgtctcaccgaagccgcgcaggcgatgagcggcatcgtcgagatgatcaacaacatcacggggcagatcaacctgctcgcgctcaacgccacgatcgagtccgcgcgcgccggcgaagcaggccgcggctttgccgtggtcgcatccgaggtgaagagcctcgccaactag

SEQ ID NO: 890 - DNA, 240 bp, BradyrhizobiumColbertium
atgcaaggtcaagcccgcgccgccatcgccgcggcttccgcggcggcgcgctgcatgctggtcgacatctcgttcgtcacagtgctctgttcctcgatcgccgcggccgtcgacgtcacgtactcgctgacattgttgatcgcctgcttgatcgaaccaagcgcgctgacgacatcgccggaaatgctgttgaggctgccgatctcctcgccgatcttgtcggtggcctgcttggcctag

SEQ ID NO: 891 - DNA, 2739 bp, BradyrhizobiumColbertium
atgacgatacagcagcccatctccgcccaagaggccgaatccgcgcccgcgccgcaggccgaagcagccgcgcgcgtcacgccgatgatggaacagtacctggagatcaaggcggcgcatcagggcctcctcttgttttaccggatgggcgacttctacgagctgttcttcgaggacgccgagatcgcctcgaagacgctcggcatcgtattgaccaagcgcggcaagcatcagggcgccgacattccgatgtgcggcgtgccggtcgagcgctccgaggattatctgcaccgcctgatctcggccggtcaccgcgtcgccgtctgcgagcagaccgaggatccggccgcggcgaaagcgcgcggcaacaagagcgtcgtgcgccgcggcgtggtgcggctggtcacgccgggcacgctgaccgaggacacgctgctcgacgcgcgcgccaacaattatctgctggcgatcgcgcgcgcccgttcctcggccggcggcgaccgctttggcctcgcctggatcgacatatcgaccgccgaattcatggtcaccgaatgctccagcggcgagcttgcggcgacgctggcgcgcatcaacccgaacgaggcgatcgtcaccgacgcgctctacaacgacaacgagatcggccagacgttgcgcgagctgccggcggtgacgccgttgacccgcgacgtcttcgacggtgcgacggctgagaagcggctgtgcgactacttcgccgtcgcaaccatggacgggctctcccagctcacgcgcctggaagccaccgccgcggccgccgccgtcacctacgtcgatcgtacccaggtcggcaagcatccgccgctgtcgccgcccgcgcgcgaagcctcgggcgcgaccatggcgatcgacccggccacccgcgccaatctcgagctgacgcggaccctcgccggcgagcgccgtggttcgctgctcgacgcgatcgactgcacggtgacctcggccggctcgcgcctgctggcccagcgcctggcggccccgctgacggatgcgccggcgatcgcgcggaggctcgacgcggtcagggccttcgtggccgattccgccgcgcgcgaggacattcgcagcatcctgcgcggcgcacccgacatttcgcgcgcgctggcccggctctcggtcggccgcggcggaccacgcgacctcgccggcattcgcgacggcatcatcgctgcggaccaggtcctggcccggctctccgaactggatcgaccgccgcaggagatcgcagcggtgatggcggcgctgcagaggccgtcgcgcgctctcgcatccgaattcgccggcgcactcgacgagcagctgccgctgatcaagcgcgacggcggcttcgtgcgccagggctacgaaccggcactggatgaggcgcgcaacctgcgcgacgcctcgcgcctggtggtggcctcgatgcaggcgcgctacgccgacgacaccggcgtgaagggcctcaagatccgccacaacaacgtgctcggctatttcgtcgaggtcaccgcccagcatggcgacaagctgatgtcggcgccgctgaacgccaccttcatccaccgccagaccctggcgggacaggtgcgcttcaccacctccgagctcggcgagatcgaggccaagatcgccaatgccggcgaccgcgcgctcgggctcgagctcgagatcttcgagcggctctgcggcagggcgctcgcgatcagcgacgatctgcgcgcggcggcacaagggtttgcgctgctcgacgtcgcgacctcgctggccaagctggcagtcgacgagaactatgtgcggcccgaggtcgatggctcgctcagcttcgccatcgaagccggccgtcatccggtggtggagcaggccctgaagcgcaacggcgagccgttcattgccaatgcctgcgatctgtcgcctgcgccagcgcagaagtccggtcagctctggctgctgaccggtccgaacatggcgggtaagtcgaccttcctgcgccagaatgcgctgattgccttgatggctcagatcggcagcttcgtgccggccacccgcgcgcggatcggcatcgtcgatcgcctgttctcgcgcgtcggcgccgccgacgatctcgcccgcggccgttcgaccttcatggtggagatggtcgagaccgcggccatcctcaaccaggccggcgagcgctcgctcgtgatcctcgacgagatcggccgcggcaccgctaccttcgacggcctttcgatcgcgtgggccgcaatcgagcatctgcacgagagcaatcgctgccgcacattgttcgccacgcattatcacgagctaaccgcgctggcggccaagctgccgcggatgttcaacgccaccgtgcgcgtcaaggaatggcaggggaacgtcgtgttcctgcacgaggtgctgccgggctcggccgaccgctcctacggcatccaggtcgccaagctcgccggcctgccgccggcggtgatcacgcgtgccaaatcggtgctgtccaagctggaggcacaggatcgcggccagaccgcgcgcgcgctggtggacgacctgccgctgttcgcagtcccctcgcgcgccgccgcggaggccgcgccgccgagcgaagccgagcagctcatggaggcggtgaaggcgcttcaccccgacgagatgtcgccgcgcgaggcgctcgatgcgctctatgccctgaaggccaagctgccgaagccgtaa

SEQ ID NO: 892 - DNA, 168 bp, BradyrhizobiumColbertium
ttgggcggagatgggctgctgtatcgtcatgagcggcgcaacctacaaaatttcgccacctgctcctatcgctttggccggcaaggggaggttttccacgttgtccgcatcgcggtatgcgcggcctgtgtgcgcgtcccccggaacatgcgggcatcagtcaattga

SEQ ID NO: 893 - DNA, 1209 bp, BradyrhizobiumColbertium
atgcgtgacgtctttatctgcgatgccgtccggaccccgatcggccgcttcggcggctcgctcgccaaggtgcgggccgacgatctcgccgcagccccgatcaaggcgctgatggccaagcaccccaacctcgactgggcgcaggtggacgaggtgttcttcggctgcgccaaccaggccggcgaggacaaccgcaacgtcgcgcgcatggcgctcctgctcgcaggtctgccggattcagttcccggccagaccctgaaccggctctgcgcctccggcctcgatgccgtcggcgctgcggggcgcgcgatccgctccggcgagatcgagctcgcgatcgcgggcggcgtcgagtcgatgacccgcgctcccttcgtgatgggcaaggcgcaggaagctttctcgcgttcggctgagatcttcgacaccaccatcggctggcgcttcatcaatccgctgctgaaggcgcaatacggcgtcgacgcgatgccggagaccggggagaacgtcgccgaggaattccaggtttcccgcgccgaccaggatgccttcgccatccgctcgcagcagcgcgcgggtgcggcgatcacggccggctatttcgccgaggagatcacgccgatcacgatccccggcggcaaggccggccccatcaccatcgacaaggatgagcatccgcgtcccgagaccacgctggaaggcctcgccaagctgaagccgatcgtgcgcaatcccggcacggtcaccgccggcaacgcctccggcgtcaatgacggcgccgccgcgatgatcctcgcgtccgaagctgcggtgaagaagcacggcctgacgccgcgcgcgcgcattcttggccttgcctcggccggcgtgccgccgcgcatcatgggcatcggccccgtgccggccacccgcaagctgatggagcgcctcggcaagaaaatcagcgatttcgacctgatcgagcttaacgaagccttcgcctcgcagggtatcgcctgcctgcgccagctcggcgtcaaggacgatgccgatttcgtcaatccgcatggcggcgccatcgcgctcggccatccgctcggcatgagcggcgcgcggctcgccctcacggcggttcacggcatggaaaagcgtggcggcaagctggcgctcgccaccatgtgcgtcggcgtgggccagggcgtcgcggtcgcgatcgagaagctgaactga

SEQ ID NO: 894 - DNA, 702 bp, BradyrhizobiumColbertium
atgaccttcatctaccccacagacagcaacaaggcgcatccgctgccgctgtcgcccgagtacaagagctcgatcaagcgcgcgccgaacaagcccctgatcccgatgcgccacacgctgtcagagctgaccggcccggtctacggccacgagaccgtgcgcgacggcgacaacgccctcccccgccagcacgcgggcgagccgctgggtgagcgcatcatcgtccatggccatgtccgcgacgaggatggccgcggcgtgccgcactcgttggtcgagatctggcaggccaattcctgcggccgctatgtccatgtccgtgaccagcatccggcgccgctcgatccgaacttcaccggggcgggccgtaccgtgagcgatgcttccggctactaccgcttcgtcaccatcaagcccggcgcctacccctggggcaatcaccacaacgcctggcggcccgcacacatccatctctcggtgttcggctattccttcgtcacgcggctcgtgacgcagatgtatttcccgaacgatcccttgttccccttcgacccgatcttcaattcggtcccggatgagaaggcgcgggcgcggatggtctcttcgttcgatctcgagaacaccaagcccgaatgggcgctgtgctaccgctttgacatcgtgctgcgcggcaagaacgccacccccatggagaatcactaa

SEQ ID NO: 895 - DNA, 603 bp, BradyrhizobiumColbertium
gtgcaggagtctgtgaagcccgacgggatcaccccatcgcagacggtcggtccgttcttcaagtacggcctgacgcccaacggcgaatacgcgtggaacgacgcgttcaccaattcaacgctgaccccggacgtctcaggcgaccgcatccgcatcgagggccgtgtgttcgacggcgacgccgtcgccgtgccggattgcatgctggagatctggcagccggatgcgcagggtcgcttcgccgatccccaggacaagcgtgcgctgccgaatgcgagcttccgcggctttgcccgctgcggcaccgacaaggatggcaactacgcgttcgagaccatcaagccgggcgctgtgccggattccgacggcaagccgcaggcgccgcatattctgcttgcggtgttcggccgcggcatgctcaggcatctctacacccgcatctatttcagcgacgaggccggcaacgctgccgatcccgtgctggcgctggtgccgactgaccgccgggccacgctcactgcgatgcgcgaggctggcaagccggtctaccggctcgacctgcgactccagggcgacaacgagacggtgttcttcgacgtgtaa

SEQ ID NO: 896 - DNA, 1689 bp, BradyrhizobiumColbertium
atgaagtttcgtctctcgttgtcctctgcgatcattgcattcggcatcgttctggccctcggtttcgcggccgtggtctccaccagcctttacaccttgaaagaactcaaggtcggcggcccgctctattccgacatcaagctcggcaacgacctcatcgccgacatcctgccgccgccggaatacatcatcgaggcttacctcgaggccaccctcgcgatgcgtgagccggatcaactggccgcgcatggcgagcgcctggtccagctccgcaaggattacgacgagcgcaaggcgttctgggtctcctccagtctcacggaggacctcaagaccacgctggtgtcgaagtccgatgagcaggtgcagaaattctggaaagcatccgaccagctgctgccggcgctcaaggccaaggacgcggctgcgtccgagcgcatctatgcccagctcaaggacgcctacactgcgcatcgcgccgtgatcgacagcatcgtcgagagcgccaacaagcggaatgccgccatggagaagctggccgcggaccgcgacagctcgatgctctatatcctccttggcgtctccgtagccgtcctcggcttcattgccgctggcctgctcggcgttgccctcggtgtcgtgcgcccgatcgtgcgaatgaccgacacgatgcagaagcttgcgaccggcgatctcgccgccgacattccattcgcgcgccgccaggacgaggtcggctcgatggcgggcgcgctcctggtgttcaagcaggcggctatcgagaattcccgcctgcgccaggaacagttgcggcaggagcaggaggcggcgcttgccaagcgcgccgccctgcaccagatggccgaaaccgtggagcgcgagaccggccgctcggtcgacactgcgggcgcggcgacgcaaggcgtcgagcgggccgcgtccagcctgtccgagattgcgaaatcgctctcggcgcagtcgcaggcggtcgcggcggcctcgacgcaggccctcggcagctcgcaagccgtctcggcggcggccgaggaattgagcgcctcgatccgcgagatcgcaagccaggtcgcacggaccagcaccgtcaccaaatcggcggtcgccgggcgcgagcaggcgcgctcgaccattcaggcgctggcgggatcggtgaagaggatcgcggaggtttccgacctgatcggcggcatcgcaggccagaccaacctcctcgcgctcaacgccacgatcgaggcggcgcgcgccggcgaagcgggccgcggtttcgcggtggttgccgccgaggtgaaatccctgtccgaccagaccgccaaatccaccgaggagatcgggcggctgattgccgagatccagacctcgacgcaggccgcagtcgacgccgtggaggccatgggaggccacatcgtcgagatcgacggtgtcgcgacctcggtcgccgccgcgatggaggagcaggacgccgcgacgcgggagatcacgcggtcgatttccgaatcggcgtccgctgccaaagaggtctcggccaagatcggcgatgtcagccgcgatgctgcctccgtcaacgagcgcgccgcggaggtcaggcaggcgatcgccgggatggcggccaatctcgaacagctgcggtcggtcgtcgtcagtaccgtgcgcgactcgaccgcggcggcctga

SEQ ID NO: 897 - DNA, 996 bp, BradyrhizobiumColbertium
gtgctggacgcaggcgccgtgcgcgaggtgaaggtgctgcatcaacgcgacaccgtcgtctcacacatcatccgtctcggcctgcgctatgtcggcgaatccgccggcgccccgcattcgctgatcgtgaaaatccccaattccgcgttcgcgcagacgctcgcagatggcggccggcgcgaggtggactactacacccggctcgcaccaagaatgccgcctgggctcgtgccgcgctgcttcgacggacatttcgacgagcagaacctcgcctggcatctcctgctcgaagatctcaccgacagccatgcgaccgcggggcaatggccgctgccgccgtcgcgcgatcaggcggtcgcgatcgtcaccacgctcgcacgctggcatgcggcatggtgggaccatcccgacctcggcgacaccgtcggcacgtttgcgagcgccggggacagcgcggagcgcatggaggccttcgccggccactacgatcgtttcgccgacctgctcggcgatcgcctcagcgaagaacgccgcatcctctaccgacgtctcatcgatcgatcggacgggctgtcccagcgctaccactcacgccgtcatctcagcatcacccatggcgatgcccatgtctggaacttcctgctgccacgcgcaggtgttgccgacaccgtgcggatcttcgacttcgatctctggagcatcaacgttccgacccacgacctcgcttacatgatcgcgatgcattggtatccggagcgccggcaggcgctcgaacgcccgctgctcagtctctaccatgacacgctgatcgagagcggcatcaccggctatacgcgcggcgcgctcgatcgcgattatcgctgggcggtgctttggcagatcacgcggccggtctggcagtggagcatcaacatcccgccggggatctggtggaataatctggagagggtgtttgcggcagtggacgatctaggctgcgaggagatgctgggctga

SEQ ID NO: 898 - DNA, 1557 bp, BradyrhizobiumColbertium
atgtccgacgccaaagccagcctgatggtccccggcctgcgccgcaacatggtgacgatctgcgccatgaccgcgaccatcatgcaggcgctcgacacgaccatcgccaatgtcgccctcccctacatgcagggcacgctgtccgcctcgcaggaccagatcaactgggtgctgacctcctacatcgtcgccgccgcgatcatgacggcgccggtcggctggatcgccaatcgcttcggccgcaagcgcatcttcatcatctgctcggccggcttcaccatggcgtcggtgctgtgcggcctcgcgcaggacatcaaccagatggtgctgttccgcctgctgcagggcgtgttcggcgcggcgctggtgccgctgtcgcaatcggtcatgctcgactattacacgctccaggaacgcgccaaggcgatggcgatctggggcatgggcgtgatgatgggtccgatcatgggaccgtcgctgggagcctggctcaccgagacctattcctggcactgggtgttcttcgtcaacctgccgttcggcatcatcaccgtgctcgggctgatcgtcttcatggacgagaccaggaaggatttcagcctcaaattcgactggttcggcttcgccgcgctggcggtcgcgatcggcgcgctacagctcgcgctcgaccgaggcgagcaattgggctggctggactccaacgagatcgtggcggagttcatcgtctcggccgccgccttctatttcttcctcgcgcactccttcacgacctcgaccccgttcatccgcttcgcgctgttccgggatcgcaatttcgtcaccggctgcgtgttcatgatcgtgatggggctcgtgctgttctcgaccatggcgctggcctcgccctatatgcagaacgtgatcggctatcccatcatcaccgccggccttctgctggcgagccgggggctcggcaccttcttcgccatgatgctggtcggccgcatgatgcgttatttcgaggcgcgcacgctgatcgtcgccgggctgacgctgaccgcgggctcgctgtttcagatgaccggctggaccgacctgacccaggtgccggagatcgtcaccgtcagcgtcatccagggcttcggcttcggcctcgtcttcgtgccgctctcgacggtggcgttcctgaccctgtcgaacgaactccggaccgacggcaccgcgatgttgaccctgatgcgcaacgtcgcaagctcggtcggcatttccatcgtgatcgcgcaactgacgcagggcacgcggtggacctacgcgatcctgtccgagcacatcaaccccttcaaccacgcactccagatgcccggcgtcagcggcctgatcaatctgtccaccgacaccggccgcgccatggccgacaagatggtcaacgtgcaggcgcagatcatcgccttctcccacgattaccagctggtgatgatcttcgtcctctgcaccctgccgctcgccttgctgatcggctcgaccaaggccaccctgcgcaagcaggcggcgggaccggagcacgcggtgatcgagtag

SEQ ID NO: 899 - DNA, 1170 bp, BradyrhizobiumColbertium
atggctgatcaagtcctcaagttccagaccgaacagaagaccgacaacgccaaaccagccaagaaggcgggcaccgatccgcgccgccgcctcgtcgcgggcctgcggcgttaccgccgcttcctgctcctggtggtgctaccaatcgtcgtcgccaccggcggcctcgcgttttatctcaatggtggacgctatgtcggcaccgacgatgcctatgtcggcgcgcagaaggtgctggtgacgccggacatctccggcaaggtcctgaaggtcgtcgtgaaggaaggccagtcggtcaagcggggagacgaactgttcgagatcgacccagttccgttccgcctggcggtggaggaggccaaggcacagctggcacaggcgcgcacgacctatgacaacctggtcgccaacatcaagatctacggcgacatgctcaatctggcccagcagggcatcgatctgaagcagcgcgacgtcgagcgcaagcaggcgctggtgaagaacaatttcggctcgcagctcgatctcgacaacgcatcgaatgcactggtcaccgccggggcgcaggcgcaatacatcaggcagcagctctccaacgccaaaacacaactgctcggcaaccctgacctgccgctcgagcaattcccggcctacgctcaggcgaaagccaagctggatgacgcgcagcgcaacctggaccacaccgtcttgcgcgcgccgatggatggcgtggcgacgcaggtcgagcagattcagctcgggcgctatgtgcccgccggcacgccggtgttctccatcatcgacgtcgcccatccctgggtcgacgccaatccgaaggagagcgatctcacttacgtaaccgagggacagccggtgacgctcgtcgtggacgcgttcccgaaccacgtcttcaagggcaagatcggctcgctctcgcccggcaccggcgcgcaattcgcgatcctgccgccgcagaacgccacgggcaatttcgtcaaggtggtgcagcgcgtgccgatccgcatctatttcgacgagaccgacaggcatgtgcggaagctgaaggccggcatgagcgtctacgccaccatcgacaccggccacaagcgctcgctggcgggcctgttcggcctgtcggcgaccgcgggccaggacggcgacaaagactga

SEQ ID NO: 900 - DNA, 498 bp, BradyrhizobiumColbertium
ttggagatgaagctcatgacccgagggtcggtcgaccagaacttcctgttcacgctcggtgagctctaccgtctgctgcgcgtctatgcggacaaggaggcctcgcgcttcggcatcacccgcgcgcaatgggcggtgctcgccaaggtcgagcgcagcgagggcatgaagcaatccgagctcgccgatttgctcgaaatgcagccgatcacgctgacgcggctgatcgacaagctctgcgacaatgactggatcgagcgccgcagcgatgcttcggaccgccgcgtcaagcgcctctatctcaagaaggccggccgccaattgcttggccggatgagcgggctgaagtccgagcttacggccaacgcgctcgacggcattacgccggccgacgcccatcgccttctcactcagctcgaagccatcaaggaaaacgtgcggaccgcaatccagaccagcggtgcggaacaggcgcgcaaggagcagcgctatggctga

SEQ ID NO: 901 - DNA, 495 bp, BradyrhizobiumColbertium
atgaccctcgcaaagccggcatttcccgcgcccgatcacgatcaccgccgctgcaccgcggatgcactggcgcatgccgaggcggtgtgcgagcagcgtgcgcagaaattcacgccaattcgccgtcaggtgctgggggcgctgctctccagccaccggccgctcggcgcctatgaggtgatcgacgaactcgccaagtcgatggcgcggccggcgccgatcacggtctaccgtgccctcgacttcctgatggccaacggccttgtgcaccgcatcgaaagccgcaacgcctacctcgcctgcgctgcccacgaccacgacacgacctcggcggtggcgttcctgatctgcgagcgctgtggcctggtcggcgagatctcgtcggcgcccttcgccaaggacctcaacgccgccgcgcgcagttcaggcttcgctcccaaattgtccgtggtggagatcacgggcgtctgcacgcattgccagaaaactgactag

SEQ ID NO: 902 - DNA, 891 bp, BradyrhizobiumColbertium
atgctcatgctgtgcctgacctgggggttcaaccagatcgcggtgaagctggtgctgcccgacattccgccgatgctccaggccaccatccgctcgatgggcgcgctgccggtgctgttcatcattggcaccctgcgtggcgtcaatttcttcgaacgtgacggcacctggaagcccggcctgatcgccgggctgatgttcggcatcgagtttgtgctgatcttccagggcctgcgcttcacgtccgcttcgcgcgcggtggtattcctctacacggcgccgttcttcgtggcgctcggctcctatcaagtgcttggcgaacgtcttggcgcctcgcaatggctgggattggccatcagctttgcgggcgtcgcgctcgctatcggcgtgccgcagcccaatgtcgatgcgcatgttctgctcggcgacctcatgatcgtcggcggtgccgcgctgtgggctgcgaccacgctggtcgccaagggcacgcggctgcgcttcgccgcgccggagaaggcgctgggctaccaggttgccacctcgatcccgattctgggagcggcggcctggctgtttggcgaatccatcacgcacacgcccagcccgctgtcgctcggcctgatggcgttccaggcgatctgggtggttggaaccacgttcacgctttggttcgcgctggtgaaggcttactccgccagcaaattgtccgctttcaccttcatcacccctttgtttggcgtcgtcggtagctatttcatcatgcacgacaccctaagcctggcgttcggggctgctgccctccttgtaattgctgggctttttctagttaaccgtccgagccaaggcgccgcggcgccgcgtgatgcattgctgaacgtcaccaaaacctga

SEQ ID NO: 903 - DNA, 1284 bp, BradyrhizobiumColbertium
atgaacaagctcgaaaaccctctcgattccgacattgcgggcccggcgccccggcatcggaccacccaggtcaaggtcggcgacgtcgccgtcggtggcggagcaccgatcgtcgtgcagtcgatgaccaacaccgacaccgccgatgtcgatagcaccatcgcccaggtcgcagcgctcgcgcgcgccggctccgaaatggtccgcattaccgtggaccgcgaggaggcagcagccgccgttccttatatccgcgacggcctcgccaagcgcggcatcaccacgcccctgatcggcgacttccattacatcggccacaagctgctcgcggcctatccggcctgcgccgaggcgctcgccaagtaccgcatcaatcccggtaatgtcggcttcaaggacaagcgcgacacccagttcgccgacatcatcgagatcgcgaacaagaacagcaagccggtgcgcatcggagccaactggggctcgctcgaccaggagctcctgaccaagctgatggacgagaacgccgcctcgccgaatccgcgcgacgtgcgcgcggtgacgcgcgaggccatggtgcagtcggcgttgctctcggccgcgcgcgccgaggagctcggcatgccgaaggatcgcatcatcctctcggcaaaagtctcggcggtgcaggatctgatcgcggtctaccaggatctggcccgccgttcggattacgccatccacctcggcctgaccgaagccggcatgggctcgaagggcatcgtggcgtcctcggcggcgctcggcatcctgctgcagcagggcatcggcgacaccatccgcatctcgctgacgccggagcccggcggcgaccgcacccgtgaggtgcaggtcggccaggagctgctgcagaccatgggtttccgcaccttcgtgccgctggttgcggcgtgccccggctgcggccgcaccacctcgaccaccttccaggagctggcccgctcgatccaggatttcatccgcgacgagatgccgacctggaaaacgaaatatcccggcgtggaagaactcaacgtcgcggtgatgggctgcatcgtcaacggccccggtgaatccaagcatgccaatatcggcatctcgctgcccggcaccggcgaagccccggccgcgcccgtgttcgtcgacggcaagaagttccgaacgctgcgcggtccgaccatctcggccgacttcaaggcgctggtgatcgactacatcgaccagcgctacggccagggcgccaaggtgccggtctctgcggcggagtga

SEQ ID NO: 904 - DNA, 813 bp, BradyrhizobiumColbertium
ttgaggcacctgcggagcttcatcgtcgggctgctcacggcgatcccgctgtcgtcgcttgcggtcgttggcagcagcgaggcagttcccgcgcgaaaggtcgttggacccaaggccaagcagctgtcacctgccaaatgcgaaatcccgaagtttcgaatcgtcgtcgatgtcggacacactccggactcctacggcgcgttgagtgcgcgcaatgatccggagttcggcttcaacttccgcctcgccagactgatcacgacgaagctcaagtccgaaggatttgccgcgacacgcctgctcgtcacggacggcaaagcgcggccgagcctgttcaagcgcgtcagcgccgcgaacgaaggcaaggccgatctgttcctgtcggtccatcatgattcggtgccggacaagctgctcgagacctgggaattcgacggggccaagagctatttcagcgaccgcttttcgggtcattcgctgttcgtctcgcgacagaatcagcacttcgccaccagcctgatgctggcccggatcattggcaggcagttgaaggagcagggcctgcgctatgccagccaatacaccctgccggtcatgggccgctaccggcgccagctgctcgacaaggacgtgggcgtctatcgctatgatgggctcgtcgtgctgtcgcggacgaggagcgccgcggtgctgctcgaggccggctcgatcatcaatcgcgacgaggaaatggagatgaactcgccggagcggcacgaggcggtcgccggagccgtcgcggctgcaatgagggagttttgcgcgaggcggtag

SEQ ID NO: 905 - DNA, 1608 bp, BradyrhizobiumColbertium
atggaagcgaaatttcagactttcctcatcctgctgaccgtgctggcaggtaccgctctcgtcgcgcgccgcttcaacatcgcgcctgccattctgctgatgctctccggcgtggggctcgctttcgtgccgggcatgcccccggtggaattgccgccggagctggtgctcttgatggtgctgccgccgctgatctactcggcaagcgtcgccatgagctggcgcgaattcaggaacaatctgcgccctatcgtcctgctcgctgtcggcgcggtcatcttcaccgcggcgctggtggcggccgcaacacactacatgatcggcctgccctggaccgtcgccttcctgctcggggccatcgtcgcgccgcccgacgtggtggcaccgctcgcgatcgcgcgccggctcaacatgccgcgccggctcctggtcatcctcgagggtgaagggctcgccaacgatgccactgcgctgatcctctaccgcttcgcgctcgcggcgatcatggtcgggaatttctccctgccgctcgcggccggcgagttcctgctcatcatcgccagcgagatcgccttcggtgtcggggtcggctggctctcattgcgcttccgcaaatggtccggagatccgcaggtcgagctgacgctgtcgctgatcacaccttacgtctcctactggttgcccgaacacgtcggcggctccggcgtgatcgcgaccgtcgcctgcggcctctatgtgagctggaacgggccattgctgatctcgtccgcaacgcgcctgcaaggcatcttcttctgggatctcgtgatctacctgatcgaaggcatgctgttcctgctgaccggcttccagatgcgcgcgctctacgaaaaatcgaagaccttcccgctcgacgacatcctcatcgcgacggccgtggtcctggtcatcgtcgtggtcgcgcgcttcgcatggctctatcccgcaacttatctgccgcggatgctcagcaaatcgctgcgcaagcgcgacccgtcgccaccatggcaatggccgttcgtgctcgccttcaccggcgtgcgcggcgcggtgtcgctggcggccgcgctggcgctgccgttcacattgccggacggcgaggcctttccatatcgcgacttgatcctgttcgtcgccttcggtgtcatcttcgtcacgctgatcggcgtcggcctgacgctgccgccggtcgtgcgctggctgggcgtcgccgaagccggccggcatgagcatgccgccgagcacgacgccgagattgccgcacgccgtcaggcgctcgatgccgcgctgaaatcgctcgacgcgttgaccgagcagaaggacgtctccgacgaagtgatgcggctgctgcgcgctcgccacgagatacgcttgaaccagcttcccgacgcgctcgatcccaaccatcacgacatctcggccgccggtaccgcgctgacacgggaactgatcgccgccgagagagcattcatccacaatctcctgcggagaggccagatcaccgacgagacgcgacgacggatcgagcgcgatctcgatctggaggaggcgagtctggcgaaccgggaatatcgcgaggcgctcctgtag

SEQ ID NO: 906 - DNA, 858 bp, BradyrhizobiumColbertium
atgattctcgaccgccgttccctgctcgcctcactctgctggatggctgccgcccccgtgctggccgcggacgcgccgccggagctcgaagcctacgagcgcgagagcggcgggcgggttgggctctatgcggagaatcttgcaactggcagaaagctcgcctggcgcgccgacgagcggttcgtgatgtgctcgaccttcaaggcctcgcttgcggcctgcgtgctggcgcgggtcgatcggggcgaggagcagcttgcggccatgatcccttttggccagaccgacctgctcgattacgcaccggtggcgaggcaaaacctcgcggccggcgagatgtccgtcgctgaaatgtgcaaggcgatcgtcgagctcagcgacaacacttgcgccaatctgctgctggcgcggatcggcggcccttccgccctgaccgcattctggcgatcgatcggtgacaccatttcacgcctcgaccacgacgagcctgaactcaaccgttcaccgcccggcaatccccaggacaccacgacgccaacagcgatggcgggcaatttgcggcggctggtgacgggcgcggcgctgtcgccaggctcgcgtgcccagctcaccgactggatggtgaactgcaagaccggggcaaaccggctgcgtggcgggctccccgcgagctggaagatcggcgacaagaccggctacaacggcaaggacgcggcgggcgacgtcgcggtggcttggccgaagcccgagacgccgatcctgatcgcggcctatgtccaaggcggctcgccgaccgcggagcagatcgcggccgtgttcgcacgaatggggcgcatggtgacggaacggctcgcgtaa

SEQ ID NO: 907 - DNA, 375 bp, BradyrhizobiumColbertium
atgagcccaaaccggtcgagcgtcgaagccgtcgtgcaatcctattttgacggactttatgagggcgacgccgaaaagctcggcgccatcttccatccctccgccgatctgcgctgggtcgagaagggcgagctccaggttctgacggtgcctgactggctcgatcgcgtccgcaagcgcgcctcggccaaggcagaaggcaagccacgcgaggatttcattgtcacgatcgaccggtcggacgacaagaccgccttcatcaaggtcagatgccagcttccgccgcggtatttcaccgactatctggtcgcgatgaagctcgccgacggctggcagatcgtgtcgaaatcgtaccggtatgacctgagggagtga

SEQ ID NO: 908 - DNA, 1815 bp, BradyrhizobiumColbertium
atgcgcattttgctcagactttgtccgcttttcgtcgccctcgggctgctggtcggcgccgggcccgcccttgccgggaagcgcgtcgctctggtgctcgccaattcggcctatcagcacgcgccgtcgctcgccaaccccgtcaacgacggatccgtgatggccaggacgctgaaggaggccggcttcgacgtcgtcgattcccggcacgatctgtcggcgcaggacacgcggcgcgtgctgcgcgacttcgccgacgcgacccgcgatgccgatatcgccgtggtctactatgccggccatggcatcgaggtcgagggctcgaactacctgattccggtggatgccaagctcgagcgcgataccgacgtctacgacgaggcgctctcgctcgaccgtgtcctggtcgcggtcgagcctgcaaagcagcttcgtctggtgatcctggatgcctgccgcgacaatccgttcggcaagcggatgaagcgcacgattgcatcgcgtggcttcggccggggcctcgcccaggtcgagccgaccagccccaacacgttgattgcctattcggccaaggccggcttcacggcgcaggatggcgacggtgtcaacagtccattcacggttgcgctttcgaagcatctgacaacacccggtctcgacgtccgccgtgccttcggcttcgtgcgcgatgaggtgctcaggtcgacgggcaacaagcaggagccgttcgtctacggttccctcggcggcgaggacatgccgctggtgccggtcaaggtggccgctatagcgccggcgaatccccaagccgatatccggcgggactacgagcttgcgcttcaggttggcagcaggccggcgtgggaagccttcctcgcccagcatcccgacggcttctatgcgagccttgccaggcttcagatcgagaagatcagcgccgaacaggcccatgcggcagccatcgcgaaggcgaagcaggccgaggcggagcgcgatcgtcttgccgcgctcggcgcccagaaggaagcgcaggccaaggccgcggccgatgcgaaggccgccgaacaggcgcagcttgccgcgcagaaggccaaggagcaggcgcagcagcaggcggctgcggccgagcagcagcgtgtcaacctcgccgccgcggcgccgagtgctgcaccggccagcacagcgagccccgcaggcaccagcgtggcctctctgaccccggcgatcgcaccagccgatctcaaccgctcggtgcaggccgaactcggccgcgtaggctgcttctccggccaagccgacggcaattggaatacgtccgcgcagcgatcgctgtcgcagttcaatcgctacgccggcaccaagctcgacgtgaaggtggcgagcaccgatgcgctcgatgcggtcaaatcgaagccgtcgcgcgtctgtccgctggtctgcgagcatggcttcaaggctgacggcgacaagtgcacgaaaatcgtctgccgccagggctatgccgtcaacgacgacaatgagtgcgaaaagcagcgtgcggccaagccggccaagcccgcgtcggccaagcgcgacgaccgtgatgagcgtcctgcacggcagcgtcgtcaggccggcggtgcggctgctggcgctgcaggtggctatggtgctgctgccggcatcgccgctgccgctggcggcagccgcgcctcgagtggcgggcagattttctgcaacagcaccggctgtcgtccggtccaccgcggttgccgtctcgaatatcgcggcggcggcggccccggcaacgacgccaatgccgaggtctgctactga

SEQ ID NO: 909 - DNA, 693 bp, BradyrhizobiumColbertium
atggcggccggcggcaaagaggatcccgtcctcgtccgcttccgccagatgtcgcggccggtgcggctgatctatgcgcggccgcggaccttcgtcgcactcgctgtcggcatcctggtctgcctgctgttgccggggacgtaccggctggtgacacggctcctgctcggctggaatgcgctgatcgcggtctatctcgtgctggtctacgccatgatggtctgcaatgaccaccagcacatccgccgcgccgccgcgatgcaggacgacggccgcttcgtgatcctgctcgtgacggcgaccggcgccttcgccagcatcgcggcgatcgtctccgagctcggcatcccgcatcggggagtcctggagctcacgatcgcgatcaccacaatcgcgttgtcgtgggctgccgtgcacacgaccttcgcgctgcattacgcgcatgactattaccgcaacgccaagccgggcggcctgcaatttccgagcggcgacgagaaagaccacgccgactattgggacttcgtctatttctcgttcgtgatcggcatgaccgcgcaagtctccgacgtaggcatcacggacaagacaatccgccgcaccgctacggcgcatgggatcgtgtcgttcatctacaacaccgcgttgctcgcgctgacggtcaatatcgcggccagcgcgatcccaaactga

SEQ ID NO: 910 - DNA, 924 bp, BradyrhizobiumColbertium
atgaccggcacgtccccgtccgatttcgccaaacgtctggacaagaccgctgatgacaccgaagccctgctcgggcgcctgctgtctgacgacatcctgcacgacgagatcgcccggcccaagcgactgatggacgcaatgcgctattcgaccctgaatggcgggaaacgcctgcggccgttcctggtggtcgagagtgccgcggtgttcagtgtgccgcgcgaggcggccctgctggtgggcgccgcgctcgaatgcatccactgctattcgctgattcatgacgatctgccggcaatggacaattccgacctgcgtcgcggtcgcccgacgttgcataagaagaccgatgatgccaccgcgatcctcgccggcgacggcctcctgacgctcgccttcgacatcatcacccgcgacgaggtccatcgcgacgccaatgtgcggctgttgctgacgcgcgcgctggcgcgctgcgccggcatcggcggcatggtaggcgggcagatcctcgatctcgccggcgagggccgcttcggcggaaacgagccgatcgatgtcgcccgcattcagcagatgaagaccggcgcgctgctgcgctacggctgcatcgcgggcgccatcctcgggcaggcctcgcagaaggaatatcaggcgctcgacgattacggccgcgcgctgggcgaggccttccagatcgccgacgatctgctcgacgtcgagggcgatgcggccgcgctgggcaagccctccggccaggacgcagcgctcggcaagaccaccttcgtcacccagctcggcatcgaaggcgccaagcagcgcgtgcgcgatctgctcgcgcgggcggacagcgccgtgtcgatcttcggcgaccgcgccggggtactgcaggctgcggcgcgcttcgtcgccgaacggaagaactga

SEQ ID NO: 911 - DNA, 675 bp, BradyrhizobiumColbertium
ttgcgcatcgtcaagatccttctcctggtgctcgcagtcgcagctcttgcgccctatgtcattgcgccgttctaccgcaccgggcatcccgtttcgacgctgatggcctggcgcgcgcttcgcggcgcgccgatgcaccgagagtggatcgatctggcgaacatgtcgccctacctgccgcgcgccgtggtggcggccgaagacgcccatttctgcaagcatcacggcatcgactggggtgcgctgcgcgaggcgatcgacgatgcgcaggaggacggcaccccgttccggggcgcctccaccataacccagcaggtcgcaaaaaacctgttcctctggcaggggcgggatttcgtccgcaaagcactggaattcccgctggcgctctggatcgatctcgtcctccccaagccgcggattctcgaaatttacctcaacatcgccgagttgggcccgcaggggcaatttggtgtcgaggcggccagcgcctatgccttcggcaagtcggccggaagcctctctccacgcgaggccgcgcttctggcctcgatcctgccgaatcccgtcaaacgcagtgcccggagccctggcccaggtgtccggcggctggcggccacctatatggcgcgggggcaggcaagctcgcttgcgacctgctggcgggaaaatcgctga

SEQ ID NO: 912 - DNA, 183 bp, BradyrhizobiumColbertium
atggccgttccgagaagaaaaacctcgccgtcgcgccgtggcatgcgccgctcggcagacgccatcaagaagccgacctatgtggaagacaaggactccggcgagctccgtcgtccgcaccatctcgacctcaagaccggcatgtacaagggccgtcaggtcctgaagaagaaagagtcctga

SEQ ID NO: 913 - DNA, 735 bp, BradyrhizobiumColbertium
gtgacggcggcggagcgaatgcttcgccgctgcattgctctgtccggatatcttgatcgagaaggcatctcgccgatggtcggtttcccgctgcttctgattccgcttgcggtctacaacatcatcgccttcctgatgccgaccgtgtcctttacggacgtgctgttcacggtgccgatgatgtccggcgaggtctggccggtcacactcgccgacctcctgctcgcactgggcgtggtgttgctgctgctcgaagtggtcaagggcgcgcggccgggctcgaaattcctgatggatcacttgctgtcgctgatcgtgttcggtgctgctgcggccgaattcgtgatgtggcccaaattcagcaactccacctttttcctgctggtgctgctggcgatggccgacttcctcggcggcattgcccagcgtacgcgccggcgcgtcacctatgtcgccgagacgacagtacccgcgccacgcaaggtcaagcgcaaggcggagacgccggcggatgatgcggaggctccctccaagttcgagccggtgatcgcgccgcaaccggcgccggcaccggtagagccgcccgccccctcggcgcaatccgtcgccgagtccgtgctgatggatcatcccgcaccgaagccggcgcagggcgctccctcgccggaaataccctcgccccatcttcagccgggcaacggtacgccacccgcgtctgatacgccgccgcgctga

SEQ ID NO: 914 - DNA, 207 bp, BradyrhizobiumColbertium
gtggcggtgatgccgacgttgcaatgggttcacaaggcgcccctgccgcggcccgaccccagcttcatcactcagctcatcgccaacgccgaatgtccgccccagacgagccgattccgccgtgcctcttccgaggatgcgcggacggcatatggcagcaagcgtccgctcggaagcgtcgccgcacgaacacggcaggtggcctga

SEQ ID NO: 915 - DNA, 1695 bp, BradyrhizobiumColbertium
ttgatccccacactgccgcaagcctcagacatcctggccgcgcttggccaggccgtgttcgcctgggacatcgccagcgattccatcgcctggggcgagcaggtcaccagcatctttcccggtattccggccgagcggctggcgaccggcgccgaattcgccaagctgatcgagcccgcgcaaacgctgcggagcgcagctctggcgcagacctccgccgtgcacggcgccgatggcacgccgtaccgggttgagtatggcgtacgcatgaacgcctccgaccccgtggtctgggtggaggagaccggccgctggttcgcaggccccgatggccgccccacgcgtgcgatcggtgctgtccgcatcaacaacgagcgtcacgcccgcgacgaagagctggccaagctggcccggctcgatccgttgaccggcgagctcaaccgctcccatctgctcggcgcgctggcagaggcgatcgaggaggcgacccgcttccgttcgaccgccgccttcatgctggtcgggatcgatcatctcgcccgagtcaacgatgccttcggcttcgatgtcgccgatgccgtgatcctcgatgtcgccaagcggattcgcgcgcgtctgcgcggcggcgacgtgcttggtcgcttctcaggcaacaagttcggcctgatcctcaagaactgtaccgtcgacgacatgaacgttgccgcggagcgcttcctcgccggcattcgcaccgacgtggtgccgacgaaatcaggcccggtctcggtcaccgcgtcgatcggcgcggtcagcctgccgcgctatgcccgcaacaccgatgaagccgtcaatcgcgcccatgagacgcttgacgctgccaagcgccgccgcgccggctcgttcgcggtatggcgtccggatgctgcgcgcgacgcgcagcgccgggtcaacatccgcgtcaccgacgagatcgtcactgcgctcaacgagcggcgcatcaggctagcctatgagcccgtggtctcggccgtctcgcgcgagcgcgcattccatgaatgcctggtgcggatggaccagggcaacggccaggtgctgctcgcgcccgacatcgtgccggtcgccgagcggctcggcctgatccgcctggtcgatcatcgcgtgctcgaactcgtggtcgccgagctcgcagccgcacccgacgtctgcctcagcctcaacatctcgcctgatacgacgatggatccggactggtgggcggggatcgaatcgctgatgctggcccatcccggtgttgccgagcggctgatcatcgagatcacggagacggtcgcgatccaggacatcgacgatgtccgtgccttcgtcagccgcctcaagcatttcggcagccgtatcgccatcgacgatttcggtgccggctacacctcgttccgcaatctgcgcaagctcggcgtggacatcgtgaagatcgacggcgctttcgtgcagaacatcacccattccgccgacgaccgcgctttcgtgcagaccctgatcgatctcgcccgccgcctcgacatcaagacggtggcggaatgggtgcaggacgaagaagcagcgagcatgctgcgcgactggggctgcgactacatccagggccgtctgatcgggcttgcctcggccgaccgcccatggggcgctccgccggacagcgcgctgcctgcggcggggtaa

SEQ ID NO: 916 - DNA, 1509 bp, BradyrhizobiumColbertium
atggatacgctcgtcaacgtcgcccatggtttcggcgtcgcgctgctgccgatcaacctgctctattgcttcatcggcgtcttcatcggcactctggtcggcgtgctgccaggcatcgggccgatctcggcgatgtcgctgctgctgccggtgacgctctccgggacgcccgaatccggcatcatcatgatggccggcatctattacggctcaatgtatggcggctcaaccacctcgatcctggtcaacatccccggcgaggcggcttccgtcgtcacctgcatcgacggccaccagatggcgaagcaggggcgtgccggtcccgcgctcggcatctccgctttcggctccttcgccgccggcacgtttgcgctgatcgccttgatgctggtcgcgccgaagcttgccagcgtcgccatcgcattcggtccggccgagtatttcagcctgatggtgctcggcctcgtcgtgctcaccttcctgacgcagggctcgatgcctaaggcactgttgatggcatgcatcggcgtcgtgctcgggctggtagggctcgacagcatcaccgcgcagccgcggctgaccttcggccgcatggagctgatcgacggcatcggcctggtgccggtggtgatgggcctgttcggtgttgccgaggtgctgctcaacaccgagcaggcgatcaagcgcgacatcatcaacaccaagatcactcatctcttgcccaccaggaaggactggaaggcgagcgcgggtccggtcggccgcggcaccgtcctcggcttcttcctcggcatcctgccgggcggcggcgcggtggtggcctcattcgcctcctacgcgctggagaagcgcctgtcgaagacgcccgagcgtttcggccatggcgcgatcgagggcgtcgccgggcccgagtcggccaacaacgccgcggcgggcggcgccttcattccgttgatgacgcttggcatccccccgaatgtggtgatggcactgctactcggggcgttcgtcattcacgggctgcagcccggaccgctgctgatcacgcaaaaccccggcctgttctggggcatcgtggccagcatgtatatcggcaacgtcatgctgctgatcctgaacctgccgatgatcggcatgtgggtgcagctgctcaagctgccctacaacatcctgttcccactgatcatcctgttcacgatcctcggcgtgtactgctcgagcaacaacgtgttcgacgtctatgtgatgatcgcgttcgggatcatcggctatttcatgcgcaagctcggcttcgagccggcaccattggtgctcgccttcgtgctggggccgatgatggagaacaatctgcgcaagtcgctgatcctgtcgcagggcgatctctggaccttcgtgcagcgtccgatctcgggggcgtgtcttgcgttcgcgctggtgctgctgatcgcgccgctgttgcccgcgctgcgcaagaagcgcgagctcgttgcgctggacgagggggcgtga

SEQ ID NO: 917 - DNA, 486 bp, BradyrhizobiumColbertium
atgaacaacgacaccaatgtcaaactccgcctcagcaactccgagctctggggcgggctgatcgggctcgcactcggcggcttcgtgatctggtcggggctgaagctcaggctcggcaccatcaacgatcccggctccggctacgtgctgttctacaccggaatcctgatgtgcgtgttcgcgagcgccatcatcgtctcggcgatcaccgagggcgggccgacgctggcctcacgctgggagaatgtgcgctggagcaagccgcttctcctcatcgcctgcctcatcgcattctccctcgcccttgagccgttgggcttcctgttgtcgtcgatcccgttgatgctgctgctgttgcgcctgatcgatcccgtgcgctggacgctggcggttccgatcgccgtgctggtgccggtctgcatgtggtgggtgctcaagcgcctgctcttgatccagttgccctcaggcctgttcgggatcggctga

SEQ ID NO: 918 - DNA, 978 bp, BradyrhizobiumColbertium
atgtcgggacacgggctgaagacgatcgcatttgccgcgctgcacgctgtgatgggcgcattgctccccactgcggtcagcgcgcaggactatcccaccaagccgatcacgttgatcgtgccatggccggccggcggatcgaccgacatctcgatgcgcgcgatcgccgacagtgcttcgaagaccctggggcagccgatcgtcatcgacaacaaggcgggcggcggcggcacggtcggacctgcgaccatggcggcggcggcgaagccggacggctacaccatctcgcaaatcccaatcacggtattccgtcttccgctgatgcaggaggtgtcgtgggatccagcgaaggatttcacctacatcgtccatctcaccggctacaccttcggtgtgacgaccagcgcggagtcgcagttcaagagctggaaggacgtggtcgagttcgccaaggcgaatccgggcaaggtgacctacgccacgcccggcgccggcacttcgctgcatatcgggatggagcagatcgccgggatggccggcatcaagctgacgcaggtgccgttcaagggaggtgcagagaccaatgccgccgtgctcggtaagcataccatgcttcaggctgattccacgggatggcgaccgctggtcgacgcgggcaagctgcggctgctgatggtgtggaccggcgcccgctcgccgaattaccccgatgtgccgacactgaaggagctcggctatcccatggtctatgattctccgttcggcatcgccggcccgaaggggatggatcccaagatcgtcggcaagttgcacgatgccttcaagaaggccctcgaggaccccgcggtgatcgcgacgctcgccaaatacgacatggtgccgaactacaagaacactgaggactacaagaagttcgtcgtcgaggtcacggattccgagcgcaaggtgatcaacacgctcgggctggcgaagaagtag

SEQ ID NO: 919 - DNA, 2868 bp, BradyrhizobiumColbertium
atgacgtcgacccgcgacaaagagcttggtgcactccgcgagcagggcccggacgccctggtcgcgctgagccaactcgcgctcgaccatatggagcagggtgtttgcgtctacgatgccgacaatcgcatcttgctggtcaatcagcgttacctctccttcttcaacatgtccgccgacatcgtgcgcgtcggcacgagctatcgagaggtgctcgcgcacagcgccaggcgcggcaacttcccggaaagcgagctcgacgcgctctattcggcgcggatcgcgcggatcgcggccggaaagccgttccgcaccgagcagcggctggcgagcggccttgtcatgtcgctcgagctgaagcctctccccggcggcggctggatgacgatctgcgacgacgtcacccgactcgcccggctcgaggcggaattgcgcgtgcaaacggagcgcagccagcacgcgcttgcgaacatgtcgcacggtctcatcatgtacgacgccgacagccgcgtggtcgtctgcaacgaacgcttcctcaacctctacaatctcgatcctggaatcgtgaagccgggagtctcgcaccgcgcggtgctcgaccattggatatcgcgcggcaacctgccggggatgccggccgacgagtttcacagctccagaatggaggacgtgcgcgccaaaagagaaaaatccctgctggtgatgcgctacgacggacgcatggtgcagacgatctcccgcttcctgcccgacggcggctgggtgaccgtgcacgaggacgtcacggagcggctgcaatacgaggaaacgctgaggcggcagaacttcattctcgatgcggcgctggagaacatggcgcacgggctcgccttcttcgacagcgatatgcgccttcgcgtctgcaataccacctaccggaagatctaccgtctgtcgccggaggagaccaggcccgggacgcatctcgccgagctgatcgagcgctcgatggcaaacggcgcgttctcgtccgaatacagtccgcaacagctgctggaagccgcaaggacgagcattgcgaaccgcgattcatcgccgatgcgccggcacatggcggacgacacgatgatctcggtacgctattgcgcgctggccgaaggcggcttcgtcgccacctacgaggacataaccgagcgcgagcgtgccatcgagcagctcagcgaacagtatcgccgcttcgatgccgcgctgaacaacatgagccagggcctgtgcatgctcgattcgagcctgcgcgtgatcgtctgcaatcgccgttatctcgagatgtacggactgtcgccggagatcgttaagcccggcgtctcgatgcgagagatcatggactacagctgcgagctcggcatccacccgaacacgaccggcgccaagctctatgccgactatgtcgagcggttgcgcgagggcgagcacacgctgcatcggcacttgagcgacggccgcatcatcaagctcaatcacaaacggatggagcacggcggctgggtcgtcacctacgaggacgtcactgagcgccacaaggcccaggcccgggtggcgcacatggcgcggcacgattcgctcaccgacctgcccaatcgcacgctgttccgcgagaagatggctgagggactgaaccaggttgcggtcgccggcggcgccatggccgtgctttgcttcgacctcgacaacttcaagaccgtcaacgaccgcctcggccacgccgcaggcgatcgcctgctgcgctgggtcgcagcgcagctgaaagcgaacgtcggcgaacacgataccgtcgcgcgcctcggcggcgacgagttcgccgtcctgcagcgcggaccacagccgcaatcggctgaggagctcgcccgccgtctcgtcgacatcatcggtcatcctccgccgctggaaagtcaatcagtccatgtcggcgtgtctgtcggtattgcgatcgcacctgaccacgggctcgacgcggacgagctgatgaagtgcgccgacctcgcgctgtaccaggccaaggccaggggacgcggaatctatcagctgttcgagcccgagatggaggaagaagcacgcagccggcacgcgctcgagcaggatctgggtggcgcgctcgagggtcgtcagttccacctggtgttccagccgcagatgcggctcgattcttccgagctcaccggcttcgaggcattgctgcgctggaaacatccctcacgcggcatcgtttctcccgccgagttcattccgattgcggaggagaacgggctgatcgtgccgatcggcgaatgggtgctgcgcacggcctgcgcggtcgccgcgtcctggcccggcgtcgccgttgcggtgaacctgtctccggtgcagttccgctcgcgcgggttggtcgggatggtcaccagcgcgcttgcagaagccggcctgccgccgcaacggctcgagctcgaggtgaccgagacggcgctgctcgatgacagcgaggcgacgatcgagatcctgcaccagcttcgcgcgctaggagtgcgcgtcagcctcgacgatttcggcgtcggctattcatcgctgagctacttacgaaaatttcctttcgaccgcatcaagatcgaccgctccttcgtcggcacgctcggggagagcccggagagcgttgcgatcgtccgcaccatcgcaagcctcggctcagtgctgggcgtcgagaccacggcggagggggtggagacggaagagcaactcgacttcgtccgcgaatgcggctgcaccgccgtccaaggctattatttcggcaagccatgtctcgcatccgacgtcggccgcaccatcgagacactgagcatggtccggcgcgtggcctga

SEQ ID NO: 920 - DNA, 954 bp, BradyrhizobiumColbertium
atgttgcggccggtgctcacggcgaaggctggcgctaagcaactcacgaggctgaccatttccacgggcaagacgagcgtgatccataccaaggtccgatgccgcgagatcacggagtccgatgtcgataagatcgcggacttgctgacgcgcggcttcgtcggccgttcacgcgaatactggattcagggcctgcgccggcaggccttccgagcggtgccggagggctatccgcgcttcggctacatgctcgacgatgacggcacgccggtcggcgtgctgcttctgatctacacggcgcgccagcgtggcgaggagacggctgtccagtgcaacctgtcgagctggtatgtcgatccggcctatcgcaactacgcgccgctgctgaccaagatcgcgcagcggcacaaggacgtcacctatttcaacatcagcccggcgccgtggacctggccgatcatcgagacgcagggctttcgcgcttattgccgcgggatattcttctcgatccctgcgctggcgcgcgcgccgcggtggagcgagatcgaggtcatcccgccgcatgccaaggagatcaagggactttccgccgccgagaccgagctcttgaggcggcatgcgcgctacaattgtctcagccttgtctgccgcacgccgaaaggaaccttccccttcatcctgcaaccggtgcgcatccgccgcggcttcatcgccccgcccgccatgaagctgatctattgccggagcatgacggaatacgccgaatgcgcgggccgaatcggccggctgctgttgcggctcggcaagatttcggtcgccgtcgattccaatggcccaattcccggcctcgttggtatctataccgagcgacggggtcgcaaatatttcaaggggccgcaccagccacttctgggcgacctcaccgacacggagctcgtgctttacgggccgtag

SEQ ID NO: 921 - DNA, 981 bp, BradyrhizobiumColbertium
atgagcattgccgtcctccccaattcgcccgataccgcgccgcagatgatcgatccgctcgatcatcttgccgacaagctgttccaccgcatgggcgccgacggcgtctatgcccgcaccgcgctttatgaaggcatcgtcgagcggctggccgcactgatcacgagccatcgcgaagccggcaccgaagtgatgcgctttccaccggtgatgagccgcgcccagctggagaaatccggctacctcaagagctttccgaacctgctcggctgcgtttgcggactgcacggcaccgaacgcgagatcaacgccgcggtgagccgcttcgatgctggcggcgactggacctcttcactgtcgccagccgacctcgtgctgtcgcctgccgcctgctatcccgtctatccgatcgcggcgagccgcggaccgttgccgaagggcggcctgcgtttcgatgtcgctgccgactgcttccgccgcgagccgtcgaagcatctcgatcgcctgcaatcgttccggatgcgcgaatatgtctgcatcggcagccccgacgacgtcgccgacttccgcgagcgctggatggtgcgggcgcaggcgatcgcgcgtgacctcggcctcaccttccgcgtcgactatgccagcgatccattcttcggccgggtcggccagatgaaggcggtgagccagaagcagcagcaactcaagttcgagctcctcattccgctgcgctcggacgagcagccgacggcctgcatgagcttcaactatcaccgcgaacatttcggcacgacctggggaatccaggacgccaatggcgagccggcccataccggctgcgttgcctttggcatggaccggctggccgtcgccatgttccacacccacggcaccgatctttccgcctggcccgccaaggtgcaggacgtcctgggctttcagccgcatgttgcggccggtgctcacggcgaaggctggcgctaa

SEQ ID NO: 922 - DNA, 1218 bp, BradyrhizobiumColbertium
atgaacgtgcgtgaagcagtcctcactgtcgacgaaatgcaggcgagctttctcgagcagggcccgtccctgaccgagcgcgccgcccggaccgccgcagcggcagcggccgacgcagacggggtcgatcgcgacgcccgcttcccgcacaaggccttcgacgtcgcgcgtgagcagaagctgctgggcgtgatgatcccggtcgagttcggcggcttcggcgcctcgatctatgacgttactgacatctgctacacactcggacgcgcctgcgcttccacggcgatgatctacgcgatgcatcagaccaaggtcgcctgcgtcatcaggcacggccatggcattccctggatggagaccatgatgcgccgggtcgcccgcgaccagtggctgctcgcctcctccaccaccgagggccagaatggcggcaatatccgcgccagcgccgccgcggtcgatcatgctggcgacaccgtctccctggttcgcgatgccaccgtgatctcctacggcgccgaggccgacggcctcgtcaccatcgcccgccgcgccaccgatgccgcagcctccgaccaggttctgatggcgctcgccaaggacgattattcgctgaagcggacgctcggctgggaaacgctcggcatgcgcggcacctgctcgaccggcttcgagctgaaggtcgattgccctgccgaccgcgtcttcccggaatcctacgacaagatccacgcccagaccatgaccccgttcgcacatctgtgctggtcgtcggcctgggccggcatcgccgctgcggccgtgacccgcgcgcaggctttcatccgcaaggcggcgcgctcttccggcggccagatgcccccggccgcggcccacttcaccgccgccaagatgtcgcttgccaagctgcgcgcgctgatctctgccaacactgacgctttcgcccgcgccgagcatgacgagcgtgcgctgagctcgctcgacttccagtccgcgatcacgctgctcaaggtgcaagcttccgagctcgcggtcgagacggtgatgcatgcgatgcgcaccgcgggtctttccggctaccgcaacgacggcgagttcaccatgggccgccacctgcgcgacgtgctgtcgtcaccgatcatgatcaacaatgaccgtattctctccaacgccgcgacatcgacgctgatgagcggcgtgccgacgagccttcgcgactga

SEQ ID NO: 923 - DNA, 273 bp, BradyrhizobiumColbertium
atgcaggccttcgataccgatttgcgcaatcgcatcatcaagctggtgaaggatatccttgagcagaactcgctcactgccgacgtcacgccggaggcaaagctagtcgacgtcggcctgacttcgatggacatggtcaatctgatgctcggcgtcgaagccgagttcgacttcaccatcccgcagtccgagatcacgccggagaatttccagtcggtcgagacgctggagcggatggtcgcgacgcagctgcagctcgcgaacgcggcttaa

SEQ ID NO: 924 - DNA, 876 bp, BradyrhizobiumColbertium
atgacgcaggcgatattggggatcatcggcggctcgggcatctatgacctgccgggcctcgagggggcccacgaagaggtgatcgctagtccgtggggggagccgtcagcaccattgcggcgcggctccatcgccggtctgccgatcgtgttcctgccgcggcatgacaagggtcaccggctttctccctccgatatcaactatcgcgccaatatcgacgtgctgaagcgcgccggcgtcaccgacctgatctcgctttcggcctgcggttccttcaaggaggaactgccgcccggcaccttcgttctcgtcgaccagttcgtcgaccggacccacaagcgcgagagctcattcttcggccgcggctgcgtcgcacatgtgtccatggcgcacccggtctcgccgcggctgcggctccatctcgcggcggcggctgacgccgagggcatcgcgatcgcccgcggcggcacttatgtctgcatggaggggccgcaattctctacttacgcagagagcatgacctacaaggcccttggctattccgtgatcggcatgaccaatatgcccgaagcgaagctcgcgcgtgaggcggagatctgttacgccaccgtcgcgatggtgacggatttcgattgctggcatcccgatcatgacgccgtcaccgtgcaggacatcattcgcgtgttgacgtcgaacgccgacaaggcgaaggcgctggtggcgcggctggcaagggattttccgcgcgagcacgagccgtgcccgatcggctccgaccgggcgctcgacaccgcgctgatcacggcgcctgaggcgcgcgatccggagcttctgaagaagctcgatgcggtggcgggtcgcatcctgcgcggctga

SEQ ID NO: 925 - DNA, 1107 bp, BradyrhizobiumColbertium
atgaaggtcgacggcaaacattttcgcagcatctggcgcgagcgcgacggctggtccgtcggcgcgatcgatcagcgccggctgccgcatgagttcgtcatcgcgcgcctgacctcgtgtgaagacgcggccgttgcgatccgcgacatgctggtacgcggcgcgccgctgatcggggcgactgccgcctacggcatggccctcgcgatgcgcgaggacgcttccgacgccggtctgaaacgggcctacgacacgctcgtggtcgcacggccaaccgcgatcaatctgaaatgggccctggacgagatacgcaggacgctcgcgccggtcgatcccgttgaaagggcggaagctgcctacgcgcgcgccgacgagatcgccgagcaggatgtcgagatcaatcgcggcattgccggcaacggtctgaagctgatcgaggcgattgcggcgaagaagccgggcgagacggtcaacgtcctcacgcactgcaatgccggttggctcgccaccgtcgactggggcaccgcgacggcgccgatctatctcgcgcacgaacgcggcatcaacgtccatgtctgggtcgacgagacccgcccgcgcaaccagggcgcttcgctcacagcctgggagctcggccatcacggcgtgccgcacacggtcatcccggacaacactggcggacacctgatgcaacatggcatggtcgatctcgtcatcgtcggcaccgaccgcgtcgccgccaatggcgacgtctgcaacaagatcggcacctatctgaaggcgctggccgcgcatgacaacggggtgccgttctatgtcgcgctgccatcgccaacgatcgacttcgccgtccacgacggcatccgcggcatcccgatcgagcagcgcagcggcaccgaggtgaccgacatgaccggccgcaccgcggacggaaggctggagacggtgcgcatcgtcccggaggggtcgccggtcgcgaactacgccttcgacgtgacgccggcacggctcgtcaccggcctgatcaccgagcgcggcgtgctgaagccggatcgagcctcgctggcggctgcgttcccggagcgggtcgcagatgctgcggaatag

SEQ ID NO: 926 - DNA, 636 bp, BradyrhizobiumColbertium
ttggcgatcgaggctgtgatctttgattttggcggcgtgctgacgagctcaccattcgaggcgttcacgcggttcgagatcgagcgcggactgcccgccgacatcatccggcgcaccaacgccgccaaccacctggagaacgcctgggccaagttcgagcgggccgaggtggacatcgacactttcgacgaattattcgccacggaatcgcttgcactgggcgcggaggtacgcggacgcgatgtgctgcccttgctgcagggcagtctacgtccagagatggtcgaagccctgaagcgcatcaaggcgcaattcaagaccggctgcatcaccaacaaccttccggccaacgccatcgggagcatgaccggacgttccctctacatcgccgaggtcatggtgctgttcgaccacgtgatcgaatccgccaagattggcctgcgcaagcccgacccgcggatatatcaattgatggtcgagacgctaaaggtcgatccgaacaactgcgtctatctcgacgatctcggtgtgaacctgaagcccgcgcgcgagatgggcatgacgacgataaaagtgacgagcggcgcccaggccatcgccgagctcgagaaggccacgggcctcaagctgggctag

SEQ ID NO: 927 - DNA, 759 bp, BradyrhizobiumColbertium
atgacgaagcttgccatgttcatcgctgcagcgctgctgctcgccacgcctgcccgtgccatcgtcggtggcggcacgccacaggccgatggtgtcgcgcgtgccgtcgtcaccatcgtcggttcgcgcggcaatttctgcaccggcagcttgattgcaccacgcgtggtcctgacggtcgcgcactgcgtgcaacccggcgccgactacaagatcgttgatcgcggtgctgacggccagccgcaattgttgaacgtgcgtacggtcgcgattcacccgaacttcaacatgcaggcgatgcaggcgcaccgcgccaccgccgacgtggcgctgctgcaactggaaattccactcaagggaaaatccacggtgacagtcggcatgccgacgattccaatccaggtcggcagccgcttcgtcatcgccggtatcggtgtcaccgttcgtggtgacggcaagagcggcggcatgacgcgcgttgccggcctcgttgcgaccgggcggcccggtacgctccaggttcgcctggtcgaccccgtaaccaacggtgttcgcgacggaattggcgcctgcaccggcgattccggcggcccggtattcgaggacaggccgggcggtcccgtgcttgtcggcctcatcagctggtccactgggccgaacggcacggctggttgcggcggattgaccggcgtgacgccgctgacgctctatcgcgagtggatcttgcaggccgcgcggagctggggtgcggcactgtga

SEQ ID NO: 928 - DNA, 159 bp, BradyrhizobiumColbertium
atgttcagaaacctgcttggccgtggcgtgactgcgaacagcgacattcattgttgcttctatgccttgcttgtttttgtggccgcccttgactgggcggcgcgtttcctccgcagcgggcatgatcacccgccgcgcttccgcttcaaaatgacatag

SEQ ID NO: 929 - DNA, 1503 bp, BradyrhizobiumColbertium
atgaatgtcgctgttcgcagtcacgccacggccaagcaggtttctgaacatttcgacgtgttgatcgtcggcgccggcatctccggcatcggcagcgcctatcatctcacgaagcagcttccgggaacgagcttcgtcatcctggaaacccaggcgacgttcgggggcacctggaccacgcatcgctatccaggcatccgctcggacagcgatctccataccttcggctatcgcttcaagccctgggtcggcccgccgatcgcgaccgccgaggagatcctcgcctacatgaacgaggtgatcgaggagaacgatctcgccaagcacattcgctacaagcacaagatcaattccgcgagctggtcgagcgagcagaacctctggaccatcgaggcggtgacgaccgacaccggcaagcccaggaccttcaccgccaacttcctctggatgtgccaaggctactatcgccattccgaaggttacacgccggaatggaagggcatggatcgcttcaagggccgcatcgtccatccgcagacctggccggatgatatcgacttgacgaacaagaaggtggtggtgatcggctcgggcgccacggcggcgacgctggtgccgaacatcgcggacaaatgcgcgcatgtcaccatgctgcagcgctcgccaacctacttccgtctcggccgcaacgccatcgagattgcggaagagctgcgccggcttcaggtcgatgaggcctggatccacgagatcgtgcggcggaagatcctgttcgagcaggatgcgttcacgaagctctgcgtatccaagcccgagcaggtcaagaaggagctgatcggccagatcagcgccgtcctgggtcccgattacgacgtcgagacgcacttcacgccgaaataccggccttggcggcagcgcatcgccttcgtgccggatgccgacctgttcaagggaatcgccagcggcaaggcctcggtcgtgaccgacgagatcgaatgtttcgtcgagaatggcatccagctcaaatcgggcaagctgctggaagccgatgtcgtcgtcaccgcgaccggtttcaatcttgcggcgctcggtgacatcgcgttcgagatcgacggaaaaccgctcgccttcggcgacaccgtcacctatcgcggcatgatgttcacgggcgtgcccaacatggtctgggtgttcggctacttccgtgccagctggaccctgcgcgtcgacctcgtcgccgatttcgtctgcaggctgctcggacacatgaaggccaaaggtgcgaagaaggtcgaggtccagctgcgccccgaggaccacaacatgccgatcctgccctggatcgatccggaaaacttcaatcccggctacatgatgcgcaacatggacctgttgcccaagcgcggcgacaagcccgagtggcaacacagccaggattactggaccgagaaggacgagattccgaagacggatctggacgacaaggcgttcgtctacgggtga

SEQ ID NO: 930 - DNA, 921 bp, BradyrhizobiumColbertium
atgaacattgagtcgaagaagcgcgacgtcgcgctcgttgtcgacgattccccggagacgctacggctgctcacagacgcgctcgacggcgccggcatgacggtcatggtggcgctcgacggtgccgccgcgatgcggatcatcgatcagatcacgccggacatcgtgctactcgatgccgtaatgcctggcatcgacggtttcgagacctgccgccggctcaagcgcgatgccggtcttgccaatgtccccgtgatcttcatgactggtcttgccgagaccgagcatatcgtgcgtggactggaggccggtggtgtcgactacgtgaccaagccgatcgtgatcgaggagatgctggcgcgcattcgcgtccatctcggcaatgcccggctgacccagagcgcacgcgccgcactcgacgtctccggccgatttctgttcgcggtcaaccgccagggccacgtgctctgggcgacgccgcaggctcagaagctgctgtccgatcatcacggcgcgcaagcggacgacttcgtgctgccgccggcgctgctgcaatggctcgagcaggccaaggccaagggcagcgcgaagtctccgggagcttcgttgcccgacaatccgcagcttcggctctactacatgggcgaaaccgcgccaaacgagttcctgctgcggctctcccgggaatccggcaccgcgctgccgcccgaattcacgagcgagctgggcctcaccacccgggagggcgaggtgctggcctggctcagcaagggcaagaccaaccgcgacatcgcgcaaattctgggcctcagcccgcgcacggtcgacaagcatctcgagcagatctacgccaagctcggcgtggaaaaccggacggctgcagcggcgattgcgacgaatgcgacgcggaggaattcgtga

SEQ ID NO: 931 - DNA, 3372 bp, BradyrhizobiumColbertium
gtggcagggcggcagcgaatagaccgcgtcaggcgccagtacaaccaatgggtcgccaaccagacgctggaagactacgcgctgcgcttcacggcgaagagcgcgcgccgctggtccgccgcccgggtcgccaacaccgcgctgggcgcgatctcgttcctggcgatggaggcgatcggaggcaccatcaccctgaactatggcgtcaccaatgcgaccgccgccatcctcgtggtctctctgatcatcttttgctgcggcgtgccgatcgcgtactatgccgccaaatgcggcatcgacatcgacctgctgacgcgaggggccggattcggctatatcggctcgaccgtcacctcgctgatctacgcgtcctttaccttcatcttcttcgccatcgaagccgtgattctcgcatccgcgctcgagatgtgcttcgggattccgcggccggtcggctatctcgtcagcgccgtcgtgatcataccgctggtggcctacggcatcacgctgatcagccgcttccaattgtggacgcagccgctgtgggtgatccttcacatcatcccgttcgcggctatcgcctggcataacccgaactcatttacggagtggcgcaagttctcgggcgaccacggcgacctcaacggacatttcgacctgttgctgttcggcgttgccgcctcggtcgtgttctcgctggtcgcgcaaatcggtgaacaggtggatttcctgcgcttcctgccgcgcgatcgccgcgcttcgagggtctcctggtggatcgcgctgatgagcgcaggaccgggctggatcgtacttggcgcgctgaagctcctggccggctcgtttctggccttcttcgcactcagccacggcgtgccgcccgaggaggccgccgagccggcgcacatgtatctcgaagcgttccgctatgtgctgtcgcagcccgagctcgcgctggcgttgaccggcacgttcgtgatcctgtcgcaagtcaagatcaacgtcacgaatgcctatgccggctcgatcgcctggtcgaatttcttctcgcgcctgacccacagccatcccggacgcgtggtctggctggtcttcaacgtcatcgtggcgctgctgctgatggagatcggcgtctacaaggcgctggagcaaactctggcgctctattcgaacgtcgcgatcgcctgggtcggcgcactggtcgccgacctcgtcgtcaacaagccgcttggattgcgaccacagcagatcgagttcaagcgcgcgcacctctacgacgtcaatccggtcggcgtcggcgcgatgacattggcgaccatcgtctccatcagcgcgttctacggcctgttcggacccaccgcgaaggcgctgtcggccttcatcgcacttgcggccgccttcttcgccgcgccgctgatcgcctgggcgacagacggcaggtactacattgcacgcaagccgaagcggagctggcagaatatcgaagcgatccagtgctgcatctgcgagcactcattcgagccggaggacatggcctcctgtccagcctatgcggggccgatctgctcgctctgctgttcgctggacgcgcgctgccacgacctttgcaagcctcacgcgaggttccaggcgcaggtgtctgaagcgctgggaaagctgatgccgcagccgatctacgcccggatcaactcgcaggtcggccattatatcggcgtgttcgtgatctcagccggcctggtcgcgctggtgctggggctgatctatctgcagacttcagcaagcgtgcatggcgagaatgcgctggtttccgacgtgctctggaaggtgttcttctcactcagcatcatcatcggcgtggttgcatggctgttcgtgctggcgcaacagagccgccgggccgcagaagccgagacgcggcgtcagaccgcgctgctgatccaggagatcgacgcgcacaagcgcacggatgcggagctccagcgggccaaggaggttgccgaatcggccaacctcgccaagagccggtacgtggtgggcctgagccacgagctgcgctcaccgctgaacgcgatcagcggctatgcccagctgctcgagcaggacacgacgcttggcgccaagccgcgcgaccaggtccgcgtcgtccgccgtagcgccgaccatctctccggcctgatcgacggcatcctagacatctccaagatcgaggcagggcggctgtatctgtcgcgcgacgaggtgcggctcagcgaatttctcgaccagctcgtcggcatgttccgcctccaggccgcagccaagggcatcgacttcgtgttcaggcggccgccgcatctgccgcgcgtggtctatgccgacgagaagcggctgcgtcaggtgctgatcaacctgctctcgaacgccatcaagttcacgcagtcgggcagcgtgcaattcgtggtgcactaccgcagtccggtcgcagaattcgaggtaatcgacaccggccccggcatccggggcgacgatctcgaacgcatcttcgcgcccttcgaacgcggcgagattggcgtctcgcagccgcagaccggcaccggccttggactaaccatcagccggctgctcgccggcgtgatgggcggtgacatcaaggtgacgagcaccgtcggcgctggctcgacgttcaaggtcaagatcctgctctccgaggtcaccaatccccagcgcatcgcgccggtggaggcgccggtctccggctatcacggcgcccgcaagaccatcctcgtcaccgacgatgaccccgtgcaccgcgacctcctgcgcgaggtgctgacgccgctcggcttcatcctgctcagcgcgcccgatggtgcgggctgtcttgcgctggcgcagcattgccgccccgatctgttcctgctcgacatctcgatgccaaccatggacggctgggccgttgccgaggcgttgcgcgagagcggccatcaccaggcgcgcatcctgatggtgtcggcaagtgcgttggaggcccacggagcgccgttggcgcagcccttccacgacggctacctgatgaagccgatcgacatcccacgcctcctggagacgatccgccagctcctcaagattgagtggcaatacggttcgtatgaggttccgatgccgctatggcgtgccgagaccgggtcaaagccgccggcgcggcacatcgaggcgctgatcgggctcggtcagctcggctatgtcaagggcatccaattgaagctggacgagatcggcaccgagcatccggagcatgccgacttcgtcgcacagatgcgctcgctggtcgatcgcttcgatctcgatcgatatatggctacattgaagacgttgcacgcgcatgaacattga

SEQ ID NO: 932 - DNA, 1266 bp, BradyrhizobiumColbertium
gtgctcatgtcagacgaagcaaacaaaggcccgttgtcgccgctccggcgcaagttgctgatggggatggcggccgtgccggccatcacgatgctgccgcgggcgtcctttgcacaggcgccggcgacctcggcggtcaacaccaccggccttgccgtcaccgacaccgaggtcacggtcggcatcctgcattcggcgaccggcaccatggcgatctccgagaccggctcgatccaggccgagaagctcgcgatcgagcagatcaatgccgcgggcggcgtgctcggccgcaagatcaagttcatccaggaggacggcgcttcggactggccgaccttcgccgagaaggcgaaaaagctcctcgtcaacgacaaggtcgcggcgatcatgggctgctggacctcggcctcccgcaaggcggtgctgccggtcgtcgagcaatataacggcatgctctactacccgaccttctacgaaggcctcgagcaatccaagaacgtgatctacaccggccaggaggcgacccagcaaattctggcgggtctcaactggatcgccaaggagaagggcgccaagtccttcttcttcatcggctcggactacatctggccgcgcacctccaacaagatcgcccgcaagcatgtcgagaacgtgctcaagggcaaggtcgtcggcgaggaatattatgcgctcggctcgacgcagttcaactccgtcatcaacaagatcaagctgaccaagccggacgtgatcttcaccgacgtcgtcggcggctccaacgtcgcgttctacaagcagctcaaggcggccggcatcgacctttcgaagcagccgctgctcacgatctcggtgacagaggacgagatcgacggtatcggcggcgagaacatcgcaggcgcgtatgcctgcatgaagtacttccagtcgctcgacaacccgaacaacaaggctttcgtctcggcgttcaagaagatgtggggcgagaagaccgtgatcggagatgtcacccaggctgcgtatctcggcccgtggctgtggaagctcaccgtcgagaaagccggctccttcgacgtggacaagatcgccgccgcctcgccgggcgtcgagttcaagggggcgccggaaggctatgtgcgcatccacgagaaccatcacctctggtcgaagacgcgggttggccgcgccaagctcgatggccagttcgagctgatctacgagaccgccgacctggtcgagccggatccgttcccgaagggctaccagtaa

SEQ ID NO: 933 - DNA, 927 bp, BradyrhizobiumColbertium
atgttcggcgactactcgcttggtgatcttggctcgatcttcgtcatgcagggctttgccgggctgatcctgttctcggtctacgtgctgatggcgctcggtctcgcgatcatcttcggccagatgggcgtcatcaacatggcccatggcgagttcatgatcctcggggcctacgtcacctggatgacttcgaatttcttccagtcctatttgccgagcctgttcagcggctacttcttcctcgcgatgattctggccttcttcgcctccggcgcgctggggatgttggtggagtgggtgctgatacggcacctttacaagcgcccgctcgatacgctgctggccacctggggtctcagcctgatgctgcagcaggcctatcgctccgtgttcggcgcgcgcgaggtcggcgtcgagctgccgcagtggatgctcggctcgctgcgcgtcaccgacagcatcgaggtgcccatcaacggcatattcgtgatgggcctcaccgtgctgattaccatttccgtcgcctacgttctctacatgtcgcgctggggccgccaggtgcgcgcggtcgtgcaaaaccgcatcatggccggcgcggtcggcatcaacaccgagaaggtcgatcgctacactttcgggctcggctgcggcatcgcgggcgtcgccggcagcgccttcaccatgatcggctcgaccgggccgacgtcgggacagctctacatcgtggacacattcctggtcgtcgtgttcggcggcgccgccagcctgctcggcaccatcgcctccgccttctcgatctcgcagacgcaatcgaccctcgaattctttatgtcgggctcgatggccaaggtgctcacgctgctcgccgtcgtcggcatcctgatgctgcggccgcagggtctcttcgccctcaaagtccgcaaataa

SEQ ID NO: 934 - DNA, 1143 bp, BradyrhizobiumColbertium
atgatcatcaactcacgcttcttcaatcgatccgagctcatgggcttcattgccctggcggtggtgctgttcgtgatcctgccgctgaccctcgacgtgttccgcctcaatctggtcgcgaaatacctgacctacgccttcgtcgcgatcggcctcgtgctgtgctggggctatggcggcatcttgagcctggggcagggcgtgttcttcggcctcggcggctattgcatggcgatgttcctcaagctcgaggcctccagcgtcgagaacaccaagatccagtcgacgcccggcatccccgatttcatggactggaatcagatcacggcactgcccttcttctggcagccgtttcacagcctcaccttcaccatcctcgccatcgtcctggtacctggcctgttcgccctgatcatcggcaccgcgatgttcaagcgtcgcgtcggcggcacctatttcgcgatcatcacccaggccgtcgccgccattctaaccatcctgatcgtcggtcagcagggctataccggcggcatcaacggcatgaccgacctgcgcacgctcaagggttgggacatccggcccgaccatgccaagatcatcctctacttcgtcgaggtggtgctgctgttcgcctgcatcggcatcgcgcagttcatccgcctgaccaagcttggccgcatcctggtcgccatgcgcgagcaggaagaccgtgtccgcttctccggctatagcgtggccaacttcaagatcttcgctttctgcatggccgcggtcttcgccgcgatcggcggtgccatgttcgcgctcaatgtcggtttcatgtcgccatccttcgtcggcatcgtgccgtcgatcgagatggtgatctacaccgcggtcggcggacggatgtcgatcttcggcgcgatatggggggcgatcctggtcaacttcgccaagaccagcctctctgaatccttcccgcagctctggctgttcggccttggcgcgctgttcatcgcggtcgtgctcgccttcccgaacggcttgtccgggctgtgggcagactacgtgcagccccgcatcgaccggctgttcgcctcgcgcaaggcgaaggcgggctggaacggcaattcggtcgccgacagcgcaccggcagagtga

SEQ ID NO: 935 - DNA, 756 bp, BradyrhizobiumColbertium
atgctcgtcggacatcagcccaaggatttcctgctcgcggtctccggactgaccgtctcgttcgacgggttcaaggcggtcaacgatctctccttctacgtcgaggagaacgagatccgggtcatcatcggccccaatggcgccggcaagaccacggtgctcgacctgatctgcggcaagaccaaggcgacctcgggctcgatccagtttcgtggcaaggagctcacgaagatgaaggagaacgagatcgtgcaaaccggcgtcggacgcaagttccagacgccgtcggtgttcgaggacctcaccgtgttcgagaacctcgagatctcgttcccgcgcggtcgcaccgtgttcggttcgctgacctttcagcgcgatcagttggtgaaggaccgggtcgaggaggtcgccgagatgatcttcctcaaggacaggctcaacacctatgccgacgagctcagccatggccagaagcagtggctcgagatcggcatgctgctgatccaggatccggacttgctgatgctcgacgagcccgtcgccggcatgagcgtgtccgaacgcgccaagaccgccgagctgctcaaccgcatcatcaagaaccgttcggtgctggtgatcgagcacgacatgaaattcgtcgaggatatcgcgcacaaggtcaccgtgctgcaccagggccagatcctttcggaggggacgatggagaaggtcaagaatgaccccaaggtcgtcgaagtctatctggggcattga

SEQ ID NO: 936 - DNA, 690 bp, BradyrhizobiumColbertium
atgctggcaatttccgatctccacgtcgcctacggccagagcgaggtgctgcacgggctcaatgtcaaggtcgcgcccaacgagatcgtcgcgatcatgggccgcaacggcatgggcaagaccacgctgatgaagtcgctgatgggcattctgcccgcgaagagcggctcggtgagcatggatggcgccgagctcggcaatctcaagagctacgagcgcgtcgccaagggcctcgcctatgtgccgcagggtcgcatgatcttctccaccatgacggtgaaggagaacatcgagacaggcctcgtcgtgtccggtggatcggaggtgccggacgatatctacgaactgttcccggtgctgctggagatgaaaggccgccgcggcggcaatctctccggcggtcagcagcaacagctcgccattgcccgcgcactcgcgaccaagccgaaggtgctgctgctggacgagccgaccgaaggcatccagccctccatcatcaaggagatggcgcgcaccttgaagcgcatccgcgacgagaagggtctttcgatcgtcgtgtccgagcaggtgctgagctttgcgctcgatatcgccgaccgcgtgctggtgatcgagaacggcgagatcgtgcgcgacgatccgcgcgacgccgtcgatgccgcacaggtctcgaaatatctgtccgtctaa

SEQ ID NO: 937 - DNA, 1230 bp, BradyrhizobiumColbertium
atgccagagacactgatcaaggtcgatctcaccaagtcggcctatgaaaacgacatggtgcacaaccgctggcaccccgacattccgatcgtggcgtgggtcaatcctggcgacgatttcatcatcgagacctatgactggaccggcggcttcatcaagaacaacgattccgccgacgacgtccgcgacattgatctgtcgatcgtgcacttcctctcgggtccgatcggcgtcaagggtgccgagcccggcgaccttcttgtcgtcgatctgctcgatgtcggcccgctcaaggagagcctgtgggggttcaacggcttcttctccaagcagaacggcggcggcttcctgaccgatcatttcccgctggcgcagaagtcgatctgggacatcaagggtctctatacctcctcccgccacgtgcccggcgtcaattttgccggcttgatccatcccggcctgatcggctgtctgcccgatccgaagatgctggagacctggaacaagcgcgaggccgaactgatctcgaccaatccgacccgcgtgcctggtctggccaatccgcccttcgcggcaaccgcccatggcggccgcgccaagggagacgtgaaggccaagatcggcgccgaaggtgcgcgcaccgtcccgccgcgcgagcatggcggcaattgcgacatcaaggacctctcgcgcggctcgaagatctacttcccggtctacgtgcccggcgccggcctctcgatgggcgatttgcacttcagccagggcgacggcgagatcaccttctgtggtgcgatcgagatggccggctggctgcacctgaaggtcgaggtgatcaaggatggcatgtcgaaatacggcatcaagaatccgatcttcaagccgtcgccgatcacgccgaactacaaggattatctcatcttcgaaggcatctcggtcgacgaggccggcaagcagcattacctcgacgtccatatcgcctatcgccaggcctgtctcaacgccatcgagtatctgaagaagttcggctattccggcgcccaggcctattcgatcctcggtactgcgccgtgccagggccacatttccggcgtcgtcgacgtgcccaacgcctgcgccacgctgtggctgccgacggagatattcgacttcgacgtcatgccgtcggcggcgggcccgatcaagcacatcaccggcgacatccagatgccgatctctccggacaagtaa

SEQ ID NO: 938 - DNA, 378 bp, BradyrhizobiumColbertium
atgccagtctacgaatatctctgtgacgattgcggacctttcaaggacctgcgtccgatggcggagtgcgacgatccgcaagcctgcccgcattgcgagacgctggcgccacgggtgatcctgaccgcaccgaatttcttctgcatgccggccgacaggcgcaaggcgcacgcggtcaacgagcgcagcacgcacgcaccgcagacgctggcacaatacaaggcctcgcatggccccggttgcggctgctgctcgacgggcaagaccgtcaaggacaagggcgcgacggacaggaaaaagcccacgcggttggtgaccaagaccaggagcggcgccaagggttttccgacggcgcggccctggatgatcagccactaa

SEQ ID NO: 939 - DNA, 1041 bp, BradyrhizobiumColbertium
atgcttcacggcgacatttccagcagcaatgacacggtcggcgtcgcggtggtgaactacaagatgccccggctgcataccaaggccgaggtgctcgagaacgcccgcaagatcgccgacatgatcgtgggcatgaaggtcggcctgcccggcatggatctcgtgattttcccggaatattccacgcaaggcatcatgtacgactccaaggagatgtacgagacggcgtccatggtgccgggcgaggaaaccgcgattttcgccgaggcctgccgcaaggcgaaagtgtggggcgtgttctcgctcaccggtgaacgccacgaggagcatccgcacaaggcgccctacaacactctcatcctgatgaacgacaagggtgagatcgtgcagaagtaccgcaagatcatgccctgggtcccgatcgagggctggtatcccggcaattgcacctatgtctcggaggggccaaagggtctcaaggtcagcctgatcatctgcgacgacggcaattatccggaaatctggcgcgactgcgccatgaagggcgccgaactgatcgtgcgttgccagggctacatgtatccggccaaggagcagcaggtcatgatctccaaggcgatggcgtgggccaacaacgtctatgtcgcggtcgccaatgcggccggcttcgacggcgtctattcctatttcggccattccgccatcatcggcttcgacggccgcacgctcggcgagtgcggcgaggaggattacggcatccagtacgcccagctctccaagcatctgatccgggatgcgcgccgcaacggtcagtcccagaatcatctctacaagctggtccaccgcggctacaccggcatgatcaattccggtgacagtccgcgtggcgtcgcggcgtgcccgtatgacttctacaagaactggatcaaggaccccgagggcacgcgggacatggtcgaggcgatgacccgctcgacaccggggaccgacgagtgtccgatcgatggcattccgaacggagcggctccaagcaattactga

SEQ ID NO: 940 - DNA, 801 bp, BradyrhizobiumColbertium
gtgatcggaacggcgatgctggcggcgatcgccgtggcattcggcggcctgctcggcgtgcagaaatggcgcaccatccagagccgcagccaattgcgcgtggtgttcgaaggcggttccgcgagcggactgcggcgcggcgggccggtcaatttcgacggtgtaccggtcggccaaatccagtcgatcaagctggatagtccccgcaggatcgtggcgctggtgatgctcgacaacagcgcgccgatccgcaaggacaccgtcgcaggcatcgagttccagggtctcaccggcatcgccgcgatctcgctgatcggcggcgccccctccgcaccgccggtgccgcttgacgcggacggcatccccatattgaccgccgatctcagcgacgccgagtccatcgtggagacgctgcacaatgttgatcgcaccatcgtgagcaacgcccccgcgatcaaggagggactgcacacgttcgagagctataccgccgacctcaggagcaagggcggagaaatcgactccgtcatggccaaggtcgacagcgccttcgcgggcttcgacaaggcggtcgcgaagatcgagggcgcggtcccaggcttcgtcgatggcaaggccgacgaactgttcgagaagatcaaggaactgcatgagcttgccggcaccatgaagaagaagtcggcgggctacatcgaggacatccgccgctcgctgctcgatgtcagcgagaccgccaacaagatggcggggacccccgtgccgccgcgaccaccgcgcaggcctacggagcagaggcgctag

SEQ ID NO: 941 - DNA, 2217 bp, BradyrhizobiumColbertium
atggaagcccaggtgtctgctgcgtccgcgttccatccatggtctccgccgcccgatgccagtgacatcgtcaagggcatccacgccatgctgcacccgcgcaacatcgtgctggtaggtgcgaccgacaagcccggcaactacgccgagcgcatctggaacaatctggtcaaatacggatttgagggcggtctctacccggtcaacgccaagcgcgaagccatctggggcgtgccctgctacaaggactttgcgagcctacccgaaaagcccgatcacgtcctggtgctggtgcctgcacgtttcgccgtgcaggtaattcgcgacgctgccgcggccggcgctcgttctgccaccatcgttacctcaggcttcagcgaactgcaggatgaggaaagccaaaagcttgccgccgaattgcaggcggccgtgcgcgagacgggtcttgccgtcaccgggccgaattgcctcggcaatctgagcgccggcgaaaagctcttcaccaatatcgacgatcgtatcgtcaccatggaacagggcgcggtggcgatcgccggacaatccggcgccatcgtcatggcgatccgtcaggcgctcgaggatcgcggcgtcggtgtcggctacatggtgacgactggcaacgaggccgggctcgagacgccggacctgatgcgctatttcgccgaagacccgagcatcaaggtgatcgtcgtctacctcgaaggcgtgcggaacacgaaggcttttcgcgaagcctgcaaggcggcgcgcgccgcgagcaagccggtgatcgccctcaagctcggcgcgtccgagggcggccgcgccgcggcgatggcgcataccggcgcgctcgcgggctcgatagagacgttcgacgcgattgccacgcgcgagggcgtgatccgggtcgccgggctcgacgaactgatcgagacgaccgaatgcttcgttcacgcgaccgtgcccaaaggcgaccggctcgccgccgtcacgctctccggcggcaagcgcggcatgctgatcgacgccttctacgcagcaggcttgaacttcgcgccgctgagcgcgcatgtcagctccgagctggcgaagatgctcggtccgggctcgatcgtcggcaatccgctcgacgccggctttgccgcagtcgtcgatccctctgtctatatgaagtcgatcaagctgatgatcgacgaccccgatatcgacatcgtcatcgtcgatgcggagctgccgaaagcgcagcacgagctgcgcgagcgcaatttgcgtatcgtcaacgatatggcgagcaaggccggaaagcccgtgatctatatcagcgcgatgtcgatcggtttcactgaattcactaaagaattgcgcaaatcgctgccgcatctcgcggtcatgcagggcctcgaccgcgcggtgaccgcgatcaagtcgctgctcgactatgcgaaactgcgcaaggaggtgcccgacatcgtctcgagctcgaagcccgccgcgcgcgccgtgctggagaagaccttgaggtcggcgaccggcgccgcgctcgacgaggtcgcctcgaagaagctcctcaaggcctatggcatcccgatttcgaaggaggcgatcgcacagactgcggcggaggccgtgaaaatcgccaggcagatcggattcccggtcgtggcaaaggtcgtcagcgcagagattctgcacaagtccgacatcggcggcgtggtcctgaatatcaacagcgcggcggaggtgaaaaaggcgttcgccgacatcacggcgcgggtagcgaagctcaagggcaagccgaggctcgacggcattctgatcgcgcagcaggtcaaggcggagctggagctcgtgatcggcgcctcgctcgacgccgagatggggcccgtcgtgctgttcgggaccggcggcatcgacatcgaactgatgaaggacgtcgcactcgccggcgcgcccctggatgaagccgaggcgcagctcctgatcggccgcaccaaggccggcatcaagatgcgcggctatcgcggcaagccggccttgcacgaagcctcggcgctaaaggcgctggtcggcctgtccaacctgatcgcagacgccggcgaccggatcgcctcggtcgacatcaacccgtttctcatcaacaccaggacgggcgtggcggtcgatgccctgatcgtcctcaacaacgccgcggcgaggcacgcggccggacattga

SEQ ID NO: 942 - DNA, 612 bp, BradyrhizobiumColbertium
atgcgaagcatcgatcccggaatgaccaccaaagagaagcagatgccccgcttcatcttccccctcgtgctggccttgatcggcctcctcctgctcggcgacggcgcttacatccacgccaaggcctggctggcgcaggtgttgctggagcgggcgttcgagcggagcgttgcgacgggagaggccgtcaagccatggtcgtgggctgacacctggccggtcgcgcggatcgaggtcaagcggatcggcgccagcgccatcgtgctggaaggcaccagcggacaggccctcgcttttggacccggccacgtccaccaaacggccgatgccggcgaacgcgggattgccgtctatgcagcccatcgtgacactcatttccgcttcctgcggaacgttgccattggcgacgtcatcgacgtcacacgtcgcgacggtcaacattttcgctatcgcgcggacgcctccgccgtggtccgtttcgatgcatcgggcatcgaagccacgacgcagggctacgaactcattctcgcgacctgctggccgttcgacgccgtcacccccggtcccgagcgctacattctgcatgcaacattgattggagccgataggtag

SEQ ID NO: 943 - DNA, 2262 bp, BradyrhizobiumColbertium
atggacacctacgacacggccgatagcgacgagcaccccttgttgagtcgtctcatcaaggtcggattgttcctcctcgcgcaaggcgttgcggtgatgctggtcgccttcatcgccctgctggtgagcttcgggacaagtttgtcggcaacgaccgaacaggccagtctgctccagcccggcgatgcaaggtctggtaccctgctcctgaaggaagacggcgcgtatgccgaagcagtccgcctcggcaccgacgttgacatcacggtgtccggcccgacgctgcgcgcccgtgtcacgcaggtcttccgcaacacgagcaaggactgggtcgaggcgacttacgtctatccgctcgcgaccggcggcgccgtcgatacgctgaagatggtggtcggcgaccgcgtcatcatcggcaacatcaaggagcggcagcaggcgcgcgtgatctacgaggaggcgcgccgcaccggccggaaggccgcccttaccgagcaggaacgaccgaacatcttcaccaactcggtggccaatatcgggcctggcgaaaccgtgctggttcagatcgagtaccaggagccggtgcatcaatccggcagggaatattcgttgcgcctgccgctcgtggtcggaccgcgctacaatccggcaccgatcgtgcagagcgtcgacttccgcagggacggctccggctggggcgcagcgacgtcagatccggttccggatcgtgagcgtatttcgccggaggtgctggatcccgcaaaacatgcgccggtcaatccgaccagcatcaccgtgcgcctgaaggctggcttcccactcggcgatatcaagagccaccatcataacgtcagggtcgagagtccggacagcgctacgcgcatcgtcacgctttccgacggcgcagtccccgccgaccgcgactttgaactgacctggaaaccggccgcggagaaggcgccttcggtcggcctgttccacgagcggatcggcgatgccgactacctgctcgccttcgtcaccccgcctggcgcggaccaggcggcgcgcaagccgccggcgcgcgaggtggtgttcgtgatcgacaattcgggctcgatgggcggcacgtccatcgttcaggccaaagcgagcctcctttatgctctcggtcgcctgcagccgaatgaccgcttcaacgtcatccgcttcgacgacaccatggacgtgctgtttccggcttccgtgccggcggatgccgcgcatgtcggtgaggcgacctccttcgtcagcgccttgcaggcgcggggcggcaccgagatggtgccggcaatgcgcgcggccctcaccgacaagctgggcggcaccgacatggttcgtcagatcgtgttcctgacagacggcgcgatcggcaacgagcagcaattgttcgagacgatcacggcgatgcgcggccgctcgcgcgtgttcatggtcggcatcggttccgcgcccaacacctatctgatgacacgcgccgccgagctcggccgcggtgccttcacccacatcggctccgtcgagcaggtggaggagcgcatgcgcggtctgttcgccaagctggagaacccggccgtgaccggcctcaccgcaaggttctccgaagccaccgccgatgtcactcccgcgatcattcccgacgtctatcgcgacgagccgttggtgctggcggcgaaactcgacaagctcgcaggctcgctcgagatcaagggccgcgtcggcgaccgcccctggacggtaacgttgccgctgcaaaacgccgccgaaggcaagggcctctccaagctctgggccaggcgcaagatcgctgatgcggaagtggcgcgcacgctgcgcgagacgtcgccggagaacgccgacaagacgatcctggcgctggcgctcgatcaccagatcgtcacgcggctcaccagcctcgttgcggtcgacaagacgccgagccggcccgaaggcgcgccgctcaagctcgaagaattgccgatcaacctgccggcgggctgggacttcgagaagatcttcggcgaacggccgcaggtcccggcgcaattgcgcgaacgccacgccgatgcgggcactccgccagcgctgaggcgcccggcacccgccgcacccgatgcgatccgcctgcccaaaacctcaactccggccgagctcaggatgttcgcaggcgcaatcctgatcctgctcgccttgaccctgttcgtgttcaaccggcgtcggaccttgctcaccgactccgcttga

SEQ ID NO: 944 - DNA, 771 bp, BradyrhizobiumColbertium
atgcagacgcaggataaagtcaccgacaagcagcttacggacgagcaaagccgcgagattgccgagaccattcgcgaggagctcgccagacggcggatctcccggcaggcgctggccgagcaggccaagctcagcctgtcgacgctggaaaaggtgcttggcggccgacggccgttcacgctcgcgaccacggtccggctggagcaggcactcggcgtctccctgcgcagaagcgcagtcatggtgacgcctctggccgcgagcgatgtcgcgcccgacagcctcggctcctatgcgcatcgcgcggtcacctggctcgaggacgtctatgtcaccctgcggccctcgttcggcgacaaggatgcgatctttgcctatcgcaccgagatcgtgtgggagccgaaggtctcgtcgctggtctttcgggagggcgatcggaccgatgccgcctacgagcataccggcgaagtcgccgttccccatcagtccggcttcatctacctcgtcatcatcaagcacggccagcaccgcgtgatcacggtgtcgcggccgacggtttccggcgagatgtacggcatcatctcgacgctccgcgccgggcccggttcgcagctcacgccgatcgctgcgcccattgcctatgtgccgctcaggaacatcccgaacccgtccttggggcgcgtcgcgcccgacgacggcaactacgccctgtatcgaaagcatttgcgtcggacggtggaagagccctttgcgctcttcctgccggcatag

SEQ ID NO: 945 - DNA, 1224 bp, BradyrhizobiumColbertium
atgaagaacaagaaaatcgccctgctcgcggcggcaacggccctgaccttgctctcggctcaaagcgcctttgcgcagaagaagtacgacaccggcgccagcgacaccgagatcaagatcggcaatgtcgaagcctattccggtccggcttccgcctacggcatcatcggcaagaccgaggaagcctatttcaagatgatcaatgaccagggcggcatcaacgggcgcaagatcaactggatctcctatgatgacggctattcgccgcccaagaccgtggagcaggtgcgcaagctgatcgagagcgacgaggtatttctggtcttcaacgcgctgggcacgccgacacagacggccgtgcagaaatatcacaacgcgaagaaagtgccgcagctcttcctggccacgggtgccagcaaatggaacgacccgaagggctttccctggaccatgggcttccagccaagctaccgggtcgaggcgcggatcttcgccaagtacatcctccaggccaagcccgatgccaaggtcgcgatcttctatgccaatgacgatttcggcaaggattacgtcgccggcatcaaggagatctttggcgagaaggcctcctcgctgatcgtcgcggaggagagctatgagaccaccgagccgtcgatcgattcccacatcgtcaagctgaagggcaccggcgccaacgtgttcgtcaacatctcgacgccgaaatttgccgcgcaggcgatcaagaagatcgccgagctcgaatggaggcctatgcacgtgatgacggacgtctcgatctcgatcggcgcagtgatgaagcctgccgggctcgacgcgtcggaaggcgtgctgtcggcgagctatctgaaggacgcatcggacccgcaatggaaggacgacgagggcatgaagaagtttctcgccttcgtcgacaagtacatgccgggcgccaacgtcgccgacaccaacatcgtctacggctatgccgccgcgcagaccctggtccagaccttgaagcagtgcggcgacaacctgacgcgggagaacgtgatgaagcaggccgcgagcctgaaggactttgcgcccgacacgttgattccaggtatcaagatcaacaccggtcccaacgacttcgcgccgatcgagcagctcaagatgatccgcttcaaggccggccagtgggagctgttcggtgatatcatcagcgcggaaacgggcggctag

SEQ ID NO: 946 - DNA, 1563 bp, BradyrhizobiumColbertium
atggaggaattcttggccgttcgttactacgattggatcgcccatcatggccgccgcacgccgaacaaggtcgcggtgatcgatctcgcgagcgatcgccgcttcacctattctcagctggatgcccgcgtctcgcgcctggcctcgtttctgcgccaccggctcggcgtctcgcgcggcgatcgcgtcgcagtgctggcgttgaacacgaccgatacgctcgaggtgcaattcgcgtgcgggcggctaggcgccatcttcgtgccgctgaacacccgccttaccgttcccgagctccagttcatcacgtccgactgcgcgccgaaggtgatgatccatgacgccgacctggccgagaccgcgctcgccgtcgcaaagctctgcaacgttccgaccagcctgctgctcggcccggggggcgcctacgaggccggaatcgccgccgcaaacccgctcgaccgagccgaggaagtcacgctcgatgacgtctcgaccgtcatgtacacgtccggcacgaccgggcatcccaagggcgcgaccatcacccatggcatgaccttctggaattgcgtcaatctcggcggtcccgcctgcatcggccccgcctcggtgctgctcaccgtgctgccgctgttccacaccggcgggctcaactgctataccaatcccgtgctgcatgccggcggcaccgtgatgatcatgcgcgccttcgatcccggcaccgcactcggcctgatcaacgatcccgcgcagggcatcaacgtgttcttcggcgtgcccgcgatctaccagttcatggcgcagcatccggcattcgcgaccaccgatctcagccggctcattgtcggcggtgtcggcggcgcaccaatgccggtaccgctgctgaaagtatgggaggcgcgcggtgtcgcgctacagcagggctacggcatgaccgagacctcaccggccgtgctggtgctcgaccgcgaggacgcggcgcgcaaggccggctccgccggcaagccggtgctgcacaccgaggtgcgtatcgtccgccccgacggcagcgatgccgatgtcggcgaactcggcgagctctgggtcaagggccccaacatcacgcccggctattggaacaggccggaggcgaacaagacctccttcaccgacggctggctgcatacgggtgacgccacgcgcgtggacgaagaaggcttctactacatcgtcgatcgctggaaggacatgtacatttccggcggcgagaacgtctacccggccgaggtcgagaacgtcctgcaccagctcaatgccatcgccgaggctgccgtgatcggcatccctgatgctcagtggggcgaggtgggccttgccatcgtcgccgtcaagccaggacagaagctgacggagggcgaggttttcgcccattgcgcggccaatctcgcgcgtttcaaatgcccgcgccaaatccgcttcgtcgatgcgctgccgcgcaacgccaccggcaagatccacaaacccaccttgcgcaaggagttctcggtcgcctcagagatcgacaagaaagtcgccaacgcctga

SEQ ID NO: 947 - DNA, 1137 bp, BradyrhizobiumColbertium
atgaagagcccgttctataccgccgagcatgacgccttccgcgacgtcatgcgacgtttcgtcgagaaggagatcaccccgttcgctcatgaatgggacgaggccggtgaattcccgcgcgcgctctatcgcaaggccgccgagatcggcctcttgggactcggctttcccgaggaatatggcgggattgccgccgaccagttcatgaagatcgttgcgagccaagagctcgcacgggccggtgccggcggcgtcagtgccagcctgatgagccacaccatcggctcgccgccgatcgcccgggcagcccgccccgcggtcaaggcacgggtgttgccgcaaattcttgcaggcgagaagatctccgcgctcgcgatcaccgagccgggtggcggctccgacgtcgcgaacctgagcacccgggcgcggcgcgacggcgatcactacgtcgtgagcggcgaaaagaccttcatcacctcggggatgcgcgccgactatctgaccgttgcggtgcgcaccggcggcgagggcgctggcggcgtcagcctgctcctgatcgagggcaacacgcccggcctgtccaggaccaagctcaagaagatgggctggtgggcctccgacaccgcgacgctgcatttcgacgagtgccgcgtgccggccgaaaacctcatcggcgaggaggggcagggcttcaagatcatcatgcagaacttcaacagcgagcgcatgggcatggcggcgagttgcaccgctttcgcccgcgtctgcctcgatgaggcgatcgcttacgcaaaggagcgcaagaccttcggcaagccgctggcgcagcaccaggtcatcaggcacaagatcgtcgacatggcgcagaaggttgcggcctcgcaagcgatgctggagatgctggcctggcggcttgagcagggcgaaagcccggtcgcggagatctgcatgatgaagaaccaggcgacgcagaccatggccttctgcgcctccgaggcggtgcagatcttcggcggtgccggcttcatgcgcggcatcaaggccgagcgcatctaccgcgaggtcaaggtcaatgccatcggcggcggcaccgaggagatcatgaaggatctggcgtcgcggcagatggggctgtga

SEQ ID NO: 948 - DNA, 1167 bp, BradyrhizobiumColbertium
atgctattcaaagctgaccacgacgatatccgccgcagcctgcaaaagttcatcgcgaacgagatcaatcctcatgtcgatgaatgggagaaggccgacatcttcccggcgcatgagctgttcaagaaaatgggcaatctcggcttcctcgggctgaacaagcccgcggagttcggcggatcgggcctcgactattcctatgcgctgatgatggcggaggagcttggcgcgattacctgcggcggcgtgccgatggcgatcggggtccagaccgacatggcgacgcccgcgctggcgcggttcggctcggatgaggtgcggcgcgagtttctggcgccctcgattgccggcgactacgtggcctgcatcggcgtctccgagccaggtgcaggctccgacgtcgcctcgatcaagacccaggcgcgatcggatggcgacgattacgtcatcaacggcggcaagatgtggatcaccaacggcacccaggccgactggatctgcctgctcgcgaataccggcgacgggccggttcatcgcaacaagtcgctgatctgcgttcccatgaagagcaagggcgtcaccgtggcgcggaagctcgacaagatgggcatgcgctcctccgacaccgcgcagatattctttgacaacgtccgcgtgcccaagtgcaaccggatcggcgaggaaggcaagggttttacctaccagatgatccagttccaggaggagcggctgtggggcgcggccgcctgtctcaaggcgcatgagtacatcatcaacgaaaccatcgagtacacccgcaatcgcaaggctttcggccagagcattctcgacaaccaggtcgtgcacttcaagctcgcggagatgcagaccgaggtcgagctgctgcgtgcgctgatctatcgtgcgggcgagcagctggtcgcaggcgaggacgtgaccaggctcgccaccatggccaagctgaaggccggccgactcggccgcgagctcaccgacgcctgcttgcaatattggggcggaatgggctttaccaacgagacgccggtcagtcgggcctatcgcgacagccgcctgacctcgatcggcggtggcgccgacgaggtcatgctgatggttctatgcaagatgatgggcacgctgcccggcagcaaagggaaggcctcatga

SEQ ID NO: 949 - DNA, 657 bp, BradyrhizobiumColbertium
atgatcacgctctatcactgcgacgcggcgcgctcgtttcgtccgctctggatgctggaagagatggggctgccgtatgaactgaagatgctgcccttcccgccgcgggtgtttgccaaggaatatcttgcgctcaatccgctcggcaccattcccttcatggtcgacggcgagaccaaaatgacggagtcctccggcatctgccattatctcggcatcaaatacggcccgacccccttgatggtcggtcccgaagatcccgcctatggcgctttcctgaactggatgtatttcagcgacgctacgttaacctttccgcaaacgctggtgctccgatacacccagctcgagccggaggagcgccgcaacccgcaggtcgccggcgactacgccaaatggttcctgggccggttgcgtgcggtggaggcagcgacggcaaatgccgaaacattgtgcgggggccgcttcaccgccgccgacattgtgatcggttatgcactccggcttgccgagaacatcggccttgccaaggattttgggccaaatgtcgcagcctattgggctcgtctgcagcagcgtgacggatttaagcgtgcagttgccgcggaacagaaggctggcgccgagcagaatgttgcgccgagggtgagggcgtaa

SEQ ID NO: 950 - DNA, 801 bp, BradyrhizobiumColbertium
atggaagataaaggtcgcgaatccgaccatctgatgctgatcacgccggagcgggtattctatgccggcctgctcggtcgcccccgcaagcgaaccccgggctgctgccacgtctatgttgcggtgaagggcagcctgcacctgacgatcgacgacctccatctctcggacgagttgatcgtgaccctgccgaaccagcggcacaccatcgccagcgactatcgcaccgtcatcagcgtaaccctggagccggagagcatgccggatggcgtgatcgaggctttggccgagcggctgcgcgggccggacaaggcggcctatgcccgcaagatcctcgccgcctatgcgctgctgcgtcagcgccgctatggcgacatcaccacagctgaattcgacgaaatgtgctttggcgaggcgctgccgcgccgcgtgctcgatccgcgcgtgatgcgtgccgttgctcgcatcgagcgcttctccggcgagccggtgacggcggacacctgtgccgctgaagctggcctctccgcctcgcgcttcctgcacctgttcaaggaagagaccggcatctcgttccggtccttccgcgcctggaagcgcgcgcggcatttgctgcacttcgccaaccaggacctcaacctcgcccatctcgcgcaggatatcggttatcccgattccacgcatttcagccactcgatccgtcgcttctacggcttgaagccgcgcgcgatcttcgtcggctcgcgagacctggcgatctatcgcagcaccgagacggtgcggctggcggaggcttcgtag

SEQ ID NO: 951 - DNA, 867 bp, BradyrhizobiumColbertium
atgaccgacaaggccgtcatcacctgcgcgctgaacggcgtgctcaccgatccgaagcagcacaacgtgcccgtgacgcctgagcagatggcgcgcgaggccaaggctgcgttcgatgccggcgcatccatcatgcacatccatctgcgccagcaggcgccgggcaaggggcacctgccgtcctgggaggtcgcagtcagcaaggagatccagcaggcgatccgcgaagcgtgccccggcgtgatcatcaaccacacttcgggcgtgtcggggccgaactattcgggcgcgctcgattgcattcgcgagaccaggccggagatcgccgcctgcaacgccggctcgctgaactacctgaaggtgaaggccgacaacacctgggcgtggccgccgatgatgttcgacaatgcggtcgagaaggtgaaggactatctcgacgtcatgaacgcggtcggcaccatccccgagttcgagtgcttcgacgtcggcatcgtccgctgcgttggcatgtatcatcaggtcggcatgtacaagggcccgctcgaatacaacttcgtgatgggtgtggcgtcgggaatgcccgctgatcccgagctgctgccgatcctgatcaagctcaagcgtcccgaggcgcattttcaggtcaccgcaatcggccgcgaagagatctggccgctgcaccagcgctgcgccgaactcggcggtcatttgcgcacggggctcgaggacaccttctacctcgccgacggcaagaaggtgacgtcgaacgggcagctgatcgaagccgtcgccgcatgcgccagacgcgcaggtcgcgagatcgcgagcccggcggaggcacggaagatcttcgggacgaatcggtaa

SEQ ID NO: 952 - DNA, 1617 bp, BradyrhizobiumColbertium
atgtccatcctcgaaaacaccatttcccccggcagcgccgcctaccaggccaaccgcgacggcatgctcggcctgatcgaccgcatgcgcgcgctggaggatcgcacacgcgcggcctccgccgcggcaaaggaccgcttccacacgcgcggcagcagctgcccgcgcgaacgtgtcgccctggtgctcgatcccggcgcgccgttcatcgaactgtcgacgcttgccggctacatgttcgacgttcccgatcccaacaagagcgtgcccggcgggggtgtcatcgccggcatcggcttcgtctcgggcgtccgctgcatggtcagcgccaacgacgccggcatcgacgccggcgcgctccagccttatggcctcgacaagacgctgcgggtgcaggagcttgcgctggagaacaagctgccttacgtgcagctcgtcgaaagcgccggcgccaacctcttgcgctatcgcgtcgaggattttatccgcggtggcaacatctttcgtaatcttgcccggctctcggcggcagggcttcccgtcgtcaccgtcacgcacggctcctccacggcgggcggtgcttaccagaccggcctctcagactacatcgtcatggtccgcggccgcacccgcgccttcctggccggcccgccgctgctgaaggctgcgaccggtgagatcgcgaccgaggaggagctcggcggcgccgagatgcacacccaagtctcaggcctcggagactatctcgccgaggacgatcgcgatgcactgcgcatcgcgcgcgagatcatggccgcgatggaatgggagcggccgggcagggtggctccgcagttcaagccgccgcgctatgaccaggacgagttgctcggcatcatgcccatggaccacaagcgtccggtcgacatgaagcaggtgatcgcgcgcatcgtcgacgattccgattttaccgagatggcgccgaactacggcccggcgactgtctgcggtcacgcccgcatcgggggacaggcgatcggtatcatcaccaacaatggcccgctcgatcccgccggcgcgaataaggcgacgcatttcatccaggcttgctgccagacccgcacgccgctgctctatctcaacaacaccaccggctacatggtcggcaaggcctatgaggaagccggcatgatcaagcacggctccaagatgatccaggcggtgacgtcggcgaccgtgccgcagatcaccatctattgcggtgcctcgttcggcgcgggcaattacggcatgtgcggccgcggcttccatccgcgcttctgcttctcctggcccaacgccaagaccgcggtgatgggtggcgagcaggccgccgaaaccatggcgatcgtgaccgaagctgccgccgcgcgccgcggcaagccggtcgagaaggacaagctcgatgcgatgaaggcacagatcatcggcgtgttcgacggccagatggacgtgttctccaccagcgcgcgcgtgctcgacgatggcgtgatcgatccacgtgacacccgcgcggtgctgtccgaagtgctcgcgatctgtcgcgagggcgacgcacgcacgccccagcgcatgcagttttcggtggcccgcccatga

SEQ ID NO: 953 - DNA, 1962 bp, BradyrhizobiumColbertium
gtgcagcaccggccgttctctagggttctggtggccaatcgcggcgagatcgcgctgcgcgtgatgcgcagcgcgcgaaagctcggcctcggcgtcgtcgcggtctattcggacgccgatcgcgatgcgctccacgtgcgtcaggccgatcgggccgtgcgcatcggagaagccttgccggcgcaatcctatctcaacatccaagcgatcattgcagcggcaagggccagcggcgcggaggcgatccatcccggctacggctttctcgccgagaacgaggaatttgcgcgcgcttgcaaggaagcgggcctcgtcttcatcggcccttcgccgcaggcgatcgaggcaatgggcaacaaggccggcgccaaggagatcttgaagaaggccggcgttcccatcgtgcccggctaccagggagccgatcagagcgacgaggtcatgctcgcggaggccaagaagatcggcttccccgtgatgatcaaggcggttgccggcggcggcgggcgcggcatgcggctcgtcactgacgccacatctttccccgatgcgctacgcagtgcgcgttcggaagcgaaggccgcgttcggcgattctaccgtcatcctggaacgcgcaattcagaacccgcgccacatcgagatccaggtgttcggggatagtcacggcaacgccatccacctcggcgagcgcgattgctcggtgcagcggcggcaccagaagctgatcgaggaagcgccctcgcccgcggtcacgccggagctgcgcgcgaagatgggcgaggtcgcggtcgccgcggtaaaggcgctgcgctacgagggcgccggcacgctcgagttcctgctcgacgcccgcggcgagttctacttcatggagatgaacacgcggctccaggtcgagcatcccgtaacggaagggatcaccgggctcgatctcgtcgagttgcagctgcgcgtcgcgcgcggcgagccgctgccgatcaagcagcaggacatcaagttttccggccatgccatcgaggtgcggctctgttcggaagacgccgcgcaggatttcatgccgcagtcgggccgcatggcgcgctggcaggtgccggacggcatccgcgtcgagcatgcactgcaatccggcacggagatcccgccgttctacgattccatgatcgccaaggtcatcagccatggcactacgcgcgaggaggcgcgggggcggctgatcgtcggtctcgagcaactcaccgcgttcggtgtgaccaccaaccaggcattcctgatgtcctgcttgcgtcatcccggtttcgccaggggtgaggcgaccacggccttcatcggcgcgcatcgcgacgaactgctggcgccggatgcgaacggtgcattcgacgtggcgctggcgggcttgctactctacgtcaccaatccacgcgcgccgtcttggcaggtcgggcgaagcctcgcggcgacgtttccgctgccggcgaagatcgaaatcgccggccacgcccatgagctcgacatcacgcgagagcgcgatggcggctacaccgtcgcctccagtgaccgccaggacagattcgaaatcgaccagctcgcggccgatatgatccgctttcgccatgacggcctgatggacagcgccaacttcctccgtgacggcgatcggctctacgtccagcatcgcgggatcccgctcgcggtcgtcgatctcacgctcgcggcgccgaaggctgcagccagcaatggtggcgacggcaaggttcgcgccgcgatgaacggccgcgtcgtcgccgtcctggtgaagccgggcgaccgcgtcaccgccggccagccagtgctgacgctggaggcgatgaaaatggagcacgtccacaaggcgggcatcgacggcgtcgtcacggcgatcgacgctgccgagggcgagcaggtgaccacgggccggatcgtggcggagatcggggcgggctag

SEQ ID NO: 954 - DNA, 813 bp, BradyrhizobiumColbertium
atgttgcgcgcaactgattccgcccgagacgccgctgctgcgctcccgacatcgtcgagcgcgctggcgtttgccgcaccaaccatgcgcgaaagctggctgttcggcgctctcttcgtcctgacgctggccgcgctcctcgcaccggcgctgcctcccgccgcctggcacgtcgcgcattttgtcgataaccgctcctggctgggtatacccaatgcgggggacgtgctgagcaacctcgcgttcgttgcgatgggtgtctggggctccgagcggctgcgcgcccgcaatgatgcgcctgtgggcgcaagctggttcttcgtgggactgatcctcactggcctgggctcgggcttctatcatctggacccatatgcgccggagcgactcgtagccgatcgcctcggcatggcggtggcgtttgcgggattccttgggattgctgccagcgagcggatcagcacacgcgcaggcgaagcggtgctggtgctgacgatgatcgcgggcctgctggctgcctgggtggcacgcgagaatctcgcgccttgggtggtggtgcagttcggcggcatggcgctcgccatggggctggcgttgacgcggccgcggcggggcgcgattggggtgcggctcggcggcgtgctgctcttctacgtgctggccaaactgtttgagctcggcgatgcagccgtgttcgaagcgaccgggcacgtcatctcgggccacacgctcaagcatcttgccgcggctctggcggcgtggccggtgatccgagtgttgaaccctactggctccgtcccgtgccctcgttga

SEQ ID NO: 955 - DNA, 987 bp, BradyrhizobiumColbertium
atgacagaggcgctgctcgaagtcaccgacctcaagaagcactatgcggtgcgtgcaggcgtgctgcgccggcaagtcggcacggtgcatgcggtcgatggcgtttcattcgcggttggcgtaggggagacgctcggcctggtcggcgaatccggctgcggcaaatccactgtggcgcggagcgtgctgcggctggtcgagccgacatcggggcgaatccgcctcgtgggagaagacatcacccatctctccaagtccgatcttcgtccgcaccgccgctcgatgcagatcgtatttcaggatccttttgcttcgctcaatccacgcatgacggcgggcgacatcgtcggcgagccgctcgccgtgcatggcctcgcgaccggcaaggcgctggaggcccgcgtcgcgcagctgttcgatcaggtgggcttaaggcccgaccagatgcgcaacttcccgcatcaattctccggcggccagcgccagcgcatctgcatcgcgcgggcgctggcgctggggcctcgcctgatcgtgtgcgacgagccggtgtccgcgctcgacgtttcgatccaggcgcaggtgatcaacctcctgatcgatctgcagcgccagcacggcttctcctatctcttcatcgcccacgatctcgccgtggtcgctcatatcagtcaccgcgtggccgtgatgtatctcggccgcatcgtggagatcgccggcaaggatgagctgttccgcaatccgcggcatccctacacgcaggccctgctcgcctccgtgccgatcgccaatccgctcgccaagaagctcgcgccgctggttgatggggatgtgccgagccccgtcaatccgccttccggctgcgcgtttcacacgcgctgccggtttgcgttggatcggtgcaggacggagcggccggcgctggtggatgcgggcgacgggcatcaggtggcgtgtctgctcaacgagggcacgggacggagccagtag

SEQ ID NO: 956 - DNA, 1008 bp, BradyrhizobiumColbertium
atggcggacacaaccgatctcgtgctcgacgtgaagaacctgaagacggtgttcttcaccaattccggcctgttcaaggccgtcgacgatctttccttcagcgtgaaacgcggcgagacgctggcgatcgtcggcgaatccgggtgcggcaagagcgtgaccgcgctttccctgatgcggctcgtgcccgatccgcccggtcgtatcgtggggggctccgtctcgctcgaaggcaccgacctgctggcgctgagcgaagcggagatgcggtccgtcagaggcaatcgcatctcgatgatcttccaggagccgatgacctcgctcaatccggtgatgcggatcggcgaccagatcgtcgaggcggtgcggctgcaccggaacatcccttcgaaagaggcacaaggcatcgcggtcgagatgctgcggctggtgcgcatccccgagccggcgcggcgcgcacgggaatatccgcatcagctgtccggcggcatgcgccagcgcgcgatgatcgcgatggcgctggcgtgccgtccggtgctgctgatcgcggacgagccgaccaccgcgctcgacgtcaccatccaggcgcagatcctggcgctgatcctcgatctccagaaggaactcggcaccggtctcgtgctgatcacgcacgatctcggtgtcgtcgcgcaaacggcgcagcgtgtgatcgtgatgtacgcaggccgaaaggtggaggaggcgagcgtcgaggcgcttttcgcctcgcccaagcatccctatacgcgcgggctgatggcctcgatcccgacggtgccggcatccggagtcccggcgcaggcgcgactgaacgaaatccccggtaccgtgccatcgctggtgcggctgccgaagggctgcgccttcgcaccgcgctgcaagctcgccatcaagcgttgcgaggccgaatatccgccgctggcggactggggcggcggccatctcgcggcgtgctggcgcgcggaagaggttgcggaggtggcatga

SEQ ID NO: 957 - DNA, 894 bp, BradyrhizobiumColbertium
ttggccgcgatcgacttcgacgttgaactaaggcgggccggcgcgcatgcgaccggcggctggcggcgcgtgctgttcatggcgcagcggcatgtgctgggcgcagccggcctcgtcatcatgacattgttcgtgttgactgcgatcttcgccgacttcatcgcgcgttatgatccgctgacggtcgattccgctcgcgcgctggcccgcccgagcctggcacactggatgggcaccgattcattcggccgcgacgtgttcagccgcatcatccacggggcgcggatctcgcttgcggtcggcctcggctcgaccgctctcggcggcacgatcggcgtgatcgtcgggctgacttcgggctatctctccggctgggtcgacctcgtgttccagcgcgtctccgacgttctccaggcgctgccgctgctggtgctggccctggtaatgacagcggcgctcgggccctcgctgcccaatgtcatcatcgccatcgccattccgctgatcccgacggtcgcccgcgtgatccgcgccaacacgctcgcgctgcgcgaacagcaattcgtggaggccgccaaatcgatcggcatgagcgagacgcggatcgcgctgcgccatgtgctgccgaacacgctggcgccgctgatcgtgctggcgaccgctcagctcggctcgaccatcctcacggaagcctcgctgtccttcctcggcctcggaatccccgagccttatccgtcgtgggggcgcatgctctccgaatccgccgccgaatatgtccgcaccgcgccgtggctcgtgatcttcccgggtatcgcgatcagcctcgccgtgttcggcgccaacctgttcggcgacgctctgcgcgacatcctggatccaaggcaacgcggctga

SEQ ID NO: 958 - DNA, 948 bp, BradyrhizobiumColbertium
atgtttgcctatctggtgcggcgcctgttcctgatgctcgtgaccctgttcgggatctcgatcgtcatcttcttcctgctgcgcatcgtccccggcaacatcgtcgacatcctgttcgccgccgccggctatgtcgatcccgccgacaaagccaatctggaaaaggagctcggcatcgaccggccgctgatcgtgcaatactggcactggatcagcggcttcctgcgcggcgatttcgggtattcctacgtctcggaaaagccggcgcttcaggagatcctgccgcggattccgatcacggcgcgcctcgccggcctcgcgctgctgttctcggcatcgatcggcatcccgctcggcgtcatcagcgcggtgaaacaggggacgaagctcgactacgctttgcgcgtcgtcagtctcagcggattgtcgctgccctcgttctggcttggtcttctgatcctgaccgcctccgtggcgatgttcggccagatgccgatcttcaacccgaatccgcagacctggctggaagcgttcgcaacctacgccgttccggccgccgccgtgggcttccgcagcgcggcgctgaccatgcgcattacgcgatcctcgatgctggaggtgctgcggcaggactatatccgcacggcccgcgccaagggcgcgtccgaggcgacggtaaactatcagcacgcgctgaagaacgcgatcctgccggtcatcaccgtgatcggcatcgaggcggcattcctgatcggcggcctgatcgtgacagagacagtgttcaacataccgggcgtcgcgcgctatttggtcgaggcgatccgctggcgcgactatccgatcgtgcagaacctcgtgatgttcatcgcggtggtggtggtgttcgccaatttcgccgtcgacatgctctatgcggtgttcgacccgcggatcaggtatacggattag

SEQ ID NO: 959 - DNA, 1599 bp, BradyrhizobiumColbertium
atgcggagcgtgtgggcgctcgccgcgacggcggcgttatctttgctgacgatctcaaccgcaacgctcgccgccgagcccaagcagggcgggattctgcggatgtatcaccgcgacagtcccggcaatgcctcgatccacgaaggcgcgacctactcgctcaacgttcccttcatgcccgtgttcaacaacctcgtcatctacaagcaggacgtggcgcagaacagcatggacagcatcgtccccgagctcgcggagagctgggcctgggtgaacggcaacaagacgctgaccttcaagctgcgccagggcgtgaaatggcacgacggcaagccattcacctcggccgacgtcaaatgcaccttcgacatgctgatgggcaaggcgcagcagaagttccggcagaacccgcgcaagagctggtacgaccaggtcagcgacatctcgaccaacggcgagtccgaggtctcgttcaatctgaagcggccgcagccctcgctgctggcgctgctcgcctccggctacaccccggtctatccctgccatgtctcgccggcggagatgcgcacgcatccaatcggcaccggccccttcaagttcgtcgagttcaaggccaatgaatccatcaagctgacccgcaatccggactattggcgcaagggccggccttacctcgacggcatcgagctcaccatcatcccgaaccgctcgaccgcgatcctcgccttcgtcgccggcaagttcgacatgacgtttccgacggaggtgacgatcccgctggtgagggacgtcaaacagcaggccccgaacgcgatctgcgagatcgcgccgacgaacgtgtcgaccaacatcatcgtcaattcgtcctcgccgccgttcgacaatgtcgacattcgccgcgccatggcgatggcgctcgaccgcaaggctttcatctccatcatgttcgagggccagggcgacatcggcgggaccatgctgccgccgccgaacggcctgtggggcatgcccaaggagatgctggagaccattcccggctacgggcccgacgtgaaggccaaccgcgaggaggcgaagaagctgatgcagaaggccggctacgggccagacaagcatctggccgtgaaggtctccacacgcaacatcccgatctatcgcgaccccgcggtgatcctgatcgaccagctcaagacgatctatatcgacggcgaggtcgacgtcgtcgagaccgcgaactggttcccgaaggtcgcgcgcaaggactacatgatcgggctcaatctcacgggcaacgcggtggacgatcccgaccagtccttctacgagaactattcctgcggctcggagcgcaactacaccaattactgcaacaaggagatcgagaagctgttcgacgtgcagtcgcaggagaccaatatcgagaagcgcaagaagctggtctgggacatcgacaagaagctgcaggaggacgtcgcgcgccccatcgtcttccacagccgcatgggcagctgctggcagccctacgtcaagggtctcaccgtcatgaccaacagctcctataacggctatcgctacgaggatgtgtggctggacaagtag

SEQ ID NO: 960 - DNA, 1551 bp, BradyrhizobiumColbertium
atgtacactggtcaccatgcccgcctgcgcccgctccagcccgccttcatcatggcgggcacaggcgagtcagtcacctatcgcgaactcgaggcacgcagcaatcggctggcacatctgtttcgcaggcacggcctgaagcggctcgatcattattcggtcttcatggagaacaattcgcgctaccttgaagcctgcggcgcgggcgaacgctccggtctctactacacctgcatcaactccttcctgacgccgggcgagctcgcctatctcctcgccaacagccagtcgcagatcttgatcacgtctgtcgccaagctcgacatcgcgcgggaggcgatccaggcctgccccgatatcaagctctgcatcgtggccgatggccccggagagagcgagcgcatcgtcggtcttgccgaggtgaccgccggcctgccgacaacgccgatctcggatgaatggctcggcaccgccatgctctattcgtccggcacgacgggacggccgaaaggaatcctgcggcccctgccggaggagccgccgaagcacaatctgccgctgttcgatttcctgaccaagctctggcactaccgtgagggcatggtctatctgtcgcccgcaccgctctatcattccgcgccgcaagccgccgtgaacctgacgatccgcatgggcggcaccgtcatcatcatggaaagcttcgaccccgagcgttaccttcagctggtcgagcaatggggcatcacccacacccagctggtgccgacgatgttctcgcgcatgctgaagctgccggatgaagtgcgaaatcgctacgacgtgtcctcgctggagattgcgatccacgcggccgcgccctgcccggcccaggtcaaggacgacatgatcaaatggtggggaccgatcatccacgaatattacggcgcgaccgagggcctcggcttcacggcctgcaacagcgaggaatggcttggtcatcgcggcaccgtgggcaaagtgctgctcggcgacctgcacatcctcgacgagaacatgcaggagtgcccgaccggcacgcctggccaggtctggttcaagacggcaacgccgttcgaatatttcaacgatcccgagaagaccagggaggcgcgttcgcccgacggcagcatgagcaccgtcggcgacgtcggctatgtcgacaaggaccgctttctctatctcaccgaccgcgcgaccttcatgatcatttcaggcggggtgaacatctatcctcaggaatgcgagaatctgctgatcacgcatcccaaggtggccgatgccgccgtgttcggcgtgcccaacgccgatctcggcgaagaggtgaaggccgtggtgcaaccgatgcccggtgtggtgcccgggccggccctggccgaagagctgatcgcgttctgcgccaaatcactttcgcggcagaaggtgccgcgctcggtcgatttcgagaaggagttgccgcggctgccgaccggcaagctctacaagaggctgctgcgggaccgctactggggcaacaaggcgtcgcggatcgtctga

SEQ ID NO: 961 - DNA, 1155 bp, BradyrhizobiumColbertium
gtgcaccagggacgtgtcgttttcggcgcgatcgaggaggtcgtgttcggccatcctgcggccggagccatcgtcgcacagatggaccggctcggagccagccgggccttcctgatggtttccggcacgctgaaccggcagaccgacgagattacgaagatcaggcaagcacttggcccgcgctgcgccggcttgttcgatgccatgccggcgcatacgccgcgggaggcggtgatcgcggcaacccgagcggcgcgtgaggcggacgccgacctcatcgtcactgtcgggggcggctccatcaccgacggcgccaaggcggtgcagctctgcctcgccaacggcatcgacgatatcgagggcatcgagcgcatccgcgtgcacaagggcgtcgcgcccgagatgatcgcgccgaccgtgcggcagatcagcgtaccgaccacgatcgccggcggcgagttcagcgcgattgccggcgtcaccgaccgggctgcgcatgtgaagcagatgctgcggcatccgctggcggtgccgcgcgcgaccatcctcgaccctgccatcaccgtgcacacgccggaatggctgttcatctcgaccggcatccgcgccgtcgaccattgcgtcgaggcgatctgctcgcatgagacccacccttatgccgacgcgcaatcggtgaagagcctcgccatgcttgccgacgcattgccgcgggtgaaggcgaaccctgccgatctcgatgcccggatggatgcgcagatcggcacctggctgtcgatgggcgcgctcgcagccggcgttcccatgggggcgagccatggcatcggctacgtcctgggagcggccttagacgtgccgcacggctacacatcctgcatcatgctgccagcggtgatgcgttggaacgcgcgcgacaatgccgagcgccagacgatcgtcgcggccgccatgggctatcccggccacgacgccgccgacgtgctcgatgccttcatccgctcgctcggcatgccgcgcagcctcgccgacgttcgggtttcgccggaacatttcgactccatcgccgagcaggcaatgcgcacgaactggatcccgcgtaatccgcgcaagatcgagggtcccgccgacgtgcgcgaaatcctgcttcttgccgcatga

SEQ ID NO: 962 - DNA, 1206 bp, BradyrhizobiumColbertium
atgggtggaccggacggaagcgagcagtttgtcaaaagacacgatttcgttcagcctcgtcgcagcgcaatcgctggacttgtcgccgcagcgttcgccatcaccggttgcgacaagccggcgtcgcaggccgccgcgccagcgcccgcgtcagtgacggtcgcgcagccggtcaagcgcaccgtcaccgactgggacgaattcaccggccgcttcgaggccatggaggaggtgcaagtgcggccgcgcgtcggcggctttgtcaactccgtcaacttccaggatggcgccatcgtgcgtcagggcgatctgctctacgtgatcgacccgcgtccgttcgaggcggtggccacgcaggcggaaggccagctggccgacgcgcgcgccagggtcgagctcgcaaagcgcgagctggaccgcgccttgagcctggtgcagaccagtgcagtctccgagcaagtcgtcgatcagcgccgccaggccttgcaggccgcgcatgcggccgaaacgcaggccgatggcgcattgaaggccgccaagctcaacatcgagttcacgcatgtcacggcgccgctgacgggccgtgtcagccgccatctcgtcagccccggcaatctcgtgcagggcagcgacagcggatcgtcgaccttgctgacatccatcgtgacactcgatccgatctacatctatttcgacatggatgaggcgaccttcatcaaatacagcaagctgtggttcgaaggccggcgcccgagctcgcgcgatacggcgaacccggtgcaggtgtctctcgtcggcgagaccaagcaatcgcgtgaaggcaccatcaacttcctcgacaaccgcctcgacgtctccacgggaacgctgcgcagccgcgccgtcgtcaagaacaccgatcagtcgatcctgcccggccagttcggccgcgtccgcctgatcgccagtgcgccctacgaggcgctgctgatcccggatgccgccatcgcgaccgaccagtcccgcaagatcgtgttcgtggtcaagcccgacgacaccgtcgaggcgcgcccggtcgtgctcgggccgcttgacgacggcctgcgcgtgatccgtgacgggctcaaggccgacgatcgcgtcatcgtcaacggcatccagcgcgcccgcgtcggcgccaaggtcgctccgcagactgcgcaagccccgaccggtggcaagtcatga

SEQ ID NO: 963 - DNA, 3162 bp, BradyrhizobiumColbertium
atgaacctcggtcgcctctccatcaaccagcccatcctggcgatggtgctgtcgatcgtgctcttgatcgtcggtgcacttgcctacaccacgctgccagtctccgaatatccgcaagtggtgccgccgaccgtcgtcgtcacgacgcaatatcccggcgcctccgcgcagatcgtgtccgacacggtcgcggctccgatcgagcaggagatcaacggcgtcgaggacatgctgtatctctacagccaggcgacctcgaacggccagctcaccatcacggtcaccttcaagctcggaaccgatctcgacaaggcccaggtgctggtgcagaaccgcgtcgcgatcgcgcagccgcgccttcccgaggaagtgcagcgcaacggggtcaccacacgcaagaactcgcccgacatcctgatggtcgtgttcatgctgtcgccggacgacaccttcgaccagctctacatctccaactatgcgctgctccaggtccgcgaccagctgctgcgcctcgacggcgtcggcgacatccagatctttggcgcgcgcgactattcgatgcggctgtggctcgatcccgatcggatcgccaatctcggcctgacctcggccgaggtgctggcggcgatccgcgcccagaacgtgcagatcgcgggcggccagatcgccgagccgccgatcgcggaccgtgccttccagccgaacctgactttcacgggccggctgaaggaccagaagcagttcgaggacattttgatcaaggcgggatccgacggccggatcgtccgcttgcgcgacgttgcccgcatcgagctcggtgccttgtcctactccaccaacagcttcctgctgcggaaatcggcggtcgccatgctggtgacgcagcggcccggatcgaacgcgctcgcaacggcgaagaacatctccgacaccatgacaaggctgaaggagaactttcctaaggggctcgactacaacatcggctataatccgaccgagttcatcgcgcagtccgtgcacgaactgatcaagacgatctacgaggccatgctgctcgtggtcgtcgtggtgctggtgttcctgcagggctggcggccggcgatcattccgatcatcgccatcccggtctcgctggttggcactttcgcggtcatggcggcgctcggcttctccatcaacaatctcacgctgttcgggctcgtcctcgccgtcgggatcgtggtcgacgacgccatcgtggtggtcgagaatgtcgagcgtcatctcgagcacggcatgggccggcgcgacgccgcgctgaagaccatggaggaggtcggcagcgcgctggtctcgatcgcgctggtgttgtgcgcggtgttcgtcccgaccgccttcctcggcggaatttccgggcagttcttccagcagttcgccgtcacgatcgcggtcgcgaccgcgatctcctgcttctgctcgctgacgctgtctccggcactggcttcgctgatcctcaccccgcatgaggacaagaagccgcccgccgcgtggaacgtcgtcgcgcgcggctggaacgccttcacgggcgtgttcaaccgcgtgttcgatcgtctcgcgcatggctatgcgagcctcgcaaacttcgtgatccgccatgcggtggtgatgctgctgttctatgtcgtgctgatcggcagcgccggctggctgatcgtgaccacgccgcagggcttcattccctcgcaggatcgaggctacgtcatcatctccgtgcaactgcccggcgcggcctcgctggcgcgcaccacggaggtcgtgcgcgagatcgagcggatctcgctggacacgcccggcatcgtccgcgtcgccgctttcgccggcttctccggcgccacgcgcacgcaagccggcaatgccgcggcgctattccccgtgttcgacgagccggagacccggctgaagaaggggctgtccgcgaacgcaatcacggccgagctgcgcaagcgcctgtccgcgatccagggcgcgttcatcatcgtgattccgccgccggccgtgcccggcatcggcaccggaggcggcttcaccatccgtatccaggaccgacagggccgcgggcccgaaatgctcgcagccgcgaccgacgagctggtcgctgccgcgcgcaaggcgccgagcctcacctcggtgttctcgccgtttacggccaatacgccgcaactcttcgtcgacatcgaccgcaccaaggcgcagaagctgggcgttcccatcgccaacatcaacgacacgatccagacctatttcggatcgacctacgtcaacgacttcaacctgttcggccgcacctaccacgtcaccgcgcaggcggacttcccgtaccgcaaggagcagagcgaccttgcgcgcctgcgcacgcgcaatgcgtccggcgacatggtgatgctcggcagcgtcgtcgaattcaaggacgcctcgggccctgaccgcgtcgcgcgctacaatctctatgcagcctccgagctccagggcgagccggcgccgggcatcagctcgaccactgcgctcgacaccatcaagcagctcgcgaacgacacgctgccgagcggcttcaccttcgaatggacagatctgtcctatcagcaggtcaccggcggcaatgcaggtctctatgtgttcccgatctgcgtgctgttcgtctatctcgtgctcgccgcgcaatatggcagctggacgctgccgttcgctgtgatcctgatcgtgccgatgtgcctgctcgcggccaccctcggcgtgcggatcatgggacaggacgtcaacattctcacccagatcggcttcgtcgtgctggtgggactggcggcgaagaatgcgatcctgatcgtcgagttcgcgcgcgacatcgagaatgagggcaagtcgcggctggaggcggtgatcgaggcctgccgcctgcgcctgcggccgatcctgatgacgtcgttcgccttcatcctcggcgtgctgccgctggtgatctcgagcggctccggctctgagatgcgtcaggccgtcggcgtcgccgtgtttttcggcatgatcggcgtcacgctgttcgggcttctgttcacgccgatcttctacgtggtagtgcggaacctggcggagggacgcagagacaagaagccgaagatcgtggcctcctag

SEQ ID NO: 964 - DNA, 1194 bp, BradyrhizobiumColbertium
atgaaatcagcccttttggccgccgtcgcaacctctgccgtattgctcgccgcaccggccgccgcgcaaggcgtcaagatcggcattctcaacgaccaatccggcgtctatgccgactacggcggcaaatggtcggtcgaggcagccaggatggcgatcgaggatttcggcggcgaggtgctgggccagaagatcgagctcgtcaccgccgaccaccagaacaagccggaccttgcaacctcgatcgcgcggcgctggtacgatgtcgagaatgtcgacatgatcacggagctgacgacctcctcggttgcgctcgcgatccacgaactctcgaaggaaaagaagaagatcgacatcgtcgtcggggctgcgacctcgcgcctgacaggcgatgcctgccagccctacggcttccattgggcctacgacacccgggcgctcggtgtcggcaccggcggcgcgctgaccaaggccggcggtgatacctggttcttcctcaccgcggactacgccttcggctacgcgctggagaaggacaccagcgagatcgtcaccgccaatggcggcaaggtggtcggatcggtgcgcgtgccgctcaattcctcggacttctcctcctttctgctgcaggcgcagagttccaaggccaagatcgtcggcctggccaatgccggcctcgacaccaccaactcgatcaagcaggcgtccgagttcggcatcgtctccggcggccagaagctcgccggcctgttgatgacgcttgccgaagtgcatggcctcggcctgcaggccgcgcagggcctggtgctgacggaaggctattattgggacgtcaatgacaagagccgcaatctcggcgagcgattcctcaagcgtaccgggcggatgccgaacatgatccaggccggcacctattcggcgacgctgagctatctgaaagcggtcaaggccgccggcaccaaggatccggatgccgtcgccaagaagctgaaggagctgccggtcgacgacgacttcgcgcagggcggcaaggtgctggagaacggccgcatggtccacgacatgtatctgttcgaggtcaagaagccctcggaatcgaagaagccgtgggactattacaagctgctcgccaccgtccccggcgacaaggccttcttcaccgccaaggaaagcggctgcccgctgacgaagtga

SEQ ID NO: 965 - DNA, 387 bp, BradyrhizobiumColbertium
atgtatcatctcaccgctctcgtcacgctgctggcgatcgcgttttatttcttcactgccatcaacgtgtcgcgctcgcgcaccgcgaccggtgtcaaggtgcctgcgatgtcgggccatcccgatttcgaacgtgccttccgcatccagatgaacacgctggaatggatgccgatcttcctgccggcgctgtggctgttcgcggtctatatcagcgatgccattgcggctggtatcggcgtggtctggatcatcggccgcatcgtctacttcgtcggttattcgaaggctgcggccaagcgtggcccgggattcgcgatccagagcatcgccgccatggcgttgtgggcaggagcgctgggcgcggtggtgttgcggctggtgtga

SEQ ID NO: 966 - DNA, 1083 bp, BradyrhizobiumColbertium
atgagcgctgacaggatctcgcgacgtaccttcgccgccagcatcgccgccctggcattcgtacggcgcgccagcgcgcaaggctatgccggcctcggcgaggccgccgacggcttcgccaaggtcacgccgggacggacattcacatttcccgccgatcacgggccgcatcccgagtttcggatcgagtggtggtatctcacggcaaacctcgtcgacggcagcggcgcagcatgcgggctgcaatggacgctgttccgccaggccgcgcagccgggtccgcaaggcgaaggctgggccaatcaacaggtgtggatggcgcatgccgcggcgacgcgcgcagacacccaccgcttctccgaaacgttttcacgcggcggcgtggggcaggccggcgtcacggccaagccgttcgatgcctggatcgacgattgggagatgaagggcttggagcgcaccgacgatcgcacactggcgccgctgacgctgaaggcatccggcaccgatttcagctatgcgctgacgctggaggccgaccggccggtggtcttgcaaggcgacggcggctacagccgcaagtcggagcgcggacaggcgtcctactattacagccagccgttctaccgggcccgaggcacgctcatcatcggcgacaagccgatcgatgtctcgggccaggcctggatggacagggaatggagcagccagccgctcgacgccgaccagaccggctgggactggctatcgctgcatctcgcatccggcgacaagctgatgctgtaccggctgcggcagaaggacggcagggactatccgttcggcaactggatcagcgccacgggcgagacacagatgattgcaggtagtgatattcagatgatgccgaaaggcacggcggatatcgcgggacgcaaggtgcccgtggaatggcaaatcgcgatcccctcgcgctcgctctcgatcgcctgcaagccgctcaacccgaaggcctggatggggaccggcttctcctattgggagggaccgatcagctttgccggcacgcatgacggcgttggctatctcgagctgaccggctattga

SEQ ID NO: 967 - DNA, 2463 bp, BradyrhizobiumColbertium
atgagacgcgcgctgtggattctcgccgtgctgctcagccattggcggcgccacaagatgcagttcgccacgctgctggtcggactgatcgcagcgacggcgctgtggagcggcgtgcaggcgatcaaccagcaagcccgcaatgcctatgaccgcgctgcggcgacgttcggcggcgcccgcacggcgatgctggtcgcgcccaatgcggcgacttttccgcaggagctgttcgtcaaactccgccgggcgggctggccggtgtcaccggcgctggagggacgggtgcagatcaacggacgctcgctccggctgctcggcattgagccggtgacattgccgactgatgtcggcaacgcgccgcgccttggcgctgcggatctgagcagcttcgttgccgcgccgggccagacgctactggcacgggagacgctgagcggcctgggggagtcggaaggcgcggcgccggcgatcagcaacggcgcaaaactgccaccgctgcgcgtgctgccgcagctcgtgccggacgtactggtggtcgatatcggcgtggcgcagcgccttctcaacaagccgggccaagtgtcgcggctgctgatcggtaagcccaggggcaaaccggcgccgctggccagcgtcgtcggcgatcaactgcagcgggtcgagccggatgccgaaacggagcttgagcgcctcaccgacagctttcatctcaacctgactgcattcggcctgttgtctttcttcgtcggcctcttcatcgtcaactcggcggtcggcctcgctttcgagcagcggctgccgatgctgcggacgctgcgggcctgcggtgcctcggcgcggctggtcaacaccgtcctggtgatcgagctggtcgcgctggcgctggtcgccggactgatcgggcttgcatgcggctatttcatcgctgcggcgctcctgccggacgtcgcggcgtcgttgcgcgggctctatggcgcgcagatcccggggcagctcacgttgcgccccgaatggtggcttgccggggtcggcatcagcgtcgcgggcgcactggtggcggccgcgacgagcctgatcaaggccatcaggatgccggtgctggcgaccgcgcagccgcgcgcctggcagcagcggcagcggcgctggctgctgctgcagagcctcgccgcctgcgccgtattcgccgttgcgctgctgctgctccactacggacaatcgctgatcgcagggttcggcgtactggccgcgctgatgctgggcgcggcgctgatcctgccggccttcctcgagatcatcctgttcgccggccagcgcgccgcgcgagggccgctcgcgctgtggttctgggcggacagccggcagcagctctccggcctttcgctcgcgctgatggcgctgctgctcgcgctcgccgtcaatgtcggggtgtccaccatggtggaaactttcagccgtaccttcatcggctggctcgaggggcggctcgccgccgacgtctacatcagcgcgtccgacaatgcgcaaggcaccgcgattcgaaactggctgaaggagcgcggcgacgtccaggcggtcctctcgggcggacgcgccgagacgcagatccggggccaatcggtcgaagtgctgggcctgcccgatcacgcgctctatcgcgagcgctggccgctgctggacagcgtgccgcgcgcctggacccggctggtgccgggcaacgccgccttcgtcagcgagcaattgagccgccagctgaatgtgcggatcggcgacgtgatcgaagtgccggcgccgggcggcgcctgggcgctcgacgtcgtcggcatctatgccgactacggcaacccaaaggggcagctcacggtgaatgtcgcggcgctgatccggcagtttccgcagacgccgcagacgcggatgggcctcatcgtcgcgaaggaccatatccctggcctgatcgcagccttgcagaagcagttcgcgctcgatgaccgcagtgtcgccgaccaggcgacggtgaaagcggaatcgattcgcatcttcaaccgcaccttcgcggtaacctcggcgctgaacgccttcacgctcggcgttgccggcattgcgcttttcacgagcctgctcacgctggccaactcccgtctgccgcagctcgcgccgctttgggcgatcggcatcacgcggccgcgccttgccgcgatcgaattgaccaagacgctttcggtcgcactcttcacggcgctgctggccgtgccgctcggcctcctggtggcgtggtgcctgatcgccatcgtcaatgtgaaggcgttcggctggcgactgccgttccacgtgtttccgttacaattgatcgagctcgtcgcggtggcgttgctcgcttcgctggttgcggcgctgctgccggtggcgcggctggcgcgaatgcggccggccagcctcgtcaaggtgttcgccaatgagcgctga

SEQ ID NO: 968 - DNA, 654 bp, BradyrhizobiumColbertium
gtgctgagcatccgaaatctctccaagaccttctcctccgccggcgagccggtccacgtgctgcgcggcgtcgatctcgatctcaggcacggcgagcgcgtcgcgctgaccggcgagtccggcagcggcaagagcacattgttgcacctgatcgcggggctcgatgccgccgatggcggcacgatcaggctggaggaaatcgaagtcaccaggctgtcggatgcggggcgtgccagcctgcggcgcgaccgcatcgggctggtctttcagcaattcaatctcatcccgagcctctcggtggcggacaatctcgccttccaggcccggatcgcgggccggcacgatgcggcctggacaaaagagctcgtcgagcgactcgggctcggcagcctgctcaaacgttatccagaacaaatatcaggcggccagcaacagcgggtcgcgatcggccgggcgctggcgacaaagccttcgctgctgctggcggacgagccgaccggcaatctggacgaaaccaccgccgaggacgtgctggcgctgacgcgcgacctcgtcgcgcgcaccggctgcggcttcctgatggtgacgcacagcctgcatctggctgccaccctcgaccgtcacctcaccttgcatgccgggcgtatcgcatga

SEQ ID NO: 969 - DNA, 1326 bp, BradyrhizobiumColbertium
atgagcgctcagggaacgtcggcggtggcgggcaagtcggccaggacgccaagaggcgcctggaccatcacctttctcctgttcctcttcatggtggtgaacttcgccgacaagatcgtcgtcggtctcgccggcgtgccgatcatgaccgacatgaagctcagcgcagagcaattcggcctgctgggctcctccttcttcttcctgttctcgatctcggccatcgtggtcggcttcgtcgtcaacaaggtgccgacgcgctgggtcctgctggtgatggcggtgatctgggcgctggcgcagttcccgatggtcggcaccgtctccttcaccacgcttttgatctgccgcatcgtgctgggcgccggcgaaggtccggccttctcggtcgccgcccacgccatctacaaatggttccccgacgagaagcgtacgctgccgaccgcgatcctgtcgcagggctccgccttcggcgtgatcctggcggtgccggcgctgaattggatcattgtcaaccattcctggcactacgccttcggcgcgcttggggtcgtcggcctgatctgggtcgcggcctggctcgccctcggcaaggagggaccgctcgaggacacggaggtcctcgccgttgccgagccgaagatcccgtatgtgcagcttctgacctcgcgcaccttcctcggctgcgtgtttgcaacctttggcgcctattgggcgctgtcgctcgggctcacctggttcacgccctttatcgtcaaggggctcggcttctcgcagagtcaggcgggcttcatctcggtcctgccctgggtgttcggtgccaccatcgtcatgctcaccggctggatctcgcaagtgatgatggcccgcggttacaccacgcgcatctcgcgcggcgtgctcggctcggtgccgctgatcatcggcggcctgatcctcgccatgatgccgcatgtgcagggcgccggcctgcagatcgcgttgctcgtcgtcggctccggcctgtgcggcgcgatctacgtggtctgcccgccgatgctcggcgagttcaccccggcctcgcagcgcggcgccgtcatcgcgatctacggggcgctctacacgctctcgggcatcatcgcgcccagcgtgatgggcaccgtgatccagcgcgcaggcagcatgctcgacggctacttgaccggcttcacgatcaatgcggcggtcatgatggcctccggcgtcatcggtctggtgctgctctggccgaacacggaaaagacgagactgacgcgtggtgcgtcggcgcaaagggcggcgctgaaaggtgctatctcgccgacttag

SEQ ID NO: 970 - DNA, 1719 bp, BradyrhizobiumColbertium
atgagcaccacccctgatctcgtgatccgcggcggcaatgtcgcggacggaagtggcggagagctgttcgaggccgacgttgcgatcaccggcgggaagataagcgaggtcggcaaggtctccgcgaggggccgcgaagagatcgacgcgcgcggcaagctcgtcacgccgggcttcgtcgacgtgcacacgcattatgacggccaggtcacctggagccaggacatcacgccgtcgtcgcagaacggcgtcaccactgcaatcatgggcaattgcggcgtcggctttgccccgtgcaagcccgatgatcacacccgcctgatccagctcatggagggcgtcgaggatattccggagccggtgctgagcgccggcattccctgggcctgggaaagctttcccgattacatggactggctcgccaagcgcgatttcgacatcgatgtcggcgcacagctgccgcatgcggcgctgcgcgtctatgtcatgggcgagcgcggcgcccgccgcgatccgtcgactgccgaggacaatgcgacgatggcaaagctcgcgggcgaggcggtgcgctccggcgcgctcggcttctcgacctcgcgcacgctcaaccatcggacctcgaccggcgacttcacgccgaccctgaaggcgggcgaagacgagctcacggccatcgccggcgcaatgcatcgcgagggccgcagcgtgctgcagttcgtgctggacctctcgaccatccacgaggacctgccgatgatgctgagggtggccgatagcacgaactgcccgatctccttctcgatcacgcagaacgacaaggcgccgcagcgttggcgccagaccctggacgagatcaatgcggcgtcgcggcgcggcctctccgtcacggcacagatcgcggcgcgtcccgtcggcctcctgctcgggctcgagctgtcgcgcaatccgttccagacccatccgagctacagggcgatcgcgcatctgccgctgcaggaacgattggcgctgctgcgtcagagcgacgtacgcaaggcgatcctgagcgagacggcgacggcgaccgacgatccgctgttcttccgtcccaactacgacaagatgttcctgctcggtgatccccccgattacgagcagccgccggagaacgcgctggggccgcaagcgcgcaggcaaggccgtcagccggaggaactcgcctatgacgccatgctgtcggacgagggccgcggcatgctctacgtgcctttcctgaactattccgacggcaatctcgatgcgacgcgcgagatgctgctcgatccccggtcggtgccgggcctctcggatggcggcgcacattgcggcatcatctgcgatgccagcttcccgacctatctgctgacccactggacgcgcgaccgcaagcgcggcgagaagctcacgatcccgttcgtggtggcggcgcagtcacgcaagaccgcgctctcggtaggcctgagggaccgcgggcttatcgctccgggctacaaggccgacgtcaacgtgttcgattacgaccgcctgcatctgcatccgcccaaggtgcattacgacctgcctgtcggcggacggcggctgttgcaggatgtcgacggctatgaggcgaccatcgtctcgggcgtggtgacgcggcggcacggcgaggccacgggacggcggccgggcaagctgattcgtggcgcgcagggagtgaattag

SEQ ID NO: 971 - DNA, 786 bp, BradyrhizobiumColbertium
atgggccgcgccttctcgatccatacctttgccggctttctcggcggcgccgtcgcaccggcgatcgtggccgcgctcgtcacactgtccggcggcaccggcgcgctgatcgcctccggcgcgatcggcattgcggtggcgctgctgctgatcgtcatgaacattcccgatgccggtgcgcacaagaagaagcccggcagcgagagcgcgccaaagcaggccgtcatcacgccggtgcttatcacgctgactgcgctgttcatgctgctgagcctgtcggtcgccggcatcaacaatttcggcgtggtggcgctgatgagcggctacggcgcctcctactccgccgccaacatcgcgctgacggctttccttggcgccagcgccattggggtgctcgcaggcggcttcctcgccgaccggaccgagcgtcacggccaggtcgccgcggcctgctttgccgccaatgccgcgatcgtgctgctgatcgcgctggtcacgctgccgggctgggctctgaccgccacaatgacggcggcgggcttcctctccggcgtcatcgccccttcgcgcgacatgctggtgcgcaacgcagcgcccgccggcgctgcaggacgggccttcggcatcgtctccaccggcttcaatctcggcggcatcgtcagtccgctgctgttcggctggatcatggaccagaatgcaccgcactgggtgttcggcgcgtccgtgatcttcatgctggcgacggtgctgctgtcgccgttcacggaacggaagcggcaagggtaa

SEQ ID NO: 972 - DNA, 180 bp, BradyrhizobiumColbertium
atggccattggcaagctgagcgagccgcccaaattcgtcgacgacaagaccgccgagaagcagcaggcggacaacaatccgaaggtgccaccgccggccctcgatgacgacgattacgaggatggcgacatcgcaacgccgaaacgcgatcgatacggccccgatgacgagccgttgtga

SEQ ID NO: 973 - DNA, 564 bp, BradyrhizobiumColbertium
ttgaagctgccggacgagacgatggtgtttccggcacacgactacaagggcgacaccgtctccaccatcggcgaggagaagcgctacaatccgcggctgcaggtgcgctcggtcgacgaatatatcgagctgatggcgaacctgaagctgcccaatcccaagatgatggacgtggcggtgcccgccaacatgcatgtcggtctgcatcaggaagaactcgagaaggaagggcgcgcgctcagcgcaaccgaggcgatccgcatcctcggccggcccgacatcctgctggtggacttgcgcgaaaccaacgagcggctgaagcacggcatgctcgaaggcgcactgcacacgccctatccctcagtcgaggagagcctcaagcccggcggcatgctgcgcgaggtcgccgccgctaccggccgccgcgtcgtcttcttctgcgccttcggcgaacgctcggcaatggcggtggcggctgcaaaggaggcagggcttctcaacaccgcccatatcgccggcggcatcgacgcctggaagaaggccggcggaccggtgttgcactga

SEQ ID NO: 974 - DNA, 453 bp, BradyrhizobiumColbertium
atgatcttccgccaactcttcgacagcgtttcgggcacctacagctacctgttggccagccgccacggcggcgaggcgctcatcctcgatcccgttctggagaaggtcgaccgctactgccaattgctgcgcgagctcgacctcaagctggtgaaggcggtggacacccatctgcatgccgaccacgtcaccgggcttggcgagttgcgcgaccgaacccattgcatgaccgtgatgggcgatcagaccaaggccgacgtggtggcgatgcgggttgccgacggcgacaaggtgacgatcgagggcctgtcgctcgacgtgatgtacacgccgggccataccgacgattcctactcctacctgatgggcgaccgcgtcttcaccggcgacacgctgctgatccgcggcaccggccgcaccgatttccagaacggctcggcgcgcgcgcaatag

SEQ ID NO: 975 - DNA, 459 bp, BradyrhizobiumColbertium
atgatgcggctgcagctcaaattcgcgatgatgctggcgctgctcgtctgggcagcggtgccgcctgctcttgcacaacaggtgccgctgcaggacaagccgttcgccgagcacaggatcgtgctgcagctctccgatggcgatgcgaagaagcagtccctggtgctgagcgtcgccaacaacctgctgaaagcctacggtcccgacaagatcgcgatcgaagtggtggcgttcggtcctggcatcgacctgcttctcgccggcggcgagcgccgcaagcaggtcgagagcctgatcgcacagggcgtgcgcttcgacatctgcctcaatacggtcgatacgatcgaacgggaaacgggcaagcggcctgacttcatccaagcggcgacgccagtgcaggtgggcgtcgggcaaatcctgttcctggcggagaacgggtacacattggtgcggccgtag

SEQ ID NO: 976 - DNA, 1752 bp, BradyrhizobiumColbertium
atggcgatccgccgccgcgatgttttgaaaagtgcaggcctcgccgccgcaacgctcgccctgccgcggctggcccgcggcactgagaccgccggcatctacgacctcgagcggttcggcaacgcaagaatcctgcacatcaccgacacgcatgcgcagctcaacccggtctattttcgcgagcccagcgtcaatatcggcatcggcgagatggcggggcggccgccgcatctggtcggccgcgccttcctggagcggttcggcatccggccagatagcgccgatgcctatgccttcacctgcgtcgagttcgagaagtccgccggccgcttcggcaagctcggcggcttcgcctatctgaagacgctggtcgatcgcttgcgcggcgaagtcggcgagcggcgttcgctcctcctcgatggcggcgatctctggcagggcaccgggcttgccaacgtcatgcagggccgcgacatggtcgaggttgccaatttgctcggcatcgatgcgatgaccgggcattgggaattcacctatggcgagcaggcgctgcgcgacaatctcgagcgattcaagggcgagttcctggcgcagaacgtgttcctgaccgaggaagccgcgttcaacgacgcgcccgccttcgacaaggccagcgggcgggtgttcaagccgtcgatgatcaaggagatgggcgggcatcgtattgcgatcgtcgggcaggccttcccctacgtcccgatcgcgcatcccaagagatttacgccggactggagcttcggcatccgcgaggaggagctgcagaagcatgtcgatgcgttgcgcggcgccgacaaggtcgacgccgtcgtcctgctgtcgcacaacggcatggatgtcgacctcaagctcgcaggccgggtcaccgggatcgacgtcatcctcggtggccacacccatgatgccgtgccgcagccgatggccgtgaggaatgcgggcggcacgacgctcgtcaccaatgccggctccaacgggaaattcctggccgtgctggatctcgcgctcgacaggggcaaggtcagcgatgtcaggtatcatctgctgccggtctattcggagctgctgaagcccgatccggcgatggccgagctgatcggtcgggtccgtgcgcagcacgtggccgattggtcggaaaagatcgcaacgcccgaccggctgctctatcgccgcggcaatttctcgggatccatggacgaattgatctgcactgcgctccgcaccgagctcgatgccgagatcgcgctgtctcccggctttcgctggggcgtcaccgtgctgtcgggacaggcgatgaccatggaggatctgctggcggagaccgcgatcagctatcccgagacctatgttcaggagatgacgggcgccgagatcaaggatgtgctcgaagacgtctgcgacaatctcttcaacgccgacccgtattaccagcagggcggcgacatggtgcgcgccggcggtctcagctacacctgcacgccggaggctgcgatcggggctcgcatctccgagctgaagctcggcaacggcaagccgctcagcgccagccaccgctacaaggtggcgggttgggcttcggtcaacacccggcagggcgcgccggtgtgggacgtcgtcggcaaatatctgcgctcaggccggatgttgcaggagcgactcggctccggcgtgacgttgaagggggtcgagggcaatccagggattgcgggacgcggatga

SEQ ID NO: 977 - DNA, 306 bp, BradyrhizobiumColbertium
atgaagcggtcacttgctctcgccatgctgcttgccttgagccttgcgccatccgcgcgcgcggcgaacgaggcggattacaaggcggcctatgccgccgccgaagcggcctccagggaggcggccggcatgcgcaaccagtggaccgtcaccgtctcggcattggccgcggccaagaaggcggccgacggcggcgatttcgatcgtgctgttgccgccgccagggaggccgaggcgctggcgaaggcctcgattttccaggccacatcggaaaaagaagcctggaaggcgatggaaatccgctag

SEQ ID NO: 978 - DNA, 864 bp, BradyrhizobiumColbertium
atgaaggtccgcctctcacttctgctcggctccgtgtgcgccgcacttgtcgcgctcgcggccgcgcctccgcgcgtggccgcggccgacaaggtcgatcccgttgccgatgccaaggcgttccagaacttcttcttccagaagtttccgaacgtgaagcgcgaggatttcgtcaacggtccttattccatgaacgaggacatgaagcggcagtggcgcgagaaggaggaattcccgccttacgagttcgcgctcgaagccggcaaggagatgttcgcgacgccgttcaagaacggcaagacctatgccgactgcttccccaacggcggcatcggcatccggcagaactatccctatttcgacgagaaggaaggcaaggtcgtcacgctggagctcgcgctcaaccgctgccgcgaggccaacggcgaagcgccctattcctatgtcaaggacgagatggcctcgctgaccgcctacatggcctatacctcgcgcggcaagccgatggacatcaggatccccgacgatccccgtgcgcttgcggcgttcgagaacggcaagcggtatttctacacgcgacgcggccagatgaacttctcctgcgcaagctgtcatgtgcagagcccgggcgagcgcatccgcgccgaaaccctggcgccggcgctcggcatcctcaacgcgatgccgatctaccgctccgaatggagcggcatgggcaccaccagccgccgcttcgtgacctgcaacagccagacccgcgcggttccgctggagccgcaatcggacgaatatcgcgacgtcgagtacttcctgtcctacgtcgccaatggcctgccgatctcgggaccgggagcacggccatga

SEQ ID NO: 979 - DNA, 312 bp, BradyrhizobiumColbertium
atggcatccagcattcgcgtccgcgcaacgtccaacggcgacatcaccgaggtgcaggcgctgatccagcaccccatggacaccggcctcgtcaagaaccccaacggcgaactggttccggcgcacttcatccaggagctgaagttcgaatgtaacggcaaggacgtcttcgtcgccaattggggcactgcggtctcgaaggacccatacgtcaagttcagcttcaagggcgccaagaagggcgacgagctcaagatctcctggatcgacaacaagggtgcgtcggacacgacgaccgcgaagatcgcgtga

SEQ ID NO: 980 - DNA, 492 bp, BradyrhizobiumColbertium
atgaccaccaccaccggccctcatccgacgcgacgcctgatcctgcagggcgcagcttccgtcgcgctgctcggcctcggcaatctgccgttcggcgccgctcccgcgcgcgctgcggccaacgacaaatatccggaagaggccttcaagcagaagaacgaggccgacgcgatcaaggcgctttatggcaagactgccgagccgtccgacaaggtcaagctcgacgcgccggagatcgccgagaatggcggcgtggtgccgatctcggtgacgacgtcactcgagaaggtgacatcgatctcgttcttcgtggccgagaacccgaatgcgctcgcggcaagctacaagatcccggacggcacgatccctgccgtcgccaaccgtctgaagatggccaagaccaccagattgaccgcggtcgtggaagcggacggcaagctctacagcgcgaccaaagaggtcaaggtcaccgtcggcggctgcggcggttga

SEQ ID NO: 981 - DNA, 414 bp, BradyrhizobiumColbertium
gtgcttttgaaccattccgcaaatgagatcatcgacataccgcttcaggacgatgccttgaccgtctttcctcgcaagcccgccttgcttgttgcgctggccctgttcgccggcgctgcggtggcgacggcggaggcgcagtccaccgtgatcgagggccggaagctcgctttcgaccgcagcaagggcaattgcctgacctgccacgccatgcaaggcggcgacctgccgggaacgatcgggccggaactgaaggatatcaaggccaggtaccccgatcgcaacgagctggtcgcaatcatcttcgacgagaccaagcgcaatccgctgaccatgatgccgccatttggccggaaccggattttgaccgaacaggagatcaacgcgatcgttgatttcctgcagaccctgtga

SEQ ID NO: 982 - DNA, 672 bp, BradyrhizobiumColbertium
ttggctgaatatgtcgtcgaatttggcagggacggcggaagggtcgagccggatgggcggctcgatgcgccggccttccatcgcaatcacgagccgatctgggctgcgctggaaaagcatctcgccggcgcgaccggaaacgtggtggaactcggcagcggaacaggtcagcacgtggttcatttcgcgcgccacacgcccggcctgatctggtggccgagcgacctcaaccagcgccacctcaagagcatcgaagcctggcgggtatatgcggctctgccgaacatccgcccgcccctgcggatcgacctcatcgatccccattggtgtccggagatgaagagcgggcagggcccgacgagccttgcagccgtgttctgcgccaatgtcatccacatcgcgccctgggtcgtcgccgaaggcctgttcgccggcgcgggtcgatacttgcgcgccgacggcaagctgttcctctacggccccttcaagcgcgacggcaagcacactgcgctcagcaatgcggtgttcgacacctcattgcgcgaaggcaatcccgaatggggcgtgcgcgacatcggcgacgtcgagagtctcgcgcggggcgcggaccttcgtctcgtcgatacgatcgatatgcccgcgaacaacctcacgctggtgttcgcgcgctag

SEQ ID NO: 983 - DNA, 2067 bp, BradyrhizobiumColbertium
atgtcggtcgacgacaggcccacgctcaccgcccccgacgacgatccctggctgtggctggaggagatcgaaggcacccaggcgctcgatttcgtcgagcggcagaacagcctgacgctcgccgcgttcggcggcaaaaccttcgagcacgaccgcgacatcctcgccgcgatctacgaccggccggacaacatcccctatgtgagccggcgcggcaacgatctgcacaacctctggaaggacgcgagccatccgcgcggcctgtggcggcggacgacaatggcggaatttcgcaaggccagcccggactgggagaccatgctggacatcgaccagctcgcagcaagcgaaggcgaggactggctgttgagccagatcgccaccatgccgggaagctcgcgcgccatgctgagcctgtcgcgcggcggcagcgatgccgtcacgcttcgcgagttcgacctcgccacgaagagattcgttgcggacggcttcacgctgccggaagccaagggcggcgtcgactggctcgatgccgacacgctgctgctgtcgagcgcgcatggcgagggcatgacgacgagctcgggatatgctcggaccgttcggctgtggcgacgcggccagcctgtcgatgaggcgcaggtgatcatcgagacaacgcccgatcacatgatgatttatggcagcgtcgacgacaccggcactgcgccgcgaacctggatcatagaccagatcgacttcttcaatcatgcgatctggctgcgcgatgccgctggcgtgacgaccaggctcgatctgccgaccgggatctggatgcaggcgcatggcgactggttcgcgatgaagctgcgcaaggactggacggtcgaggggcggacctacgccaccgataccgtgctcggcatttcgctttcggcgttcctcgccggcagccgcgatttcgcaatcctgttcgaacccgcaccacggcgggcgctgcaaggcctgttctgggtcgccggcaagctggtcctctcgattctcgacgagctgaagccgcgcttcgagatccgcacgccgtccacaaccggctggagccgcgagatgcttcccggcctgccgggaatcggggtcgtcgacgtctggccgctggatcgccatccgtccgagagcaacggcgatctgctcgccaatgtgcaggacccgctgacaccgccatcgctgctgctgatcgagcgtggcgtcgccagcccaaccgtgctgaagcaggcaccgaagacgttcaccccagacgggctcgtggtgacccagcacgaggcgatctcgatcgacggcgagcgcattccctatgtccagcccgcccccgccgcagagatcggcgacgcgccggtctatatgagcgcctatggcggtttcggactttccgtgaagccgtattacaacgcctcgctcggcaagctgtggctggagcgcggcggcacgacggtgcaggccaatttgcgcggcggcggcgagttcggcacgcgctggcacgatgccggccggctcgcaggcaagaagctgtcgcatgacgatttcgccgcggtcgctgccgatctcgtccgccgcggcgtgacgcagccgaagcgcatcgcggcgcagggcggatcgaacggcggcatcctcatcaccaacatgctggtgcgctaccccgagcgcttcggtgcgctgttctgcaccatcccgctgatcgacatgcgccgctacaccaagctgctcgcgggcgcgagctggatcgccgaatatggcgatcccgacaagcccgacgaatgggagtggctgcagacctactcggcctatcacaatgtgaaggccggccagccctatccgccgatcctgatcgccaccacgcgacgcgacgaccgcgttcatcccggccatgcccgcaagatggcggcgaagctccaggcgatgggctatgaggcctggctctacgaaccggcagccggcggccacggctacggcaaggacaacaaggagcgcgccggcttcgaggtgctgggctatcggtttttgaaggagaggatcgggtggcgggatggcgactag

SEQ ID NO: 984 - DNA, 1248 bp, BradyrhizobiumColbertium
atgatcgatgtgacgtctactgccgaaatcgccgacgacgcccgcgtgcgtgccaatgtggtgcgccttgccgccgcgcaggcattgaccggcgccaactcggcggtgatcttcgcaaccggcgcgatcgtcggcgcgacgcttgcgccggacatgtcgttcgcgacggtgccgatctcgatgtatgtggtcgggcttgctgcgggcacgctgccgaccggcacgatttcgcggcgcttcggtcgtcgcgcggctttcatcatcggcacgggcctcggcacgctcaccggcctgctcggctcgttcgcgatcctgcgcggttcgttcgcgctgttctgcttcgcaaccttcctcggcggcctctacggcgccgtggcgcaatcctatcgcttcgccgccgcggatggcgccagcgcggcttaccgtcccaaggcggtgtcgtgggtgatggccggcggcgtgttcgctggcgtgctcggcccgcagctcgtgcaatggaccatggacgtctggcagccctatctgttcgccttcagcttcctggtgcaggcggccgtcgcgctggtcgcgatgggcatcgtcgccggcgtcgacatgcccaagcccgcgccggccgatctgcacggcggacggccgctgctcaccatcgtgacccagccgcgcttcatcgcggcggcgctctgcggtgcgatctcctatcccatgatgaatctggtgatgacctcggcgccgctcgcgatgcagatgtgcggcctcagcgtgtccgattccaatttcggcctgcaatggcacatcgtcgcgatgtatgggccgagcttcttcaccggctcgctgatcgcccgcttcggtgcgccgaagatcgtggccgccggcctcctgctggaagccgccgccgccggtatcggcctctccggcctcaccgccatgcatttctgggccacgctggttgtcctcggcgtgggctggaatttctccttcatcggcgcttccgcgctggtgctggagacgcaccagccgcaggagcgcaacaaggtgcaggcgttcaacgatttcctggtgttcggcatgatggcgatcggctcgttctcctcgggccagttgctggccaattacggctggtctgcggtcaacctcgtggtgttcccaccggtcgtgctgggccttgtcattctctcgctcgtctcttgggctcgtcgccgcaaggcgcggctggacgcggccatgggcgagtttccggacgcggtctag

SEQ ID NO: 985 - DNA, 1236 bp, BradyrhizobiumColbertium
atgctcgataatccccaacagccccgaattgacgaatcctccctccgttacgaaggctggcgcatcgtcgcggtctgtttcctgctcgccaccttcggctggggtctcggcttctacggccagagcgtctacgtcgccgagctccagcgcgcgcgcggctggccgacgtcgttgatctcctccggcaccacgttcttctatctcttcggcgcgctgctcgtcgtcttcgtcggcgaagccgtgcgaaagtacgggccgcggctctgcctgatcgctggcacgctggcgatggcggccgcggccgttgcgatcggcgcggtgcgcgaaccctggcagctctatcttgccaatgccgtgctcgccttcggctgggccggcaccagcctcggcatgatcacgaacacgatcagcctgtggttcgaccacaggcgcggcatggcgatcagccttgcgctgaacggtgcgagcttcggcggcatcgccggcgttccgctgctggtgatgctgatcggccatgtcggctttgccagcgcgatgtacgccgctgccggagccatgctggtgctgctgctgcccgtcattctccttctcgtcggccgaccgcccgaccgccacggccggcacgcgaccgcgaaggcaagaccgcaatcctcgacgcagatccgcgcatgggcattgcgtgacgtcggcttcctcacggtgacgacagccttcgccctcgtgctgttcgcgcaggtcggcttcatcgtgcacctgatctcgttcctcgatcccgtgatcggccgggagcgggcagctcttgccgtcgccgtgctgacggcgatggccgtggtcggccgtgtactgttctcactggtgatcgaccgcctcgaccagcggctcgcctccgcgctgtcgttcctcagccaggctgcggcgcttctcgtcgtcatcaatctgcacgacgactacgtgctgatcgcggcctgcgcggtgttcggcttctcggttggcaacctcataacgctgccttcgctgatcgtgcagcaggagttcgagtcggccgccttcggtgtgctgatcagcctcaacaccgcgatcaaccaggtcacctacgcattcggccccggcgtggtcggggccttgcgcgattggtccggcggctattcgctgccgttctatctctgcatcgtgctggaggtgatggcagctgcactgatcatggtgcgaggcaagccaggagcaaggctatcgtag

SEQ ID NO: 986 - DNA, 495 bp, BradyrhizobiumColbertium
atgtcgcaaagcccagccgttcctgccggcacccgaatcggccacgttcatctcaaggtcgccgatctcgatcgtgcgctcggcttctattgcggcgtgctcggtttcgagctgatgcagcgcatgggctcgggcgcggccttcatcgcggccggcggctatcatcaccacatcggcctcaacacctgggagagcaagggcggctcgccgccgcccccgggcacgacggggctcttccacaccgcgatcctctatccgacgcgccccgcgctggcgaatgcgctgcaccgtgtgctctcggccggcattgcgctcgatggcgcgagcgaccacggcgtcagcgaagcgctgtacttgcgcgatcccgaccagaacggcgtcgaactgtactgggacaagccgagggaacaatggccgttcggaccggatggaaagctcgcaatgttcaccaagcggctggatgtggaggcattgttgcggcagcgtgaattgtga

SEQ ID NO: 987 - DNA, 546 bp, BradyrhizobiumColbertium
atgcgcctgaagcttctttcgcctggcgaaatgaacgagagccagcgccagacctatgacgaatcgatcgccggcaagcgcggcaagccgccgccgccgatgatggcctggttgaacagccccgacatggcccgtcacgccacacggctcggcgaggtccttcgattcgatacggtattcccggccaagctctcggagatcgcgatcctggtgacggcgcggcactggaccgcgcattacgaatggtatgcgcacaagcgcctcgcacttgccggcgggatggcccctgagatcatcgaggcgatccgcgaccgccgcacgcccgacttcgacgaccccaaggccaggatgatctacgacctcgcgaagtcgctgcacgaaggccacggcgtcgagaagggcctgtatgatgaggcggtgaagctgctcggcgagcgcggcgtggtcgaggtgatcgggctctgcggctattacacgctggtgtcgatgacgctgaatacgttcgagttcgagctgccggaaggtgaggtgtcggagctggcttaa

SEQ ID NO: 988 - DNA, 1212 bp, BradyrhizobiumColbertium
atggaaacgaccatgagcgatacagaaaccaccgatctcgagaccttccgcaacgagacgcgcgcctggctggaagccaattgtccgcccgaaatgcgcaagcccgcaacatcggatgcggatgtgttctggggcggtcgcaacgcgaagttctcgtcggagccgcagcgcatctggttcgagcgcatgcgcgacaagggctggaccgtgcccgactggccgaaggagtatggcggcggcggcctcagcgccgccgagcacaaggggctgcgcgcggagatggcgcggatcggcgcccgtccgccgctgtcgagcttcggcatctggatgctcgggccggcgctcctgaagtacggcaacgaagcccagaagaaggagcatctgccgaagatcgcagcgggcgagatccgctggtgccagggctattccgagccgaacgccggatccgatctcgcctcgctccagacccgcgccgagagcgacggcgacgacttcatcatcaacggccagaagatctggacctcctacgccaactacgccgactggatcttctgcctggtgcgcaccgatcccgccgcgaagaagcatgacggcatcagcttcatcctgttcgacatgacctccaagggtgtttcgaccaagccgatcctgctgatctcgggctattcgccgttctgcgaaaccttcttcgacaatgtccgggtgccgaagtcgcacgtggtcggcaccatcaaccgcggctgggacgtcgcgaaatatctgctccagcacgagcgcgcgatgatctcgggcatgggcgagcgcggcgtcggccgtccgctcggtcagatcgcggctgacaccgtcggcaccgatgcgcagggtcggctcgacgatgtcatgctgcgcggccagatcgcgcgcttcgacgttgacgaagccgcgctcgcggcctgcgccgagcgcgccgtcgatctcgccaaggcagggcaggcgcatccggcgttttcctcggccatgaaatattacggcaccgagctcaacaagcgtcgccacgagatcctgatgtcggccggcggcgtcgatgcgctggaatgggagagcgagcgctccaagcagggcgcgaagccgcgcgcctggctgcgcaccaaggccaactcgatcgagggcggcacgtccgaggtcatgctcggcatcgtcgccaagcgcatcctggatctgccgggggcgtga

SEQ ID NO: 989 - DNA, 162 bp, BradyrhizobiumColbertium
ttgttcttcggtgaggacgagggccatgtacgtgtttcccgttcgaaatctattcgttgtcgtcattccgggatggccctaagggccaggcccggaatccatcagacggcatttccgcgggcagatggattgcgggctcgcgctacgcgcgccccggagtga

SEQ ID NO: 990 - DNA, 1140 bp, BradyrhizobiumColbertium
atggccctcgtcctcaccgaagaacaatccatgctccgcgactccgcgcgcggactgatcagcggcaaggcgccggtgtcgcacctgcgccatctgcgcgacagcaaggatcgcgtcgggttctcgaaagagctctggcacgccttcgccgagatgggctttgccggcctcctggtgccggaggacttcggcggcagcggcctcggctatgtcgaggcgggcgtcgtcatggaggagatcggccgcacgctgatgccctcgccctttcttgccaccagcgtggttgcggcctcggcgctgaatcgcggcggcaatgccgcgcagaagtcggaatacctgccgaagattgcaagcggttcgctgctcgcgacgctcgcgatcgacgagggtgcaaaacatcgcccgctgcagaccagtctccaggccgttcgcgcgggcaacggcttcaggctctcgggcgccaaggctctggtggtcgacggccatgtcgtcgacctcctgatcgtcgccgcgcgcacggcgggggccgccggcgagcgcgagggcctgaccttgttcctggtcgacccgaaggccaagggtgttgcgatcgagcgcaccatcatggtcgatgcgcacaacgcggcgcggatcgacttcgccaatgtcgaggtcgatgccgacagcgtgctcggcgaagtcgaccaggccgccaacctgctcgatggcgttctcgacatcggccgcggcgccgtcgctgccgagatggtcggcctcagcgaggaggtctttggccgcaccgtcgaatatctgaagagccgcaaacaattcggcaagctgatcggcgaattccaggcgctgcagcatcgcgccgccgaactctacatcgacatcgagataacccgcgccgccaccatgaaggcgctgcaggcactggacgccgatgttgccaaggccgcatcgagcgtcgccgtcgcaaaggcccgcgccggcaccaccgccacgcgcgcggtgcaggagggcgtgcagatgcacggcggcatgggcatgaccgaccagttcgacatcggcttcttcatgaagcgtgcgagagtctgcgaggagctgttcggcgatgcgaattaccacaccgagcagctggccagggcgcgcgggtattga

SEQ ID NO: 991 - DNA, 126 bp, BradyrhizobiumColbertium
ttgaggcaagcggcagagacgaggctagagaggaccagcgcgagccgtcatggccaggctcgtcccggccattcacgttctcaagtgctgcaagagcgcggatgcccgggacaagcccgggcatga

SEQ ID NO: 992 - DNA, 159 bp, BradyrhizobiumColbertium
atgacgaccaagagtgtggtgcgcgtctacgtcaacatcgtcattgcgaggagcgcttgcgacgacgcaatccaggctgttgccggggaggcattctggactgcctcgcggagcctgtcaccgggccgcgcttcgcgcggacccgttggcgcgcaatga

SEQ ID NO: 993 - DNA, 1041 bp, BradyrhizobiumColbertium
atgatgcgcacttttcgtggcggcctgctgatcgggctcgccctcgccgtggtggtcgccgtcgcggcgatcatctatgaattctacgacacccgcaccttgaagcgcacagtgcgccgcggcgaggtgctgtgcggcgtcaacaagggactgccgggcttctcatattcggaagacaacaagaattggaccggcttcgacgtcgatttctgccgcgcggtggcggcggcgatcttcgacgacccgggcaaggcgaagttcatcccgctcgacgccaacgagcgcttcaaggaattgcagagccggaaggtcgacattctctcgcgcaacacgacctggagcatggcgcgcgagctcgactacgatctctatttccccgccgtcgcctattacgacggcgcaggcttcatgctgccgcgctcgcgcaacaaggagacatcgctggatctgaccggcagcaaggtttgcgtgcaggccaacacgacgacggcgctcaacatcgccgactacttccgcatcaacaacatgaaatacgaagaggtgaagttcgaaaacctcgccgacgtggtgaaggcctacgacaccggcaagtgcgacacgttcagcgccgacgtctcgcagctctatgcgctcaggctcaacctctccaagcccggcgaccacatgatcctgccggacatgatctccaaggagccgctggcgcccgtcgtgcgccagcgcgacgacgactggatgatgatcgtgaagtggacgctgtacgcgatgatcaacgccgaggagctgggagtcacctcggagaacatcgacgaagcgctgaagtcgaagaagccggaagtgatgcgcctcgtcggcaccgaaggcaattacggcgagaagctcggcctgaccaaggactgggcggcgcgcatcatccgccacgtcggcaattacggcgagatgtacgaccgcaacatcggcgagaagtcaaagctgaagattccgcgcggcatgaaccagctgtggaacgcgggcggggtgcagtacgcaccgccgatgagataa

SEQ ID NO: 994 - DNA, 594 bp, BradyrhizobiumColbertium
atgacggattttcgtcgcctgaccggggttttcatggctgcgatggggctgatcctgtccgcgccgcaggccctcgcgcagcaacctgaccgcggcgacgagccgggcttgattgctgatgacggctatcagctcgagccggaatggcagaagcaggtggtctacttccgcaccaccgagcccccgggcacgatcatcgtctcgacggccgaacgtcacctttatcttgtgcagcccggcggccgcgcgattcgctacggcatcggggtggggcgcgacggcttccagtggcaagggctggtgaccatcaccaacaagaaggagtggccggactggacgccgccgccggagatgatccagcgccagccctatctcccgcgcttcatggccggcggcccgggcaatccgctgggcgcccgcgccatgtatctcggcaccacggtctaccgcatccacggcaccaaccgacccgacacgatcggcaccaaggtgtcctcgggctgcttccgcctggtcaacgccgacgtcgccgatctctacgatcgcgtcccgatcggcaccaaggtggtcatccggcagaagcccgaactctga

SEQ ID NO: 995 - DNA, 975 bp, BradyrhizobiumColbertium
atggacgactcgaccaccagcaccgacatccgccttcgtgaaggctcctcgatcgcgcaacggctgatcatggccggctgtgcggccgcggtggcgctgtgcttcacgcccggcctgctcacgcacgatacgctggagatcatcgtctcggcggtggcgctcctggtgggggcgggattcgtcgtcggcatcatgatggcgccggcggtggtgtggatcatcacgcccaacgagatcctgatcgggcagcagcgtccgttcggaaagctccgcacgcgtgtcgtcccgaagcacgacatcagcggattgcaggttcccggcagcaagagggtgaaagcccgtttccagctggtcttcacgctggcatcgggagaacgcctgacgtcgccgccgatctcggacgtgacccatgttcgcgacaccgtggacaggatcgtcacacagttcgaggtccccaatgtcgaggcacccagcaatccgctcgacgcccgcaatcccgagatgcatctcggcgagccggccgagccttttcctgtgagggacgtccgcatcgtcgcgttgatcgcgatcgccttgtgcgctggtccctatgcctacaagctctggcgaggcctgccgcccagccatgtcgatatcctgttgctgccgctcggcgtgatcgccgggctggccgtctaccgctacgccaacctcgcgatcggcgcattctggatcatccggcaggaccatattcgcgtcgagcgattgtggggcgacggcacgccccgcgcggaccacatcgaagggcccgacgtgaagacgatcacggtggagcgccgcggccgctccgaggacgagcactgcatcgtggtgatccgtctgcactcgggacgacggtttcgcagcccgcggatcggttcgcgggtcgaggcccgcgccgtgggcacggagatcgtgcgccggctgggaatcgcggcggagagcaacaagatctag

SEQ ID NO: 996 - DNA, 564 bp, BradyrhizobiumColbertium
atgactttcaaactgctcgccatggccgccgcactgaccggcttcaccgtcaccggggccgttatccccggcgtctgcgacgaggtgtccggcgcggcacccttgcgcgtcgctgccgcgagccaggagaacgcgcccgatttcaccggaatcaccaactggttcaattcgaaaccgctgaccatggccgacctccgcggcaaggtcgtgatggttgatttctggacctatggctgcgtcaactgcgtcaacacgctgccgcacgtcaacgacctctacgccaagtacaaggacaagggcctcgtcgtggtcggcgtgcacacgccggagttcccgttcgagcgctcggcttcgaacgtgcaggccgcgctgaagcgccacggcatcgcctatccggtggctcaggacaataattccaagacctggaacgcctaccgcaaccaatattggccggcgcaatacatcatcgaccagagcggcaagatcgtattccggcacgccggcgaaggcagttacgaccagatcgagcgcaccgtggcaaagctgctgaacgtcgccagctga

SEQ ID NO: 997 - DNA, 699 bp, BradyrhizobiumColbertium
atgctcgaactcagcctcgccgtccttgccggcatcttcaccgtcgcggcgccctgcacgctgccgatgctgccgattttgctcggcgcttcgatcggacgcgcaggacatttgcggccggcgatgatcgcgctcggcttcgtcatgtcgttctcagcgaccgcgctgctgctcggcgcgatcacacaattgttcgacttcgatccgaccgttttgcgcgaggccgcatcgatcctgctgttgggcttcggcctgttgatgctgtggccggcgccgttcgagtggctctcgatccggctcaacggctggctcgatctcggcgcatccagcggagtgcaacgcgagggcgcgctcggcggtctcgtgctcggcaccacgctgggcctggtatggacaccctgcgccgggcccgtgctcggctcgatcctgacgctggttgcaagctcgaagaaccttgcctgggccagcacgctgctggtcgcctatgccatgggcgcggcgatcccgttgctcgcgatcgcttatggcggacaggccgcgaccacgcgtgtgcgcagcctcgcgcggatatcgccgcggctgcagcagggctttggcgtcgtcgtgatcggcttcgccctctccgcctacttccaatacgacacgctgatcgtggcctggcttaccagcttctatcccaccggccagatcggcctgtga

SEQ ID NO: 998 - DNA, 612 bp, BradyrhizobiumColbertium
atgccgaacgtcatcgccatcaacgcccaggccagccagagcatcgttgccgctcaggcgacttcggacgacatgcttctcgaaagcattgccgacggcaatcggacggccatgcacatcctctattgccggcacaatgtgcgggtgtaccgcttcatcctgcgcatcgtgcgcgatgcgaccacggcggaagacctggtcagccaggtttttctggacgtgtggcgcaccgccggccaattccagggccgctcgcaggtctcgacctggctgctctcgatcgcccgcttcaaggcactcaccgcaatgcgccagcgccgcttcgaggacatcgaccaggaagacgtgcgccagattcccgatggtaacgatacgccggagacgtcgctcgaccgcagcgacaccagcgccatcctgcgcgcctgcgtgcagaagctgtcgcccgcacatcgcgagatcatcaacctcgtctactaccacgagaagtcggtggaggaggtcggccagatcatcggcattccccagagcacggtgaagacccggatgttctatgcccgcaagcaattggccgatttgcttaagggcgccggcgtcgaccgcttcgccgcctaa

SEQ ID NO: 999 - DNA, 738 bp, BradyrhizobiumColbertium
atgacccaaagccagcacatcatgatcgtcgacgacgaggccccggcccgggagatggtcggcgattacctcaagatgcacggcttcaccgtgacgctgtgcgacggcggcaagtcgctgcgggcagcgatccagggcagcatgcccgatctcgtggtgctcgacctcaacatgcccgaggaagacgggctctcgatcattcgcgacctcaagagccgcatcaacgtgccggtcatcatgctgacggcgaccgcgagcccgatcgaccgcgtggtcgggctcgaactcggcgccgacgattacgtggcaaagccgtgcgagctgcgcgagctgatggcgcgcatccgctccgtgctgcggcggagcgtgccggccaaggccgccgcgcccgacgcggcggcggcgaaatcggacaaggagcagctggtgcgcttcggcaccaaatggctcgacctcgaagcccaggccttgcgcgacgacgagggcaacgagcatccgctgacggcctccgagttcgggctgctcaaggtgttcgcggccaacccgaagcgcgtgctgtcgcgcgagcgcctgctcgagctcgccaatgcgcgcgatgccgaagccttcgaccgcgccgtggacctgcgcatcatgcgcatccgccgcaagatcgagcccgatccggcaaagcccgccgtgatccgcaccatccgcggcggcggctacctgttctcgccgcagggcgagaaggcgtag

SEQ ID NO: 1000 - DNA, 1746 bp, BradyrhizobiumColbertium
atggccgaacaggacgatgtcctccacctgatcgacgataccggtatcgcgccggaggatgccaacgcccggaaatggaaaatcgccgtcatcgacgacgatccggccgtgcatgacggcacgcgctttgccctctcggactacagcctgaacggccagagcctggagattctgtcggcctattccgcggcggaaggccgcaagctgatggccgagcacagcgacatcgccgccgtgctgctcgacgtcatcatggagaccgacgtcgccgggctcgaactggtcgagtacatccgcaacgagatcaggaacgagaccgtccgcatcatcctgcgtaccggccagccgggtcaggcgccggagcggcgcgtgatcgtgcagtacgacatcaacgactacaaggccaagaccgagctcaccgcagacaagctgttcacctcgctgaccgccgcgctgcgctcctatcagcagctcgagcgcatggtgcagacccggcgcgggctggagatcatcatcgacgccgcctcgacgctgtacgacttcaagtcgatgcagcgcctcgccgagggcgtgctgacccagctcgcctcgctgctcaacgtcgattgcgccggcatcctggtcttgcgcgacaacggcggcatcgatcccgagctctcggtgctcgccggcagcggctgctacagccgcttcatcggcttcacctcgtcgaaggcgctcgaccccgaactgcgcgagatggtggaggcggcgttccagcgccgcaagaacgaattcgccgaccaccgcagcgtgatctacctgcgcaccggaagcggacgcgaggtcgtggtgctgctgcaggccgagcgcgagctctccgagaccgaccgctcgctggtcgagatcttctccagccggctctcgatcgccttcgacaacgtgatcctctaccagcagctccaggacgccaacgcgcagctggaagaccgcgtcgcccagcgcacccgcgcgctgatgcaggccaaccgccgcctctcggcgcaatggctgcggctgcagcgcgccaacggcttcaagaacgagatcctgggcaccgttgcccacgacttgaagaatccgctcggcgtcatcctcggccgcaccgagatgctgaaggagctgatctcgaccggcgcatcggaagccggcgtggtcgcccaggtcgatcacatccgcgacgccaccaagcgactgaccacgatggttgaccatctgatctcggatgcgatggccgatgccttcgacatcaccatccgccgcgagccggtcgatgtcgccaccctggtcaaggaggtcgccgaggccaaccagccgctcgcggtcaacaagcagcagacgatcagcgtcaccgccccgcccaatatcgtcacaatgtgcgacatcgaccgcatccgcgaagcgatcgacaacctcatcagcaacgccatcaagtactctccgatcggcggcaggatcgacgtgaccgtcacccatgaaggcagcgacacgatcgtgcgcgtcagcgacgagggcgccggcctgtcgcccgaggatctcggccgcctgttcggccggttccagcggctgtcggcaaagccgaccgccggcgagagttcgacggggctcgggctctccatcgtcaagcgcatcatcgacatgcacggcggcgaggtgaccgccgacagcgacggccccggcaagggctcgaccttcaccatgaccctccccgcgaccgaaatgccgtga

SEQ ID NO: 1001 - DNA, 2079 bp, BradyrhizobiumColbertium
ttgcccgggctcggacatagcgaacacgcggacaggccgcccggctcgatcgggcagctgcgcgcgcgactcgtcggcgtcctgcgggcagtgccgatccgctggcgcatcctgtcgatcgccgggctgaactccgccgttgtcgtcgtcctggtggcgatgatctggaacggcgcgcaggtgctggggtcggcctgggacgatgtgcgccaggtgcgcgagtccgaccgtatcctcgcgctgctcgaaagcgagaccgggcggctgcaaaacctgattcaccgctacatcaatcagccgagcccggacctgttcgccgagatcctcctgctgcgcgaggcggtgctgggcaccctgacaaaccgcgccgccaaggacccgatgctcgcaggctcggtcgaggagctggagcgcaccaccgaccgcttcctcaacggtttcggcgagctgcgcagcgtgcaggccaccatcgccaagacctacgaggagcaggtgcagggcccggccagggacatggccggcctctactccatcatcgagggcgccacgggccatcgcgacgcgctgatctggccctcgctggggaaatcccgggaggccttcaccgcgatgctggtggcggccaattcctactatctttcgctgtcgtcaggcgcggccgacgacgcgcgccgcaacaccgagacgatcgagaagaccatccccgtgatgatcgatctcgccgacaacgacctccagaggatggccctgcggcggctcgcgtcccgcactgcagcgctgcgcgagggatttgccaagctgtccgagcagcttgccagccgcaccgagctcctgcgcaacaccatcgacgccagccaggccgaggcgatcggcgccatcgacgatctctcgaccaagatgcgccagcgcgagcagaaggcgcaggagacgtttgaccgcacgcttgccgacatttcccgccgcgtgctgtcgatcgcggtgatcttcctcggcatcatcctcaccgccggcgtgctgatcgcgctgtcgattcgcctgcctctgcagcagatcatggcagcgatgcgcgcgatcacgctcggcgatctcgaccgcgaggtacagggcaccaaggcacgcgatgaggtcggcgccatggcgcgcgcggtggaagtgttccgcgagaacgcgatcgccaagcgccagaccgaggacgagctgcgtgcgtccaaggaaaaggccgagagcgcgctgctcgagctcaacgccgcccagcagaacctgatcgacgcggagcggctcgccgcgctcggcggactggtcgccggcgtggcccacgaggtcaacaatccgatcgggatcagcctgaccgttgcttcgagtcttgcccggcgcaccgagatcttcgaggcccagctcaagggcgagggcggcttgcgccgctcgcagctggaggagttcgtgcaatcctcgcgcgacgcctcgcagcagctggtcgccaacctccagcgcgccggcgagctgatccagtccttcaagcaggtcgcggtcgaccgctcgcacgccgagcggcggcagttcagcctgagcgaagccaccgaccagatcatcgccagcctgcgcccggtgctgaagcgctcgccgatcacgctggaggtcgacgtgcccgaagggctgctgctggacggctatcccggctcctacggccagatcctgaccaatttgttcctcaacgccgccaaccacgccttcgccgacgggcgcgccggcacaatcacgatctcggcgcggccgcgcgggacggaggacatcgagatcatcttcagcgatgacggggccggcatgaccccggacgtgcagcgccaggcctttgaccctttctttaccacccggcgcaatgaaggcggcacgggactcggcctgcatatcgtctataacctcgtcacccagcagctcggcggccgcatgatgctggaatccaagctgggacaaggcactacttttcgcattatcatgccccgcatcgccaagggcggcgcgcaaagcacagagaccgacgggacttctcaatggccgaacaggacgatgtcctccacctga

SEQ ID NO: 1002 - DNA, 996 bp, BradyrhizobiumColbertium
gtgccagtgctgagccgtgccgaactctcgcggaccggggtgatcttcgtcgcgcttgtgcttgccgtctggacgacgggcgccgttgcgcgcgaatttcgcgccgccgacacccaggccgaggattacccgaccgtccaggcgctgcgctacatgggcgccctgatcgccgagcgctccagtggccggcatgagatcaaggtgttccattcccgccagctcggcgaggaaaaggagaccatcgagcagacccgggccggcgcgatcgacctcaaccggaccaacgtggcgctgatcggcaatttcgttccggcgatgaacgtgctcgcgatgccgttcctgttccggtccatcgagcacatgcagaaggtgctggacggacccatcggcagcgagatcctgaacagcttcgagccctacggcttcgtcgggctcaccttctacgattccggcgcgcggtcgatctacaatggcgttcgcccggtgaagactgtcgccgatctcaagggattgcggatccgggtgcagcagtcggagttgatgagccagatgatgcgcgcgctcggcgccgaaccggtcgagctgccatacggacaggtgctcaccgggctcgccaaccagctgatcgacggcgccgagaacaactggccatctttcgtgacgacggaccattacaagcatgccggccactacacgctcaccgagcacacgatgagcccggaggtgctggtgatctcgctcaaggcctggaaaagcctctcggcggaggagcagacgatcttcaaggaggcggcgcaacgctccagccggttcatgcgcgagaagtggcgcgacctcgaggagcagtcgcagcgcaaggcgcaggacgcgggcgtgaccatcatcaaggagatcgaccgcaggccgttcgaggaggcgatgacggcgatctacgacaaggccgggcgcgatccggccgcggccgcgctgatcgaacgtattcgcaaggtggagtag

SEQ ID NO: 1003 - DNA, 1323 bp, BradyrhizobiumColbertium
atgtcagccttacgcctcttgcagctcgttgccgtccttgcggcgctttcattggccgcccccgcgcgtgccgcgaccgagatcgcgtggtggcacgccatgtccggcgaactcgggcggcagctcgagaagctggcctcggacttcaacgcttcgcagtccgattaccgcatcgtgcccgtctacaagggcaattacaccgagacggtcacagcggcgatctttgccttccgctcgcgcagccagcccgcgatcgtccaggtcaacgaggtcgccaccgcgaccatgaccgcggccaagggcgcgatctatccggtgttcagcctgatgcgggaccagggcgagccgttctcgctgggcgattacctgcccgcggtttccggctactacaccgatgccgccggcaatctcctgtccttcccgttcaattcctcgacgccgattctctactacaacaagaccatgttccgcgacgcgggcctcgatccggacaagccgccgaaaacctggccggacttgggggcggccgcgaagcgcctgcgcgaccgtggcgctgcgtgcggcttcaccacgtcctggccgtcctggatccatgtcgagaatttctccgccttccacaatttgccgctggcgacgcgggcgaacggctttgccggattggatgcgggactgaccatcgacaatccggtgctcgtccatcatgtcgcggcgctcagcgagtggcagaagacgaaggtgttcgactacagcggccgcgggcaatcggccgagccgcgcttccagaagggcgaatgcggcatcttcatcggctcctcggcgacccgcgccgacatcaaggccaattcgaagttcgagatcggctacggcatgatgccgtactggcccgacgtgaagggcgcgccgcagaactcgatcatcggcggtgccaccttgtgggtgctgcgcgaccgtcctcgcgaggaatacaagggtgtggcgcggttcttcgcctacctgtcgcagcccggcgtgcaggctgcctggcatcagaacaccggctatctgcctgtgacccgcgccgccttcgagctgacgcgctcgcaaggcttctacgagcgcaatccgggctcggcgatctcgttcgagcagatcacgctcaatccgccgacggagaattccaagggcatccggctcggctccttcgtcctgatccgcggcgcgatcgaggacgagctcgagcgcgccttcgccggccagaagagcgcgcaggaagcgcttagttccgctgtcgagcgcggcaacaagatcctgcgccagttcgagcgtgcaagtccggagcgctag

SEQ ID NO: 1004 - DNA, 942 bp, BradyrhizobiumColbertium
atgagattgccagacctcaccgacgccgaaagcttccgcgccttccgctccgatgcggcgcgttggttgccggtcgcgctcgacatcgcgcgcagccacgggctcgacgccagcgcgccgcatgtgtttccaaccgggaccaacctcgtcgtcgggctcggcgacgggctgatcctcaagatcttccccccgctcttgcgtgcgcaattcgtctccgagcgcgcctcgctggcacagctcaagggtcgcctcgatctgccgatcccggagatcgtcgccgagggcgtgcgagacggctggcgctatctgatcatgacgcgccttgccggcacgctcggttcggaagtctggccgcagctgccggaagaccagaaggagcgcctgctgcgccagatcggggagaccatcgcgagcgtgcagcgcgccccgctcggcgcgctcgcgcatctcgagccgcgctgggacgaattcatgcgcgcccagatgcagggctgcgaggcacggcatacgcgtcttggcctcgcgcccaaattcctgaggggcctcgacgatctcctgcgcgatgccgccgagctcatcccgatggatgcgccgccggtgatcctgatcggcgaatacattcccgagaacttcttgctcgcctgcgatgacggccagtggtcgctcgccgggctgttcgacttcggcgacgtgctggcgggatggcgcgattacgacctgctcggccccagcgcctccatggcggcgggccggccggggagggtcaaaagcctgctcgagggttttggctatgagaagctcgacttcgtcctcaagcggcgcctgatggccctgatgctgctgcaccgcgccagcgacctcaacgcgcacatctgcgtcgagggctggcaggggagggcgaaggatttggtcgagctgcaggagctgatctgggcgggctga

SEQ ID NO: 1005 - DNA, 138 bp, BradyrhizobiumColbertium
ttggaaccggattcgcaaggttcgtgccagagcttaacgaggcgttacatagcccataagccactgacattgctcatatctagccgccaaagccgcaaactgcgacgtggggagggcagcttagattgcatacaatga

SEQ ID NO: 1006 - DNA, 1623 bp, BradyrhizobiumColbertium
atgaagcgccgcgatttcctcaaatccgtttccggactggccgccggagcggcgcttccggccatgccctcggtgatctcctcggccaaggccgacgcgcgttcggagacactcctgatcgtctcggagggcggccccaacaatctcgacatccacggcgtcggcaccaacgtgcccggctatgaggtgtcctggaactgctacgaccgcctgatcagccacgagatgaagagcggccccggcggggtgccctattacgaccgcgacaagttcaagggcgagctcgccgacgacatgaagatcgacgacatgtcggtcaccttcaagctgaagaagaacgccaaattccacgacggcacgccggttaccgcgagagacgtgaaatggtcgctcgatcgcgcggtcagcgtcggcggcttcccgaccttccagatgagcgcgggatcgctcaccaaggccgagcagttcgtcgtcatcgacgaccacacggtgcgcgtcgacttcctgaagaaggacaggctgacgatcccagatcttgccgtcatcgtgccctgcatcgtcaattccgagctggtgaagaagaacgccagcgagaaggacccctggggcctcgaattcaccaagcagcagaccgcgggctccggcgcctacaaggtggtgaagtggacggccggcaccgaagtggtgatggagcgcaacgacgcctgggtcggcggtcccctgccgaagatcaagcgcgtgatctggcgcatggtgccgcaggccggcaaccgccgggcgctgctcgagcgcggcgatgccgacatctcctatgagctgcccttcaaggatttccaggagatgaaggccaacggcaagctcaacgtggtgtcgctgccgttctccaacggtattcagtatatcggcatgaacgtgaccaagccgccgttcgacaatccgaaggtgcggcaggccatggcctatgcgatgccgtatcagaagatcatggacgccgtgctgttcggcctcggcaatcccatgttcggtgcggccaaggacaagccgaccgaggtcgcctggccgcagccgcacaggttcaacacggacatggagaaggcgaaggcgctgctggccgaggccggttacgccaacggcttcgagaccacgatctcgttcgacctcaacttcgccggcgtcaacgagccgctctgcgtgctggtgcaggagagcctcgcgcagctcggcatcaagaccaccatcaacaaggtgcccggcgccaactggcgcaccgaactgaacaagaaggagatgccgctcttcaccaacgtgttctcgggctggctcgattaccccgaatacttcttctactggtgctatcacggcaacaattccgtgttcaacaccatgagctacaagtcggccgcgatggacaagctcatcgacggtgcgcgcaccgcggcggctgccggcgacaaggccgcctacgatgccgacgtcaagggcttcgtcgacctcgcctacgccgacatgccgcgcatcccgctgtaccagccctacgtcaacgtcgcgatgcagaagaacatcagcggctatcaatactggttccatcggaggctcgactatcgcgcgatggcgaaggggtga

SEQ ID NO: 1007 - DNA, 366 bp, BradyrhizobiumColbertium
atgcgaacttgtctcgtcgttgacgattccagcgtcatccggaaggttgcgcgccggatcctggaaggcctcgactttcagatcctcgaagccgaagacggcgaaaaggcgctggaggcttgcaagcgcgggctgcccgatgcggtgctgcttgactggaatatgccggtgatggacggctacgagttcctcggccatctcaggcgcatgcccgggggcgaccagcccaaggtggtgttctgcaccaccgagaacgacgtcgcgcatatcgcgcgcgcgctgcacgccggcgccaacgaatacatcatgaagccgttcgacaaggacatcgtgacggcgaaattccaggaagtcggcctgatctga

SEQ ID NO: 1008 - DNA, 1128 bp, BradyrhizobiumColbertium
atgatcgtcgacgactccgtcgtcatccgcggtctgatctcgcgctgggtcggtgccgagcacgacatggaggtcgcggcctccttgcgcaccgggctcgaagcggtcaaccagctcgagcgcatcaaccccgacgttgccgtgctcgacatcgaaatgcccgagctcgacggcatctcggcgctgccaaaactgctggcgaagaagcgcgatctcgtcatcatcatggcctcgacgctgacgcgccgcaacgccgagatcagtttcaaggcgctgtcgctcggcgcggccgattacatccccaagccggagtcgacgcgcgaagcgtcggcggcggacatctttcaccacgacctgatccagaagatccgccatctcggcgcacggctgcgtcgcaagcccgcggtcgcaagcccgccgctcgcgccggcgagtccggcgcccgcgatgcgtgcaccgtccgtcgcaaggtctgccgcgcctgcaccggctccggccgcaccgtcatcgggggcgctcacgacgcgtgcgttctcgacccaggtaccgaaggtgttgctgatcggatcctcgaccggcggaccgcaggcgctgatggcgctcgtcgccgatctcgggccggtgatcgaccgcgtcccggtgctggtcacccaacacatgccgccgaccttcacgaccatccttgccgagcatctggcgcgctcgagccgccggccggcagccgaggcggtcgacggcgagctggtgaagccgggacggatctatctcgcgccgggcggcaagcacatgcgcgtcgcacgcagcggcggggacaccgtgatcgcgctcgacgacggtcccgcggtcaacttctgcaagcccgcggtcgatccgctcttcacctcggccatcgacgtctggcacggcaacattctctccgtaatcctgaccggcatgggctcggacggcatgcgcggcggcaaggacatcgtcgctgccggcggcagcgtcatcgcacaggacgaggcttccagcgtggtttggggcatgccgggggctgcggccaatgctggcatctgcgcggcgatcctgccgctcaaccagatcggcgccaaggtcaatcgcctgttcgcgggagaccgctcgtga

SEQ ID NO: 1009 - DNA, 873 bp, BradyrhizobiumColbertium
gtgacgccggtcgactacgattatctgcgcaagttcctgaaagaacgctccggtctcgatctctccgccgacaagcaatatctggtcgagagccggttgctgccgctcgcccgcagggcgagcctggaaggcattcccgatctcgtgctgaagatcaggaatggcgacggtcggcttgcgaccgacgtggtcgaggcgatgaccaccaacgagaccttcttctatcgcgacaagatcccattcgatcatctgcgcgacaccatcctgccgagcctgatccaggcgcgcgcggcgcgcaagtcgattcgcatctggtcggcggcctcctcgaccgggcaggagccttattcgatcgcgatgtgtgtgaaggagataggcgcagccttggccggttggcgcatcgagatcgtggccaccgatctgtcgcaggaggtgctggagaaatccagagccggtgtctatagccagttcgaggtgcagcgcggcctgccgatccagcacctgatgaagtattttacgcaggtcggcgaactctggcagctcaatgccgacattcgcgccatggtgcagttccgccagctcaatctgctgcaggacttctctcatctgggcacgttcgacgtgatcttctgtcgcaacgtgctgatctatttcgatcaggacaccaaggcggtgatcttcgagcgcctggccaaggcgatggaagccgacggcacgctgctgcttggcgctgccgaatccgtcgtcggcatcaccgacgcgttccgccccgtcacggagcgtcgaggtctctaccagctcaatcctgcgcgttcaggccgtccgatgggcggattgatgccgccgtcgttgaagatcgccgcggcgcggtga

SEQ ID NO: 1010 - DNA, 1161 bp, BradyrhizobiumColbertium
atgcagcgcatcagctgcctcgagcgggatgactggcgtgagaccgcagcgcaatgcggcttcaccttccacactatcggcggcgagcgctattgggacgagcgtgcctattacggcttcacgctcgacgagatcgagcgcggcatcgaggcaccgaccagtgacattgacgcaatgtgcctggagctcgtcggacgggtgatcggcgatgagcgccatctccgacgattgaagattccggaagcgttctggagcctgatcgccgagagctggaagcgcgacgaccgcagcctctatggccggctcgacctcaaattcgacggcaaaggtccggcaaagctgctcgaatacaatgcggatacgccgacctcgatcttcgaggccgcggtgtttcaatggacctggctcgaacaggcgatcgaacggcgcatcgtcccaccgcgcgccgatcagttcaactccatccatgagcggctgatcgcggcctggagggagatcgccggcagccgccacatccatctcaccggcgtcacggacaacgaggaagacgccggcacactcgcctatctcgaagacaccgcgcgccaagccgggctctcgaccaaattgctcgatatcgagcagatcggctggcgcgacgagcccggcggcttcgtcgagatcgacgatcgcgacatcgcactggccttcaagctctatccttgggagtggatgttccatgacacgttcggcgccaagctcgcgagcgcgccgacacgctggatcgagccgccgtggaaggcggtgctttccaacaagggcattctaccgctgctctgggagatgtttccgaaccatcccaatctgctgccggccttcttcgaggacgatccgcgcgccgccgagctcggcagctcgtttgtgcgcaagccgctgctgtcgcgcgaaggcgccaacgtcacgctggtgtcgggcggcatgccgctcgatgaacaggccgggccctacggcgcggaaggcttcgtgcggcaggcgctgtcaccgctgccgaatttctcagggttctatccagtgatcggaagctggctggtgaaccacgagccctgcggcctatcgatccgcgaagacgagagcccgatcacgggaaacggttcgcggtttctgccgcatgcgattttgtga

SEQ ID NO: 1011 - DNA, 384 bp, BradyrhizobiumColbertium
atggccgacaaacccgccaaaaagcagttcggcaagcgccggccggtggccgagccaccgccgtcacggccgccgaccaagcgctccggccatgtcgcgctgctggtgatgggcacgattgcggtcggcaccaccgcctacaccttgatgccgcggcagaactgcgagcccacccccggagccgtgccggagcagacgaccacgacatgcagcagcagcagttcgtcggggggcagcagctcgcgctggtcgtcgcggtcgagcttcttcaacagcgattcctccagtcattcctcgtcgggaacgtcgtccgtttccggccacggcagcgtgagccgcggcggcttcggctcgttcggccacggcttctccggcggcggctga

SEQ ID NO: 1012 - DNA, 405 bp, BradyrhizobiumColbertium
atgatcctgcaatcactcgccggcctgcccgccttcctggtctatttctgcaccgggctgatcgcgatcgtggcctatctgttcgtctatacgcgcatcaccgcccacaacgaattccagctcatccgcgacaaccagccggccgcggcgatcgcacttgggctcagcctgctcggcttcgtcgcgccgctggtcagcgccatcgcgcattcggccaacgtgctggactgcctgatctgggcgacgatcgcattggtcgtccaggtcatcgtgttctatctcgtcaaggttccggtgccgaacctgtcggcgcgaatcgatgccggcgagcttgcgccggcgatctggctcggcctgtcctcgctcgccgcggggctgctgaacgctgccagcatgatctactga

SEQ ID NO: 1013 - DNA, 702 bp, BradyrhizobiumColbertium
atgcgcgttttgctgattgaagatgacagcgccgtcgcgcagtcgatcgagctgatgttgaagtcggagagcttcaacgtctacacgaccgatttgggggaagaaggcgtcgatctcggtaaactatacgattacgacattattcttctcgacctcaacctgcccgacatgtccggctacgacgtgctcaagcagctccgggtctcgaaaatcaagacaccgattctgatcctctccggcctcgccggcatcgaggacaaggtcaagggtctcggcgtcggcgccgacgactacatgaccaagcccttccacaaggacgagctggtggcccgcatccacgcgatcgtgcgccgctccaagggccatgcccagtcggtcatccagactggcgacctcgtcgtcaacctcgacaccaagacggtggaagtcggcggccagcgcgtgcatctgaccggcaaggaatatcagatgctggagctgctctcgctccgcaagggcacgaccctcaccaaggaaatgttcctcaaccatctctatggcggcatggacgagcccgagctgaagatcatcgacgtcttcatctgcaagctccgcaagaagctggccaacgcgtccgagggccgcaacttcatcgagaccgtgtggggccgcggctatgtgctgcgcgagccgcacgaagccgacgagcgcatccccgcctga

SEQ ID NO: 1014 - DNA, 1326 bp, BradyrhizobiumColbertium
atgaaggctttggccgaacagatcggcgacatcgacggcatcaacatatatggccgcgtggtcggcgtgcgcggcctgatggtcgaggtcgccggtcccattcatgccatgtcggtcggcgcgcggctggtgatcgagaccggtgccaaccgtaccattccctgcgaggtgatcggcttctccggcaacaatgccgtcgtgatgccgttcgccggcctcgacggcgtgcgccgcggttgcaaggcggtcatcgccaatgcggccaatcaggtgcggccgtctgcagcgtggctcggccgcgtcgtcaacgcgctgggcgagccgatcgacggcaaggggccgttgccgcagggctcctcgccgatgccgttccgcaatacgccgccgccggcacactcgcgcaagcgtgtcggcgcgccgctcgatctcggcgtgcgcgcgatgaacacctttctcacgtgctgccgcggccagcgcatgggcatcttcgcaggctccggcgtcggcaagtcggtgctgctgtcgatgctggcccgcaacgtcgatgccgatgtcagcgtcatcggactgatcggcgaacgcggccgcgaggtgcaggagttcctccaggacgatctcggagaggaggggcttgcgcgctcagtcgtggtggtcgcgacctcggatgagccggcgctgatgcgccgccaggccgcgtatctgacgctcgcggtcgccgagtattttcgcgacgaggacaaggacgtgctctgcctgatggactcggtgacgcgctttgccatggctcagcgcgagatcggtctgtccgccggcgagccgccgaccgccaaaggctacacccccaccgtcttcaccgaattgccgaagctgttggagcgcgccgggccgggcctcgggataggtgccatcaccgcgatcttcacggtgctggtcgatggcgacgaccacaacgagccgatcgcggatgcggtccgcggcatcctcgacggccacatcgtgatgcagcgcgcgattgcggagcgcggccgctatcccgcgatcaacatcctcaaatccgtctcgcgcaccatgccgaaatcggcggacccgcagttctggccggtcatccagcgggcacgccaggtgatggcgacctatgccgacatggaggaattgatccggcttggcgcctaccgggccggctccagcccggaggtcgacgaggcgatccgcctgcacgagccgctggaggcgttcctgcgccagcgcaaggacgagaaggcgtcactggcggacggctaccgccaattggcgcaaatcctcggcaatttggaaacggaacgctaa

SEQ ID NO: 1015 - DNA, 420 bp, BradyrhizobiumColbertium
atgaagtcacgagataccctcatccgcctgaagaagtttcaggtcgacgagaagcgccgcagggtcacccagatcgagaccatgatcgcagacttccaacgcatgtcggtcgatctcgaacgtgagatccagaccgagcaggagcgtgccgggatcaacgatccctcgcacttcgcctatccgacttacgccaaggccgcgatccagcgccgcgagaacctgacccgttcggccgatgagctcaagggccagctcgacgaagccaaggccgcactggccgaagctttcgaggagctgaagaaggtcgagctgctcgacgagcgcgaccaggcccgcgagcgcgccgaagagaacgcccgcgagcaggccgacctcgacagcatcggcctgatgcgtgctcgcatcggcgccgtcgcgtaa

SEQ ID NO: 1016 - DNA, 546 bp, BradyrhizobiumColbertium
atgctgacgccagcagagctggtcgggttgatcgaggcggtggcgaagcgcgatcaggccgcgttcgagcgcctttacgccgctacgcgcgcgaaactctatggcgtcgtgctccgtatcttgcgccgacaggatctcgcagaggaggtcattcaggagacctacgtcaagatctggaacggcgccggccagttcaatccggccctgtcgtcgccgatcacttggatggcctcgattgcgcgcaaccgcgccatcgacatcgtgcgcaagaagtcggaagcctccatcgaggacgagcctcaggcgatggaggttgcggccgagagccccgatccgctggcgcgccgcgagatgaccgaggagctgaagcgcctcctggaatgtatcggccggctcgagcccgaccgccagcggctcgtgctgctcgcctattacaacggctggagccgcgagcaattggcggaaaaattcgctgctcccgtcaacacggtgaagacgtggctccggcgcagcatgctggatatcagggagtgcctcgggctctag

SEQ ID NO: 1017 - DNA, 1059 bp, BradyrhizobiumColbertium
gtgatggactacaccgaggaccatatcgcgctcgccgcggaatacgcgctcggcacgctcgatgccgatgagcgtgcccaggtcgagaccatgatggcggtggacgaggcgttcgccggcatcgtgctgtcctggtcctatcggctcagtgccctcaaccagatggtcggctcggtcgagccgcgcccgatcgtgtgggagaacatcagatccgagatcgcgcgcacggcccttgcgcaacagccgtccgcgcccgccgaggctacgcctccgccgcctctgccggaaccgccctcgcccgacaccggagagctctcgacggagagctcgtcatcggccgacgtgcagcgtcctcaagtcgagcctccggcgcggccatctgacgagcctgatgcgatacccgacatcgcgccgcaattcatcccgcaggtgcatgctcccgatctcaacgtcgtccgcgcaccgcagacgccggtcgcggacgatggcaacgtgattcgcctcgagaaccgggtgaagcgctggcgctccatcgcatcggctgtcggtgcgcttgcagccgtgctgctcgtgacgctgtctctccaaatcttcctgcccgaggcgctgccgggcgccttgcgtccggcgccgcgcatccagaccgtcgaggtcaagaccccggccgcgccgctcgccccctccgcgcaatatgtcgcgctgctgcagggccagggcggcggccctgccttcattctcaccatcgatggcgcgacgcgaaatttcacggtgcggaaggtcggcgcgacgccggagccgggcaagagcttcgagctttggctgatctcggacaagctgccgcggccgcgctcgctcggcgtcatcggcgcgagcgatttcaccgcgcgtccgctgctcgcgtcctacgatgccgaggtcgtcaatggtgcgacctacgccgtcacggtcgagccggccggcggttcaccgaacggccaaccgacctcggccccagtgttttccggaaagctgatcgagactgtcccgcccacgcaagcgcaggcgccggcgaagaagtag

SEQ ID NO: 1018 - DNA, 960 bp, BradyrhizobiumColbertium
atggatgcagcgagaacgccgggcatcttccgtcaccaatatgcggggctgccgcacggcgcggccttcgaacattggcgcgagcgggccgtcggctcctgcggcctcgatatcgggccgagccatggcgagagcatcgattgcaggctccagatcagcgtggtcgacaacatcgcgctcgctattcccgaaggcgcctccgcacaatattcccgcacgcagagtcatcttgccgacggcagcgacgacctcgttctgatcgcggcacatgcgggcctcgtcagcgtcggacagaacggccacaccgtcgaactctcgcccgctcagatggtgctggtcgacatgagcgtcaccggcactgtcggccataccgatgagaatcgcttcacctctatccgcatgccgcgccgcgcgctgctcgatatcagtccgcgcgccgaagacaagctatcccaggtgctgagcgacggtgcggtcgccgagaccatcttccgctaccatgcgctcgccgccaaccacgcgccgcatctcgatgcggtgggccagcgcctgaccgcgcagcatatggtcgatctcgtcggcctcctgctcggcaccgatgcagagcacgcgagccgcgcacgcggccgggggcaggcggcggcccgactcgacctcatgcgcgccgacgtgatggctgcgctcggccgcaacgatctctgcctgtccgaggtcgcgacgcgctcgggtctgagcccgcgccaggcgcaacgcctgttcgagcaggccggcaccaccttcaccgaattcgtgctggagcagcgtctgcttcatgcgcgcaagctgctcggcgatccccgcgccagggcgcgcaagatcagcgacatcgcgcattcctcgggcttctccgacctgtcctatttcaaccgcgccttccgcaagcgcttcggcgcgacgccgtcggagctgcgcgaggcgtaa

SEQ ID NO: 1019 - DNA, 204 bp, BradyrhizobiumColbertium
atgaaccactcgatttacagcgcagatcgctcgacccacctcaagatcgtggtggtggcgctcgttgccggcatcgcggtggcgggcctcggcatcaccgcgcgcgcaacgagctcggatgaaggccttacccagaccgcacgcgtcatgaaggccggcaagccggtcaccatcaccagcgcgaacacctcgctcgttcgctga

SEQ ID NO: 1020 - DNA, 2142 bp, BradyrhizobiumColbertium
atggtcgacgtcacggcgggacagggcgtaggcagcgccaagcccggcatcccctccctcagcgagatcgtcaccatcctcaagcgcggcgatatcgcgctggcgctcggcgtcctcaccatcctggtggtgctgatcctgccgctgcccgcgatcgtgctggatctgttcctggcgatctcgatcacgctctcgatcctgatcctgatgacatcgttgttcatccaggcgccattggaattctcggccttcccaaccgtcctgctgatctcgaccatgctgcgcctgtcgctcaacatggcctcgacccgcctgatcctctcgcacggacacgagggcacggccgccgccggccacgtcatcgaggcctttggcaacttcgtgatgggcggcaatttcgtcatcggcatcatcgtcttcgccatcctgatcatcgtcaatttcgtcgtcatcaccaagggttcgggccgcatcgccgaggtcgccgcgcgcttccacctcgacgccatgcctggcaagcagatggcgatcgacgccgacctctccgccggcctgatcgacgagaaggtcgccaaggagcggcgcaaggagctggaggacgagagcggcttcttcggcgcgatggacggcgcctccaagttcgtccgcggcgacgccatcgccggactgctcgtcgtcttcatcaacgtcgtcggcggcatcatcatcggcgtggcgcagcagggcatgtccttcgccgacgccggccgcacctacacgctcctgaccgtcggtgacggcctcgtcacccaggtgccggcgctgatcgtctcgaccgcggccggcctgctcgtctccaaggccggcgtctccggtgccgccgacaaggcgctgatgaagcagttctccggctatccgcaggcgctcgcgatgtcctcggcggtgatgctggtgctggcggcgctgccgggcattcccacgctcccgttcctcgcacttggcctcggcgcaggcgcgctggcctggaactcgcgcaaccgcaaccgggtcaccgccaaggccgaagaagccgccaaggccgcgcccgcggcaggtcagcccggtgtaccgggggccgctgcgaccgaagagccgatctcggccgcactcaagatcgacgacctcaagatcgagcttggctatgcgctgctgccgctggtcaacggccccgacggcaccgaccgcctcaccgagcagatcaaggcgctgcgccgttcgctcgcgatcgagatgggcttcgtgatgccggcggtgcgaatcctcgacaacgtccagctcgaggccaacacctacatcatcaagatcaaggaggtcgacgccggcaccggcaagatctggccgaaccagttcatggtcatggaccccggcggcggccaggtgcaggtacccggcatccacaccaccgagccgaccttcggcctgcccgcgacctgggtcgatgccagcctgaaggaagaggcctcgctcaagggctacaccgtcgtcgacgccgcgaccgtgctctcgacccatctcaccgagctgctcaaggccaacatgtcggacctgctctcttacggcgaggtgcagaagctgctcaaggagctgccgaaggagcagagcgagctggtcaaggatatcgtcccgggacaggtgacggtctccggcatccagcgcgtgctgcagctgctgctcgccgagcgcatctcgatccgcgacctctcgaccatcctcgaaggtatcgccgattcgctcgccttctcgcgcaatccagccaccatggtcgagcacgtccgcgcccgcctcgcgcggcagatctgcgcgcagaacacctcctatgccggctatctgccgctgatcgcgctctcggcgaagtgggagcaggcctttgccgagtcgatcatcggccagggcgaggagcgcagcctcgcgatgcagccctcgaaattgtcggagttcatgaccgccgtgcgcgaggccttcgaacgcgccgcccgagaaggcgaagcgccggtgctggtcacctccgcggccattcgtcctttcgtccggtccctggtggagcggttccgggcccagaccaccgtgctgtcgcaggccgaaatccacccaagggcgaggctcaaaacggtcggaagcatctga

SEQ ID NO: 1021 - DNA, 303 bp, BradyrhizobiumColbertium
atgaaccgcatcattggtatcactgctgcactggcactgagcatgggccttgcgaccgcaactctcgcagccgagggcgccgcgatcagcggcgaggtgaagaagatcgacgagggcgccggcaagatcacgctcaggcacggaccggcgaagagcctcggcatggaggaacccatgaccatggtctaccgggtcaaggatcctgcgatgctgaagcaagtgaaggtcggcgataaggtgaccttcgaggctgaggaaggaacgtcgggatatacggtgaccaggatgcagaaggccaagtag

SEQ ID NO: 1022 - DNA, 456 bp, BradyrhizobiumColbertium
atgaagaccgccatcaagctcggcctcgcgctggccgcgctttcgaccgcgccggcgcttgcccatgagaagcacgggcacgcaaccttttcggccggcgagcccggcaatcccaagaagcccgcgcgcaccatcgagattctgatgaacgagatggactacacgcccgcccggatcgaggtgaagcgcggcgagcagatccgcttcgtgctgcgcaatgtcggcaaggaggaccatgaattcctgctcgccacgaccaaagagaatctcgcgcatgctcaggagatgaagaagcatccgcacatggagcacgacgagccgaacgcagtgcgcctcgccccgagcaagacggccgagatcctctggaaattcagcaaggccggcacgttcgaattttcctgtctgatccccgatcaccgcgactacggcatgatcggccacgtcaccgtgaagtaa

SEQ ID NO: 1023 - DNA, 1335 bp, BradyrhizobiumColbertium
atgttttcccggcgaggattcttgggcagcgccgcgcttgccggcgcgtcggccatcagcggccgtgtgcaggccgcttcgattccggaagcacccaccatggacaaggccgtgatgcagccgccgctgcatccaatcagcgggcccgactatcggcccgtggtcacgctgaacggctggtcgctgccgtaccggatgaacggcgactggaaggaattccatctcgtcgccgaacccgtggtgcgggaattcgccgaaggcatgaaggtgaatctgtggggctacaacggccagtcgcccggcccgaccatcgaagccgtcgagggcgacaagctccgcatcttcgtcaccaacagactgcccgaatacaccaccgtgcactggcacggcatgatcattccgagcggcatggatggtgtcggcggattgacccagccgcacatccagccgggcaagaccttcgtctacgaattcgagatgaagaaaagcggaaccttcatgtaccacccgcattccgacgagatggtgcagatggcaatgggcatgatgggcatggtcgtcgtgcatccgcgcgaccagagctttcggcccgtcgaccgggacttcgtcttcgtgatgagcacctatcgcgtcgaccccggcacctacctgccccatgtcaacgagatgaccgacttcaacatgtggacctggaatgcgcgggtgtttcccggcatcgatccgctgccggtcaggctcggcgacaaggtgcgcgtgcggatcggcaatctcaccatgaccaaccacccgatccatctgcatggccacagctttgcggtgacctccacggacggcggctggattccggagagcgcacaatatccggagacgaccaccgacgtgccggtcggcgcggtgcgtgtgttcgacgtgctcgcggacaatcccggcgactgggcatttcattgtcacaagtcgcaccacaccatgaatgcgatggggcacgatgtgcgcaacctcatcggggtgtcgcgcaaggatctcgccaaggccgtcggcaagctcgcgcccgacggaatggccatgggctcgaccggcatggcgatgggcaacatggagatgcccgcgcccgacaacacgctgccaatgatgaccggcaccggccagttcgggccgatcgagatgggcggcatgttcacggtgatgaagatccgcgaggacctcgcgcgcgacgattaccgcgatcctgggccatacaagttcccgcaaggcaccgtcgcctacgaggtcacggcgcccgccgcagagccggcccggcaaaagccgggcgcgccgatgaagaacatgaagatgtga

SEQ ID NO: 1024 - DNA, 1425 bp, BradyrhizobiumColbertium
atggcacaccatttggcgcggggcctgctggtcctgactgcgttcagcgtttccggctgcgtcgcattctcacccgatagcgggatgacggcagttgccgagctgacgggccagaccattaacaaggacgtcgccttcgtgcgaacggccgagagtgctgccgcggtcgacgcacgcgttcgccagctgttgtcgcggacgctgaccgcagacacagccgtgcagatcgcgctactcaacaacaaggggctgcaagccgcctataacgagctggcgctggccgagaccgatctggtcgaacagagcctgccgcccaatcccgtgttcgcggtctcgcgcatcaccggcaatggcgccagcgagatcgagcgtcaggtcgtcggcgacatcctcgcgctcgccaccctgccgttccgctccgacattgctcgcgagcgcttccgtgaagcccagctgcgcgctgccctggcgacgctgcggctcgccgccgacgtccgccgcgcctatgcccgcgccgtcgcgggcaacgaaatggtagggctgctgacggacgcgaaggcgacggcggaatcgaccgctcagctcgcggtcaagctgggggagaccggctctctcaacaagctcgaccaggcccgcgagcaggtattctacgccgagaccaccgccgacctcgcaacggcgcgccaggttgcagcgagcgcccgcgaaaggctggcccgcctgatggggctgtgggacgccggtctggacttccgcctccccgatcaactgccgccgctgccgcgcaggccacaagcgctgcccacgatcgaggccgatgcggtggcccatcgcatcgacttgcagatcgcgcggctggagctgaacgcactggccaaggccctcaacctcaccgaggcgacgcgttttgtgacgctgttcgatctcgccggcatgacccgccgcacgcaggagccggaaggagccccgttccgcgagcgcggcttcgacgtgcagttccagattccgatcttcgacggcggcgaggtgcgggtgcggcaggccgtcgaatcctacaacttcgccttcaaccgcctgaccgagcgtgccgtgaatgtgcgctccgaggcgcgcgatgcctatcgcgtctatcgctccacctacgacatcgcgagccattaccagcgcgagatcatccccctgcgcaagatcatcaccgaggagatgcagctgcgtttctccagcatgcaagtcgacatcttcgcgctgctcaccgaggcgcggcagcgtctggcgtcgttgcgcggcgcgatcgatgcccggcagagattctttctcgcccaggccgatttgcagagcgtcgtcaatggcggctacgccccggtggccggcgccgacagtccaaccaccgtcgccgcggcagcgcctgccgccggcggccactga

SEQ ID NO: 1025 - DNA, 210 bp, BradyrhizobiumColbertium
ttgctggccctcgccacactggtgctgtccggctgcatgccggcaacgccccaggtcgccagcgccgatccggctgatccggcggtaaaggtcgcgcccgtcggctatcgctcgaccatcgcgccctacacgagcctgcggcctgcgacgccggcgtcgtggcgcgagcgcaacgagaatgtgacgccgcagccgaaacgagagcggtag

SEQ ID NO: 1026 - DNA, 444 bp, BradyrhizobiumColbertium
atgttgctgcgattgacgcgaccgttgcggatcagggtggggcggatcatcgccctcgcctatctgttctgcgtgctcgcgccagcagcaagtcttgcctggggcaatggcgctgccccctgtcttgacgacgtacgcctcgccgatcctgtgccggtgcaccaccagatgcaagctggccacaatcatgacggctcgtcggacgaccacgcggaaccgcacgcccatcatcagacggccgagaaggatgcacccgctcagcatcgccatggcggcgacggaacagtgggtccatgctgcgcgatgatgtgcgtcagcgctctgccggccgatctgcccatcgtcacgacgccagtgcagcccatgtctgcctgcgcgcccgagatcgtggccagcctgcacagcgcggcgccgcccctgcactaccgtccccccatcgcctga

SEQ ID NO: 1027 - DNA, 1188 bp, BradyrhizobiumColbertium
atgcggctggttattgcgcttctgatcggctcgatcggcgccgtcggcatgtgggcggtcgtggtcgtgattccgatcgtgcaggccgaattcggcgccacgcgcggcgcggtgtcgctggcttttaccctcatgatgttcggcttcgggctcggcggcgtgatcgccgggaaaatcaccgaccgcttcggcatcgttccggcgatggcgatcagcatcgccttcctcggcgtcgccaacgtgctcgctggcctgtcgagccagctctggcagttcgtcgccgcctacttcctcatcggcctcggcaccgcggcgaccttcgcgccgctgatggcggaagcctcgcactggttcgagcgttaccgcggcctcgccgtgaccatcgttgccagcggcaattatgtcgcgggcacgatgtggccgccgctcgtgagctggggcacgcaggagatcggctggcgctatacccatatcggcatcggcatcgtctgcgtcagcctgatgacggtgctggtgctggtcctgcgcgcgcagatgggcagggacacggtccacgatcatgccaacgcaccgccgccgcgggtcgatctcaagctctccaccaacacgctgacggtgctgctgtcgatcgccgccatcgcgtgctgcgtcgcgatggcgatgccccaggtgcatatcgtcgcctattgcggcgatctcggctatggcgtggcgcgtggcgccgagatgctgtccttgatgatggcctgcggcatcatcagccggatcggctcgggctacctggccgataagatcgggggtatccgcaccctgctggtgggatcgctggcgcagggctttgcgctggtgttctatctgttcttcgacagcctcacctcgctgtatctgatttcggcgatgttcggccttttccagggtggcatcgtgccgagctacgcgatcatcgtgcgcgaggcgatgcccgcgagcgaggcggcgacgcgcgtcggcatcgtgatcttcgcctcggtgttcggcatgtccttcggtggctgggtgtccggcgtgatcttcgatgccaccggctcctacggcgcggcgttcgcgaacggcgtagcgtggaatgcgctgaacatcggcatcgtcgtgttgctgctgattcgctcgcggatgagcgcaatgaagaccggcccgggattcgccacttag

SEQ ID NO: 1028 - DNA, 417 bp, BradyrhizobiumColbertium
atgcgccctcacctcgccctcggcgccgcaatcgtgctgggcactcctgccgcagccatcgctcaaagccacgaggcgcatggcatcgccaaacctcatgtggcgctgcagcaagtcgtcgaggggctgccgagggatgacaaacaatcggtgcgggtgatgaccgcatcattcaggcccggcgacaagaccgtctatcacacccaccgttacccagtgactgtgtatgtgcaggaaggcgccttcactctggaactggccggcaagccgcccctcacgatcaaggcgggcgaggcgctggtcgaaccacccggcgtgccgatgaccggctacaatcggacggagagagagaccaaggtcgtcatcttctatgtcagcgcggtcgatacgccttttctcgacctgctcgcgcattga

SEQ ID NO: 1029 - DNA, 891 bp, BradyrhizobiumColbertium
atgttcgactggaacgacctcaaatatttcctggcggtcgcgcgccacggcagcaccattgccgccggcaaggcgctcggtctcagccagtcgaccgtgcatcgtcggctcgacgaactggagcggcgactgggccgcacactggtgacccgccagcagagcggctaccgcctgactgaattcggccaggcgatgttgccgtatgcggagcgcgtcgaggccgccattatcgacttcacgcggcgcaccagcgacgtcgagcaggacatgaaaggtgtgatccgcgtcacctgcccggagccgatcgttgcccggctgacccaatccggcctgctcgacgtctttcgcgcgcagcatccctcgctgcgggtcgagttcgtgatgagcgaccgctatctcgacctctccaagggcgaggtcgatgtcgcgtttcgctccggtgacaccgacgaccaactcgtggggcgaaagatcgccgagtcgatctgggcggtctacgccagccgcgactatgtcgaacgacacggcaagcctgagcgcatcgaggacctcgagcggcatctgctggtcggcctggacgattcgctggccaatcaccgcgccgtcaaatggctgaaagaggtcgcgccggatggcaggatgtcggctcgcatcaacagcgtgcttggcctcgtctctgcgatcaagtcgggagtgggcatcggaccgcttccgatcgcacttggcgacgctgagcccggcctcgtccgcgtgctcggcccgatcgcggaattgacgcggagctggcgtatcctgacgcatcccgatctcaggcgcgtgccgcggatcgctgcgttcttcgacttcatcgtgctccagcgcgaggcgttgaagcccatcctgacgggatga

SEQ ID NO: 1030 - DNA, 657 bp, BradyrhizobiumColbertium
gtgatctacattgccggcatggacgaccacaccaaccgaacccgcaaaccgcgcgccgacgccatgcgcaatcgcgagcgcgtgctcgaggcggcaaaggcggtgttcagcgccggcggtcccgaggcgagcctggaggcggtggccaaacgcgccggcgtcggcatcggcacgctgtaccggcattttccggcccgcgaggatctgttcgaggcggtgtaccggcgcgaagtcgagcagctcagcgagcttgccgaggagttgaagaatgccaaggacccggtggacgcgttgcgtcgctggctgcgctccaacgtcgagttcgttgccaccaagaagggcatgtcggccgcgctggcgctgaccttccagagctcgtcggagctcgcggcattctcgatggaccggctgacgaaggcgatcggctcgttgctcgaccgcgcggttgcggccggccagatacgtggcgatctcggcccggaggacctgctcagggcactcgtcggcatgtgctacatgcacgaccagcccggatggcagtcctcggtgctgcggatgctcgacgtgttcgtcgatggcttgcgggtgcggcccggtgccaaaagcaagacgcgcgtcgccaagccggcgagagcggccgcgaagcggaagcggtga

SEQ ID NO: 1031 - DNA, 498 bp, BradyrhizobiumColbertium
atgaaccactccatcagcctcaccgtgaacggtgcgcggcgcgatttcgtcctggacgatccgcgcgtcacgctgctcgatctcctgcgtgagcgcctccatctcaccggcaccaagaagggatgtgaccgcgggcagtgcggcgcctgcaccatccttgtcgacggcaagcgtatcaattcctgtctcgcgctcgccatcagccatgacggcgccgatatcctcacgatcgaaggcgttgcgcgcggggaccagcttcatcccgtgcaggccgccttcatcgctcatgacggcttccagtgtgggttctgcacccccggccagatcatgagcgcgatcggcatgatgcaggaggcgcaggccggcaacgatcccgagcgcatccgcgaatgcatgagcggcaatctctgccgctgcggcgcgtatgccggcatcgtggatgccgtgctcgacgcgcaaggacagatggacgaatccagccagaggcgctccgcatga

SEQ ID NO: 1032 - DNA, 1056 bp, BradyrhizobiumColbertium
atgaagccgttcgattatgtcaggcctgcctcggtcgcagcggcggttgccgctgccgctcagcccggcgctgtctttcttgccgccggcaccaatctgctcgatttgatgaaggggggcgtcagccgtccggaccgcctcgtcgacgtcacgcatctcgatgggctcgatcagatcgagactctcggcgacggttcgttgcgcatcggagcgctggtgagcaatgccgatctcgcgcacgatgctgagttcgcgagatcttatccggccgtggccgaggccctgctgtccggcgcgtcggcccagttgcgcaatgccgcgaccgtcggcggcaatctcctgcagcggacgcgctgtgcgtatttctatgacaccgccagccgttgcaacaagcgcgagcccggcagcggctgcgacgcccgcgacggcgagaaccgcggccatgccgtgctcggctggaccgagagctgcatcgccacgcatccgtcggacttctgcgtgccgctggtcgcgctcgatgccatggtcgagatcgagggcaggggcggccggcgcgaggtcgcgctcgaccaattgcatcgcctgcccggcgatacccccgagcgtgattccgtactcgaacccggagacctcatcgtcgccgtgcgtctgccgcccgccgcgcgcggctttgccgcgcatgcgcgctatctcaaggtccgcgagcgtacgtcttacgccttcgccgtggtatcggccgcggctgccctgcggatcgagagcggcatgattgtcgaagcgcgacttgcgcttggtggtgtcgccgcaaagccctggcgtgcccgcgccgccgaggacgtgctcaagaacgtctcgcccactgccgacgctttccaggaagctgcctggcgtgcgctcacggacgcaaagccgtcaggcgacaacgccttcaagatcgagctcgcgcgccgcatcgtcgtgcgcgcgctgaccctcgccgccgccggcacgcccgcgcgcatccccgcgctgccggcctctccctttgccgcgacatccggagccgaccatgcctga

SEQ ID NO: 1033 - DNA, 2262 bp, BradyrhizobiumColbertium
atgcctgagctcaacctcaccagtacccccgcccatctgcggcacggctcgaacatcggccagccgctgacccgccgggacggcatcctcaaggtcacgggacgggcaacttacgccgccgacaatcatccgcccggcatgctgtttgctgtgatggccgtgtccagcatctcgcgcggccgcgtggtctcgctcgatgttgccgcggccaagcgccatcctggcgtcgtcgatgtcatgacgcatgatcacaagcctcggcttgcgatcgatccggaggtcaagaccaatccgttcgtgttccggatggaggtgctgcaaagcaatgaggtccgctacgccaaccagccgatcgcggtcgtgatcgccgagacgctggaagcggcaacggaaggcgcggtgctgctggcgccgcgttacgaggtgcagtctgcgcgcgtcgggctggatgccggcgaaagcttcgtgccgcccgtcgtcggtgtcggcaaccccgcggagcatcgccacggcgatatcgaggccggcctcgcctcggccgagaagcagatcgatgccatctacgagacgcccccgcaatatcacaacgccatggagccgcatgcgatcgttgcgtcgtgggacggagacaatctttccgtcgacatgccgacccagggcctgatgctgtcgctcgcgcgcatcgccgaattgttcggcattgcgcatgacaagattcacatccgcagcccgttccttggcggcggatttggctccaagggcctgatggccggcccgcaagtcctcggagtcatggccgcgaagctggtcggcaagccggtcaagctggtgctgcgccgtgagcagatgtacggtccggtcggccatcgcgcgccgacccgccagcggctgcgcatcggtgcggatggcgaggggcgcctcaccgcgctcgatcatcatgcgcggaccgtatcgagcacgttcgacgatttctacgagcccgccgccgatgcctcgcacacgctctacgcggcgcctgcgatccgcacctcgcatgacgccgtgcgcgtcaactccggcacgccgctgttcatgcgtgctccaggcgaagcgaccggatcgatcgcgctcgaaagcgcgatcgacgagatggcctgggcctgtggcatggatccgctcgccttccgcctgaagaactatgccgaggtcgagccgatcaccggcaagccgttctcttcaaaagcgctgcgcgcctgctacgagcagggcgccgcgcgcttcggctggaccaaacgtccgctccggccgcggcagatgcgcgacgatgccggcctcctggtcggctggggcatgggcactgcgaccttcccggcgctgatgttccaggccgaagcgcgcgcggtgctccgccgcgacggctcgggcgccatggagatcggcgcgcatgacatggggcagggcgcctggacggcgctcgcccagatcgccgccgacgaactcgggctcgatatcgatcgcgtcgagttcaaggcgggttcgtccgatctgcccgacgccggcatcgcgggcggctcggcgcacacggcaacggcgggtgctgcgatccgcagcgccggtgcggccgtgatcgcaaagctcgccgatctcgcaaccagcgacgagcgctcgcccctgttcggcgccggcaatgccggcgtgatcgcgcgcgacggcaggctgcttcgccgtgacgacgaaagccgaggtgagagctattccgatatcctcgcgcgagcaggcgtcgcggaggtcgaggcccgtggcaccggggcgccgaaccccgcggcgatggaggaatatgcgatgcatgcccacggcgcggtgtttgcggaggtgaaggtcgatcccgtgctcggccaggtccgcgtcacccgcatggccggcgctttcgcggccgggcggatcgtcaatccgcgcatggtgcagagccagctgttcgggggcatgatctggggcctctcgtttgcgctgcacgaggaggccatcaccgaccggcgcaccggccggatcatgaatgccaatctcggcgagtaccacatcccggtgaatgccgacgtgccgccgctcgacgtcatcacggtcgaggaacacgatccgcacgtgaacgcgctcggcatcaagggcgtcggagaaatcggcatcaccggaagtgccggggcggttgccaacgccgtctggcacgccaccggcgtgcgcgtccgtcggtttccgatccggatcgaggaattgctgacgcggcgctga

SEQ ID NO: 1034 - DNA, 153 bp, BradyrhizobiumColbertium
atgaagaccacactcgcaaatgccgaagccgcacgcgaagaggttccgcgcggcagcgacgaattccactcgcaggagctgcgcaaggccatcgccgaatacatcgagctgcagcgagaagcgctcaaggctctccgcaggaagttgaactga

SEQ ID NO: 1035 - DNA, 549 bp, BradyrhizobiumColbertium
atgagcgtcgacatcggtggacggctgcgattcctccgggcgcgccacaagctgtcgcagcgcgagctcgccaagcgcgccggcgtcaccaattcgaccatctcgctgatcgaatccaaccagatgaacccctcggtcggcgcgctcaagcgcatcctcgacggcatcccgatggggctcgccgagttcttcgcgctggagccggagtccaggcgcaagatcttctaccgggccgaggagctgaccgaagtcggcaagaagccgatctcctatcgccaggtcggcgacaatctgttcggccgcagcctccagatcctgaaggagcggtacgagcccggcagcgacaccggacgcgttcacctcgtccatgacggcgaggagggcggcatcgtgatctccgggaagctcgaggtcaccgtcgaggacgagcgccgcatcctgaaccccggcgatgcctattatttcgagagccgccgcccgcaccgcttccgatgcgtgggcggcaagccctgcgaggtgatctcggcctgcacgccgccgacgttttga

SEQ ID NO: 1036 - DNA, 1329 bp, BradyrhizobiumColbertium
gtgacccttcatcagattccgaacaccatcaagaccgattcgtactggatgccgttcacggccaaccggcaattcaagaaatcgccgcgcctgttctcctcggccgagggcatgtactacaccagcgtcgacggccgtcaggtgatcgacggctccgccgggctctggtgtgtcaatgccggccatggccgcaagcagatcgccgccgccgtcgagcggcagctgatgacgctggacttcgcgccgtcgttccagatgggccatccgctagcgttcgatttcgccgagcgtctcgccgagatcgcgccgaagggcctcgaccgcgttttcttcaccaactccggctccgagtcggtcgataccgcgctgaagatcgcgctcgcctatcatcgcgccaacggccaggccagccgcacgcgcctgatcggccgcgagcgcggctatcacggcgtcggcttcggcggcacgtcggtcggcggcatggtcgccaaccgacgtgccttcacgaccctgctgccgggcgtcgatcatatccgtcacacccatgatctcacccgcaacgccttcgccaaggacctgcccgagcacggcgccgagctcgcggacgatctcgagcgtttggtcgccctgcacggcgccgagaccatcgccgccgtcatcgtcgagccggtgccgggttcgaccgcggtgctgccgccgccgaaaggctatctgaagcgcctgcgcgagatctgcgacaagcacggcatcctcttgatcttcgacgaggtcatcaccggcttcggccgtctcggcacgccgttcgccgccaacttcttcggcttcacgccggacctgatgacgacggccaagggcatcaccaatggcaccgtgccctgcggtgcggtattcgcgagccgcaaggtgtacgacggcatgatgaccggcccggagaaccagatcgagctgttccacggctacacctattcggcgcatccggtggcgtgtgccgcgggcatcgcgaccctcgacatctacaaggacgaaggcctgctcacccgcggtgcttcgctcgcggaatattggcgcgatgcgctgcattcgctgaagggtctgccgaacgtcgtcgacatccgaaattgcggcctgatgggcgcggtcgagctggcgccacgcgacggcgtggtcggcgcacgcggctacgacatgctcgtcgaatgcttcaacagcggcctctatcttcgcaccggtggcgactccgttgcgatgtcgccgccgctcatcgtcgagaagagccacatcgacaagatggtctcgatcctcggcgacgccatcaagaaggtggcctga

SEQ ID NO: 1037 - DNA, 1266 bp, BradyrhizobiumColbertium
gtgaaaattctgatcctcggcagcggtgtcatcggtgtcacctctgcctactaccttgcgcgtgccggccacgaggtgacggtcgtcgaccgtcagcccgagccggcactggagacctctttcgccaatgccggcgaggtgtcgcccggctattcctcgccctgggccgggcccggcgtgccggtgaaggcggtcaagtggctgttgatgaagcacggtccgctggtgatccggccgaagctcgatcctgtcatgtgggtctggctgctcaagatgctgcgcaactgcaccagcgcgcgctacgcggtcaacaagagccggatgattccgatcgcggaatacagccgcgatgccttgcgcgacctgcgccgcgacatcggcatccagtatgacgagcgctcgcagggcacgctgcagctgttccgctaccaggcccagctcgacggcacggccgaggatatcgccgtgctcaagcaatatggcgttcccttcgaggtgctgagccgcgagggctgcatcgcggtcgagccggcgctcgctggcgtaaaggaaaagttcgtcggcgggcttcgcctgccgcaggacgagaccggcgactgccacatgttcacgcagtcgctcgcaaggcatgcgcaggcgctcggcgtgcgctttctgttcaacaccggcatcgatcgcatcgtcaccgagggtgcgcgtgtcagcggcgtcgcgaccagtgccggcctgttgcaggcggacgcttacgtgctcgcgctcggcagctggtcgtcacggctggtcgcgccgctcggcatctcgctgccggtctatccggtgaagggctattcgatcacggtgccgatcaaggacgcctccggcgcgccggaatcgaccgtgatggacgagagctacaaggtcgcgatcacgcgccttggcgatcgcatccgtgtcggcggcaccgcggaaatctccggctactcggacaagctctacgatgcccgccgcgccacgctcgatcattcgctgaccgacctgttcccgcgcggcggcgatctcgccaaggcgacgttctggagcggcctgcgtccgatgacgccggacggcccgcccgtgatcggccggacgcactacgccaatctgcacctcaacaccggccacggcacgctcggctggaccatgtcctgcggctcgggccgcgtgctcgccgacatgctgtccggcaggaagccggacatcgacgtgagtgcgctgtcggtcgagcggtacaagcaccggttcgggtaa

SEQ ID NO: 1038 - DNA, 165 bp, BradyrhizobiumColbertium
gtgggtgaattgcgtgacggcggcggggtagctgccttcaacgcccgcggcgggtggaagaaatccgcgccgtgtctacgccgccattgcgagcgcagcgatgcaatccagagtcttgccgcggaggcattctggattgcttcgttgcttcgctcctcgcaatga

SEQ ID NO: 1039 - DNA, 645 bp, BradyrhizobiumColbertium
atgcgcaaactggccgccgcaaagccggctaggaaggtgaaagccaaggccatcgccaggccggccgagccggcgatggacgttacggtcggccgccgcatccgggatctcaggcgggtcaggcgattttcgctggagacggtcgccgcacgcacggacctgtcgatcgggtttctcagccagatcgagcgcgggctgtcgtcgccgtcgctgcgcgtgctggcgaccctcgccgacgtgctcggcgtcggcatcgccgcgctgttcggcgccagcccgagcgctgacgcggcctccgatcaggtggtgacgcgcggactgcagcggcccgagctgaaactctggcgcaccggcgtatcaaagcagttgctgagcccggccggtgcggacaacaagctcaacctgttcctggtgcatcttgaacctggcggctccaccggcgatgagctctacacgcatgatggcgaggaagccggcctcgtgctcgaaggcgagatgatgctgacggtggacagcgagacctggtcgctgaagaccggcgacagttttcgctttgccagccgaaggccgcaccggttttcgaacccggctgaagatgcgaaggcggtggtgctgtgggtgaattgcgtgacggcggcggggtag

SEQ ID NO: 1040 - DNA, 798 bp, BradyrhizobiumColbertium
atgcgcgggcggcgccggccagacccaaagggggatgcgatgaagcgttatgtccaggccgcggtcgcggcactcgcgattgccgcaacggtgccggcgtcggcgcaacaggtgctcaaggtcggctcgacgccgacgggcattcccttcaccttcctcgacaccaagaccaacaccatccagggcatcatggtcgatctcatcaccgaagtcggcaaggatgccggcttcaacgtgcagatcgagccgatgcagttttccgcgctgatcccgtcgctgacctcgagcaagatcgacatcatcgcggccgcgatgttcatcacgccgccgcgcaaggaggtcgtcgacttctcggatccgatctacacctacggcgagggcctcgtggttcccaagagcgatactaaggcctacgccacgcaggaggatttgaagggcgagacggtcggcgcgcaggtcggcaccgccttcgtcgacgcgctcaagaagaccggcctgttcgccgacgtgaaggcctacgacaccattcccgacatcctgcgcgacgtgaacaccggccgcctcaaggccggctacgccgactatccgatcctcgcctacaatctgaagcagggcggcttcccggaggtacgcctcgtggacggctacaagcccgtcacggtcggatcggtcggcatcggcgtgcgcaagggtgaggccgcgctgctcggcaagatcaacgcttcgctcaccaagctgaaggccaatggcaccattgacaagatcctgggtaaatggggcctgaaggcccagggctag

SEQ ID NO: 1041 - DNA, 654 bp, BradyrhizobiumColbertium
atgaaaggcttttggcgcgacgccgtcgagttcttcccgattctgctgaacggcgtcgcgctgacgattatcgtcacgattggctcgctgctgctttcgacagtgctcggcctcgtctgggcaatgatgcgggtttccggtatcaaggcgctgtcgatgctcagcgccagcctgatcaacgtgatccgcggcatccccattatcgtgctgctgttctatctctacttcgtgatgcccgacctcggtgtcacgctctcggccctgcaggccgcgatcctcggcctcggcatcgcctattcggcttatcaggccgagaatttccgtgccggtatcgaggccatcgacaagggccagatcgaggcggcgcaatccatcggcatgggctggtggctcaccatgcgccgcgtggtgctgccgcaggccgtacgcatcgtgctgccgccttacggcaacgtcatgatcatgatgctgaaggattcctcgcaggcctcgaccatcacggtcgccgagctcgcgctgcagggcaagctgatcgcatcctcgaccttcaagaacaccagcgtgttcacgcttgttgcgctgatgtatctcaccatgagcattcccctgattttgctggttcgtcatttcgagaagcgggccggcaagcgatga

SEQ ID NO: 1042 - DNA, 732 bp, BradyrhizobiumColbertium
atgatcgagctgaacgacgtccacaagagcttcggcagggtcgaggtgctcaagggcattacggcttccgtcgagaagggcgaggtggtctgcatcatcggcccctcgggctcgggcaagtccacaatcctgcgctgcatcaatgggctcgagagctacgaccgcggtgagatcagcgtcgagggactgaaggtcgaccgggatgcaccgtcgatcgtgaacatccgcacccaggtctccatggtgttccagcgcttcaacctgttcccgcatcgcacggcgctggagaacgtggttgaagggcctctctatgtgaagaaagagtcgcgcgcgcaagcgtttgatcgcggccgtgcgctgctcgcccaggtcggtcttgcggaaaaggccgatgcgcatccgccgcaactctccggcggccagcagcagcgcgtcgcgatcgcgcgggcgctcgccatgcagcccaaggcgatcctgttcgacgagccgacctcagcgctcgaccctgagctggtcggcgacgtgctcggcgtcatgcgcaagctcgccgacgacggcatgaccatggtcgtcgtcactcacgagatgggctttgcccgcgacgtcgccgaccgcgtgctgttcatcgatggcggcgtcatcgtcgagcaggggccggccagggcgctgctcaatcagccgcagcatccccgcacgcaggactttctacgccgtgtgctacatccgctctga

SEQ ID NO: 1043 - DNA, 1284 bp, BradyrhizobiumColbertium
atgacgcgcctgcctctgccgccctcgctctatgccgatacagccgtcgctccggttgccacgccgccgctcgatgtcgacaagaatgtctccgtcgcgatcgtcggcggcggctatagcggcctctccaccgcgttgcatctggccgagcagggcgtcgacgcgctggtgctggaggcgcaggagcccggctggggcgcgtcgggcaacaatggcggccataccaatcccggattgaagcacgatcctgatcagatcgaagccgacttcggcgccgacctcggccgccggatgatcgacttctcctacggcaccaccaacttcacgcacgatctgatccgccgctatcagatcccgtgcgaggcacgccagaacggcacgctgcgcgcggcctacaatgaagccagcgccgccgcgatcgaaaagaccgcgcagcagtgcatccgccgcggcatgccggtgagttacctgaaccgcgatcagctccgcgacatgacgggcaccgaccgctatatcggcgccatgctcgatacccgcggcggcgatctgcatcccctcagctacgcccgcggccttgcgcgcgcggcgatctccgccggcgcgaaggtgcatggcgaaacgccggcattgtcactgcgccgcgacggcacgcgctggcgcatcgagacgccgcgcgcagtggtgcacgccgacaaggtgctgctcgccaccaacggcttcaccgacgatctctggcccgcgctccgccgcaccatcgtgccggtgttctcttcgattgccgccaccgcgccgctctccgacgcagtcgcccgttcgatcatgccgacgcggccggttctctatgagagcggccacatcactgtctattaccgcatcgatcagcagaaccgtctgctgatgggcgggcgcggcccgatgcgctggatcaagtcgccctacgacgtcgcgtacctcatccgctatgccgagcggctatggccgcagctcaagggctttgcctggacgcacggctggaatagccggcttgccatcaccgcagatcattatccgcatgtgcatgagcccgcggaaagcatcctgatctcgctgggctgcaacggccgcggcgtcgcgctttcgaccgcgatgggcgcgcaactcgcccgccgcctgatcggaggcgccaaggccgagatcgacatgccgatcacaggcatcaagccgatcccgatgcatgcgttctggccggtcggggtgacgaccgccgtgatcgcgggtcgggtgcgagacaggctgggcatatga

SEQ ID NO: 1044 - DNA, 225 bp, BradyrhizobiumColbertium
atgaagaaacttgcgctcgccgcgtcgctcatcattgcggccggattcacattgacaagccctgcgctggccaagggcggccatggcggcggtcatggtcatggacatggtcacaagatgggccatcatcaccatggcaagtcgttcggatggcaccatgggcgcaaggtcggctggcgcggcgtgggttgcccgcccggtctgtggaagcagggccgctgctga

SEQ ID NO: 1045 - DNA, 1590 bp, BradyrhizobiumColbertium
atgcctcatcagttcagcctcaaccaaaccatccgcaagcccgccgtctcatcgaaaggcggcatcgtcgcctcacaatcgcggcgagcggccgaagtgggggcagaggtgctggcagcgggcggcgactgcgtggacgcgatcgtggcgaccacgatggcgctgaatgtgctggagccctggaacagcggcatcggcggtggcggtgcaatggtgctctaccgcgccaaggaaaatcgctatgaggtgatcgactacggcatgtccgcgccgcagagcctgcgcgctgccgactatccgctcagtggcgaaggcgcggcctccgatctcttcccgtggccgcgggtgaaggacgatcgcaacatccacgggcccggttcgatcgcggtgcccggcgttgtcgccggtatggaagaggcgcatcgccgctacgccaaaatgccgtggaaggatctggtcgcgccggcagctcggctcgccggcgaaggtctgctggtcgattggtggacgacggtgacgatctcgggctcggccgccgatctcaggcgctatcccgcgagcgccgcggcgttcctgaaggacgggctgccaccgactgcaccatgggggatcaaggccgagacgcgcttgccgcaggacacgctgaaagcaacgctgtctcatcttgccgaggccggaccgcgcgacttctaccagggtgacctcgccaggagcatcgcctccgacatcaaggctgatggcggttcactgtcggtggaggacctcgccgccttccgcgcgcatttgcgcgagccgctggcgatcccgtatcgcggcggcaaggtgtatgcgacgccggagctcacggctggccccaccatggcgcacgcactgcgcctcttgcagcagaatctgcagccgggaagcgcaccggacgcggccgcctatgtcgaatatgcactcgccctgcaaacggccttcggcgagcggctcaaggacatgggcgatgccgacggcaagcgctcgctcggcgccgaatatctggcgcccgcctgcaccacgcatttctccgtggtcgaccgccagggcaacctcgctgcggtgacgcagacactgctctcgtcgttcggctcgcgatatgtgacgccgcacaccggcatcgccatgaacaacggcatcatgtggttcgacccgacgccgggcaccaccaattcgctcgcgccgggcaagcgctgtctctgcaactacacgcctgtcatcgccgagacgaaggatagcaagcgccttgccgtcggcgcctccggcggccgccgcatcctgccgtcggtgatgcaactcgtgtcctttgcgatggatttcggcatggacctcgatgccgccatccatcagccgcgcatcgacgccagcgagggcgcggtcgtgatcggcgatgcccgcctgccagcagaagtacgcgacgctctggccactcgcttcgactatgaagagagccgggtgcagatcttgccgcagaaattcgcctgcccaagcgtggttatgcgcgacggcgacgtcaattccggcgcagtcgagatcttccagccctgggccgaagcggtggaggaaggctga

SEQ ID NO: 1046 - DNA, 774 bp, BradyrhizobiumColbertium
atggctggtgtgatgcaggcgcgggatggcgcggttggaatcttgaccctcgacgagccggcaagcctgaacgcgatgaccccggacctgctcggcgcgctcgccgtcgccgtcgccgacatgacgaaagatccggacgttcgcgccctcatcctgaccggagagggacgcggcttctgctcgggccagaacctgaaggcatcggaggcgctcggggaggacatcgcggccggcgtgatgcgcttctactggccggcgttcaaggccttgcgcgagtgccgcgtccccgtggttgttgccgtgaacggcgtcgcggccggcggtggcttcagtctggcgatggccggtgacatcatcgtcgcggcgcggtcggcgagcttcatccaggtgttcagccgcatcgccttggtgcccgatctcggctcgacctggctgctgccgcggctggtcggccggcagcgcgcgctcgagctgatgctgttgaacgagcccctgacggcagagcgcgcccaggagatcggcctggtgcggcaggtcgttgacgacgcgaagctgatggaggaggcgcttggtttggcgcgccgcctggccgagggtccgacacgcgccttggttgcgacgcgcgcgctgatcgaggacagcgagcatgcgacctacgaggcgcagtttcgccgcgagatcgagcttcaggccacgatccgcaagagcgcggatgccatcgaaggccgcaatgccttcatcgagaagcgcaaggcaaggtttacgggcaagtga

SEQ ID NO: 1047 - DNA, 177 bp, BradyrhizobiumColbertium
atgttgatcgcttcagtcagcctgctgcgccagcccctgagcttcgtcgccaccaaatggcagacgctgatccgcgttgcaggcaatccctaccgccccgagctgcactacatgcgcggacctggcccgaaatggcgcgccaagtatcaggccagccggctgaaccgctcgctctga

SEQ ID NO: 1048 - DNA, 234 bp, BradyrhizobiumColbertium
atggtccaggtctattttcactgctccaacaccgagggcacgctgatcgaccataacggcgccgctgtcgccaatctgaccgaagcacgggaccgtgccgcccagatcatgacctcgatgatccagacgccgggtgccgaagactggcgcgactgggtgattcacgtcagcgaccacgacggcgaggagatcttcgatcttccgttcaccgccatgctcggcaagccgcattga

SEQ ID NO: 1049 - DNA, 2076 bp, BradyrhizobiumColbertium
gtgaaccacctcacgttctggcgtgattgccgacgtctgtacctgtttgcagctgttgtgattggcgcgttgttcggccctgatacggcagcctcctccgagccggtgaggaaaagcggctacgccgtcggctcggagacctgcggcagcggggatctcgctttcccgcgactgcagatcgacatgaaggccggatactgcgccggcctcgtcgccagcgacgaggatcgcctgaagtttccgcgctcgatcgtccaggtgcccggccgtgacctgttcgttgtggccgacatgggcggctggggccgcagcgacggacggctgctgctgctcgatccgcatgcgccccaggggcaacgcttcaaggagctgctgaccgaattggaatatccgttcggtctcgtcatcggtccggacaggaagctgtatgcctcgaccgccgagacgatcttccgattcgatccgctcgccgacagcccgcgcagcacggtcgagaccatcatccgtcacatgcccggccgccgcatcacgctgcccgatggcaccaggatcgacgagagcgcccacccgctcaagcagtttgtgttcgacaagcacgggcggctgttcgtcaatgtcggctcgcacagcgacgattgcatgacgcgtgcgcgggccgcaaagccctgcgccgcggccgaaggcgcctcggcgctggccgcaatctggctgttcactccgcccgcaggcggtgtctttccggcgctgaggcccgacgatcccgacccgcagcacatggtctacgcgcgcgggctgcgcaattcgatggcgctggcgttgcatccgaacttccctgatgcgggctatgccttcctgcaaggcgagaacggccaagatctgcccgacatcttcaaaccgaacgaggagatcaacgcgatcgagcaggggaggcactatggctggccctactgctacgatctgtcgactccgagtccggagttcaggcgcgtgttgcaatcggggccgtacaaatcgctctgcacggcgaatgcgctctacaaggcgccgcactcgctgatgccgccgcacggcgcgccgctcgcgatgctgtattatcgtggcacgaagttcccggagttggaaggcaagttgctggtcggtctgcacggctatcgtccgaccggcagccgcatcctcatctatgaagtcgacgatcgcggcttccccaagccgaagccagcaccggtgcgctatcacgtgagctgcgcggcggatccgacccgcagcttccagaccgacggcggcgaagtcgcggccgcgccgttcgaggagctgatttccggttggcaccgcgtcaacggtgcgcggccgcaaggtgcgcccgtgggcatgaccgttgcggaggacggtgcgatctggctggtcgaggacaagaaccggaccgtgatccgcatcgatcgcgccgcgggcgacgtgccggtgccgctgccctgcgagatccgcagccaggcgatgatcgatcagctcgcggccttcgtggcgagagatgcgcagaatggcgtccggctgacgacgctgcgcaagggcctggtcgagaggcattgcgtgggctgccactcgggtttcggcctcaagccgggtcaatcggaggcagacaaggacgtagccgtgctccgtttcatgctgtcgcaagacggttggatctacccgggcgatcccgatgccggcaagctgcgcacgcggctgcgcgggcgcggggccgagaagctgatgccgccgggcggcgaaagcttgccgaagaccgagccgggctacacacagctgctggacactgcggacctgcttgttgcgaagatggtcccgggcacgcgcatgcggatcaagcccgggccgccgcagcgcaagttcttcggccggaccaaccgggaatgcggcgaaataccggccgccaaggtcgtggtcgtgacacaaaggagcgctgtagacaaacccggcttcagccgattcttccggccggccgatccctatctgaacggcgagtgcaccgacgacgatggctattacatccggcaggactttctggtgcctgtgcagtag

SEQ ID NO: 1050 - DNA, 891 bp, BradyrhizobiumColbertium
ttgctcgccgcgaccctgccggccgctgccgagaccaagctgttcgagagcgtacaggtgacgcaagcgggcgaatatacgttcggcatcgaagggcctgctgccgacctcgacggcaatctcttcgtggtcaatttcggcaagcccggcaccatcgggcgattgccgcccggcggcacggcatcgcagctgttcacggtgcttcccgaaggcagcgtcggcaacgccatccgcttcgaccggaacggcaacatgttcatcgccgactacaagaagcacaacgtcttcacgatcccgaagggcgcgaccgagcctgtcgcctggtttcactccgaccagatgaaccagcccaacgacatcaccatcgcgcgggacgggacgatctatgcgagcgatccgaactggaagggcagggagggccacatctggcgcatcgcgaaggccgccgacggtaccgtgcaggggcaggtgatgtcggcgccgcgcgcgatgggcaccaccaacgggatcgatctcagcccggacggcaagacgctctatgtcggcgaatccagcagcggccagatctggtcctatggaatccggggcaacgagctcgtcgacgccaagctcgtcaaatcgttccagccggacaccatcgacggcctgcgcaccgacgccaccggacgcctctatgtggcgcgcattctcaagggcgtgatcgcgctgatgaagccgaacggcatggtcgagcgcgagatcgcgctcaaggccaaggagccgaccaacctggccttcggggggagcgacggcaagaccgtcttcgtcacccagcgccaaggcggcttcatcgagtctttccgcaccgaccagcccggccgcgagcactgtctccagcgtgggcgttgctag

SEQ ID NO: 1051 - DNA, 1026 bp, BradyrhizobiumColbertium
gtgaaagccgtctataccgaactgcatcgcagccacgatccgcaattcttcctggttcgcggcgtggtcaagcgcaccaccgagcagcccgagcgcgccgatcgcctgctcaagggattgaaggacggcaagcatcaactgatcgagccgacgacgttcgggcagggcccgcgcgcgcgcatccacagtccggaatatctgtcgttcctgagcgaggcctgggaggcctggactgcgctcggcgattccggcccggagatgatcggcaacatccatcccgtgcgtcatgccgcgacctatcccacccacatcgtcggcaagctcggttggcatacggccgacaccgcagcgccgatcggtccgggcacctgggcggccgcctgcgccgcggccgacgttgcagtcaccgccgcgcagatggtgatggacggcgaggatgcgacctacgcgctctgccgtccgccgggccatcacgcctatcgcgacatggccggcggcttctgcttcctcaacaacagcgcgatcgcggcggcgcatctgcgccagaagcacgagcgcgtcgtcattctggacgtcgatgttcatcacggcaacggcacgcaaggcattttttacgcccggcccgacgtttatacgatctcgatccatgccgaccccgtcgcgtactatccctacgtgtggggctatgcgcatgagcgcggggaaggacccggcctcggcaccaatctcaacattcccctggccatcggtaccggcgatgacggctacatgcaggcgctggacctcgcgcgcaaggcgatcgagtcgtttgcgccgggcgcactcgtcgtcgcgctcggtctcgacgcctccgagcacgacccgctgaagggactggccgtcaccacgcccggcttccgccgcatcggccaggccatcgcgaagatgggcctgccgaccgtgctcgtgcaggagggcggttatctctctgatatccttggcgccaacctgacctcggtgctgtcgggattcgaagaggcaaggtga

SEQ ID NO: 1052 - DNA, 981 bp, BradyrhizobiumColbertium
atgacgccgcggcggctgcgtatctttcccgcgatttcacgcaaccgcaatcccaacacctatgtcggcgagctgatgcgggtcgcgcagttcgccgaccgcaacgggttcgaaggcatcctgctgttcgaaggcaacgatgtgttcgtcgagccatgggcgatggcccagcacatcctggcagagacgacgcgatcttcgccgctgatcgccgtcaatcccgtctacatgcatcccttcacggcggccaaattcgtctcgtccttcgctcagctgcacggccgtaaggtctacctcaacatgatcacggggacggcgatcagcgatttgcacggactgggcgacgaccagtcgcatgccgatcgttacgttcgactcggtgaattcgtcgtgctgatgcgtcagttgctggaaagcccgcggccgctgaatttcgacggacggttctaccgcgccagcaatctgcaacttcgcccgcgcctgcctgcggagctgatgccggaattcttgatcgccggccaatccgaggcggcccagcgcgtcgcgaaggagaccggctgcatcaagatgcagatgctgccgcccgatctcgatcacgggctggacgtatcgggcctgaactttggaattcttgcacgcgagagacgcgacgaggctcggcaggctgcaaaagcacgcttccgcgacaatcccgacgatcgcgagctgctcgcgctcaccgtggagaacagcgactccgtgtggaagcggcggctctatgagggacagagcggcgagcttgccgacaatggctattggctgctgccgttcctgaacttccaggcggactgcccgtatctggtcggcagctacgaggagatcggcgccaagctgaagacttttgcggcggggggcctgacaacgatcatgctcgacatggtcgccgacgagaccgagatgcagcacgtctgcagggcgctcgccgcgagcgggatgttctag

SEQ ID NO: 1053 - DNA, 732 bp, BradyrhizobiumColbertium
atggcggacgacagaatcgaactcttcgtcgggctgatcgagacctttgacgcgccgggcgcgatcgatgcgtgccgacgcctgctctcggccgacgagcgggcccgggccgatcgcttcaagttcgagcggcatcgacggcagtatattttcgcacatgccatgttgcgtctggcgctgtcgcaggtcgccaccaacgtcgcgccctccgactgggcgtttggcgccggccgctatgggcggccgtttgtcgcagcgcccgtgacctcgaccgcgctgcatttcagcctgtcgcatgccgacggctgcgtcgcctgcgtggtgtcgcggcatgaggccatcggcgtcgacgtggaaaccgtgtcgcggcgcgtcgcgccgctgtccaccgcgctgcgcttctttgcgccggaagaggtcgaagcgctgcgcggactgccggagcccgccgccatcgagcgcttcttcgacttttggacgctcaaggaggcctatctcaaggcgcggggtttcggactcaacctgccgctcgatggcttcgcgatgcaggtctcgcgcgaggccatcgagatcagcttcaagcccgacatcgccgacgatccggacggctggcacttctcgctgtgttcgccatcgccgtcgcatcgcctcgcgatcgccgacggctcccgtgcgaacggcggccttccgatcagccgcaatgcctggccgctccgggaagcggctgaatga

SEQ ID NO: 1054 - DNA, 171 bp, BradyrhizobiumColbertium
atgggtttcatcaaatttacgaagaagacctcgctcaacgaggaagaccgcaaggcgctgcaagacctgctcaatttcgagaagcagaagctccagaaggagctgaaggaaatcgaacagagcctcaaggctctgagcgggtccaagaagaaatccaagaagaagaagtag

SEQ ID NO: 1055 - DNA, 6438 bp, BradyrhizobiumColbertium
atggcgttgtcggacattgcatccggagcagatgagagatcagccggcacgacggccgaaaccaggatattcgcgcatatcggcggccttctcgaattctacgcgcgcaagacacctggtgcgcccgcactccttgcccctggacggccggccctcagctatggcgcactgggcgtatcgatccggcaactggtcggcaccttgcgcgacctgggcatcgccccggcagaccgcgtcgcggttgcgctgccacgcggcgccgacagtgcgctggcgctgatcgcggtcgcctcaggttgcgcctgcgtccccgtcaatcccgaactgacgtcggacgagctccaacgctatttcagcgaattgaagttggcggcgctcctgacccgagccgacatcaactcggcgagccgcgacgccgccagggccctcgatatcgcggtgatcgatttcgtgccggggccggtcggcgatctcggcggttgtgcgttcgtcggcccggcgatcggagcggcgaatcccagcggcgccccgcgcggcgacgacgacgccttcatcctgttgacgtcaggcacggcggcgcggccgaaaatggtgccgctgacgcaccacaatgtctgcctgtccgcttacaacgcgggccacgtgctgtcgctcacgtcgcacgatcggctgctcaacgtcctcccgctgtttcatgcccatggcctgatctcgggtcttctcacggcgctggcggccggctccagcgtgatctgcaccgacgggttcgacgcctcgtccttcttcggctggatgcgggagctgcaaccgacctggtacacggcggtgccggccattcatcgcgccctgctgacggcggcggaagcagacccggaccgcgcccgttcgtcgtcgctgcgcgtgatccgctcggcctcggcctcgctcgcgcctgcgcttcttcgaggattggaggcgacgttcggcgttcccgtgctcgagacctacgggatgacggaagcggcctcgcaggtcgcagccaatccgttcgagctgcgcaaggccggatcggtcggccgcgccgcgggccccgagatcgcgatcatggaccaggccggccgcacgctcgcaagcggcgcccatggcgagatcatgttgcgcgggccgaacatgagccgcggctactacaatgacgatgcggcgacgcaggcggcgttccgcaagggctggtttcggaccggtgatctcggctatctcgatgaggacggctatctcttcatcgtcggccgcatcaaggacatcatcaaccgcggcggccagaaggtctcgccgctggaggtcgaagaggtcctgctcagccatccggcggtgctggaggccggcgtgttcgccgtcccgcacgaaaagctcggcgagaacgtcgccgccgtcgttgtgctgcggccgaatgccgaggtgacttccgaccaattgcgccggttcgcccgaaagcggcttgcgccctacaaggtaccgagcttgatccgcagcgtggcagcgctgccgaaaggcgccagcggcaaggtgaagcgcaacgcgctggccgagctgatcgcaacagcacacagccgcgacgagatacggctgccgcgcaatgcgatggagaccgagctcgccgagatctgggctggcctgctggagctgccgcaggtcggcgccgaccaggacgtgttcgcgctcggtgcggactcgctcgcggtgacacagatgcgctcgcggctgcgcgaacggtacaacgtcgatttctctttcgaggacatcttcgattgcccaaccgtcgctgcgcttgcggcccggatcgacaccgccgcaaaccggcgcgagacagcgctgccggcctggcaacgagccgcagatgcagacgcaccgctgtcgttccagcagcagcggatgtacctcctttcgcggctcgattcgacacgctgcaattacaacgtcgtcgaagtcgcgctcctgaagggcccggtcgacgtcgccgctttgtccgcaagcctcaccgccatctgcaagcgccacgaggcgctgcgaaccgtcttcatcgaacgccagggcgagccggcccagctcgtgctgtcgtcgcctccgcggttcgagcgcatcaagctcaggccctgccccgcgcagaagcgggccgctgttatcaggcacgaggcgctcaagctggcgcagtatccgttcgacctcgctcgcgagccgctgctgaagctgacattgctgtcgttcgacagaaccaaccacgctctggtcgtcaacatccatcatctcgtcacggacggctggtcgcagcgcctgttctgggaggagctcgccgtccattatgccgcttcgcgcaagaaggaccgggccgcactgcctgcgcccgccttccagtatcgcgacttcgcactctggcagcagggctgggcgcaggcgccggcggccagggagcagctcgattattggcggacacagctcgacggtgtcaccacgctgccgctgcgaaccgacaggccgaggccggaagtctggagcggtcacggggcgcggcactatctcgaactctccaagaacctgtcgggcgagctgcgcgcgctgagccaggaccacggcgtcacaccgttcatgacgctgctcgcggccttccagtgcctgctgttccgccacaccgggcatgaggacgtcgctacgggatcgctgatcgccaatcgcaaccagatcgagagcgagagcctgattgggctgttcgccaacacgctgatcctgcgcaatcatttcggtggcgatcccggcttcagcgagatgttgcggcgggtgcggcaggtgaccttggacgcctaccgcaaccaggacctcccgatcgaggaggtgctgcgcgcactgcagatcgcgcgccgcagcgacggcaatccgttgttccggatcatgttcatcctccagaacgcctcgatcgaggcggcccgctttcccggcctttcgatgcggcggctggaagtcgatcccaaggtggcgcgcttcgacatcactctggaactggtcgaggccgatggtcgcttcaccggcttcttcgaatacgccaccgatctcttcgacgctgcgaccatcgaaggcatggccggccagttcaagacgctgctcaaggccgtcatcgccgatccggagcagcgcatctcgcgcctgccgcttctcaccgggacggaacgccagcagctgctggcacaaggtcggggcctgccggccaatttcaccgcgcgcggcaatttcatcgaacgcttcgaccggcagatgaagaagacaccggacgccattgcggtgtcggacggaagcacgtcgctgagttatcgcgagctggcgcgtcgcagccaggcggccgcacgctggctcagccgcgaggggatcggcgccgagagcgtggtcgccctgcttgcggagcgcggggccgacctgctcgccgcgatgatggcagtgcagcgcgtcggcgcggccttcgtcaatctcgatcccgaccagccggcggcccggcttacgaccatcctcggatcgagctgcgcccgcatcctgctgaccggacggcctcagtccaccttggccgacgccctgctcgcgccgctggtcgagcgcattgaagtggccgagctcgaagacgtgattgccccggcggcgaccaggccggctcgcgccgcgcagcgcgacgcctcgagcctcgcctatctcgtctatacatccggctcgtccggcgcgccgaagggcgtcatgatcgagcagcgcggcctgtcgaaccacctggcttcgctcatctccgaactcgacctttccgccagggacgtgatcgcgcagaccgctccgcagagcttcgtcatctcggtctggcagttccttgccggaccgatggtcggcgcgcgcgtgcatgtctgcgccaatgcgatcgtgcgagacccgatcctgctggcacgggagatcgcgcgcgaggacatcacggtgctcgagatcgtgccttcgctgctgcgcgtcattctggatcgcatggacgaggcgcctgtgctgcgcgccttctcaaagttgcggctgctgatctcgaccggagagccgctgcccgtcgagctctgccgtgcctggttcgcccgctgtcctgaagtgccgcttatcaacgcctatggcgcgtcggaatgctcggacgacgtctccctgcatcgcctgaccaaggcgccggcgatcgcgatcggcaccgttccggtcggcgcgccgctgccgaacacccagctctacgtgctcgacgcaaaccttcagccgcagcccgtcggagtgaccggcgagctctgcatcggcggtgccggcgtcggtcgcggctatgtcaacgaccccgcgcagacgcggcaacgctttctgcccgatccattctcacgccaggcgggccggctctaccggaccggcgatctggccagacgccgctccgacggcacgatcgaatgcctcggccgggccgaccatcaggtcaagatccgcggctatcgtatcgagctcaaggagatcgagagtgcgcttgccgaacatccaaacgtgcgtaccggcatcgtcgagccgcgccgcgaggcgagcggcgacatcaagctgatcgcccatatcgtcgcagagccccacagccggagcagcgccagcgagctgcgcggattcctgaaaggcaggctgtcggaccatgccatcccgtccgcgtttctgttcctcgaccggatgccgctcaatgcccacggcaagatcgaccgctccgcgctgctggcgcctccccacgagccatccgcagctgatgctgccgtaccggcccggcggttcacggaaaaggtgctctctgacatctggatcgacctgctgaaggtcgagcgggtcggtgtgaccgacaatttcttcgacctcggcggccattcgctgctggcgggacaggcgatggcgcgcattgcccgcgcgctcggcgtatcgctgccgctcaagaccatcttcgaggcatcgaccatcgaacagctcgcccggcaggtcgacgaagccgcggcggcgaagccgcacgagcctgccgcaaccctgccgcgatcggctgcaggcggacttcctgcgccttccatcgcgcaggaccaaatgctgcggatcgagcgaaatctgccggggctgccgctcttcaacctgcccttcgccttccgtctgcagggcccgctcgattcggccgcgctcgcaaaggcgatcgatgatgtcgtacgccggcacgaatcgctgcggaccgcgttcgcctggaacggcgatgagcccgaaagccgcatcgtcgcgcctcgcaccctcggccatgtcatgaccgtggagacgatcggtgacggccatccgcacaccaacaagcgacgcaaggcgctcgaactcaggaagatcgatctcctgatcaagcaggagacctataccccgatcgacgccgcgcgcgcgccgctactgcgcgcccggttgttgcggctgcacgacgaggaccatgtgctgcttctgacgcttcatcatgccatcgtcgatggctggtcgatcggcgtgctgttcgaggacttgtcgagccgctatgcggcgctggccggatattcctcagtgccgctgccgaagccgcccccggccttttcggaggtcgcgcgctggcagcgctggtggtgcggcaccgatgctgcgcgccgtcaggctgccgattggacggaaaatctgcgaggagcgggccccgtcttcgagggcgaatccaccccgggcgcgtccaccggtcaccatccagtcagcctcgaccgcgaactgatcggccggatctcggcgctgggagcccagcataatggcacgctgttcatgtgcctgctcaccggtctgaaggccctgctgctggcccggaccggccgcaccgatatcgtggtcgcgaccgccatggccaatcgtgcccagccggacaccgaccgaatcgtcgggccgttcgagaacaccgtgctcatccgcacgacggtcacaccggagctgtcgttcacgcaggccttggcgcgggtgcgccaaggcgtgctcgacgcgcatgcgcggcaggagctgccgttcaacgtcctggccgaccatctggagcaggaggggttagatcccgcctcgctgctccaggtgtatttcacgctgcagaatccgttgcgtcagccgctcgatctcccggatctcgcgacagcgtcgatcggcgacatcgcgcgtgaaggccagccggtgctgccgatcgaccagagctggctgtcgctgatgctcaaggagcgtccgaccggagtcaccggcacatgcaactacaagcgcgaattgctcgagggccgaatggtcggcgagtggatggagaatctcgtcgcgctgctgactgcagccgccgcccagcccgacgcaccgctcagccggttactcgcgagcaaggcagcctga

SEQ ID NO: 1056 - DNA, 3462 bp, BradyrhizobiumColbertium
atgctggagaatgagccgggcacgggagaaggcgagctgaaacgctggctcgaaggtatcggcctcggccgctacagcgatctgttcgcgcagcatcgtctcgatctcgacgtcatgggggacctgaccgaacccgatctgatcgagctcggattgccgctcggcgatcgcaagcggctccagcgggcgatggcggcgttgtttcaggcggaaacggcggaatcgcccaccgcagcggtgcgtccacaagcgcgggcggaggtcggtgctgaacggcgccaactcaccaccatgttctgcgacatggtggattcgacgttgctttccacgcagttcgatccggaagacgtccgcgacatgattgccggcttccgcgaaacctgtgtccgcgtggtcaagcactacgagggctttgccgcgcgtttcgtcggcgacggtatcctggtctatttcggctatccatccgcccatgaggacgatgcggagcgtgcggtgcgcgccgggctggaaatcgtgagggcgctgtcgagcgcgcgcgcggtcgagccgcgtggtgcgccgagccattcgccggccgtgcgcatcggaatcgcgaccggcctcgtcgtggtcggcgatctcgtcgggcagggcaccgaggagcgcgactccgcggtgggagaaaccgtcaacctcgccgcgcgcctgcaagccctggctccgcccaatggcgtcgtgatctccgcttcgacgcagtcgctgctgaaggggaagttcgactaccgcaatctgggcgtccacgacttgaagggcatctccgagaagacgcaggtctggcacgtggtgcgcgcctcgcgggtggagacgcgctttgccgcggccatgggcacgcggctgacgcccctcgtcaaccgcgaggaggagatcgcgctgttgatgggacgctggcagcaggccaaggacggcgacggccaggtcgtggtcaagttcggcgagcccggcatcggcaagtcgcgtatcatccaggagatcttcgagcggatatcgggcgaccgccatgggcaggtttcgctccagtgctcgccttactacacctccaccgcgttccatccgttcgtcgagcagctcaagttctcgctcggcctcgatcgcgatgatacgtcagcgctgtcgctggcgagcctcgaaaaagcgatcgctgccgctcatggcgatatcgagcaagtcacgccgctgtttgccgctctgctgtcgataccaacgggggaccgctatccgccgctcgaactgtcgccgcagcagcagaaggatgcgaccgttgtggcgctggtcaaccacttcctcggccttgcacgcgacatgccgctggtgatcgcgttcgaggatttgcactggatcgatccgacgtcccgcgaggtgatcgacctgctggtcgagcgggtacagaaccgcccgatcctggtcgtcatcaccgcgcgcgtcgaattccagccaagctggaacgcccattcgcacatcaccaccctggtcctgaaccgtctgagccggcagcttcgcacgactctggtcgaacgtgtcgccggtcgagagctgcccaaggaggtcgtggaggagatcatcgtcaagacggacggcgtgccgctgttcctggaagaactgacgaagaccgtccttgaatccaacctcctgaccgagcgccacgggcgctatgtgttgtcggggccctggcggcaactcgcaatcccggcaaccctgaccgactcgctgatggcgcggctcgaccggatgggaccgttcaagcggattgcgcagatcggtgccacgatcggccgcgagttctcctacgagacgctgcacgccgtcgccaatacaccggccgagcagatcgaggcggcactcaatcatctggagcaggcgggtttgatcatccgccgcggccatccgccggacgcgctctactccttcaagcacgtgatgatccagaacgccgcgcatgacagcctgctacacagcgagcggcgcaagctgcattccaggatcgcccaggtgctcgtcgagatgtacccggagaagaccgatcgcgaaccggagctgctcgcccatcacctcaccgaatccggccagagcgagggcgctgcgagcttctggctcaaggccggcaagcaggccgccaagagcggcgccaatctggaggcgatcggccatctgcaccgcggcctcgcggtcgtgcaagccaatgcgcgcatgcagggcgcagacgagatggagctcgagctgcgcattgcgctcggcaatgcgctgattgccgccaagggctacgcggtgcaggaagtcgaggagaactatacccgcgcgctggagctcggctatcagctcgacgacgacgaaaaggccttcgctgcgacccgcggcctctgggtctgtcatttcatccgcgcagatctgacccgcgcgcacgaactcagcgtcgagctgttgaggttcgccaagcgcgcgcgactgaacgagcgggcgcagccggcgcagcagaccggatacctgatcgaagcgcaccgctcgatcgcgatgaccatgctctatcgtgggcgctttgccgcatcccagcatcatttgcaccggtgcatcaacctctacagcccggatctgcattccgatctgatggagcgacacggcaccgatcccggagtggtctcgctgtcctatctcggctatctcctgtggttccttggtcgccccgacgcagcacgccagcatagcgagcaggcgatcgcgaatgcggagaagatccggcatcccttcaccctcgctttcgctctcgtgttcggtgcctatctctgtcagcatctgcgcgacgtcgagggcacgcgcgaccatgccaaccgcgcgatgatcatcgccaccgagcacaatttcctgcattggaagcagcaggcggcgatcctgcgcggctgggcgctggctcagctcggcgacgccgacgaagggctccgccagatgcgcctcggcctcgacgagtacgaggcgatggattcctggctggccggctgctggttccgctgcctgctcgcggaagcctatgccaaggttgggttgcgcgaggccgccctgcgcgccctcgatggtgcgctcgcgacggcaaggcgcacgggcgatcattcctacctcgccgaggtccatcgcctgcagggcgagatcacgctgtcggacggtgatccggtctcggtgcaggaggccgaaggtctgttcgagttatccctggagatcgcacgcaagcagggtgcgctgtcctgggagctccgcaccgccgtcagccttgcgcgcctgtcgcttgaaaccggcaagcgcgagcacgcaagactcctgctggtgccgatcgtggccaaattcagcgagggcctttacacggcggacctgaagcaggcgatgcagctcgtcaacgagcttggcgcggatgcgcccgctcgcgagcaggccgatctgtga

SEQ ID NO: 1057 - DNA, 795 bp, BradyrhizobiumColbertium
atgcgggatattgccgccgcacgtgcgcgctatgtgggattgattgccaggcgcgagctgatttcctcaaagcgcctgctcgatgcgcttgctgccgttccgcgtgaggattttctgccgcgcggaccctggcgcatcaaggacgaggcggcgcgcagctaccggctgacgcccgatgcagatccggtccatctctacgacaatgtgctggtcgcgatcgacgcgcgtcgcaagctcgacacggggttgccgagcctgtgggcgcatttgatcgacatactcgacgtcaagcagggagagcgtgtcgtgcagatcggctgcggcctcggctatttctccgcggtgctgtcgaggatggtcggcccaaagggccacgtgcatgcgatcgaatgcgatgagcggctcgcggcccgagcggggaactatttgcgcggctatggcaacgtcacggtcgtccatggcgacggatgcaaggatgtcgtcgaacccgccgacgtgatcattgtgcatgccggtttctcgcacccgcatccgctctggctgcggtcgctgcgtccgcgcggccgtcttctggtgccgctgacccagcgggatcgcgaaggcgccgcgatcaagatcacgcggaaggccaaacgtttcgaggccgaggcgatccagcagattcgcatcttccccggccaggggcgcggtgtgactgccctcgacgaccgggtcgccgattggtggcagcgggcatcggccccggcaccgctgcgctttcgcggtctcgcgcaagggctgccgtcggatggttaa

SEQ ID NO: 1058 - DNA, 948 bp, BradyrhizobiumColbertium
atgcattccgttgcactgctgactgccagctatgccaaggatatcgaacgtttctcgctcctcagcgagagcatcgacacctggctctcgggattcacgcggcattatgtgcttgtgaacgacgaggacgtgccgctgttcgcaccgttcgtctccgacaggcgcgttatcgttccggcctcgcgctatctgccgaaatggctgctcgcgctgccgccggcgctgcaattcggcaaccggcgcatctggctgtcgctgctgtcttcaccggtgcacggctggcatatccagcagatcctgaagatcgccggcgtcctgaatgcacctgagcagcgcgtctgcattctcgactcggacaatcttttcttccgcgaattcgacgtccgccaatatgcaggcgccgagaagacgccgctgttcgtcgcgcccaaggcgatcggggcggatcatccgctgcatggcctctggctccgcacggtcgatcagcttctcggtatcgagcagcgctcgttcccggccgacgattatgtcggcaacgcgctggtctgggacaaggacacggtgcgtgcgatggtcggcgccatcaagtcggccacgggcttgagctgggctctggcattgtgccggaagaagaaattctccgaatatctgctttacgggaatttcgtcgcgaattcgccggaccatctggcgagacatcgggtcaccgaagacagcattgcagtctcgcactgggatgacacgccccttgaccgcccggccatcgaagcgatgatgcatgcggcctcccccgagcaggttgcactctgcatccagtcctattcgtcaacctcggtcgaggacatccgcgacgtgttccgtctctcatcgcgcgatcgtcgcagtccgggcctggctcccgatcacgtcggagatgcgcccgcgttcgaaacgccgaagatgcgatag

SEQ ID NO: 1059 - DNA, 1122 bp, BradyrhizobiumColbertium
gtgcacggcgccgcttggtacgaaggcgcgttggttgcaaaaggaacgcccaacgtggtcaggctcgatcgacgcgaatttctcctcggcagcgccgcagccctcgcggcgggcgcatcggcgtccgcagtgccggcgtcgaaacgcgcccagcgtcgtcccggctttggcgctgcggccacgttgtgggatctgcaagcggatccgcggctcggcgaggccatcagcacctattgcacgcagattgtgccggtgctcgagctgaaatggccgatgctgcggccggatgcgcacacgttcgctttcgagcgcgccgacgcgatcctggatttcgcgcgagacaacgatctctcgatgcgcggccacgcgctcgcctggtatcatgacattccggactggaccaagcagatcaaggacaccaagggcgtcgagcgcgcctatcgcgaccacatcggcaccgtcgtgtcctactacaaggacaagctgacatcgtgggatgtcgtgaacgagccgatcccggacaatcctcgcagtccgaaggaccggcgcgacacgttctggacgcagcatctgggtcagagctggattccgctggcgttccgcacggcggctgcggcggaccccttcgtcaagctcgcgatcaacgaatacgacatcgaatcggcgaaagactcgttcatcgccaagcgcgcggcctatcgcaacctcatcatggatttgctcgaccggggcgttccgctccacgcggtcgggctgcaatcgcatctgcacgccgagctcgagatcgacacgcacgggctcgccgaattcgttaccgagctgcgttcctggggactcgatgtgctcgtcaccgaactcgacgtcgacgaccagaagctggcgggtagtccggcggagcgcgacgccatcgtcgccaagcgcgtcgacgaccttctcaccgcaatctcggtcagcggcccggtccgctcgatcctgacctggggactctcggaccgctacagctggatcaacggcacgtttgcccgcaaggacaagcagccgaaccgccccttgccgctcgacggcgagttcaagcctaagccgttcatggacgtcatcagcaagttcacgaacgaggcttga

SEQ ID NO: 1060 - DNA, 1437 bp, BradyrhizobiumColbertium
atgctgaatcgtcatttctcgatctacctggtcgcctacatcctgcccgcggcggtgggcttcttcgccgtcacggcctatacgcggctgctgagcccggcggagtacggcgtctatgtggtcggcatcagccttgcgggcattctgggcgcgatcttcttcgcctggatcaagctgtcggtgtcgcgctatcaggcgatgtcggcggacgtcgattttcgcggcacggcgatcgtggcgttcgccctgacggccgcagtgctctgcgccaccactccgctggtcttcctgttccgcagcgacgtcagcgtcgggctgctgctcgccagcatgttcgtggcgatcatggccaacgcggtcgacgtcggccaggagttcgagcgcgccaagttgcgcccctaccggttcgcggcgatctcgatcgtgcgcagcgtctccagcgtcggcttcggtcttctcggcatctggctcggctggggtggattggggctgctcgccgcgttcggtctgggatcgctcgccggcatcatcatgaatctcgtcggcgaccgcaccaggatcgcacgcttccagcgcagccagttcatgcagctggcgcgctacggcctgccgctgacgctggccggattgtccgttgcggtctattcggccagcgaccggctcatcgtcgcctatctgctcggcaaggatgccgccggcatcttcggcgttgccgccgatctgccgcgccagttcatggtcatgatcgcctccagcgttgccgcggcgaccgtgccgctggtgttccggtcattgtccgagaacaacagcgagacgacgcgggagcggctgaccgaaagcctcgagcttctgctcgtcgtcgtcgcacccgttgcggtgtggcttgcgcttgcggcggaccaggtcgccggcacgctcgtcggcgtcgacttccgcgccggcgtctcggcgctgctgccgatcctggtgctggcccgcctcttcggtatcgccaatcagttctacgtgcagatcagcttccagcttgccgagcggcccttcatgctggcggcgcaatccttcctcacgctgctgatcagcgtcgtcctgatgttcgcgttgatcgccggctatggccttcacggcgcggcgctggcgacgctggcgaccgaggcgatcggattgctcgttgcggtcgtcttgatgcatcgggcccacccggtcccgttcgagctcaatcgcctcgccggcgttgccgtctccgcggccgcgatggccgccgcgatcctgatggcccgatcgcaagcgggcggcaccggcctcgtgccgctcgtcatggtcagtctcgccggcggcctcgcctatgccgccgcggcctggctgctgaatgttgcgaacgtgcgaacgctgtcgctgcgtttcctgcgaacattgaaccgcaaggcgctcggcgtctag

SEQ ID NO: 1061 - DNA, 240 bp, BradyrhizobiumColbertium
ttgtcgctcacgtgcagattggaatcattgcttaagaaatcgcagccgccttacgttccgtctgtggcgggattcggtacgttcgagcgacaaatctctcatatacgagggttggcacaggcggaaggcgggcttcggccgaggccggcccgaagctgggctcgatcgctgcggcagaatgtccggatcaccttttggtgcagccgtcccggccgagcggggcggatggtccctcgctag

SEQ ID NO: 1062 - DNA, 1545 bp, BradyrhizobiumColbertium
atgaaaaatcaactggcgacggcgcaattcaccaaggcgatgcgacgtctccggcctgccggaatggttgcgctcgcgacgcttgccacattcgtgggcgcggcccccgcgaccgcggccaagcagcagcgccaggccgccgaggcggtcgcgccccgccaggccggcgagccgatcatggcgatcgtctcgatcaagagccagcagatcactttctacgatgccgagggttggatcgtgcgcgcgccggtgtcgaccggcaccacgggacgcgagaccccggctggcgtctttgccatcctcgagaagaaccgggagcatcgctcgagcatgtatgacgatgcctggatgccgcacatgcagcgcatcacctggaacggcatcgcgttgcatggcggaccgctgcccggctatgccgcctcgcacggctgcgtgcggatgccgttcggctttgccgagaacgtgttcgacaggacctatatcgggatgcgcgtgattgtctcgccgcacgacacggtcccgaccgatatctcgcatccctcgctgttcgtgcccaagccggaggccatcgcggccgtgcccggccgggccgacaagctctccgccgaggcggaggaggccaccagggcggccgacgaggccaagaaagctgcgtccgccgccgcgaaggaggctaccgcgctgccggccacgctgcgcaagctggggcagcagaagacccgcgcagacgccgagctcgccttcgccgacaagacgctcgccaatgccaagacggatcaggcccgcgccagggccgaggagcggaagcagaaggccgaggccaaggctgccgacgcggcaacgcagctcgaggccgccatggccgcggcgcagccgaagcgcgatgcggtcgccgccacgaaggaagccgcgaaggcggcggcagccaggaaagccgacgccgtcaaggcggcgaccgacgcaaagctcgccggcgagccggtctcggtttacatcagccgcgcgacgcagaagctctacgtgcggcggaacacgcacaagccggcgcccgacggcggcggcgaggtgttcgatgccagcatcgaggtccccgtcaccatccgcaatcccgagcagccgatcggaacgcatatcttcacggcgatggcgaagaccgatacgggcctgcgctggagcgtggtgacgatcgagaatggcgatgaggccaggagcgcgctcgaccgggtcaccatcccgcaggacgtgtgggatcggatcggaccgaccgcgctgccgcgctcgtcgatcgtcatctccgatgagccgctgagcaacgagaccaattaccggaccgagttcgtcgcggtgctcagcaacgaaccgcagggcggcttcatcacgcgcaagccgaccgcgccggccatggtcgccagcgatgacggatgggacaacggcttcggcttcttctacccgcgtgatccctacgtccagcaaggcaatccgcgccgccgcagccagtatcagtattatcagccggcgcagccgttccagcgcggcttctggtaa

SEQ ID NO: 1063 - DNA, 537 bp, BradyrhizobiumColbertium
atgagccgcatcttcggcgcggtgcgccagaacgggtatgtggtgcgggacatccacgccgccatgaagcactggatcgaggtgatgggcgtaggtccctggtactacatggaccgggtgaagaccgattggttccgccatcgcggccaggattccgccgtggagatgagcattgcgctagccaattccggcgatcttcagatcgagctgatccagcagcgcaacgatgcaccttcgctgtacaaggagtttctcgacgccggccaggaggggctccagcacatgtcgtactggagccatgactaccaggcgctgtacgacacggcgcttgggctcggctacaggatcggccatgagggccagatcggcggcgacaggggacgctttgcctatttcgacacgcaggcccatccgggcacggtgatcgagatctcggacatcagcggcgccaagggcccgttcttcgagaaggtccggctggccgcgatgaactgggacggcacccggccggtccgcgaagtcggcggccgttcgtag

SEQ ID NO: 1064 - DNA, 969 bp, BradyrhizobiumColbertium
atgaagctcagcaccgtcacgctctcactgttcgcgtcgttgatcatggcggcgccggcccgcgccgaggaccccgcgtcctaccccacccgcaagatccggatgctgttgccctatgcggccggcggcggcggtgacgtggtcggccggctgcttgcggacagcatgggcaaggcgctggggcagagcatctatgtcgagaaccacaccggcgctgccggaacgctcggcacgaagatggtcgcgaccgctgcgaatgatggctacaccatcaccctcggcggcatgaccacccatgtgctggcgcccgcgatctatccgaagctgccctacgatcccatcaaggatttcaccacaatcggccgcgtcggcacctcctcgatcatgctggtcgcgaccaggaatttcgccgccaacgacgtcaagggcctggtcgcgctggccaagaagggcgagccgatccagtacggcagctggggcgtgggttcgaccgggcaattctgcgcggagatcctgatgcagcagaccggcatcaagatggaccacgtgccgttcaacggtatcgcaaagctcgccggcgacctgctcggcggccacatctcgcttgcaacgctcgacatggcaactgcgacgccgctggtgaaggacggctcgatcaaggcgctggcagcctgcggcgaacgttcgccgagcctgcctgacgtcgccagttacaaggaacagggcgtgccattcgaccgcaatctgtcctgggcgatgtatgccccggcgggcatcgcgcctccgatcgcacagaaattgtcagcggccttgaaggaggcgctcggcgacgaggtggtgaagcagaagctcctggcgctcggcatcacgccccaattcgtccccggcgaggagcaacgcgacatcaacgcacgcgacatcgcggcctggaagcaagtcgccaagggcgcgggcatcgaggtgaagtga

SEQ ID NO: 1065 - DNA, 894 bp, BradyrhizobiumColbertium
atgcggcaggtgaggatcggcagcatgcggatcgatctcgtcagcgagatcccttcgcttgccttcgacaagagctggctattcgcgaacgtcaccgacgccgtgatcgcggagaaccgcagctggctcgatcaccgctatatcgagccggagaccggccgcttcatcctgagccatcactcctatctggtgcgcacgccgagctggaccgcgatcgtcgacacctgctgcggcaaccacaagcaccggccgcgcgtgccggcatggaacggtctcgaccgaccctatctcgaaaacatgcgggcgctcggcgttgcccctgaagaggtcgacttcgtgatgtgcacgcatctgcatgttgaccacgtcggctggaacacgcggctctgcgacggtcgatgggtgccgacctttcccaacgcgcgctatctgatgggacgggacgagtaccggcacttcgaggccgcccacaatgccgcgccggcgacaccggtgaaccacggctcgttcgaggattccgtgctgccggtggtggcggccgggcttgccgagttcgtcgcgaccgatcattgcgtgttcagcgatcgcgatgcggccgtgcgtttcgcgccggcgccgggacatacggcgggcaacatgcagatccacctcaatggtggccacgaacacgcggtgatgtcgggcgacgtcatccatcatccgatccagtgcgccgcgccctggctgtccaatgccgccgacgtcgatccggccgcggcgctcgcaacccggatggccctgctggaggagcttgcggacacgccgagctatctgctgaccggccattttccggcaccgaccgccgggcgcgtggtccggcacggcgatgcctatcgctttcgtttcgaggattag

SEQ ID NO: 1066 - DNA, 1212 bp, BradyrhizobiumColbertium
atggcgcgccttgcccgtcttcgcctggcctcggcctgcatccttgtgccgctgctcgcagccggcaccgcgtccgcccaaagcgcaaaacacgatcccggcgccgacgacaagaccatcaagatcggcaccaccgcgccgttgagcgggccggtctcggccttcgcgcagatcgcgaaatcggccgaggcctatttccggaaggtgaacgacgaaggcggtgtcaacgggcggcgcatccagatgatcatcgcagatgacgcctacagcccgcccaagacggtggagcagacccggcggctggtcgagagcgaagaggtgctcctgatcttcggcggtgtcggcacgccgaccaacagcgccgtgcacaaatatctcaatgagcgaaaggtgccgcagctcttcctcggatcgggcgcggcgaagtgggacgacccgaagaatttcccgtggaccgtcggctggcagccgacctatcgcgacgaagcgatcgcctacgccaagtacatcaaggcgagccacgccaacgcgaaggtcggcgtgctctaccagaacgacgatctcggcaaggactatctgaaggcgctggaggaagggctcgacggcggcgaagcgatcgtcgcgcgggcggcttacgagacctcggcgccgaccgtcgacacccagatcctgcagttgaagaccgcgggcgcggatgtcgtcctcgtcgcggcgacgccgaaattcgcggcacaggcgatccgcaagatcggcgaaatcggctggaagccggtcaccatcatctccaacgtctcggcctcgatcagcggcgtgcttgagccggccggcaaggacaactcgaccggcgtcatctcaagcaagtacctgaaggacgcgaccgaccccgcgctgaaggacgatgccggctacaaggaatggctcgccttcatggacaagtacatgccggacggcaacaagagcgactggctcaacgtctatggctacacaatcgcgcagacgctggtgaccgtgctgaaggcatcaggcaacgatctcacccgcgccaatgtcatgaagcaggcgacctccatgaaggacgtgcggctgccgatgcttatcaacggcaccgcggtgagcaattcgcccgagcgctttacgccgatgacgagccttcagctcatccgcttcgacggaactcgctgggtgccgttcggcggtctcctgaagaattga

SEQ ID NO: 1067 - DNA, 699 bp, BradyrhizobiumColbertium
atggctgtccctacctccagcgcggcggacgcggctgcgcccacgacccgcgagcgcatcctctccgaagcgctcgacctgttcgcgcagagcggctatggcggcgcctcgatgcgcgagctggcgcgccgggtcggcatccgcgagagcagcctctacaaccattttgccggcaaggccgcgatcctggaggcgatcgtggccgagcacggtccggccagctcggcgagccggctggaggagccgcgctacaagcagctcgcacgtcaacccgccgcgttctgccggcagttcgcgctcgacctcgtcgagcaatggtccgatccgcgcgagcaccagttccagaaggtcatcaccgccgagcgcaaccgcgtccccggcatccgggccaagttcgccgatcaattctacgcgcgcgagcagagcctgatgacggactattttcgcggctttgcgctcgccggtctgatctcgacgactgacccgcgcgagaccgcacgcctgttcgcggccgggctcatctacatccgtctcgaacattacgtgatgggtgcggcgccttcgccgcgagcaaaggtgatcgaggcgatcgaccgctatctcgccttcttcctgtcgctgatcgcggcaggcaacgacgccgacaacaagaaacgaaagcccaagggagagaaccgtggcaaggctgcccctgattga

SEQ ID NO: 1068 - DNA, 561 bp, BradyrhizobiumColbertium
gtggcaaggctgcccctgattgatccggagacgacgagcggcgacatccgcgcttcgttcgaccgcatgccggtcaagctcaacatcttccgcatgatggctcatgccgaggccaacatgatcccggcgatgcggctcggcaattcgatcctgcacaagcagaagctctcggccgtcaaccgcgagctcttgatcctccaggccgcccagctggagggcggcgcctatgaatggcgccagcacgttccgatcgcgctcggcgtcggctgtacgcaggcgcagatcgatgcggtcgagcgcggcgactacggtgcggccgcgctgagcggagccgagcgtgcgctgctcgagttcggccgcgaggtcgtcgagaacgtccgcgtgcccgaggccactttcgctgccgtgcgaacgcatttcagcgatcaggagatcgtcgaatccattgtcgcactcggcttctacatgatgatggcgcgcctcaccgaggcgaccgaaaccgatctcgatcccgccgccggcatgaaggtctatgacggcggcaagaggccgggcggctga

SEQ ID NO: 1069 - DNA, 846 bp, BradyrhizobiumColbertium
atggcggaaaccgagagcaggccggaacgctacatccgcccgcccagcgcggaatcatcaggcgaggcgccgggcaggggacgcctcaaagggcgccgcatcctcatcgtcggcggcggccagcgcgtcttcgacgccgccaccgatccgatcggcaacggccgcgccatgagcattttatgcgcacgcgaaggtgcgaaggtcgcggtcgccgatctcaatcgcccctctgccgagcagaccgtcagttgcatcaccgacgaaggcggcgagggcttcgccatcgccgcggacgtcacgtccgaagcggacgttcagcgcatgatcgaggaagcccgtcgcatgatgggcggactcgacggcatggtgctgaacataggtaccttcggcaaggtcgggctcgatgccgtcagtcccgaggagtggaacaggatctacgacgtcaatgtccgcggccccatgctgtgctgccgcgcggcgctgcccaaattcaacgacggcggggccgtcgtcttcatctcctcgatcgccgcgctgaaggccggctcccagatggcggtgtacgattcctccaaggccgcgctcggcggcctgatgcgcaacatcgcccatctcggcgcgcgccgcggcatccgcgccaatctcgtctatcccggcctcgtcgacactccgaacggccgcgaagccggtgccggccgccccaaccgcggcaagggtcatatcccgttcggccgccaggcaaccgcctgggagatcgcctatgccgtgctgttctttctctcggacgaaagcgtctacgtcaccgcgcaggccctcgccgtggatagcgggctgagcgggatgtaa

SEQ ID NO: 1070 - DNA, 540 bp, BradyrhizobiumColbertium
gtgatcacagaccaacccatgagcaccggcggcagcctgccgtcgcctggagcactcatcgccaagtcaaatcgtctgatacaggcgctcgcaaagccgtcgctggtccagctcgtgctgcgcattgcgctggccgtgccgttctggcgctcgggcatactgaaatgggacggcttccttaggctcaacgagacggcggtgacgctgttcagcgacgaattcatgctgcacttgccgggcgggccctatcactttccggcaccgacgatgatggcattcctgtcgggctcaggtgagatcatgttcccgatcctgctggtgctgggattgggcacacggtttgcggcgctcgggcttctgttcatgaccgtgatcgtcgagctcacggtgcccgacggctggccgattcacctcacctgggcggccatggcactcggcatcatggcttacggacccgggaacgtctcgctcgaccatctcatttgtcgcgtccgtagcccggatggagccaacgggccggcgcgaagcgccgcccgatga

SEQ ID NO: 1071 - DNA, 783 bp, BradyrhizobiumColbertium
atgccgcctgaggccaacctgtccttcgccgctgcattcgcgccggcgctgctcgatccggtacgcagcacgccctcgctcgtgaccggcccgaacggcaaggctgccggccgacgctacgacgtctaccgcaacaacgtcacggtcagcctgatcgatgcgctggccgcaatttatccggcggtgcaacgcatcacgggcaccgacttcttccgcgccatggcccgcttccacgtgcgcagcaatccgcctgcatcgccgctgctgttcgagtatggtcgcgatttcccggacttcatcgcgcaatatgagcatgcgcaggccatgccctggctcgccgacgtcgcacgcatcgagcgggcctggctcgatgcctatcacgccgccgatgccgtgccgttgtcgccggcccggctctcggcggtggcgcccgatcgtttggccggtctggtgttcattccgcatccggcggcgcgatgcctgcgctcgggctatgcggccgtgacgatctttgcggccaaccgcgacaacacaacggtcacgcgcatcgatgcctccaagccggaagatgccctgatcacgcggcctgaattcgacgtcaccgtgcgccgccttccgcccggcggagccgtgttcgcgagccgcctgatatcgggacgcccgctcggcgaggccgcggcggcggcgctggaagctgcaagcgacttcgacattgccgcgaacatcgccgggctgatcgaagccggcgccttcacctcgctcgccgacggagaccgatcgtga

SEQ ID NO: 1072 - DNA, 918 bp, BradyrhizobiumColbertium
atgagcacggcgatcaggcccacctcgccaacagcgatgccgctccgctttgcactgccgatcggcggcgtcgccgggacgagcttcaagcccgagcatctcccggcgattctcgaagcaggacctcggcgcggctttttcgaagtccacgccgagaactacatgggcgccggcggcccgccgcatcgcgcgctggaagcgatccgccgcgagcatccactctcgctgcatggcgtctgcatgtctatcggcggaccgcggccgctcgacaaggcgcatctggcgcgcttccgaggcctggtcgcacgctatcagccagcgctggtgtccgagcatcttgcatggtccacgcacgagaccagcttcttcaacgatcttcttcccctgccctacaccgaagcgacgctggcctgcgtctgcgaccacatcgatcaggtacaggaagcgatccggcggccgctgctgctggagaacccgtcgacctatgtcgcatttcgcgaatcctcgatgagcgagaccgaattcattcgcgcggtggcagagcgcaccggttgcggcctgctgctcgacatcaacaacgtattcgtctccgcaaccaaccacggattctcggcgctcaactatctcgcggacttcccgctgtcgcgcgtcggggaaattcatctcgccgggcatgccgagcaagccgacgacgaaggtgatctgctgttgatcgacagccatgacggcccggtcgccgacgcagtctggaagctctatgagatcgtgatcggtcgccgcggtgccgtgccgacgctgatcgagtgggacagcaggattcccgattggccgatcctggaggcggaagccacggcggcccaggcgatcctcgaccggcgtcagtctgccgtgccagcaggagagcgccatgccgcctga

SEQ ID NO: 1073 - DNA, 306 bp, BradyrhizobiumColbertium
atgtctgccaaacacgccgttacctccctcgtcctcgccggagcggtgtcgaccgcgctcgcgacccttgccgccgccggtccgctgagcaaggccgaggccgaagccgccgtcgccgccaagaaggaaaaatgcttcggcgtcgcgctgaagggccagaacgattgcgcggccggaccagggacgacttgccagggcacctcgaccgtcgattaccagggtaatgcctggaaattcgtgcaaggcggcacctgcaccagcatcgagctgccgaacggcaagaagggttcgttgaagccggtgtga

SEQ ID NO: 1074 - DNA, 2088 bp, BradyrhizobiumColbertium
atgaaggtcgatcccgaacgacggcttcatgcgatcgcaggggtgacggtcagcatccgcctcgccgtgtctgcgctggtcctgacggcgattctgctgacagccgccctctccagcctgttgtggtggcgtacggcggaggcgaccagccggcagcttgcctccaccatcaacgagcagatcgtggcggcggtgcgcaaggaggtcgcggccatcgtcgacgaggcgcgcgccgcgcacaccgcgatccgcacattgttcctgcagaacgtgctcgacacccgcgaggccgacaagcgcgaattcgtcttcctctcgcaattgcagtcgcaggcgacgatctcctgggtcgcgttcggctggcccgacggctccttcttcgccgcgcacaagctcggcgatcgccgcctggagatgatggaaatctcgctgacggatcatccgggtcagcgccgcatcgacgaatatgacgtcgtgcccggcgacatcgagttcgccaatcgccgcttcgagccgacctcgttccatgttgccgaccaggcctggttcaaatccgggctcagcgcggacgatccgcaatggttcagggtgtcggagcatgcgtccggagaacggccgtcgatcgcctttgccgggccgatcgacgtctaccaggagcggcaaggcgtgcttgccgtcatcatcgagtatacgcgccttgcgcgcttcctgtcgcagctggaggtcgggcgcaccggcacggccttcatcgtcgacggcagcggcgagctcgtcgccgcgccggacaaggacgctgacgaactccatccggcacgtggcgatacgagattgctgccgctcgcgcgccttgcgctcggcaaggccggtgaagcggggcgcaaggaagcctggcgcagtcgcctcacgtcaggcggcgcggcctacgaggtggcgctgacgccgctgccgtttcccggctggtcgcttgcaaccgtgatcccggaggccgagtttctcgggccggtcgagacgacgttgcagcgcctgatccttggcctcgccatcggtgccgtgctcgcagcgcttggctcggcgatgctggcgcgctccgtcatcgccgcgccgctgtcgcgcgtcgtcggcgagcttcgccacgtcgaggcattcgcgctggagcaggtgcgccgtcatccctcgcggctcaaggagatcgcgagcctgtcgagtgcgatcgccgagatggcggccggcctctccgccttccgcaaattcattccggccgatctcgtccgcggcctgctgcgccagggcgtcgaggcgaggcccggcggcagcgtgcaggagctcagcgtgatgttcatcgacatcgccggcttcaccggcctgtccgagcggctgggcgatcgcgtggtgccgctcttgtcgcgctatctcgacctgacctcggagatcatcgtcgccaatggcgggaccatcgacaagttcatcggcgatgccgtgatggcgttctggggcgcgccgcagccgcaagccgatcacgctgcgcgctgctgccgcgctgcgctcgcctgccgcagggcgatcgaacaatcgggcctcgtcgacgatctcggccagccgctccagatccgcatcggcatcaattcgggccgcatgctggtcggcaatatcggttcggagctgcggttgaactacaccgtgatcggcgatgccgtgaacgtcgccagccggctcgaaggcgccaacaaatcctatggcacgcagatcctgatcggcgaagcgacggaacgtctggtgcgcggtgccgtcatcacgcgcgaggtcgacagcatcgctgtctacggacgcgaggagggtctctcggcctacgaattgattgggatggtgaacgagacagcggcggaccccggctggatcgcgaattacgagcgcggcctcgccgcctatcgtgcgcggcggttcgccgacgcgctcgccgacttcgagatggtgttgaagcagcgcggccgcgatcgtccggccgaactgatgcgtgaccgatgccggcagttcgccgcgacgtcgcctgatagcgcctggcgacccgtggcggcattgacgtcgaaatag

SEQ ID NO: 1075 - DNA, 621 bp, BradyrhizobiumColbertium
gtggcaaagccggtctgtcccgcgcatgatgtggacatgaaaaccacactgctcaaatccgaacactacacccgctcgccctggaagaacggcggcggcaccttcaccgacatcgcggacgcccaccgggccgatgcgcggcagaaggactgggatagcctggtctggcgttttgcctcgaccccgatcgtggcgcccggcccgttctcctacatgcccggcatcgaccgcttgcagatggtggtgggcgggcgcgggctggtgctgaaatcgcctacgcaggaattcgacgagcgtgaaccttttacgacggtgcgcttcactggcgagctcgagatcgtcaccgagctcgaggccggtccggtcgaggtcgtgaacctgatggcgcggcggggggcggccgagatcgagctcgaggcgcttagggaacccggcgagcggccgctcgccgcgggaacgcatctcgtctacgccgcgcgcggcgattgccttgttcgtcttggccgtgaggatcttgcgatcccgagccagggcacgctgaaggtcgaaacgggggagccatcgcagctcgtcctcgcatccggcctggctgtgctgggatcgatccgcatcgtcggttga

SEQ ID NO: 1076 - DNA, 1218 bp, BradyrhizobiumColbertium
atgcagaccgccgctcgagggcaggacatgaacgcgcttccgaataacgccgccacacctgccgatggcgtcgtcgactggctcaccaacggcacacgcgacgagcgcttcatcgacgacatcttcgcgcagatgtgcattcgcctccagcaggccggcattccgttgaagcgcgcgacgctgcacgtgttgatcaatcacccgcaatggctgggggcccgcatgatgtggtccgacgggatgcgcaatgcggagatcgcgctggtcgattatgaagttcgcgagcggtccgagtatatcggcagcgccgccagcgaaatccaggatggcgccgaagaggtgcgcgagcggctcgagcaggatcccacgctgggccgcaagcacaccctctatgacgagatgcgggccaagggcctgaccgactatgtcgcctggccgctactccacacgctcggcaagcgccatctcgtcactttcgcgaccgatcggcccggcggcttcgacggtgcgcacattgcgggcctgaagaagctgttgccggtgctggcgctggtcagcgagatccgtatcaagaaccgcctggcgcggacgctgctggagacctatgtcggctcccacgccggcgagctgattctggccggcgccaccaggcgcggcaccggcaccacggtgcgcgcggcgatcatgatctgcgacctcagggatttcaccaagatctccgacaactggccgcgcgacgacgtcatcgatctgctcaacgattatttcgacgcgatgtccgagccgatcgcgcgccatggcggcgagatcctcaagttcatcggcgacggcctgctcgccatcttcccgctgagccagcccaacgcctgcgcgaacctgctgcatgccgtgaccgaagcccggcaggccatggccgcgctgaacgagcggaacaacgggaccggccgcgcgccgctgaattacggcatcggcgtccacgtcggcgacgtcatgtacggcaatatcggatcatcgagccggctggacttcaccgtgatcggcccggccgtcaacatggcctcccgcctcgaggcgctgaccaagaccatcggcaggaaggtgcttctctcgcgcgctttcgccgacctggtggagaacgagttcgcgctggagcatgtcggcgagcacgaggtgcgcggcttcagcaaaccgatcgagctgtttgcctatccggagtga

SEQ ID NO: 1077 - DNA, 180 bp, BradyrhizobiumColbertium
atgagcagggataacgaactgaagcccgacgatttcccgatccaggccgacaaggacaagctgaggacgcacaagggcgagccggttgcagtggcggaatcggagcagattgcggacgagatcgccgaccggctcaacgagcacgcccaccaggaagagcaggatcgctggtcggcctga

SEQ ID NO: 1078 - DNA, 207 bp, BradyrhizobiumColbertium
atgaccaagacgaaggcgtccgacacgcaagtcgcgagcaccggagcgcagccggcactcaatcccggcgatgaagccccgtcgggaacgacgggcaccggtgaggatgtctgcccggactgtaacggcaaggggcggatcgacggcgctccgtgcgagacctgcagggggagcgggaccgtcacccgggccatcggcggggcctga

SEQ ID NO: 1079 - DNA, 369 bp, BradyrhizobiumColbertium
atggcaacgagtgtcaagcaaatgctggaagctgcgaacgcggaggtcccgaagatcgcctcggagcaggcggccgagatgatcaacaagggcaacacgctggtggtggacgttcgcgacgcgccggaagtcgccgccagcggcaagatcgccggcgccgtcaacgtctcgcgcgggatgctcgagtttcgcgccgacccggagtcgccctatcacgacaaggcgttcgacagaagcaagaccgtcatcctctattgcgcatccggcggcaggtcggcgctggccggcaagctcctgaaggatatgggctacgagaacgtctacaacctcggcggcttcaaggactggacgggcccggtggagaggtag

SEQ ID NO: 1080 - DNA, 798 bp, BradyrhizobiumColbertium
atgccgaaattccttcgcatcggagtccatcaatccaacgtctccggatacacgtcgaaggcgtggtgcgtcaggtgcgtcggctcggcggtcttcctgaagtggggcgccgtggaggtgcagggcaccggggccgcgcgcaaggtgtattgggcgcgatcaccgcaggagaagacgatccgctgccgcaccgcgcagcgcgcgcaggattacaccaaggccgcgatcgcacggcgtcgcaatcatcgctacgagccgctgaccggacccatcgcgaaccggcgcccgtccgccgcgcgcaacccggagctcaagcaggcgctcgccaccatcctcatcgtcgacatcgtcggctccaccgcgaaggccgccaagctcggcgatgcgcgctggaccagggtgatgggccattactacgccgcggtccgcaaggaactgaagacgtgcggcggcagggaagtcgtgaccaccggcgacggcgtgctggcgacattccggaagcccgccgccggcatcgcctgcgcgaacgcggtccagaaggcggtgcgcacgctcggcctcgagatccgggtcggcctgcatgccggcgaatacaccatcagcggcggcgaaatggtcggcctcgccttccacatctgcacccgcgtcgcggcgaaagcgcgcggaggagaggtgttggtgtcgagcgcggtgagggagctgatgacggcgcaggcggcggcgagcctgagggatcacggcatgcaccggctcaagggcgtgccggagcggtggcggctgtggcgggtggaggggtga

SEQ ID NO: 1081 - DNA, 621 bp, BradyrhizobiumColbertium
gtgtcggaacgggacggagacgacgcatcaccaaaaagagaaggactgcgggaacaaaagcgccgcgaaacgttgcgacggatcgcagacaccgggctgaggctcttccttcgcaacggctatgaggcgacgacgctcgatgccatcgccgaagcagccggaatttcgcgccggaccttcttctattatttcaagtcgaaggaagacatcatcctggcctggcagggcggtctcgccgacgccatagggcgggcggttctggagcaatcaaccaagcagacgccgctggaagcggtgaagaacgcgctggtcaagctcacggcgtcctacgaggacgttcaggcccgcaggcaaatgatggagatcgaccgcttcatccgcgccaacgagacgcttcgcgcccgcgaggccaccaaatacgcgcagcaggagcaggcggtcttcgacgcgctctgcacgctgtggccgcagccgaagcggcagaccgcactccgcatggtcgcgatggtctccatcggagcctttcgccttgcgatcgacagctggagccaggacgagggaaggcgctcgtttgccgcctatctgcgcgaccgtttcgccaacatgaaggcggaagcttga

SEQ ID NO: 1082 - DNA, 204 bp, BradyrhizobiumColbertium
atggccggagctgcgcacgcgctggtccattccggcggccggttgcagcaagcctggctctgcaccacgggaatcgcaacacgaggcatcggcatcccggtcgttcgccgggccgtccctgtctgcagtcatcttgctccggttcgcttggtcttggacgcgttgacccggtcgagccttgccggccggccccacatgcagtaa

SEQ ID NO: 1083 - DNA, 699 bp, BradyrhizobiumColbertium
atggaccagcgcgtgcgcagctccggccatatcgagcttctgcgccgccggcccgccggctacgccgtcgtcaccaaccgcccaggcgcgatgcaccggcctcgccgtgcaatcggcagacctcacagaggcctgcagatcaccaccccgacggtacgcgacgcgcgcgccttccattccggcgggcaccgccgggacggcgtcgtgcgcgcctcgcccggggagcgcgacgagcgtcgatttgccgcgcgcagccttgcccgcgcggcgaaggcgatgcggtcgccgtatctcggcaacatcggcatcctcctcctgctctgcgccatctcgttccatccctgcttcgatctggcgaagatcgtctcgaacagcttcctgtgtctcggtgcgaaggccgcgttcgccgcgaccgtcaatctcgtcgtgaacgagtggacgccgacgatccaggcctttctggccggccgcctcttgcgctggatcggcctcagcctgctgctcgcgctgcttccggcgctgaccgtcatccgcgccgggatgctggcgaagctgcgctcgttcgccgcgctcgggcttgttcggctgcgcggcgtcctgaaagcctcgctgcagccgaacaagcgcaatgtgctaccaggccgcgatgcaggcgccgttcacgagaaggtcaacacgcccacgcggcacgaagcttga

SEQ ID NO: 1084 - DNA, 957 bp, BradyrhizobiumColbertium
atgcccggttggaatgcgagcgatattccgtcacagcgggggcgctgcgccgtcgtcacaggcacgggtggcctcggttacgaggatgcgcttgcgctcgcatgcgcgggcgccgaggtgatcatcgccggccgcaatgcagccaagggagccgacgccgtcgcgcgcatccgctcgcacgagccgaatgcgaacgtccggttcgaatggctcgatcttgcggatattcattcggttcgagccttcggcgcccgattgcgcgccgaacgggacagtctcgacctgctcgtcaacaacgccgcggtgatgacgccccggacccggcagctgacggccgacggcttcgagctgcagttcggcaccaaccatctcggccatttcgcgctaacggccgagcttctcccattgctgcggaaaggcgttcagccccgtgtcgtcaccgtctccagcgtggccgcgcgcagcggagcgatcgcgttcgacaatttgcaggccgagcgtcgctacgagccgatgccgatctacagccagtccaagcttgcgaacctgatgtttgcgttcgagttgcagcggcgcagccgggccttcggctggggcatcaccagcgttgcggcccatcccggcgtgtcgcgcaccgacctcatcccgaatggggccggccggatgagcctccccggcctggcgcggacggccctctggttcctgtttcagccggcggcgcaaggtgcgctgccgacgttgttcgcggcgacatcgccggacattgtccccggtggctattacggcccggacaagttcggggaaacgcgcggctcgccctccgtggcgcgcgtgccgccgcaggccgatgacgacgcggtggcgtctcgcctgtgggatgtctcggcaagattgaccggcgccagcttcgcgacggagtcacatcgcgcccggacgaagacagatccgtgcacttga

SEQ ID NO: 1085 - DNA, 969 bp, BradyrhizobiumColbertium
atggccccgcgcgccaattggaaaggcttcctgagactgtccctcgtcacctgtcccgtggcgctctatccggccacatccgaaagcgagaagatctcgttcaaccagctcaaccggcagaccggccaccgcatcaaatacgtgaaggtggatgcggacaccggcgacgaggtgccgaacgaggacatcgtcaagggctacgagctggagaagggccagtacatcgaggtgtccagggaagagctcgaggagatcgcgctggagtccacgcgcaccatcgagatcgacgagttcgtcgacaagtccgacatcgacgcgcgctatctgatccgcccctattacatccggcccgacggcaaggtcggccacgacgccttcgcggtgatccgcgagaccatccgcgagatggacaaggtcgcgatcgggcgcgtggtgctgaccagccgcgagcacatcatcgcgctggagccgatggacaagggcctcgtcggcaccctcctgcgctacccctacgaggtccgcagcgagcaggactatttcgacgagatccaggacgtgaaggtcaccaaggacatgctcgatctcgcccggcacatcgtcaaccagaaggccggacgcttcacacccgagaagttcgaggaccattacgagaccgcgctgatcgagctgatcaacgagaagcgcgccggcaaggtgatccggccgaaggagcggccgcagggcgagaacgtcgtcgacctcatggaggcgctgcgccgcagcgtcggcaaggaggccgggaaggaagccggcaagcaggccgggcaggaggccgcgcccgcgaaggcgggcaagccggcgaagaagccgaggaaggcggcggcaggccagaaggagatgctgatgccgatcgcgggcaggaaggcggccgccgccagggactcgtccgcgaagaagccggccgcaggggcgcggcggaagtcggcatga

SEQ ID NO: 1086 - DNA, 303 bp, BradyrhizobiumColbertium
atgctgatgaccagggagagacggccggcgatccgcaccttgaggggctgggccatccaattgctgcaggaggccggcgcgatctgcgaatgcgaggagcatggctgggccagggatcgtgccgacccgcacgcgcgccatcgcgcgctcgcgcttgcgcgccgggagccgccagacggcgtctctccggatcaggcggtcgcggagatcaacgacgtgctcgattcgatcggcgatgcctgtccggagtgtcccgacgagggcctttggggcttccacaggcgaccgcggtcaacgaagtag

SEQ ID NO: 1087 - DNA, 477 bp, BradyrhizobiumColbertium
atggccattgatgcgttcgccggctccacgccggtgtttctccccgagcagttcttcgtcggccgccttgagggatgggcggtggtcgagagcctcattggcgggctcctgaagcgcgcgacgatcgcggctcatggcgagctggacgcggacaccgatactgtcgtcctgaccgaaacctacaccttcgatgtcggccacagcgacacgctgcgctggacgattcacaaaacgggcgaaggtcggtacaccggccatgaaaatcgcctggaaggtgaagccgccggcgagcaggccggttgtgcattccactggaagtacacccgcgacacgccccagggcgatggcaagtcgttcatgctgaacttcgacgactggttctacgcgatcgatgatcgcgcgtgcatcgtgcgcggcagcgccgggcgcgcgggcatcccgttcgcgacggcgcatgtgacctatcggaggctctag

SEQ ID NO: 1088 - DNA, 987 bp, BradyrhizobiumColbertium
atgccactgcaactgaacatgagccgccgcctcctgctcgccggcagcacggccggagcgatgacgccgctgctgggcatgccggcagcgctcgcgcaagcgcctgcgcccaggaccaattccggccattacagtttccggatcggcgatatcaaggcaaccgtcgtcagcgacggcacgctgagcggcaatccgcgcatctacgcctcgaccgcgcaggcggaggagctcggcaggaccttgagcgatgcgttcctgccgaccgacagcttcaggctcaacctgaacacgcttctgctggaaaagggcggcaggagaatcctgatcgaggcgggtgccgcgcaaacactcggccccgatggcggacatctgttccgcaatcttgaggcgatcggcgtgcagcccgaacacatcgacgccatcgtgatcacgcatacccatcccgaccacgtcggcaatctcagccgctccgacggatcgagcgcctttccgaaggcgacggtctatattcccgaggacgattttgcgttcttcatccggggcgagccggacctgtcgcggctgcccatgccggaagacttccggcgcgccttcatcgccaacatcaagcgcagcgtggcgccggtcgccaggtcagccgtgctgtaccggccgggcagcgaagtgttgccgggcctgacgacgatcgccgccggcggccacacgccgggcatgtcggcgatcctggtgcattccggcgcgcaatcattgctgatcacgtccgatgccgcctatagccccctgctcaacatcgacaacgcttggcggcccggccccgatctcgatcccgacgccgccttgcagtcgcgcaggcgcttgttcgaccgcgccgcggcggaccgcattccggtgctcgggtttcatttcccgtttccgggcatcggcaacatcaggaagacggatgtcggctatcgctgggtgccggcgaactggcggttcgaaggctga

SEQ ID NO: 1089 - DNA, 996 bp, BradyrhizobiumColbertium
atggatttagccaaagtcgacctcaatctgcttgtggtgctgcatgcgctgctcgaggccggcagcgtcacgcgcgccgccgagcgtctcggcagcagccagccggcggtcagccgtgcgttggcaaggctgcggcgcctgttcggcgaccggctgatggtgaaggcggcaagcggcatggtgccgacgctccgcgccgaggcgatgcgcgagccgctggcgaacctgctcggcggcgtcgaggcatttctccacaagccgaagttcgatccttccgccaccgaccgcgtctttcgcatcgcgacgaccgattatggcgcgctcgccatcctgcccaatgtcgccgcccgctttgcgcgcgaggcgcccggtgcggcgatcgaggtcgtcggcttctcgcgcgatgtgtttcgcatgctcgccgacggtcaggtcgatttcgtgctgtatgccgataacccggtctccggatcctttcgggcgcgcgagctattccgcgaaagcttcgtgacgctggtcaggcaagggcatcctttgctcaaggagatgcgcggggctagggacgtgctgccgatcaagctgttcacggcctggccgcacatcgtcgtcagcattttcggcgggcagggcgggccgatcgacaccgccttggccgagcgtggctacaagcggcacgtcgcgctgcgcgttccctatttcgcaaccgccgcggtgatcacggcagcgtcggattacctggtgaccatgccctcgcgggccgcccggcagctcgcgccgcggctcggcctcgtgatgctgaagccgccggcgcaggtgacgccctacggctatcgcctgctctggcacgaacgaagccacgacgatcccggcgcggtctggctgcgccggctggtggtcgatggcgtcaagtcgaggggcgctgtggcccaacgcgtaaatgtcagacctggcttctgtcgcagtaactgtacaactatcatcggcatcgcgggatag

SEQ ID NO: 1090 - DNA, 534 bp, BradyrhizobiumColbertium
atggatcgattgaccgacgtgttgggcggagcgacggcgcatatcggcgcggagtattttcacctgccgatccatggtggcggccctgtctatcgtgagcgcgtttattgctacgagctttatcaccagatgcgtttgcgatggccaaatgaaggtccatttcgcctgaatggtgaagtcgataaggccgcgcatcctatcctgtcggagcgcggtgcgagccacgcaaagcctgatcttttggttcatgggcccggcgatatgggccttaatcacgcgatcatcgaagtcaaatcgctccgcgcgagcgtcaacggcatagagaaggatctcaacacactctctttgtttcggcgagccgtgggctatgagcgggcgatctatcttatatatggaggcgagcgcctcgaccgcattttcgcatggatcgaccggttggcaggccgaattccggccttgcccgtcgtcgaggtctgggcgcaccaagagccgggccgaccggctgagaatctcttcaccattggtcggccgtga

SEQ ID NO: 1091 - DNA, 3885 bp, BradyrhizobiumColbertium
atggtcgcgggaaccgctcaatatcggcacaagttgcagccagacgtttccacgagacctatctggatcatgtttgagatcacgcgcgacgacattgcggccctgaacgatgaggatttgcgagcgctgattggccgtctttgcgaggccgaattgcgccgcaaggacttgccggtctctgccgtcacgtggggcggcgaccagaccgccaaggatggtgggctcgatgtgcgggttgcactcgcgcccggtacccatatccaaggcttcgtcccaagggcggccacgggctttcaggtgaagaagccggatatgccggccgccgaaatcataaaggagatgaagcccaagggagtgcttcggcctgtcatcgaggaactggccgccgcctgcggagcctacgtcatcgttagctcgaacggctcgacctctgattccgccctaaaaagccgcggcaaagctatggccgacgccatgcagggctgctcggatgctgccaagcttcatctcgagttctacgaccgcagccgcgttgcaagctgggttcgggaccatgccgggctgatcccttgggttcggtcgcggatcggcagggcgttccgtggatggcaatcctacggcggatggtccccgctaccggcgggtgccgacaatacgtaccttcttgatgacaaggcccgcatcaagaccaccggccaaaaggacgacgatgctgacggggtgaccgtcgtcgacggtatcgaccgcatgcgggacgcgctccgcaatccggggcaggtcgtccggttggtcggtttgtccggcgttggcaaaacgaggttggtagaagcgcttttcgacccaatgatcgggacgaaggctctcgacccgtcactcgcgatttatgccgatacggctcatgaacctgacccgcagccacgcggtcttgcctccgaccttcttgcgcaaaggacgcgcgcaattctggtcgtcgacaattgcccctttgacacccatcggcagctcgctgaggtggcgcgcatcgctggttcgacgataagcgttatcacaatcgaatacgatttccgcgacgatcagcccgaaggcactgatgttttctcgctggaaacgtcctcgctccctctcatcgaaaagctcgtgcgagcccgatttcgggacatatcccaaatcgacgcccgcacgatcgctgaattctcagacgggaatgccaggatcgccctcgccctcgcaggaaccctgaagaaaaccgagaccatttcgggtctgaccaacaccgagctgttcacgcgcttatttcagcagcgtcacagccacgatgccaatcttctccagatcgctgaagcctgctccttggtttactcgtttcagggagaggccttggaaggtgagaacgcagagctccccatactgggccggttgattggaaggtccgctcaagacgtatttgcagcggccgctgagctaaagcgacgcgatcttctccagcagcgacgggaatggcgagccgttctgccgcatgccatagcaaaccggctcgcgaaactggcgcttgagaacattccctatcctctcattagggccgaaatcgttgaaggtccctccgaacggctgcttcgctcgttttcgcggcgccttggctatctcaatgacagcaagcaggcgcaggacatcgtgcgaggctggctttccaagaccgggctcctcgccgatgtcttggagctgaacgaactcggacgcgcgatgtttgaaaacgtcgcgcctgtggcaccagaagctacgctctcggcgcttgagaatgtatttgggaatgccgatcggctcactctcttgagaggagggcacctcattcgcttgttgcattcccttgcctatgacacacctctgttcgagcgggcggttcgcctgcttatcgcgtttgcgagcgttcttgaggaaggtagcttcgatggcgaggccgcgagggccacgacgcccctcttttatcccgcgttttccggcacgcacgccccccttgccgtgcgcttgcctgtcgtaaagcgattgttgaagtcagagaagccggtcgagcagtatctaggtatccaggcgcttgaagcactgatgacgacacacaacttcgcgccctatggccagttcgagtttggcgcgcggtcacgcaactatggctatcacccgaaaagtggcgcggaagccggtaggtggtttgaggatgtcctgagcttcgtagagccgtttgcgcttggcgacagcccaatcacggcccgcgtgcgcaagtcgatcgctcataaattccgctggctctggactcatggcggtcggcacgatgccctggagcggatcgccaaaagtatcgctggaggcggcttctggcgcgacggctgggtcgctacgcgtcagacccaccactacgacggcaagagcctgacgaaagaagccgccgagcggcttacgcgcttagaggaatttcttcggccgaaggacttggtcaaccgtgtgcgggcgattgtcctgggcgatcgcagtgggcgcctcacgctggacgacctcggtatcgacgatcaatcggcggtaaaggcgtccgaacgcatgaggcgatccaacatcgcggccgaaaaattaggccgggacgttgccatggatgatgcggcgttttctgcgctgcttcctgaactcgtcagtgctccaggaaatcttagcgaatttggtcggggtctcgcgctggaggccctcgagccccgccttctgtggcgccggttagtcgacgaggttagtcggaccgataatgccaacgttcaggtacttctcggcattctgagtggcctcgaagtccgagagagtgcccaagccaacgctttgctcgacgaagctgttgatgacccgatcttggctccatggttgccgacgctgcagacgggtgtaaccattgacgacaaaggagtcgctcggctgcggcgagctttggatctcggcaaggcgccgatcggccaatatttcagtctcgtgtatggcggcgtttgcgagccgatcccgggacctgcgtttcgagacctcgtccttgccatcggtgccaagcccgacggtaatcgcattgcgctcgaaattctcgccatgcgtcttcattccaacgcgaccgcaaagcgtacgcctttgccggagagtgctgaggcggggcgccaattgctcgtcgatcatcgctttacccgccgaggaaatgccgccgattccgacgactaccggttgggccttgtggcggcagcttcgctcgccggggcggagggggcatcaattacacgcaagttactgcgcgacctaaaagaggccgttgcaaggtatgacgtctcggctggcgagcaggacgacctgcttctcagtatcttcaagaagcaacctgtcgctgcgcttgatgaactcgcgtccggtgaggagaaggaccggcaacgcagtaccgagctcatccaggacatgctgcgtaatcggcaaagcccttcaagcgttgttcctgacgacgtgttacttagctggtgcgaagccgatcctgcccggcgctatccatttgctgccggcgtggcgctgctctactcgcgtccgaacgatcagtcgtcggatgaatggaagcctattgccaagctgctgctcgaacgggctccggatccggttgccgtcttcgaagccatgggccagcgaatctggccgacgagcttcgatggttcacccgcctcgaagttcgaatctcggatgcaactcctcgacatcctcgagcttggtgagaacgccgctctccgcgtggctgtcggcaagttccggggagaactggctgacgaagccgcgagatggcggcagcgcgatttggaagaggattcggcgcgcagtgggcgctttgagtga

SEQ ID NO: 1092 - DNA, 73 bp, BradyrhizobiumColbertium
gggcctgtagctcaatggttagagccggccgctcataacggtctggttgcaggttcgagtcctgccgggccca

SEQ ID NO: 1093 - DNA, 975 bp, BradyrhizobiumColbertium
atgttgcgaatgttgcgtcgcggtcttttcggacttgcagttctttcggttcttttcagcaccacacctcccgcctccgccgcctatcccgaccgtcccatccactggctgatcggcttctccgccggcggccccgtcgacatcgtggcgcggatcatggcgcagtggctgtcggagcggctcggccagcaggtcatcgtcgagaaccgcaccggctccggcggcaacatcgccgccgccgcggcggtcaacgccccgccggacggctacacgctgctattcgtcgcgcccaacaacgcgatctcgacctcgctctacaagaagctgccgttcgacttcctgcgcgacaccgtgccggtggccagcatcatgcagctcaccaacatgctggtcgtctccaatgcattcccgccgaagtcggtcaaggagttcatcgactattgcctcgccaaccccggcaagatctcctatgcctcgtccggcaacggcacctcggtgcacatgtcggccgagctgttcaaggtgatgacgaagtgcgacatggtgcacgtgccctatcgcggctcggccatcgccttccccgacatcatctccaacaaggtgcagctgatcttcgacaacctgccctcggcgatggagcaggtgaagggcggcaacgtccgcgccctcggggtgacctcgccgaagcgctggccgagcgtgcccgacgtgcccgcgatcgccgagaccgtgccgggcttcgaatcggtcggcttctacggcatctccgcgccgaagggcacgccgcccgaggtgatcgagaccctcaacaaggccgtcggcgaagcgctgaaggacccgcagctggtggcgaagctcgccgcgaccggcggcattcccaagccgatgacatcagccgagttcggcaagctggtcgcggacgagaccgcgaagtggcgcaaggtggtcgagttcgccggggtctcggtggactag

SEQ ID NO: 1094 - DNA, 978 bp, BradyrhizobiumColbertium
atgagattcgcctgtcccatcctgctcggcgcggcgctgcttgccggccccgccgccgcccaaaccggaggcacggccattccgcccgcgacgaccagccagacgatcagcctgggaacggcgacgcccggcggcggcttcccgctctacggcaatgccttcgccgaggtgatgaacgcggccgatccgctggcgaccatcgttccccgcaacaccaagggcagcagcgagaacatcccgctcctggagaagggcgagctcgatctcgcgctggtcgcgggcgagccggcctatgaggccttcgccggcatcggccgcgcgcccgtgcgcctgaagatcctcactgcgatctattccaaccccggcctgttcgtggtgcgcgccgacagtccctacaggaccatccgcgatctcgtcggccagccggtggccttcggggcgaaaggttcgggcctgccgattctggcgcgctacatgctggatggtctcggcttgaatcaggacgaggacttcaaggcggtctatctcgaccgcgccggcgatggccccgcgatggtcgaggacggccgcgtcgccgcgctctggggcgccggcatcggctggcccggctttgccgcggtggcctcgagcccggcaggcgcgcgcttcatcgcacccgatgtcgaggagatggcgcgcatccgcgccaagcacgggttcctcaagccgctgctggtgccggcgggtagctatcccaagcagaccgcgccgatcgcctcgctgggctcgtggagctttgtcctcacgcgcgaggacctgcccgacgatgtcgcctatcgcctcgcgaagacgctgcacggtgtcgagccggcgttctgccggaagctcgcccaggcctgcgagacgacggcctcgaacacgatcgcggccgcgccgaagacggagctgatccatccgggcgcgatgaaatatttccgcgaaatcggcgtggtgaagtga

SEQ ID NO: 1095 - DNA, 1212 bp, BradyrhizobiumColbertium
gtgaatccaaccagatttggactgccgctagcggccgccttggcgacactgcttccaggtgcggcgtcggcgcagctgtccgacgacgtcgtcaagatcggcgtgctcaccgacatgaacggcccggcctccgcgccgaccggccagggctcggtgaccgccgcgcagatggcgatcgacgatttcggcggcaccgtgctcggcaagccgatcagcgtcgtgatcggcgaccaccagctcaaggccgatatcggcgcttcgctggcgcggcggtggtacgacgtcgagcaggtcgacctgatcgtcgacgtgccggtctccgcggtcggcctcgccgtgcagaacatcgcgaacgagaagaagcggctgttcatcacccactccaccggcaccgcggatttccacggcaagttctgctcgccttacgcgatccagtgggtgttcgacacccgcgcgctcgcggtcggcaccgcggatgcggtggtcaagcgcggcggcgacagctggttcttcatcaccgacgattacgccttcggccattcgctggagcgcgacgcctccgccgtcgtcaccgccaatggcggcaaggtgctgggctcggtgcggccgccgctggcaacgcccgacctctcctccttcgtgctgcaggcgcaggcctccaaggccaagatcatcggcattgccgccggtccccccaacaacatgaacgagatcaagaccggcgccgagttcggcgtgttcaagggcggccagcagatggcggcgctgctcgcgctgatcaccgacatccacggcctcggcctgcaggcggcgcaaggcctgctcctgaccacgtcgttctactgggacatggacgacaagacccgcgaatggtcgaagcgctatttcgccaagatgaacaagatgccgtcgatgtggcaggccggcgtctattccagcgtgatgcactatctcaacgccatcaaggcggccggcagcgacgatccgctcaaggtcgccgccaagatgcgcgagaagccgatcgaggatttcttcgcccgcaacggcaaactgcgcgaggacaatctgatggtgcacgacctctggctggtgcaggtgaagacgccggaggagagcaaatatccgtgggactattacaagatcctcacgaccatctccggcgacaaggcgttcggtccgccggacccggcgtgtgcgctggtgaagaagtga

SEQ ID NO: 1096 - DNA, 894 bp, BradyrhizobiumColbertium
atggaattcctgacgaccagcgaagccgccgactatcttcggctcggcgaacgcaagctttacgaactcgtcacaaccggtgcgatcccctgcagcaaggtgacgggaaagtggctcttcccgcggcacgagctcgacctctgggtgctgtcgggcctctcgcgtccggccggcatgctgatcgccgagccgccgccggtcgtgggcggcagccaggacgagctcctggattggagcctgcgcgagtccggctccggcctgggatcgatgagtgaaggcagcgcgcgcgggctcgagcgcctgcagcgcaacgaggtgatggctgcggcggtgcacttccacagtctggatgcctccaacaatctcgccggcgacgccagtgtcgaggcgctgcgggccgctccggacctgcatgatgcggtgctggtcgcgttcgtgcgccgcgaagagggcctggtgctgccacagggcaatcccaagcggctgcacggcctcaccgacgtgctcgcgctcggcgcccggatggcgatgcggcaacaaggcacgggcgcgcagatgctgctcgacgtgctgctgaagcgggcgggcgcctcgacgcgggacttgcgccgcatcgagacgccggccctgaccggcccggatctcgccgaactggttcgcggcggccaggccgattgcggcatcgggacgcgcgccgtcgcgcgctcggccgggctcgacttcgtgccgctggcctgggagaacctcgatcttgcgatgcggcagcgcagctatttccgtcctgccatgcaggccttgctccggttcctgaacgagcggcggctgcgccagcgcgccgacgagctgaccggttacgatccctcgaccgcaggacagatccgcttcgcggcctga

SEQ ID NO: 1097 - DNA, 828 bp, BradyrhizobiumColbertium
atgcgccgcctgtccgttgcacttgcgcttctctgcgggctcgctgcgggcgtcgcggcgtcattcgcggaggaccgcggcatagtcctcgcctcgacgacggcgacgcaggagtccggcctgctcaactatctcctgccaatcttccgcgacaagacgggcatcgatgtcactgtgatcgcgcggcgcgccgacgaagtgctcgacggtgcgcgacgaggcgaagtcgacgtcgtgctgatgcacgcgcggccccaggaggagaaattcgtcgccgacgggtttgccgtgaagcgctacgacgtcatgtacaacgactatgtgctgatcgggccgaagagcgatcctgccggtgtgaagggcaaggacatcgcgacggcgatgaaggctatcgaagccaagggcgcgccgttcgtcacgcgcggcgatcggtcgggcacccacgccgcagaactcgcgctgtggatcgtcgccgggatcgatatcaccgcggccaagggcccctggtatcgcgaggtcgggccgggcatggcctccgcgctcgatgcggcgcgtgctgcgaaagcctatgtgttgtcggatcgcggcagctggatcgcgttcaaagatcgcggcgatctcgacgtcctcgtggagggcgacaggcggctgctcaaccagtacggcgtgatgctggtgaaccccgcgaagtttccgaacgtgaagaaagacctcgcgcagaccttcatcgactggctgacgtcgcctgagggacagacggcgatcgccgcttacaaggtcgaggggcagcagctgttcttccccaattcggacaggtcgggcggctga

SEQ ID NO: 1098 - DNA, 1107 bp, BradyrhizobiumColbertium
atgacccagcgcctgccgccctcgctcacgccgctcgacaccgcgctcgcggcattgctgcaaagcgttgatgctgtcgcaccggtagaagtgccgctggcagacgcgatcggttgcatcgctgcgggcacgccgccgattgcagcttatccttcgcacggcatcgcggcggcggacggctgggcgctatccgccaacgatctcgtcggcgcgtcctcctattcgccgttgccactgacgatggcccctgcatgggtcgaggtcggcgatgcgatgccgatgggatgcgactgcgtgctcgatgccggcgcgatcgagctgtcggggccgcttcctcaggtgctggcagagggcgtgccgggacagggcgtcaggcgcgccggaagcgacatccccgaatgcacgccagcggccgccgaaggcgatccgatcggtgctgctgatctgctgattgcgagcgtggcgggtctggagaaactcggcgtgcggcggccccggttgcgcatcgtcaacgtgcccggcgcaacggcaacgatggacatgatcgccgggatggcgcgcgcagcggggttggaggtggacacctgccaaacgcgtgcacgcggtgaagcatcgattgccgatgcgcttgatgtgtcctcttgcgatctcctgctgacgatcggcggcagcggcgtcggccgccaggatgccgccatcacggcgctggcgcagcgcggcgcggtgatggcgcacggcctcgccctccagcccggccgcactgccgcggtcggacggctcggccaggtgcccgtcgtcgccttgcccggctcccccgatcatgcgcttgcggtgtggctggcgctcgtgctgccgctcgtggatcgtctgtcggcgcgtcgtcgccacccgcaagtgtccctgccgctcgcgcgaaagatcgcatccgtcgtcggcatcgcagagattgctttgctggcggaggaacatcgtgcctgggtgccgcttgccgtgggcgactggccccttcaagccatcgcccgtgcggacgcatggctgctgatcccggccagccacgagggatttgcggcgggtacgccggtcgatgcccatctcatgcggacatga

SEQ ID NO: 1099 - DNA, 1950 bp, BradyrhizobiumColbertium
atgacgatgatcccgaaatcaccagaccgcagcgcgctcgaacaggagcagttcctcaccatcctgtcgcgcgaggaggcgctggcgcgcttcgaggcggcgttgttcccgcgagcgctcctcagcgaaagccgcaagctcgctgctgcgctcggcgcagccctcgccgaagacatcacggcgccgatcgacgtgccgccattcgaccgctccaacgtcgacggttttgccgtgcgctccgccgaccttgcggcggccggcgagggcgcgcccgtgcgcctcgcgccgaatggcgagaccgtccattgcggcaccgcgccgacgctgcaggtggcgccggggaccgcgaccccgatcgccaccggcggtccgctgccgcggggcgccgatgccgtggtcatggtggaacacacccagccggatggaccggatgcgatcgaggtgcgtcgcgcggtttcgccgggacaattcatctcgtatgccgtcttctgcttgaaaaaaaaaagggcgctgctgcgtgccggcaccatcatcggctcgcgcgagatcggcatgctcgcggcttgcggcattgccgaggtgggtgtcgcgcgcaagccgcgggttgccgtgatctccaccggcgacgaactggttcagcccggccaatcgctcggggctgccgacatctacgataccaacggcgccattgtcgccgccgccatcgacgagaatggcggtgaagcggtcttcctcggtgccattcccgatgacgaagcaaagctcgaaccggccatgcgccgcgcccttgcggactgcgacatgctcgtgctgtcgggcggcacctcgaaaggcgcgggcgatctctcccatcgcatcatcggccggctcggcgcgcccggcatcatcgcgcatggcgttgcgctcaagcccggcaagccgctgtgccttgcggtgtgcgatggcaagccggtggtgatcctgccgggcttcccgacctcggcgatgttcaccttccatgacatgatcgtgccggtgctgcgcaggatggccggacagccgccgcgcaccgacgccaaggtgaaggcgacggtgccggtccgcatcgcctccgagctcggtcgcaccgaattcgtcatggtctcgctggtcgagggcaagggcggcctgatcgcctatccctccggcaaggggtctggcgcgatcacgtcttttgcgcaggccgatggattcctgcgcatcgatgccctcgccgaccagatgtcggccgggaccgagaccgaggtgacgctcttcacgccgcatgtgcgcgtgcccgatctcgtcatcgtcggcagccattgcactggtctcgacctcgtgaccgcacagcttgcacatgccggcctgaccgtgcgctcgattgcggtcggcagcctcggaggattggcggcagcaaagcgtggcgagtgcgatttcgcgccgatccatctgttcgacgatcgaagtgagatctacaacgcgccttatctcgtcgaggggctcaagctcgtgccggggtggcggcggatgcagggcattgtcttccgcaagggcgatacgcgcttcgagggcctgaacgcgaaggaagcggttgcctcggcactcgctgaccgcacctgcatcatggtcaaccgcaaccagggcgccggcactcgcatcctgatcgaccgcctgctcggcggtgcgcgtccggagggctactggaaccagcctcgttcgcacaatgcggttgcggcggccgtggcgcagcaccgcgccgactggggcatgaccatcgcgccggtcgcccacgcagtcggactcggcttcatccccttcgcggaagagcattacgacttcgcgttggtgacggctcgcaaggaccgctcggcggtgcaggcctttctcgacgcgcttggctcggacgcggcgcgcgccgcactcgagcgcgcgggtttccggcccgcatag

SEQ ID NO: 1100 - DNA, 300 bp, BradyrhizobiumColbertium
atgagcgcgcccacaccgctcaatttccgcaggatcgctgcactcgttgccgcgacgggtacgctgttctggctctacaccttctactacattgcgaatgtcccgcccggggacggcaccggctttcaatggctcgcggttttcccgctcggcattgtcttcggcctgttcttcctgccggcctggctgctggtcgcgatcggccggttgccgcgattcaccaccatcgtcggcctctctggcctgatcgccttcgcgatcatctgggcgcagctcctcaacgagttcgcgaagtcctga

SEQ ID NO: 1101 - DNA, 603 bp, BradyrhizobiumColbertium
gtgctgctcgccggcggcctcgcccggcgcatgggtggcggcgacaagccgatgcgcaccatcggcggccgcaccattctggagcgcgtgattgcgcggctgtcgccccagtgcagtgggctgatcctcaacgcgaacggcgatcccgcacgtttcgccgcgttcggcttgcaggtggtcgccgacgatgtgcccggctttccgggcccgctcgccggcattctcgcggcgctggactggaccgcggcgaaccgaccggagaccgaatgggtgctcagcgccgccggcgattgcccgttcctgccccgcgatctcgtggcgcgactgcatgaggcgcgtgcgcgcgagaacgcgcagctcgcggtagcagcatcaggcgatcagtcgcatccggtgatcgggctgtggcgagtcgccttgcgcgaggagttgcgccaggccctggtcgtcgaagatctccgcaagatcgatcggtggaccgcgcgctatccgctcgcgaccgtgacgtggccggccgagccgctcgatccgttcttcaatgccaacacggtcgaggacattgccgatgctgaacggctggcagcactggacgatgcatcctag

SEQ ID NO: 1102 - DNA, 990 bp, BradyrhizobiumColbertium
ttgcttcgctgcgctcgcaatgacggcaaggcggcatttcgctctctcgccgccatgcatatatcggcctcgaccgaatgtcatgctaacctctcggccatgatgaagatcgacaaagcccccgtgccgctgatcgtccccaacccggacgacccacgcctgacccagagcgtgaccgggaccgaccagaccggcgccacggtcgagatcaaggttccgatggagcgaccgctgacgctctacctgaacgcccaggagatcgtcacaatgatgacgatcggcgactatccggaatatctggcgctcggctacctgctgaaccagaacatgctgaaatacaacgacgtggtcaccgaggtcgaatatgacgacgacctccaggtcgtcgtcgtgcgcaccgagcatcacaccaacttcgaggccaagctgaagaagcgcacgcagacctcgggctgcgcgcagggcaccgctttcggcgatttgctggaggcggtcgagagcgtcgcgttacccagggcggagctgcgcacctcctggctctaccagatgacgcagaccatcaacaccatgccttctctctacctggaggccggcgcgatccatggctgcgtgctgtgccaggaaggggtcccgctctgctacaccgaggacgtcggccgccacaacgcggtcgacaagatcgcgggctggatgtatcgccacggcgtcgatcccggcgacaagatcctctacaccactgggcgcctcacctcggagatggtgatcaagaccgtccgcatgggaatcccgattctggtgtcgcgctccggcttcaccgcctggggtgtcgatctcgcaaggcaggtcggactgacgctggtgggacgcacccgcggcaagcgcttcatcgcactcgcgggcgaggagcgcatcgtttacgatcagaacctcgcttatgtcgaggaggagtcggccaagcacaagcgcaagggtgaaggtggtgacgactga

SEQ ID NO: 1103 - DNA, 528 bp, BradyrhizobiumColbertium
atgaaagtcatcggccttgcaggctggagcggtgcgggcaagacgacgctgttgacgcggctgattccgcttttcaacgcgcaaggtttgcgcgtctcggtcatcaagcatgcgcatcaccggttcgacgtcgatgtgcccggcaaggattcctggcgccatcgcgaggccggagccgcggaggtgctggttgcctcgtcgaaccgctgggccctgatgcacgagttgcgcggggcggcggagccgcggctgccggagctgctcggcaagctgtctgcggtcgatctcgtcgtggtcgagggtttcaagcgcgagccgcatcgcaagatcgaggtgcatcgcgccgcaaacggcaagccgctgctgttccccgaggataccgggattgccggcattgcgagcgacgtcgcgattgacacaagcctcccgactgtccatctcgacgatgtcgcgggcgccgccgcattgatgctgcgcgcggcgatgccggtcgaggaagcagtggcgaaaagcgcggcgatgcgctga

SEQ ID NO: 1104 - DNA, 1257 bp, BradyrhizobiumColbertium
atggcgcaactgtcggacgattgctttgcctttggcggaccgatgatgtcggtcgacgacgcagtcggcttgatcacgacgcgcgtcaacgcaatcgcggatctcgaaacggttgcgctcgtcgatgcggacggacgcgtgctcgcgcgcgatgtggcagcacctttgccgctgccgcccttcaccaactccgccgtcgacggctatgccgtccgcaacgcagatcttccgaaaagcacggagcaatcgttcccgctcgatggccggatccaggccggcggccgcgcacaggcgccgatcaagcccggccacacggcgcgcatcttcaccggcgcgccgatgccgccggatgcggagaccgtcttcatgcaggaggatgtccgcgtcgatgagtccggcaagatcgtgctgccgccggggctgaagcctggcgccaatgtccgtccggcgggtgaggatattgcgcaaggtcacgtcgcgcttcgtggcgggcagcgtttgcggccccagcatgtcgcgcttgccgccgcattcggcctgacaaggctcgacgtcgtcaggcgcatccgagttgccgtgttctcgaccggcgacgaactggcttcgcccggcgaggcgcgcgcagcctcgcagctgttcgattccaaccgcttcatgctggtggcgatgctgcgccggctcggctgcgaggtcagcgatctcggcatcctgcgcgacgagcgcgcctcgctcgcgagcggcctgaagcaggtcgcaggccgccacgacctgatcctcacgaccggcggcgtctcgaccggtgaggaggatcatgtcaaggcggcggtcgagagcatcggctcgctggtgctgtggcggatggcgatcaagcccgggcggcccgtggcgatggggatcgtcgacggcacaccgctgatcggattgcccgggaatcccgtcgcgagcttcgtcaccttcgtgcatgtggtgcggccgacggtgctggcccttgcgggtagtctgccggagccgctcttgcccatcccggtgcgcgcggcgtttgcttacaagaagaaggcggggcggcgcgagtatgtgcgcgcttcgttgcggcgcgcgcaggacggccggctcgaggcgatcaagttcccgcgcgagggggccgggctgctgtcctcgctggtcgagaccgacggtctcgtcgcgctcggtgaggacatcacgaatgtggagccggggcaggacgtgggcttcttgtcctatgccgacctgctctag

SEQ ID NO: 1105 - DNA, 192 bp, BradyrhizobiumColbertium
ttgccggccctcaagacgcgcaaggcgctcaagcctttgcagccgggcgatcagctcgaggttcactgcaccgatcccttgtcggtcattgacattccgaacctgatccgagagaccggcgacaaggtcgaaattaccgagcgcaacgaggcgcgcatcgtgttcctggtcgaaaagggcggcgccttgtag

SEQ ID NO: 1106 - DNA, 114 bp, BradyrhizobiumColbertium
atgctgcgcctgcggcggaaacggccggagccttcgctgcaatgcgaaagcgcgccgattgttgcggtagatgatctcaaacccaagttctcgaacctaagacatcgggcatga

SEQ ID NO: 1107 - DNA, 1428 bp, BradyrhizobiumColbertium
atgactttctcaacatcgagggcagccgcaagtcccgcggggagccgcgagcccgccatcaagctcggcaagacggctgcagggccggagttcagtgccctggcgcaagcctcgatcctgatcgtcgacgacgagccgggcatgcgcaatttcctgatgcgcacgcttgccccgcgctgcaagctggtggacgatgcggccgatactgaccaggcctcgcgcaagctcgattccaatcggtacgacgtcgtcattctcgacaacatcatgcccggcaagaatggcgtcgactggctcgccgagcagcgcgccgtgggctttttcgctgacgccatcctgatcaccgcctatgccgacctcgacaccgcgatccaggccctgcgcgccggtgcggccgatttcgtgctgaagccgttccgctccaaccagattctcaacgccgtggcacggtgcctcgaccgcgtccgcctccagcgcgagaattatgtcctgcgctatgctttgcgtgcctcgtccgaccgcaccttgctgcgcgacaatctgattggacagtcggcagcgacgctgcgcgtgcgcgagaccatcgcgcgcgtcgcgcgcctgccgacctcggttctgctcaccggtgaatccggcaccggcaaggaagtggcggcgcgctcgatccactcgttgtccgaccgcgccgacaagccgttcgtgcccgtcaattgcgcggctatcccgcccgagatgatcgaggccgagctgttcggacacatcaagggcgccttcaccggcgccgattcggggcgcgagggcctgttcctgtatgcgcatggcggcacgctgttcctagacgagatcggagagctgccgctgccgatgcaaagcaagctgctccgcgtgctcgaggatcgccgcgtccgtccggtcggctccgagcgtgaagtgccggtcgacctgcgcttcatcttcgcaaccaatgccgagctccagaaggaggtcgaaaagggccgtttccgagccgatctgttctaccggctcaacgtgatgcagatccgcctgccgctgctgaaggatcgcggcgacgacgtgcaggagcttgccaccatcttcatgagcaagctgtccgtgcagctcggcatgccgccggtgccgatcgacgcctcggtgcgggcggcgctcgtcagctacgactggcccggcaatgtgcgggagctgcgcaatctgatcgagcggacgctcatcctcggcgccttccccgacgatttcgccggtccccgcaacgacacgcagccggcgcccgccgacagtcttgcggagctcgagcgccgtcacattctcggcgtgctgaaggaggtcaacggcaatcgcgaggaggcggcccggcgcctcggtatctcgcgcaagaccatcgaccgcaaatgcgcgttgtgggatgcctga

SEQ ID NO: 1108 - DNA, 2025 bp, BradyrhizobiumColbertium
atgcctgaagccgccggccgcagcgccgaactggtgcgggggcgctccgtccgctttcgcctgctcgcgatcgcgctgctgccgatgctggtcatcctgccgctcctgctcggcgttgcgatctatcgctggaacgcgaaattcgatgcgaccctgatctccaaggtgaacggcgatctcaccatcgctcaccaatatctcgcccgcatcctggaaaagaccggcgtacagatccgggcgctcagcctgtcggcccgcttccacgaggtgctggcgtcggatgcgcgcggccccctgcaggatctgctcgacgaggcccgcaaggagatcggtctcgattttctgtatctgaccaacggtcgcggggacgtcctggcagcatcgccgccgctacagcatcggccgagaagtgactggccgatcatcaagtcggcactgtcgggcgaggtccccgcgaccggggtcgacattttcgacaatgacgagctcgccgcaatttcgcccgtcctggccgagcgcgcgcgattggacatcgtgccgacgccgaacgcggtgccgaccgaccgcagcaccgagacgcgcgggatggtcgtgcatgcggcgagccgggcgatgttgcccgacggcggcgccgctgcgctggtcggcggcacactgctcaatcagaatctcgaattcatcgacacgatcaacgatctcgtctatcgcgcggcgagcctgcctgagggcagtcagggcaccgcgacgctgttcctggacgacgtgcggatatcgaccaacgtccgtctgttcgagggacggcgcgcgctcggcacccgcgtctcggcggcggtgcgctcggccgtgctgggcgaggggcggacctggctcgacagcgctttcgtggtcaacgactggtacatctccgcctacgagccgctggtcgacagttacggcaagcgggtcggcatgctctatgtcggcttcctggagaagccgttcagcgaagccaagtaccagacattggtgatcatcgtcgcagcgttcgtcgccatcacggccgcgaccgtgccgatcttcctgcgctgggcgtcctccatcttcatgccgctggagcgcgtcacggcgacgatctccgaggtggagcgtggcaacctctccgcccggaccaagatgccggtgtcgggtgacgagatcggtcgcgtcgccgtccatctcgacagcctgctcgaccagatccaggaacgcgaccggcagctccgggaatggaatgaggagctgaacgtccgcgtgcgggagcgcacccgcgacctcgagcacgccaatctcaagctcgaggcgaccaccaagcagctcatcatgtccgagaagctggctgcgatcggggaggtcactgccggcgttgcgcacgagatcaacaacccgatcgcggtgatgcaggggaatctcgacgtcatccgcagcgtgttcggtgccgatgccgacaaggcgaaggtcgagtttcgcctgctggacgagcagatccatcgcatcagccagatcgtgaccaagctgctgcagttcgcaaggccggaggaatatgccggctacgtcgagcgccatgcgccagccagcgtgatctccgactgtctgccgctggtgcagcatcttctgaacaagaccgagatcgccgtggtcagggacgaccgcgccagccggctcgtgctgatgaaccgcaacgagttgcagcaggtcctgatcaatctcatcgtcaacgcgattcacgccatgccggacggcggaaccctgacgctccgctctttcgatgccgagcgcgacggccatccgggcgtcgccatggcggttgccgacaccggcatcgggatgagcaccgaggtgatcgagaagatcttcgatcccttctacacgacgaaacggcggcaaggcaccgggctcggactctccatcagccagacgctgatcgagcgacagggcggccagatcaccgccgaaagccgcgtcggcctcggaagcacgttcacggtctggctgccggaagcctcctga

SEQ ID NO: 1109 - DNA, 123 bp, BradyrhizobiumColbertium
ttgccggcacaccgatttgagaccggccatgcgtgctcggcagccgcgcatgacaggtcggatttcgcgtcgaagcggaatgcgcaggcgcgctcgcgtcatgtgcgccgagcaagcagctga

SEQ ID NO: 1110 - DNA, 1653 bp, BradyrhizobiumColbertium
atgacgaccgctgataccgttcttgcaccggttggtgctcccggtttgctcgatcgtgaacgcacgatcgcgaccgccggtttcaatcgctggctggtgccgcctgcggcgctgtgcatccatctgtgcatcggcatggcctacggcttctcggtcttctggctgccgctgtcgcgcgcgatcggcgtgaccgcgccgaaggcatgtccggacatgtcgctggtccaggagctgtttacgaccacctgcgactggcgggtcgccagcatgggctggatgtacacgctgttcttcgtgctgctcggcatcgcggctgcggtctggggcggctggctggagcgcgtcggcccgcgcaaggccggcttcgtctcggcgctgtgctggtgcggcggtctcttcctcggcgcgatcggcatctacacccatcagctctggctgctgtggctggggtcgggcgtgatcggcggcatcggtctcggcctcggctatatctcgccggtgtcgacgctcgtgaaatggtttccggaccgtcgcggcatggcgaccggcatggccatcatgggcttcggcggcggcgccatgatcggcgcgccattggcgaacctcctgatgaactatttcaagagtccgagctcggtcggcgtctgggagaccttcgtcgcgatgggcgtcatctacttcgtgttcatgatgatcggcgcattccgctatcgcctgccgccggcgggctggcagcccgagggctggaccccgccgtccaaggccaacgcgatgatctcgaagaacaacgtccatcttaatgatgcgcacaagacgccgcagttctggctgatctggtgggtcctgtgcctgaacgtgtcggctggcatcggcgtgatcggcatggcctcgccgatgctgcaggagatcttcggcggcaagctgatcggcctgccggacgtaggcttcaatgcgcttgatgcaggacagaaggcgcagatcgcagcgatcgctgcgggcttcgccgggttgctctcgctgttcaatatcggcggccgcttcttctgggcctcgctgtcggacaagatcggacgcaagaacacctactacacgttcttcatcctcggcatcgtgctgtatgcgctggcgccgaccttcgcggcgatgggctcgaagctgctgttcgtggtcggtttcggcatcatcctgtcgatgtatggcggcggctttgcgaccgtgccggcctatcttgccgacatgttcggcacccagttcgtcggcgccatccacggccggctgctgacggcgtggtcgaccgcgggcatcattggtcccgtggttgtgaactacatccgcgagttccagcttgcggccggcgtgccgcgcgaccagctctacaacacgacgatgtacattctctgcgccatgctgatcgccggcctgatctgcaactatctgatcaagccggtcgactcgaaatggcacatgaaggacgccgacgttgccaagctgcaggcggcgagcgccagcgcagcagccgcgggaccgcacggctcctacggcatcggctttggcgggctcgatgccaaggcggcgctgttctgggccttcgtcggcattcccctggcctggggtgtgtggaagacgctggagagcgcgatcaagatcttctga

SEQ ID NO: 1111 - DNA, 1704 bp, BradyrhizobiumColbertium
atgagccacgacgtgcatgaggtccgcccgttcgagcatccgggcgaggggcgccggcgcgccaaggccacccctaaagggcgccagattgatccgaccgccgcgcacgagatcgagcttctgcttggcgacaggccgcggcgtcgcgatctcctgatcgaatatctccacctgatccaggacaagtaccgccagatctcggctgcgcatctggccgcgctcgccgacgagatgaagctctcatttgcagaggtgttcgagacggcaaccttctacgcgcatttcgacgtggtgaaggaaggcgagccggacatcccgccgctgacgatccgcgtctgcgattcgctgacctgcgcgatgcttggcggcgagaagctgctcgaggatctgcagagcgcgtccgggcctggcatccgcgtcgtgcgcgcgccctgcgtcggccgttgtgataccgcgcccacggcagaggtcggtcacaacttcgtcgaccatgccaccgtcgccaatgtgataaaggcggccaaggccggcgacactcacgcgcatctgcctgaatataccggctatgaggcctatgtcgccgccggcggctacaggctcctcgatcgcgtacgctcgggcgagctgtcgaaggacgatctcctgaaggcgctcgacgacgcttcgctgcgcggactcggcggcgcgggctttcccacagggcgcaaatggcgcgccgtgctcggcgagccagggccgcggctgatggcgatcaacggcgatgagggcgagcccggcacgttcaaggaccgtcattacctcgaaaccgatccgcatcgcttcatcgagggcatgctgatcggcgcgcatgtcgtgcaggcctccgatgtctacatctatcttcgcgacgaatatccggcctcgcgcgagattctccagcgcgagatcgcaaagctgccgccgggcgggccgacgctgcacctgcggcgcggtgccggcgcttacatctgcggtgaggaatcctcgctgctggagagcatcgagggcaagcgcggcctgcccaggcacaagccaccttatccgttccaggtcggcctgttcgggctgccgacgctcatcaacaatatcgagacgctgtggtgggtgcgcgacatcgtcgagaagggcgccgaatggtggaggggccatggtcgccacgagcgtcatggtctccgcagcttctcggtctcgggacgcgtgaaggatcccggcatgaagctcgcccccgccggcatcaccgtacgcgagctgatcgacgaatattgcggcggcatggccgacggccatcagttctacgcctatcttccgggcggtgcgtccggcggcatcctgccggcgtcgatggacgacattccgctcgatttcggcacgctggagaaatacggctgcttcatcggatcggcggcgatcgtgatcctgtctcagaaggacagcgtgcgcgcagcggcgctgaacctgatgaagttcttcgaggacgagagctgcggccaatgcactccgtgccgcgtcggaacgcaaaaggcggcgctgctgatgcagaagccggtctggaaccgtgccttgctggaagaattgagccaggcgatgcgcgatgcctcgatctgcgggctcggacaggcggcatcgaatccgctctcatccgtgatcaaatatttccctgacgagttcaaggaagcggccgaatga

SEQ ID NO: 1112 - DNA, 2769 bp, BradyrhizobiumColbertium
atgaccaagattacgttcgagctcgacggcaagcaggtcgaggccaatcccggcgaaacgatctggcaggttgcaaaacgccaggggcgggagattccgcatctgtgctattcgccggcgccggactatcgccccgacggcaattgccgcgcctgcatggtcgagatcgagggcgagcgggtgctggcggcgtcctgcaagcgcacgccatcggtcggcatgaaggtgaagaccgagtcggcgcgtgcagtgtccgcgcagaagatggtgatggagctgctggtcgccgaccagccggcgcgcgagacctcgcacgatccagactcgaagttctggcattgggccgaaacgacaggcatcaccgagagccgcttccccgccgccgagcggtggacgaccgacgccagccatccggcgatgcgcgtcaatctcgatgcctgcatccagtgcggcctgtgcgtgcgcgcctgtcgcgaggtccaggtcaacgacgtcatcggcatggcctatcgtaaccacggcgcaaaggtcgtgttcgacttcgacgaccccatgggcgagtccacctgcgtcgcctgcggcgagtgcgtgcaggcctgtccgaccggcgccttgatgccggccgtgatgctggacgacaagcagacccgcgtcacctttcccgacaggaaggtcgattcgctctgcccgttctgcggcgtcggctgccaggtcacctacgacgtcaaggacgagaaggtgatctacgccgagggccgcgacggccccgccaatcacaatcggctttgtgtgaagggccgcttcggcttcgactacatccatcatccgcatcgtctcaccaggccgctggtgcggctgccgaatgcgaagaaggatgccaatgaccaggtcgacccggccaatccgttcacgcatttccgcgaagcgagctgggaggaagcgctcgatatcgccgccaaggggctcgtcaagatccgcgacgagaacggcgtgaaggcgctcgccggcttcggctcggccaagggctccaacgaagaggcctatttgttccagaagctggtgcgcaccggcttcggctcgaacaatgtcgaccactgcacgcggctgtgccacgcctcgtcggtggcggcgctgttcgaaggcctgagctcgggcgcggtgtcggcgccgtttgccgcggcgatggatgccgaagtcatcatcgtgatcggcgccaatccgaccgtgaaccatccggttgcggcgaccttcatcaaaaacgctgtcaagcagaatggcgcaaaactgttcgtgatggatccgcgccggcagacgctgtcgcgccacgccaccaagcatctgcagttcaagcctggctccgacgtcgccatgctcaacgcgatgatcaatacgattatcaccgagggtctgaccgacgaccagtacattgccggctacaccgaagggttcgacgagctcaaggagaagatcaaggagttcacgccggagaagatggaggcgatctgcggtatcccggcgcagaccctgcgcgaggtggcgcggacctatgcccgcgcaaagtcgtccatcatcttctggggcatgggcatcagccagcacgtccacggcaccgacaatgcgcgctgcctgatcgcgctggcgttgatcaccggccaggtcggccgtcccggcaccggcctgcatccgctgcgtggccagaacaacgtgcagggcgcctccgatgccggcctgatcccgatgttcctgccggactatcagccggtcgggcgcgacgacatgcgcagcaatttcgagaagctctggctgcaggatctcgatcccgtccgcggcctgaccgtggtcgagatcatgaatgcgatccacgccggcgagatcaagggcatgtatatcgagggcgagaaccccgcgatgtccgacccggatctccagcatgcgcgtcaggcgctggcgatgctcgatcacctcgtggtgcaggatctcttcgtcaccgagaccgcgttccatgccgacgtgatcctgccggcgtccgccttcgcggagaaggacggctccttcaccaacaccgaccgccgcgtgcaactcgcacgccaggtggtcaagccgcccggtgatgcgcggcaggatctctggatcatccaggagatcggcaagcgcatgggcttgccatggaattattccgggcccggcgacgtcttcaccgagatggcgcaactgatgccgtcgctcaagaacatcacctgggaacgtctcgtgcgcgaaggcgcggtcacctaccccgtcgacgatccggacaagcccggcaacgagatcatcttcaccaccggcttcccgaccgcgaacggccggggcaagatcgtgccggccaaggtgatcccgccggacgagattccggacgatgaatatccgatggtgctgtcgaccggccgggtgctggagcactggcacaccggctcgatgacgcgccgcgcacaggtgctcgaccagatcgagcccgaggcggtcgcgttcatgtcgccaaaggacatgcgcaagaagaggctgatgccgggcgacttcatccgcctggagacgcgccgcggcgcggtcgaggtcaaggtccgctccgaccgtgatgtgccggagaacatggtgttcatgccgttctgctatgcggaggcggccgcgaacctgctgaccaacccggcgctcgatccgtttggcaagatcccggagttcaagttctgcgcggcgcgggctgagcgcgccgagatgcgggacgcggcggagtag

SEQ ID NO: 1113 - DNA, 474 bp, BradyrhizobiumColbertium
atgtccagggtcaccccagccacgcgagcgctcaccgccgccggtgtcgccttcaccatccacgcctacgactacgatcccgacgccgagagcatcgggctgcaagctgcatcagcactcggtgaggatcccgcgcgcgtcctgaagacgctgatggcgcaggtagacggcaagccggtctgcgtggtcgtgccgtccgaccgtgaagtctcgatgaagaagctcgccgccgccatggccggcaagtcggcgcagatgatgaagccgcccgaggcggaacgcgtcaccggctacaaggtcggtggcatcagcccgttcgggcagcgtaagcccgcgcgcaccgtgatcgagcggagtgcgctcgcgcatgacatggtctatctcaatggcggtcaacgcggcttgcaggtgcggctgaagccggccgatgctcggggcgtcctcaacgcggtcgtggcggatgtgctggcgtga

SEQ ID NO: 1114 - DNA, 1086 bp, BradyrhizobiumColbertium
atgaggcggttgcttctgccgtggcttgcggtcctgctcggcatctgtgtcccggctgaggcgcatcaggtcaacctcgtcacggcgcgcgtggcgttgagccccgatcgcgcggtcagcatcgaacttggactgaagggcagcgatgtcgatcgcctgatcggtttgcgtacgtacgaccccaggcaagacgcggtcgatcccgccgcggtcgaagcagccaaatccgccatcctcgcctatatgagcacgcacctagctgtcacgggcggtgccaagccctgtgcggccggagatgcggcgatcctggccgacggcgacggcatcatctatcgcaacggctttgcctgcgctgatgccgccggcgacatcgtctatcgttcgaccgtgttgaccgataaggatccggccgcacgtcaaatcgtactgattgcgcaaggccggtcggaggcgcaggccttgctcgatgcaggcaacacgacagtcacgctttcagccgcgccgccgtcgctgctgtcgacgatgcagcgctatgtcctcaccgggatcgaacacatctttctcggctacgatcacgtcgcatttctggttgccgtggtgctgtgggcaagacggctcattcctgtggtcaagatcgtgactgccttcaccatcgcccattcgatcaccttgtcgctcgccgcacttgacgttctcgtcatcccgagccgcatcgtggagcccgcaatcgcagcctcgatcgtcttcgtcgccgtggagaacttcttctcgcgcgacgtcgacaagcgttggcgcgcggcgtttctgttcggactgatccacggcttcggcttcgccggcgtgcttcgcgagatcgggctgccgccgaacgcagcggcgacggcgcttgccgctttcaatatcggcgtcgaaatcggacaggttgccatcgttgcgatcgcgttgccgatcctccgtttggccgaccgacccagccttgaagaccgttccgaaccggtgagggcgccggcgctggtctacgcgctgtccgcgatcatcggcgtgcttggcggctattggttgcttgcgcgcgtcttcgaggcctaa

SEQ ID NO: 1115 - DNA, 441 bp, BradyrhizobiumColbertium
atggaatcgagactggttcgtcacgacaccgatccggtgccgttcgcgccggacgccgtcatcgcagccttcaagacgatcccggacttgctggcacacgacgctgatttgaccgtccgcggacgctggctcgacgtcgactgcctgctcggcccgagcacccagccatttcacgtcgccatccgcgccgggcagatcgtggatatgacgccggcacctgtcctgatgcgcacctggcggttcgcctatcgtgcgacgccggctgcacttgctgcccattggcagcagatgccaccggccggctggcatgacctgctcgcgctgaccaagcgcggacaggcgacccttgaaggggatctgcatcccttcatgacgcatcttcagtatttcaaggatctgctggcgttgccccggcggagcggtttcggaggtgcgtcatga

SEQ ID NO: 1116 - DNA, 858 bp, BradyrhizobiumColbertium
atgaacggcttcatcgagccgatcgtcgggcgctacgtgcacgtcgaaatcaatggagagatcaaccggatctatttcgaggagaacggcagcggcattcccttggtctgcctccacaccgccggttctgacgcgcggcaatggcgccacttgctgaccgatcccgagttcaccggacatttccgcgtcgtcgccttcgacatgccttggcacggcaagtccaatccgcctgacagccaatatggcaccgagtatcggctgaccaccgcgagctacacggcaaccatccgcgcgttctgcaacgcgctgaagctggagcgcccggtggtgatggggtgctcgatcggcggccgtatcgtgctcaatctggccatcgagcatgcgcgcgagtttcgcgcattgatcgggctggaggccgcggacttccagcaaccctggtacgacacggcttggctgaaccggcccgacgttcatggcggcgaggtctgcgccgcgctggtctccgggctgatcgcgcccaacggcccggaagcctcgcgcgacgagacgctgtggggctacaagcagggtggccccggcatcttcaagggcgatctctatttctatcgcgtcgacggcgatctgcgcgggcgcacctctgacatcgacgtcaaccagtgcccgctttatctcctcaccggcgagtacgatttctcctgcacgccggaagacacgctgcgcaccgccgccggcattcccggtgccaaggcgacggtgatggagcggctcggccactttccgatgagtgagaacccggaacagttccggcgctacatcgcgccggtgctgcaagacatcctcgataagcagaattattga

SEQ ID NO: 1117 - DNA, 1197 bp, BradyrhizobiumColbertium
atgaagttgcgttggatgatggcggcgattctggccgcacaagcgagcactgcgtttgcagccgacaatgtgatcaggattggcgtgctcaacgaccagtcgggcgtgttcgccgacaatggcgggcgcggctcggtggtcgctgcaaagctcgccgcagaggacttcggcaacgagctgctcggcaagaagatcgagatcatttcggccgaccatcagaacaagcccgacatcgcatcggccaccgcgcgcaaatggttcgacaatgaaggcgtcgacatgattgcggacggcgcggcctcgtcggccggctttgccatcctcgaagttgcgaaacagaagaacaagatcttcgtcatctctggccccggctcgtccgacttcaccgggaaatcctgctcgccggtcagcttccacttcaactacgacacctacgcgctgtccaagctcaccagtgacgcgatcacgcgggccggcggcaaaacctggtacttcgtgacggccgactacgctttcggccacgcgcttcaacgcgatgccacgaaattcatcgaggccgcgggcggcaaggtgatcggctcggccgcccatccgctcggcaccgctgattttgcgtccttcctgttgcaggcgcagggctcgaaggccgacgttgttgggcttgcgacgtcgggcgcagacgtgcagaccgctatcaagcaggctggtgaattcggtatcgtcgagggtggccagaagctcgctggtctgctcgttttcatcacggacgtgaactcgctgggcctgaaggtcacccaaggcttgcaggtgacgacctcgttctattgggacctcaacgagcagacccgtgcctggtcgaagcgctacgccgcgcagatggacggcaaggtcgccagcatggtgcaggccggcgtctatagcggcgtccaccactacctttcagccgttaaggcagccggtaccaccgatgcgaccgccgttgccgccaagatgcacgagctgaaggtcaatgatatgtacaacaaggacgttgcgatccgcccggacggacgcgtgctgcataccatgttcctggtgcaggtgaagaaaccggaggagtccaagtataagttcgactattaccgggtcgtcagctccaagccgggcgaagaagtgttccgcccgatgagcgaaggcggctgcccgctggtgaagtaa

SEQ ID NO: 1118 - DNA, 882 bp, BradyrhizobiumColbertium
atgtctggttcgattgggttcatcggtcttggcgtcatgggcgagccgatctgccgcaacctgttgcgcaagagcggccgggcggtgctcgcgttcgaccttgccgcggagccgctggcgcggatcgtggacgacggggccacggcggcgaagtcgatcggggatctcgtcaccggcgcagagaccatcttcctgtgcctgcctagcgcgaggcacgtgatgtcggtcttcgagggcattttgccggtgatcagaaatggccagaccgtgatcgatctcggcacctccgatgtcggcctaacgcggtcgttcgccaagcagctcgctgacaagggtgcgctttggatcgacgccccgatcgcgcgcacgcgccaggctgcgcaggacggcacgctcagcgtcatggttggcgccacacccgagcactttgccagggtcgagccgttgatccggcatttcgcaacggacgtcaccctctgcggaggcaccggggccggacaggtgacgaagatcctgaacaacatggttctgttcgagaccgtcaatgcgctggcggaggcggtcgcgatcgccaagcacagcggcgtcgagccgaagctgctgctggagacgctgtccaaggggtcagcggacagctttgcgctgcgtaatcacggcatgaaggcgatcgttgccaaggattttcctctgcgggcgttctccaccgaatatgcaatgaaggacctttcctatgcgctggagcttggcgcgcaagccgggctaaatctgcgcggcgcggcgctgatgcgcaccatcttccaggagacgatcgacaagggcatgggcgatgcgtattttcccgttatcgcaaagctcatcgacccctccggatttccccaatag

SEQ ID NO: 1119 - DNA, 756 bp, BradyrhizobiumColbertium
atgccttcgcccggcgtcgcagccgtcgaccgtgccctgagcatcctggccgccttcgaggacgcgccggagccgatgacgctcgctgagctcgcccggcgcaccaagatgtacaaaagcacgctgttgcggctgatgacgtctcttcaggaattcggctacctcgtgcagttcgccgacggtcgttaccatctcgggccgacaccgttccggctcggcgcggtctaccagcgcagcaacaatctgcatgatcgcgtggtgccgctgctgcgtcagctcgtcgccgacggcacggaaagtccatcgtatcacgtgcggcatgatgcgaagcgcaggctctgcgtcttccgggtcgattcccaacactcgacgctcgaccgcgtcgaggccggcatgctgctgccgttggaccgcggcgcggccggacggattatcctggccttcgacggggagaagggcgaggcctacgacgagattcgcgagggttgcatcgcagtgtcctttggcgagcgcgatcccgattgcgccgggcttgcctgcccggtgttcggtcctggcggcaaatgcgtcggtgccctgtcgctctcagggccgaagccgcgcttcacgcgggacaatatcaaggcgatggcgtcgctgttgctgagagccgccgtccgcctgacgcgtgcgctgggtggcccgaccgagctgctcgacagtgccttatcggcttcggctgaagatgtgcgtcccgcgcgaggggcgaggcgctag

SEQ ID NO: 1120 - DNA, 684 bp, BradyrhizobiumColbertium
atggcaaggcgtccggcgaaggcaagcggatcgatcgcgcgcggcggcggtgtcgcattgggcgaagccgtattccgctcgctgtgcgaggcgctgcaggccggcagctaccgcgccggcgaccgattgcgcgaagaggaagtggcgcagcggctgaacgtgagccgcacgcccgtgcgggaagccctggggcgcctcgccgcgcgcggcttcgtcgagccagccggtggccgcgggctgatcgtgcgcaatctcgacatttccgaggtgctcgagctctatgccatgcgcgagatcatggaaggggccgcggcgcgcctcgctgccgagcacgcctctaccccggagatcgacgcgctcggggatatcgagcaggctttcgtcgcggcggccaagaccgacaaggccgagatggcaaggctcaaccgggcttttcacgaagccatctgccgggcggcgcgcaaccgctatctcgacaatgcgtcgcgggaattgcaggactggatcgccctgctcggcccgaccaccttcacggtgaccggacgcccctcgaccagccatagcgagcatcaggcgatcatcgccgcgattgcggcgcgcgacggcgacaaggccgagcagctcgcgcgggcgcatatccgcgaggcgctacgctgccggctgaagctgctgcagaaacagtag

SEQ ID NO: 1121 - DNA, 1392 bp, BradyrhizobiumColbertium
atgggcagcaaatacgacgtgctggtgatcggtggcggcaatgcggcgctgtgcgcggcgatcagcgccaggcgcggcggcgcctcggtgctcgtgctggaaggcgcgccgaagttctatcgcggcggcaacacccgccacacccgcaacatgcgctgcgcccatgatgccgcgaccgaaatcctgaccggcccctacaccgaggacgagttctgggaggacctgctgcgcgtcaccggcgggcagaccgacgagatgctggcgcgccacatgatccgcgagtccaaggacatcctgaactggatcgtggagcagggcgtgcgctggcagccctcgctgggcggcacgctgagcctcggccgcaccaactccttctttctcggcggtggccgcgcgatgctgaatgcgctctatctcacggcggagcggctcggcgtcgacgtcgcatacgacgccgaggtcaccgacctcgagattgaggacggcatgttcctcgcggcgcgcctcaagcggccgatcaacgggcagaccgagatccgcgccaccgcgctggttgccgcagccggcggcttcgaagccaacatcgaatggctcaagcaatattggggcgaggccgctgacaacttcctcattcgcggcacgccctataatcgcgggtcgatcctgaagattctgctcgacaagggcgtgcaggaggtcggcgatcccacccagtgccacgcggtcgcgatcgacgcccgcgcgccgaaattcgacggcggcatcatcacgcgccacgactcggtggtgttcggcatcgtcgtcaacaagcacgcgcagcgcttctacgacgagggcgaggacatctggccgaagcgctatgcgatctggggccgactggttgcggcgcagcccgaccagatcgcctatatcatcttcgactccaccgtcgtcaccagcttcatgccgacgttgtttccgccgatcgccgggcagacggttgccgaactggccggcaagctcgaactcgatccggccgcgctggaaaagaccatcaccgagttcaacgccgcagtgcggcccggcacgttcgaccacacgattctggatgactgcgtgaccgagggcatcacgccacccaagacacactgggcgcgcaagatcgagacagcgccctatctcgcctatccggtaaggccgggcatcaccttcacctatctcgggacgcgcgtgaacaaggaggcgcggatgctgatgaaggacggcaagccgtccgccaacatgttcgcggccggcgagatcatggccggcaacgtgctgggcaagggctatgcggccggaatgggcatgaccatcggcagcgtgttcgggcggatcgcgggacgggaagcggcaaaacatgcacggaactag

SEQ ID NO: 1122 - DNA, 1083 bp, BradyrhizobiumColbertium
ttggacgaagccgaccgtctgatgacggtctgcaattcctgccgctattgcgagggcctgtgcgcggtatttccggcgatggaaatgcgccgcgccttctctgacggcgacctcaactaccttgccaatctctgccatgcctgcggcgcctgctacgtcgactgccagttctcgccgccgcacgagttcaacgtcaatgtcccgaagacgctggctgtcgcgcgcgcggaatcctatgcggcctatgcctggcctcaggcgctctccggcgcgttcgcgcgcaacggcctcgtcatcagcattgtcgcagcgctcagcatggcggccttcatcctcggcttcgccgccttgaatgaccggagcgttctgtttggtgtgcacaccggccctggcgccttctacaagttgatgccgcacaatatgatggccggactgttcggtgctgcctttctctatgccgtttttgcgctttttatgagcgtgcgcgccttctggcgtgacatcggcccgcccattgacggccgcgtcgacgggggctcgatcttccaggcgatccgcgatgccggcgagctgcgctatctccatggcggcggtgtcggttgctacaacgaggacgacaagcccaccgaccggcggaaaagctatcatcatctgaccttctacggcttcctgctgtgctttgccgcgacgtcggtggcgacgctgtatcactatctgctcggccgcgaggcgccgtatccgtggtgggacctgcccgtggtgctgggcacgctgggcggcatcggcctcatcgttgggccgatcggtctgttcatggccaagatgcggcgcgatcccgcgctgctcgacgagacccgctacggcatggatgtcggcttcattgccatgctgttcctgaccggcgtcaccggaatgctgctgctcgtcctgcgcgagacaggcgcgatggggccattgctcgcgctgcatctcggcgccgtgttcgcattgttcatcaccatgccctacggcaagttcgtgcacggcatctaccgcttcgtcgcactggtgcgctacgcgcaggagcggcggaccgcggcgtga

SEQ ID NO: 1123 - DNA, 3405 bp, BradyrhizobiumColbertium
atgatcagggaattgatgtcgtcacgccgtttcgcgccgctgttctgggcgcaattcttttcggcgctcaatgacaatgtgctcaagaacgcgctcgtcatcatcctgctttacagcgcggcgacgagccacggcgatgcgctggtgacggtcgcaggcgccgtcttcatcttcccctatttcatcctgtccgggctcggcggccagcttgccgacaaatacgtcaaatccgtcgtcgcaaggcggctgaaattcgtcgagatcttcgccgcgtgctttgccgctgccggcttcttcctgcattcggtgccgctgctgttcgcagcgctcgcgctgttcggcaccatcgccgccctgttcgggccggtgaaatatgccatgctgccggaccagctcgagctcggcgagctcgcgactggcaacgcgctggtcgaaggcgcgaccttcatggccatcctgctcggcaccgtcgccggcggccagttcgtggccggctccgcacatatgggctgggtcgcctccgccgtggtcgcgctggcgctgctgtcatgggcgtttgccgcccgcattccgcagacgacgccctccgcgcccgatctccccgtcgatgccaatccatggacctcgacgatgagcctgctcaggacgctctacgccgaccatcgcctgtgggacggcaccgtgatcgtctcctggttctggctggtcggtgcgatcgtgctgtcgctgctgccggcgctggtcaaggacgtcgtcggtggcaccgagggcgtggtgacgctgtgccttgccatcttcgcgatcggcatcgccatcggctcgctgtttgccgcaagcctgagccacgtacgtcccaatctcgcgctggtgccgatcggcgccatcatcatgggatttgcggggctcgatctcgcctgggccatcggtgtcgctgccaaggggcacgagatcactgcgctcggctttgcgacctcgttcggcggcctgcgtatgctggtcgacttcgttgccttcgcattcggcggcggcctcttcgttgtgccgtcctttgccgcagtccaggcctggtcgcaaccttccgaacgcgcccgcatcatcgccgccggcaacgtgctgcaggccgccttcatggtggtcggctcgctgttcgtcgcgctgttgcaggcggccgggctccatgtcggctggatctttttcggcctcggcgtcgccagcttcggcgcggtgtggttcgtgctcacgaagtggggcaaggaaggcgtgcgcgatgccggcgggcttctgttccgcgccctgttccgtacggaggtgcgcggactagaaaacctgccgcctccgggcacgcgcatgctgatcgcgccgaaccatgtcagcctgatcgacggcccgctgctgcatgccgtgctgccgatcgacgcgagcttcgcggtcgatactggtatcgccaaagcctggtgggccaagccgttcctacgcgcggtcaggcactacaccatggatccgagcaagccgctggccgcgcgcgacctgatcaagctcgtcgccgcgggcgagccagtcgtcatcttcccggaaggacgcatcaccgtctcgggatcgttgatgaaggtgtatgacggcaccgcgatgatcgcggacaaggccgatgccgtggttgtgccggtccgcatcgaaggcgcgcaacgctcttatctcagctatctcaacagcagccagatcaagcggtcctggtttccgcgtgtgaccgtcaccatcctgccgccggtcaagctcccggtcgatgaaacgctgaagggcaaggcacgccgcaatgccgccggcgccgcactgcaggacgtcatgatcgatgccctcgtgaagaacgccatgctcgatcacacgctgttcgaagcgctcggacatgcccatcgcgaccgcgacaccggcaaggtcatcatcgaggacgcgctcggcgccaggctaacctatcgcaagctgattctcggcgcgcaggtcctgagccgcaagctcgagagcggcaccgccgtcggcgagaatgtcggcgtgctgctgccgaactcggcgggcgttgccgtagtgttcatggcgctgcagaacatcggccgtgtgccggcgatgctcaacttctccgccggcccggtcaacgtgctcgccgccatgaaggccgcgcaggtcaggaccgtgctgacctcgaaggccttcatcgagaagggcaagctcgacaagctgatgaccgcgatctccgcggaggcgcgcgtggtctatctcgaggacgtccgcgacacgataggcgtcgccgacaagatcaagggcctgctcgccggcacgacgccgcgtgtcgcccgccaggccaacgatcccgccgtcgtgctgttcacctcgggctccgaaggcacgccgaagggcgtggtgctgtcccaccgcaacatcctcgccaatgcggcgcaggcgctggcgcgggtcgacgccaacgccaacgacaaagtgttcaacgtgctgccggtgttccactcgtttgggctgaccgggggaatgatgatgccgatgctggcgggcattccgatctacatgtacccctcgccgctgcactaccggatcgtacccgagttgatctaccagaccggcgcgaccatcctgttcggcaccgacacgttcctcaccggctacgcccgctcggcgcacccttacgacttccgcaccttgcgcctcgtgatcgccggtgccgaggcagtcaaggatcgcacgcgccaggtgttcatggagcggtacggcattcgtatcctcgaaggctatggcgtcacggagaccgcgcccgttctcgccatgaacacgccgatggccaaccggcccggcaccgtcggccgcctgtcgcctctgatggaaagccgactcgacccggtccgcggcatcgatgatggcggacgcctctcggtgcgcgggccgaatgtgatgctcggttatctcagggccgagaatcccggcgtgatcgaagtacttcccgaaggctggcacgacaccggcgacatcgtttcgatcgacgctgccggcttcatcaccatcaagggccgcgccaagcgcttcgccaagatcgcgggcgaaatggtctccctctccgcggtcgagagcatcggagcgaccctgtggccgcacgccgctacggttgccgtgtcgatccccgacgcacgcaagggagagcgcatcgtgctgctgacgacggaaaaaaacgccgagcgcagcgcgatgctggctcgggccaagacgatcggcgcatccgagctcaccgtgcctgcgacaatcatggtggtcgacaaggtgccgttgctcggcaccggcaagaccgactatgtcacggccacgacgatggcacgtgagcaggcgtccgcgccggaccgggaggtggcatag

SEQ ID NO: 1124 - DNA, 267 bp, BradyrhizobiumColbertium
atgcaaaccctcgctgttgatatcgccgtcaccttcgtcgacgacgccaaggctctcgtcaccggtctgtgccgcgccgccctcaacgccgcgacggcgcccatcaaccgcgtcgccaatacctgcgacgttgccggcgtcctcgagcagcgtcgggcgaccttccggatgtggcgggcgagccgcgcccgagcccgccgagagcggcgccggtttagcctgctcggtcgcttctcgcccttccgccgccttgcccatctgacctga

SEQ ID NO: 1125 - DNA, 558 bp, BradyrhizobiumColbertium
gtggagatcgcccgcggcatcatctcagctaagggactgagatcattgaaggttcgggacgtcgcggaggccgccggctgctcggtcggcagcgtctataacgagttcggagacttcgatggggttatcctgaccgtcaatcgggagacggttcaggcgctcacggcgcagctccggggcgttcctgccgaagatcccgttcgccagctctatggcttggccgcgacctatctcgatttctttgccgagcacgccaatctgctgcgctcgctgttcgagcatcggatggaggacgaccgtccctacccggacgatattcttcagatggtgatggatgccttcgcgttgatgcatccacccctggtgcggctattgccggatgccgatgacgtgaagatcgcgttgctgtcgcgcacgctgttttccgccgtgcatggcatcatctcgctcggcctcgaggagcgcatggtggccgtgccgccgcagatgctgcgccagcagatcgaacagtttgtcgacactcatctcacgggcctcgggattctgccccggagctga

SEQ ID NO: 1126 - DNA, 1305 bp, BradyrhizobiumColbertium
gtgtttcgcagaacagcgacgtcagcggagcgacacagcttccttcacgtcatcaagctcgtctcgcctttcgtgatggtcgtcgtgctccaggcggcgatcgcgggattcagtctcgaggtgatgtcgtcggtccgcgcctatgtggcgggcgaagcgctatggtcgcgttcgcaaaagaacgccgtctatttcctcaaccgctatctgcactcgggcgaggccagcctgttcgcgcagtatcaagcctcgcttgccgttcccatcggcgacgagttcgcgcgctgggcgctcgagcgcgatcccgtcgacgtcgaggccgcccgcatcggcttcctgcagggcggcaaccatcccgatgacgtaccaggactgatctggctgtttcgctacttcaaccgtgtcagcttcctccaggaagcgatcagcgaatgggccgccactgatcccatgctgctggagctcagcgtgttcggcgagctcatccggtccgaactggaaaacggccccattgcagacgatcgcctgcagtttcttgcgtcgcggctctcggagctcaacagccaattcacggtgcatgcaaagcggttctccaccgtcctcggcgagggctcccgcgcgatcaagttgacgctgacctgcatcaacttcctgaccgcagcgacgctgatcctgcttctgatctggcatacgcggcgtttggtgctgcaacggcaggcgttcgaacacgccttgcatgccgagaaagagcgcctggcctggcaggcgtcgcacgatgggctgaccggtctgttcaaccgccgcgccttcgaggcccgcctgcaaagcgagctggacgatgccgcggcgggtgcgttcggcctcatcctgctcgacctcgaccagttcaagagtgtcaacgacaactgtggccaccttgccggcgaccgcctgctctgcgaggtctcgcgcctcctgcagcaggaccggcatgcacatgatcttgtggctaggctcggcggtgacgaattctgcctgatcctgccgcgctgcccgccctacgaggctgtcgatatcgccgagcgtctgcgcagatcgctcgagatgttcaatttcgcctggggcgaccgctgcttttccgtgaccgccagcatcggcgtcgcctgcatcaccgaccgcaacaccacgctcgaagatgcgatgcggcgcgcggatgccgcctgctaccgcgccaaggaaaagggacgcaacagcgttcaggtcgagggcgggagacctgatgtggtcgttgttgcggcacggctccgcgagccggcgcgcgcttaa

SEQ ID NO: 1127 - DNA, 150 bp, BradyrhizobiumColbertium
ttgaagcgatttgcttgcgcctgcttcacgacggcttcaccctctgacggagtcttccgcacctttcagatcgagttaagcaaccatctcgtctacttcgtgttgcaggcgcaacgcttcgctgcgatcgttgatcggcttggggaataa

SEQ ID NO: 1128 - DNA, 1305 bp, BradyrhizobiumColbertium
atgacagtgaccgacattgcgagccggacctacaatcacagctggcggctggatcccatcatccgcagcctgcttgataccgacttctacaagctattgatgttacaaatgattcgggaagactacccggatcagcaggtgaccttttcggtcatcaaccgctcgcgccatgtacgtctcgccgagatcatcgacgagggtgagctgcgcgctcagctcgatcacgcccgcaccatccgcttcaccaagaaagagctgatctggctggccggtaacaccttctacggcaagacccacatgttctcggcggacttcatccgctggctggcggagttccgcctgcccgagtacgagctgcgcaaggtcgagggccagtacgagctgcatttccacggtccctggacccacaccacgatgtgggagattccggcgcttgcgatcatcaacgagctgcgctcgcgcgcggcaatgaagggccgcggccgcttcgaactcgacgtgctctatgcccgcgccaaggccaagctgtggaccaaggtggaacggctgcgcaagctcgagaatttgcggctctccgacttcggcacgcgccgccgtcacggctttctctggcagcgctggtgcgtcgaggcggtgaaggaaggcctgggtccgtccttcatcggcacatccaacgtgctgctcgcgatggacaacgatctcgaagccatcggcaccaacgcgcacgaactgccgatggtcgctgccgcgctcgccagggacgacgaggaactgcgctgggcgccctaccgcatcctcgaccagtggcgccagacctatggcggcaatctcctgatcgcactgcccgacgccttcggcaccaaagccttcctgcgcgatgcgccggaatgggttgccgactggaccggcttccgtcccgacagcgcgccgccgatccaggcaggcgaagagatcatcgcctggtggcagaggaagggccgcaaccccaaggacaagctgctggtcttttccgacgcgatggacgtcggctcgatcgaggagacctatcaccacttcgccggccgcgtgcggctctccttcggctggggcaccaacctcaccaacgacttcgtcggctgcacgccggatggctcgttcaacctcgatccgatctcgctggtctgcaaggtctcgtcggtcgatggccatccggccgtcaagctctccgacaatccggagaaggcgaccggccttccatcggagatcgagcgttacctgcgcgtgttcggcgacgcgggtcgcgtgcgcaagccggtgatggtgtag

SEQ ID NO: 1129 - DNA, 792 bp, BradyrhizobiumColbertium
atgaacgcccaggcgccagcggccttgcgggatccccgcctcaacagccccgagccttttacgcccccgctcggcgatggcggcttcttccagcgcgatcgttccatccatccgccggcgcatgcgcccggttacaaatcctcggtgctgcgctcgccgcgccagtcgctgctgtcgctggaaaactcggtttcggagatcaccgggccggtgttcgggcacaatgatctcggcccgctcgacaacgatctgatccgcaactacgccaaggacggcgaccccatcggcgagcggatcatcgtgcatggccgcgtgctggacgaaaccggccgcggggtgccgaacacgctggtcgagttctggcaggccaatgccggcggccgctaccggcacaaaaaggacacctatctggcgccgatcgatccgaatttcgggggctgcggacgcgcgctcactgacgaaaccggctactattatttccgcaccgtgaagccggggccctatccctggcgcaactatgtcaacagctggcgcccggcccatatccacttctcggtgttcggctccggcttcgcgcaacggctgatcacgcagatgtacttcgaaggtgaccccctgattccaatctgcccgattctgacgacgatcccggacaaggatgcgctcggccgcctggtggcgccgctcgacctcaacgcctccagcccgttcgattcgctcgcctaccgcttcgacattgtgctgcgcggccagcgctccacctatttcgaaaatcgcaccgcggggaactga

SEQ ID NO: 1130 - DNA, 627 bp, BradyrhizobiumColbertium
atgccgcagccgctcaattatctcaaggaaacagcctcgcagaccgccgggccctacgtccatatcggcctgatcccggccatggccggcttcgacatcttcgagaggaatttctccaatgtgctggtgacgcccaacagcaagggcgagcgcatcacgctggagggcaaggtgctcgacggcaccggcacgccgctgcgcgacgttctgctcgagatatggcaggccaatgcggccggtcgctacaaccatccggcggaccgttcggcgggcgcactcgatgagggctttcgcggctggggccgcgccgggtccgacttcgacagcggcctcgtcaccttcgagaccatcaagcccggcgcgatcaccgacaaggcgggccgcaaatgcgcaccgcatatcaatgtctggatcgtcgcgcgcggcatcaacatcggcctcaacacgcggctctacttctcggatgaagaggccgccaacgccgccgaccccgtgctcaacctgatcgaacagccggtgcgccgcaagaccttgatcgcaacgcgcagcgagcgcgccggcaaggtcgtgtacgccttcacgatcaatttgcaggggccggaggagacggtgttcttcgacgtgtga

SEQ ID NO: 1131 - DNA, 837 bp, BradyrhizobiumColbertium
gtgtacaatttgttcggcgagtccggcgacctgcccgacgtcgtgcactgcgagaccatcgcatcccgttcggtgctgcacgactggacgctggccgtgcatcgtcatgcccggctgcaccaggtcttgctgatcgagcgcggcggcggcgaagcgacgctcgacgggcgcgtggtgcccttgaggccgatgcaaatcgtcaacgtacctgtcggccacgttcacggcttccgtttcgtaccggacactcagggctgggtgttgaccatcgccgccgagatcctggatgaggcgctgctcgcggccgagggcttgcgcggcgcattgtcacgatccgccgtggtgcgcggcacgccgcagatccgcgccacgatgaagcagatcttcgccgagcacgccgcgcgcgatttcggccgtgcccatgtgctccgcgccttgtcctcggccatgatcgggctcgtggcgcgcgcgctctcaggggagagcggcggcaacggcactgccgaatccagcctgttccgccgcttcgaggcgctgctggagcagcatcatctggagcgctggagcgtcgccgactatgccaaggcgctgtcggtgacgtcgacgcatctcaaccggatcacgcgaagggcgaccggcgataccgcctcgcatttgatcctcaaccggctgatccgcgaggcgcggcgcaacctcgtctacaccaacctgccgatctcgacgatcgcctacgcgctcggcttcgaggaccccgcctatttcagccgggtctatgccgcagccacgggcctatcgccgcgcgccttccgcgcgcagctccatggcgaagaggcgtga

SEQ ID NO: 1132 - DNA, 1173 bp, BradyrhizobiumColbertium
atgaaagttcaggtctgtatcatcggcggcgggccgtccgggttgctgctgtcccagctgctgcatctcaagggcatcgacacgatcgtgctggagaaatacagccgcgatcacgtgctcgcccgcatccgcgccggcgtgctcgagcacggctttgccaagctgatgcgcgaggcgcggtgcggcgagcggatggaccgcgagggggagatccaccgcgggttcgagatcgcccatgacggcgtgctctccaagatcgatctgcacaagcactcaggcggcaattcggtgctggtctatggccagaccgagctgacgcgcgacctgtacgaggcgcgcgaccggctcggcggcaaggtcgtgcacaatgccgaggacgtaacgccgcatcatctgacatcggatcgtccctacgtcacctaccgctcgaacggcgaaacgatccgcatcgattgcgactacatcgtcggcgcagacggctttcacggtgtcagccgcaagtcgatcccgaaggacgtgctgcgcgaatacgagaaggtctatccgttcggctggctgggggtgctgtcgcgaaccaagccggtatcgcccgagctgatctatgtgaagcacgagcgcggctttgcgctgtgctccctgcgctcgcaggtgctcagccgctactacatccaggtgccactgacggacaaggtggaggattggagcgacgatgcgttctgggccgagctgaagcgccgcctgccggaggaggtcgccggccgcctgattacgggaccctcgatcgagaagagcatcgcgcctttgcgcagcttcgtcgccgagccgatgagttatggccgcctgttccttgcaggcgatgccgcgcacatcgtgccgccgaccggggcccgcgggctgaacagcgccgcttccgacatctactatctctaccacgccttgctcgcgcattatcagggcggcgacgattccggtctcaaaggctactccgccaaggcgctcgcgcggatctggaaagcgcaacgcttctcctggtggatgacgatgctgctgcacagctttcccgaccggctcgactacgaggatcggctccagcagacggagctggactatctgctctcgtccgagacggcgcagcgcctgcttgcggagaattacgtggggctgccgttctag

SEQ ID NO: 1133 - DNA, 2151 bp, BradyrhizobiumColbertium
atgcggcggatcggcaggcgcgacatcgttgcggcatacctgactgcgctcatcgcgggcgcagtcttcacatcgccgccgcttcaggcgctgcaaggcctctctctcgacctcctcacggcgctgcgcggcaagaccattggcgaccgccgtgatcccgccgcctcgccggtcgtcgtagtggcgatcgatggggagacttacgcgacgccacccttcaagggatcgccgacgcaaacctggacacgtgagattgggcgcgtgctcggcagcatcagtgagggcggcgccaaggtgatcggctacgacgtcatcttcccaagctcgatcgagctgtccgagattccgtttggcgacgggccgctcggctcgcgcatgaggggattcgatcgggactacctgatcgcgctccgacaaatctccgacagcggcaagctcgtgctcggcgaggtcctgagcaacgaccacccggagcggccctaccaggcgcaacgggtggcggtgcgaaacaacatccgcgccctcaacgtccacaccgatgcggacgatgtcatccggcggatgccgctcaccttctccatcgacggcaagccggtgccggcgatggccgtcgaactcgccgcgcgcgcactcggcgcgaaggtcgaggtggcgccatccggtaaggccgagctggccggctatgcgatcccgggcgtcgtgccgaacacgctgacgctgaattttcgaagccttagccgcgacgttccgacctactccttcgccgatctgcgagcctgcgtcgaaaaaggcgaccacgacttctttcgccgtgccttcgagggcaaggtcgttctgctcggcaccgtcctcaacttcgaggaccgcaagctcacctcgatgcgtctctccggcggatatgacgggaccccggcgccgcgctgtgccatcccctcacctgcaggcgccgcgcagaaggcccgcagcgacgtggccggcgtgttcgttcacgccgctgcggtccgaaatctgatcgagcgggacgccgtgaccgagctcggcttccccgggcggtcccttctcacgatcgcattcgctgccgtcgtcgcgatcgcagcctgcatgctcgcgcccggcgccgcactgatggcctggttcggcctcacgctcgtctacggggccgtcaccgtcagcgccttcgtgcacgccttggcgctgccgctggccgagccggctctggccggccttgccgcgctcgcgatcatgatcggctaccgcttcgtgctggccgatcgcgacgagcgttttctgcgcaagagctttgccctctacctcgcgcccgaggtcatcgagaccatggtcgcctccggcaagatgccggcgctcagcggcgagatgcgcaacgtcaccatgttcttctccgacctcagcggtttctcgtccattgccgagaccatgaccccgggcgagctggtgacgctgatgaacgaatatctgtccgccatgaccgacatcatcgagaatcatggcggctacgtcgacaagtacatcggcgattccatcgtcgccatgttcggcgcgccggccgacgatcccgcgcacgcgcgcaacgcggttcgcgccgcgctgaaatgccacgagaaactggctgagctcaacgcagcccatcccgccttcgccggccacgacatatcgcatcgcatcggactgaacagcggcgaggccgtggtcggcaatatcggctcgcggcgccgcttcaactacaccgtgatgagcgataccgtgaacgtcgcctcgcggctggagggggccaacaaatattacggcacagccatcatggcctctgagagcaccaaggcgcagaccggcgacaccttcgcctggcgcgagctcgacgcgatcagggttcagggacgcggcgaagcaatcagggtgttcgagccgctggcggagagcggtgcggagagcaccgagcagacgaaggcagctgccgcgtatgcggaaggtcttgcctgctggcgagccagagagtttgcgaaggcggtgaatacgttcgagcggctggcggagtccgatccagcctcggcaatgttcgccaagcgagcgaaggcgctagccgagacgccgccgccgccggactggacgccggtcaatacgctggaaggaaagtag

SEQ ID NO: 1134 - DNA, 669 bp, BradyrhizobiumColbertium
atgagaagcctgatcggcgccgtcctcggtgccttctgccttgcggcccccgcgctggcggagactcctgccgcgatcgtcgaggacgtccaaggaaaggtcgacggcatcgccttcatggactatgtggcagcgggaaagatcatcaagctcgggcccaaggccagcatcacgctcagctacctcaaatcatgcgagcgcgagacgatcagcgaaggcgttgttctggtcggcactgagcagagcaccgtgcagctgggcgaggtcaagcgggagaaggtgccctgcgataccaatgcggcaaagctgtcggaacgccaggcgaaccagagcgccgcaacgaccttccgcaacgtgcggtcggacgccaagggccccccgtccaagctgccgacgctctacggcgtcgccccgctggtgcaggcgaagagcgggagcacgctggtcatcgagcgcaccgacggcaaggaacccacgatcaccgtgccgctgaggagcgaaaccatggtccgtggcaagttctacgactttgccaaagccgggaagtcgctgaccccaggaggaagctatctcgccatcctcggcgccaagcgctacgccttccagatcgatgccagcgccacctcttcgccgacgccgatcgtcggccgcctgctgcggctcgaatag

SEQ ID NO: 1135 - DNA, 1134 bp, BradyrhizobiumColbertium
atgctgacccaagcgctgctggttgatgacagccgctccgtcctcaacttcctgaaacgtcatatcgaggcagaaggtctggtcgaggccaccgccttcctcgatcccgtggaggcgctggcttgcgcgcgggggcgcgtcttcgatctggtgctggtggattacgagatgccgcatatggacggcatcagcttcattcgcagcttccgcaggcttcccggctgcgccgacatcccgatcgcgatggtcacctcgcgccagaccgacgacatcaagatggaagcgctgcaggccggtgcaaccgatttcctgccgaagaagccacaaagcctcgaaatgacggtgcgcctgcggaatttgattcagcttggtgcagccgtgcgcaagctcaacgaccgcgccgcgcacctggccagcgaagtcgcagcagcaacgcgaaagctcggcgagcgcgaagaggagatcatcctgcggctcgcgctcgcggtcgaataccgcgacaatgataccggcgagcacaccctgagagtcgcgcgctacagccgcgtgatcgccgaacagctcggcctgcccgcccggctttgccgcgacatctatctcgccgcgcctctgcacgacgtcggcaaggtcgccatccccgacaatatcctgctcaagccaggcaggctcaccgaggacgagatggcggtgatccggacgcatgccgcgatcggcgaacgaatactggccgattccagctgcgagctgatccggctcggtgcgcaaattgccgcgagccatcacgagcgctgggacggcgcgggctatccgaacggcctcaaggcggaggccatcccggtcgccgcccgcgtggtcgccgtcgcggacgtcttcgacgccctgacgacgcggcggccatataaggagccgatggcgatcgagatggcgcgcaactacctgattgagaatcagggcaagcagttcgacccggcctgcgtccaggcgttcctgtcgcgctgggacgaggtggtcgggatcgccgccggtgagacgcctcttcagaaaagcggggcccctctcgttcctgatatagagagtgcggccgagagccgcccggtggaggatcattcggccgaggcagccccgaccgcctga

SEQ ID NO: 1136 - DNA, 153 bp, BradyrhizobiumColbertium
ttgggtcagcattggtggcgggggctctcttcactgccaaagacacgagacccagccataacccgggcgaatttaacgcgaagcaaatgcgcggaaacagtgccggcgcggaggcgtcgcctgaaatttcggcaggttgtgcccgcggcatga

SEQ ID NO: 1137 - DNA, 324 bp, BradyrhizobiumColbertium
atgtcgctcaattccacggagccaaaatggtcgttgcggttgcccgctgattgcagcatcgccgccattcgcagcgtctatgacctcattcgcgaggcgttcggccgccaggagcggcttgagatcgactgctcgaacgtggacaaggccgatgtgacctcgatccagcttctgctgtcgaccgccaagaccggcgaggcccagggccgccccgtggtcctgacctccttctcgcaatctctgcgcaacacccttcgccgcgccggctttgccagcgaagcgatgatcgatcagcacttcccgcaaaagaaagatggcacctga

SEQ ID NO: 1138 - DNA, 366 bp, BradyrhizobiumColbertium
atggccacgattctcaccgtcgacgattcgcccagcatccggcagatgatcaaggtcgtgctcgagccggccggtcacaacgtgatcgaggccggtgatggcgcccaagggctggccaaggcgcaagccggcaagctggacctcgtgatcaccgacctcaacatgccggtcatgaacgggctggagttgatccgcgcgctgcgcaagctgccgaacgctgtcggaatgcccatcgtattcctgaccaccgaatccaatgacacggtgaagcaggaagccaagagcgccggcgccaccggctggatcaccaagcccttcaaacccgagcaattgctggccgtggtcggcaagctggtgcgcgcatga

SEQ ID NO: 1139 - DNA, 2097 bp, BradyrhizobiumColbertium
atggatccgaccgagatctttcgtcaggaagccagcgaacttttcgaggttcttgaaggatcgctgctcgatctcggtctacgtcccgatgaccgcgaactggtcgattccgcctttcgtgccctgcatacgatcaagggctcgggcgccatgttcggcttcgagaaggtcgcctcgttcacccacgaattcgagaccgccttcgatcgcgttcgcaagggcgagatcaagccgacgcaggagctgatctcggtcgcgcttgccgccaaggactatatccgagcgttgatcgaggatccgcagtcgaccgacgacattatcggcgaagccatcctcgacgatctcaagcgcttcgtctcggccgacacgcccgccgttccggtcgtcgagatcgccggggcgccgccgctggcgccagtggagagcaagcgggccggctggcacctttatctggaattcgaatcccatatcctgcgcaacggctccaatccgctcgatctgctggaagatctctgcaagctcggtccctgcttcgtggtgcctgtcaccgacggcgtcccgtttctcgatgagatggagccagaggattgctatctgaaatgggacgtcaagctgcacgcggcctgcgacaaggacgcgatcgacgacgtcttcatgttcgttcaggacgagatgaggctgacgctgtcgccgctggagcaggtcgaagcgcccgcgccggctccgttgctccagcttctcgacgaagagcccgcgccgccggccgagacggccgcggtggtggcggaggcggctcccgcgcccgttgccgagcagcccgcaaaagcagagcacaaggccgaagctgcaaccgagccgaaagccgagatcaagcgtgaagcgccgcccgcccgccgtgaggacgccaagcaggagcggggtatcgccacggtccgcgtccaggccgagcgcctcgacgagctgatggaccgcgtcggcgagctcgtgatcgcccaggcgcgattgacccagctcgcggcctccggctccgacctctcgatcaagctgatcgctgaggaaatcgagcgtcttgcttcttctctgcgcgacaccacgatgggtgcgcgcatggtgccgatcggctcgctgttcggccgcttccgtcgcctcgtgcacgatctgtcgcgggatctctccaagcccgtcgaattcgtcacctcgggcgaggataccgagctcgacaagaccatgatcgagtgcctggctgatccgctggtgcacctcatccgcaatgccatcgaccacggcatcgaagacaccgccacgcgcgctgccaacggcaagaccgagcagggccgcatcgagctcgccgccgtccattccggcgcgcaggtgctcgtcaccgtgaaggacaatggcggtggcctcaacacggcgcgcatccgtgcgaaggcggaagagcagggattgatcgcggccggtgccgtgctcagcgatcacgagatccaccagttcctcttccacccgggcttctcgaccgcgcagacgatctcggcgctgtcgggccgcggcgtgggcatggacgtagtcaaacgcaccatcgagaacatgcgcggctctatcgacctgtcgaccaggccgggccagggtaccaccgtgacgctacgcctgccgctgacgctcgcgatcatcgagggtctgttgatccgggtcggcgaaggccgctacatcattccgctctcggcggtggaggagtgcgtcgagctgaccgcggaggacgagcgttcgcgcggccgcaacttcctcaacgtgcgcggcaatctcgtgcccttcctgcgtctgcgcgagatcatgtcctcgtcgggcgcacccgaccggcaccagaagacgatcatcatctccacaggcgaaacccgggtcggcctagtcgtcgaccagatcattggcaatcaccagacggtgatcaagtcgctgtccaagctgcattcggacgtcacgatcttctcgggcgcgacgatcctgggcgacggcacggcggcgctgatcctcgacgttgcgcagctggtcacgctggcgcagtcccaggtcgaaaaacagcacatcagcgaggcggcatga

SEQ ID NO: 1140 - DNA, 465 bp, BradyrhizobiumColbertium
atgatgaacgagggggtggcgggcgagcatcagtccggcgcgatgcaggtcgtgatgatcggtctcggagaggaaaagttcgcgctcgatgcgggcctcgtgcgcgaaatcatcgatcccgttcccgtgaccaaggtcgcgggcgcgcgcgcattcgttccaagcgtgatcaacgtgcgcggcaatgtcattccgctcgcggacttgcgtatccgcttcgggatgccgcagctggatgattctgccgatacacgcatcgttgtcatcgagctcgatctcgacggggagccggttctggttggcgtaaccgcggacaaggtctacgaggtcacagagatctcgcaagccgacgtgcagcagacaccgcgagtcgggatgcactggaagccggagttcattcgcttcatcgcgaagtggcgtgaagagttcgtcatcgttccgaacatggaacgcattctgaattga

SEQ ID NO: 1141 - DNA, 2085 bp, BradyrhizobiumColbertium
atgcggttcactatcaaggcaaagctggcgtgtgcgttcggcgtgatcattctgttgtcaggagtcacgggcggactggcatatctgaagctcgcgcaacaagtcgaggtttccgcggatttcgtcgtgcgcgccgcgcgcatagataaggccggagagctgcagaacaacgtactctatcagaccagggctgagcgagacatcatactcgcggcaagcgatgcggagatgctcaagctggtcgacgaaatcaagaagcatcgctccgaggcgacccggcttctcagcgagatcaaggccacggcgtcggatgccggcaagcatatgctggacaaattctcggcggcctacgacaagatgaatgccggcgaggacgctatgctcagcctggcattgaagaactccaactatcggggcgcccaattgtggacctctgatggagcgccggttctgaagcagtggaacgacgttctcgatgcctctcttgccgaattgaatcgtttgacggcttcgcccgagaagagcaacgcgcttctagctatctatgccatcaggctggaaggagtgcgtctacaacggcaggtcgccctgtcgttctcggcgtcgagcatggaggagctcaatgccgcgatcaaggcgatcgcggacgagcaagaggcactcaaggtcgcactcaagcagggcgccgctcccatgtccgcggtcggcttgtcgtcgacgaacattgtcagctacacggatcgtctcttcaatgtcgtctcccgcgtggtcgagatcgtgaaagaaggcggcaacataaaggcgtcggcgatggccgcggtcgaaggaagagcaaatgcggccgaggcaatctccacatcgggcgagtatatcagcctggtgaagaagcagatggcggaaatgtcggcggcatccgcgcaggaggcaggtcaggccaagattcttctggtcagcgtcatcggattgtcactcctggttggtgcgacgtccgcgatcatgatggcccttagcatcagccgtggactgtcccgcgcggtcaaccttgccggagccgtcgcaaacggcgatctgagccagacaatctcggtcaagagcaatgacgaaatcggcgacctcgttcgttcgctgaatgcgatggttgagaagctccgacaagtcgtgtcggaggcactcactgctgctcagaacgtatctgccggcagtcaggagctgtccgccagcgccgagcagctgtcgcagggcgctacggagcaggcgtcctcggcagaagaagcctcgtcctccatggaggaaatggcctccaacgtgaagcagaatgccgataatgccaaccagaccgaaaagattgccgcacagtcggcgcgtgatgccgagtccagcggtagtgccgtcggccgtgccgttcacgcgatgcagaccatcgccgaaaagatcacgatcgtgcaggagatcgcgcggcagaccgacctgcttgcactgaacgcggccgtggaagcggcgcgagccggcgagcacggcaagggtttcgcggtggtcgcgtccgaggtacgcaagctcgccgagcggagccaggcggccgccgccgagatcggcacgttgtcgaccgagacggtgaaggtcgcgcaggaagcgggtgaaatgctgtccaagctggtgcccgacatcaagaagacggcggaactcgttcaggagatcaccgccgcgtgccgcgagcaggatgtcggctcggcccagatcaatcaggccatccagcaactcgacaaggtcggccagcagaatgccagtgcatccgagcaggtctcctcgacttcggaggaactggcctcgcaggccgagcagttgcaatcgacgatctccttcttccgtatcgatgacgccgcgcgcaattcgaaggctgctcctcaggaggtcgaccgggccgttggtcaacttcgcgccaaggctgcgaagatggcggccgctgatcgccgcggcagggcgcccgttgccaagccggcacgagcgttgaaggtcgccggtggcggtggtttcgctttcgatatggatgaggtcggcgacgatcgggacgccgagtttcagcgatag

SEQ ID NO: 1142 - DNA, 1920 bp, BradyrhizobiumColbertium
atgagattcaccgtcaaggcaaagctcgccagtgctttcggcctcgtcatcgtcctgtccatgattgccggtggcgtcgcctacatgaaattcggtgatatgatggcgacggccgacagcatggtccttcgcgccaagcgcatggaaaaggccacccagatcgagagggacattctgctccagcttcgggccgagaagaacgccatcctggcgaccggcgccgatgtagaacagtttgccgcagacgccgccaagcgtcgtgagcacgcgacgaagacgcgggacgaagtgcacgctctggcgagcgaagccggtagaaagctgctcgacaacttcgccgcaacctacgccaagatgaacgcgtaccaggacgagacgatccggctggcaaggacggataaggcgaaggcgacggagcgctcgatgaacgagggccgcaaggtcgtcgcggatgcgctggagtcgatgagcgcttacgtcgagaatacgaagacacagatgagcgatcaggccgtccacgcgcaagaggaggggcagaaggcacagttcatgctgatgacgctgatcggcgtgtcgctggtgatcgcgatcggggctgctttgtggatttcgatctcgatcagtcgtgcgcttggcggcgcagtgggtcttgccaacgcggtcgcgatgggcgacctcagccagaatgtcgaggtcaagagcaacgacgaggtcggcgatctcatcaagtcgctgaacgcaatgactgcgaacctcaacgcgacggcggcgatcgccaacgaggtcgcgcaaggcaatctggccgtcgaagccaagcgtctgtccgacaaggacactttgggacttgcgctcgaacgcatgatcgcgagcctgaatgccagtgcggaggtcgccaacgagatcgcgcgcggcaatctcacggtcgaagccaagcggatttctgacaaggacaagctcggcgtcgcgctggaaaccatggtgcagaggctccggcagatcgtgtccgaagccttgaccgcggctcagaacgtctcggccgggagccaggagctgtccgcaagtgccgaacagctctcgcagggagcaaccgagcaggcctcatccgccgaggaagcttcgtcctcgatggaggagatggcttcgaacgtgaagcagaacgcggacaatgccaatcagaccgagcggatcgccgcacaatcggccaaggacgcagaggcgagcggcgcggccgtcgggcgggccgttcaggcgatgcagaccatcgcggagaagatcaccatcgtgcaggaaattgcgcggcaaaccgacctgctcgccctcaacgcggcggtagaggccgctcgcgccggcgagcacggcaagggcttcgccgtggtggcctcggaggtgcgcaagctcgccgaacgcagccaggcggcagccgccgagatcggcactctctcgactgaaagcgtgaaggtcgcccaggaagcgggcggcatgttgtccaaactcgttcccgacatcaagaagacggctgaactggtccaggagatcacggccgcctgccgcgagcaggacgtcggcgcggctcagatcaaccaggcgatccagcagcttgacaaggtcggccagcagaatgccagcgcgtccgagcaggtatcttcaacgtcggaggaactggcgtcgcaggccgagcagctgcagtcgacgatctcgttcttccgaatcgaggaaggcgggaaggccaaggctgctccgcaggagatcgagcatgccgtcggtcggcttcgcgccaaggcggcgaagatggccgcagccgatggcggcgccaggaggccggctgtcaggccggctcgcgccctgaaggtcggcggtggcggctttgcctttgaaatggacgacgccgacgacgaccgcgacgcggagtttcaacgctaa

SEQ ID NO: 1143 - DNA, 489 bp, BradyrhizobiumColbertium
atggccgcaacctcgcaatacctgacgctcgggctcgccggcgagacgttcggcatcagcattcgcaatgtccgggagatcctcgacatgcggccgatctcgcgcctgccgcatgcgccgagcttcctgctcggcatgatcgacgtgcgcggcagcggctatccgatcgtcgacctcaggaccaagctcggcctgccgaacgtggccgcgaccgaggcgacgcgtatcatcatcctcgacgtgccgatgaaggaccgtctggtcggcgtcggctttgtcgccgactgcgtgttcgaggttaccgacatcgatgaacaggcgatcgagccgatcccggaagtcggcggaaaatggcagtccgactatgcggctggaatcggccgcaagggggagaagttcgtcgtgatcttcgacctcgccaagttgatggccaacgacgaggttccagaagtccgcgacaccgtcccggatgcgttctgcgccgcctga

SEQ ID NO: 1144 - DNA, 2169 bp, BradyrhizobiumColbertium
atgagattcaccgtcaaggccaaactcgcgagcgcgttcggcgcagtcatcattctctcgatgattacgggcggggtcgcctataagtctctctccactttgaccgagcagcaggagcgcatcgtcgaccaggcctaccgcacgaaattggccgccgacgtcatgagtgcaatccaggcgcaacagcgcgccgaaagccgcatgatccaggcggtctcggacaaggacactcaagacaattacaatgcgatgctgacccgtcgcgagaagatgctcaagctcaacggcgagctctacagcaaagcaagcgaggccggtcgccgcttgcttgatcaggccgccggtccgatcaagcgcatgaacgagttggaagatcaggctgccaagtttgcgctgctcaactccaatcaccgggctgcgcagctgtggaagtccgaaggacaggtcgcggtcaagaatctggacgcgatgttggatgcagcgctcgcggagctcggcggcaacggctccgagagccagcgtgctgctgcgttgctgacagcccgcgccgaggtcgcgaggctcgcgcgctcgatcgtcttgacctattcgacctcgacggcgcaggaagcagatgcggatgtgaaggagaccatgcagcggctggccgatctcaaggcatccgtggctcaagcgagtcaaccgggcgcgaccaatgccatcaatgcgcagctggatcgcctgacgaacgtcgtggagaatgttacgcgtcttgccctggaagccggcaacctgaaggcggcggccatcgccagcggtgaaggccgtaaggccttcaatgaggcgctggatgccatcgagcaatatgtccagagaaacgagaagcagatggccgaggtcgcggaggagggtgccagggacgcggccttcgcaaagatgctcttgatcagcatgatctgcgccgcactgttgatcgcaatcgctgcggcgacctggatcgcgctcaatatcagccgtgggttggcccgtgcagtcggtcttgccaatgcggtcgcggtcggcgatctcggccagaagatcagcgtttcgagcaacgacgaggtcggcgatctggtatcatctctcaacgcgatgaccgccaatctgaacgccactgcggcggtcgcgaacgagatcgcgcaaggcaacctcacggtcgaagccaagccgctgtcggagaaggacacgctgggcctcgcgctggaacgcatgatcgagaagctgcgccagatcgtgtccgaagctctcaccgcggcgcagaacgtctcggccggcagccaggaactgtccgccagcgccgagcagctgtcgcaaggcgcgaccgagcaggcctcgtccgccgaggaggcatcctcctcgatggaggagatggctgcgaacgtgaagcagaacgccgacaatgccagccagaccgagaagatcgcggcgcagtccgccaaggatgcggaggcttccggtgccgcggtcggccgcgccgtcagcgcgatgcagaccatcgccgagaagatcacgatcgtccaggagatcgcgcgccagaccgatctgctcgcgctcaacgcggccgtggaagccgcgcgcgcaggcgagcacggcaagggctttgcggtggtcgcctcggaggtgcgcaagctcgccgaacgtagccaggcggctgcggccgagatcggcactctctcgaccgacaccgtcaaggtggcgcaggaggccggcgccatgctctccaagctggttccggacatcaagaagacggctgagctcgtcgaagagattacagcagcctgccgcgagcaggacgtgggctcggcccagatcaaccaggccatccagcagctcgacaaggtcggtcagcaaaacgccagcgcatccgagcaggtgtcctcgacctccgaggaacttgcctcgcaagcggagcaactgcagtcgaccatcgcctatttccgaatcgaccatggctcgattaagcaggcatcggagccgatcgaccgcgcggtcaatcagctgcgggccaaggctgccaccatggcggctgtcgagcgtcccgcgaggaagccgcaggccaagccggcgcgcgccgtcaaagctgccggcggcggtttcgccttcgacctgaatgagggcgaggacgatcgagacgccgatttccagcgctag

SEQ ID NO: 1145 - DNA, 855 bp, BradyrhizobiumColbertium
atgatgcccgccatccaagataccgccgtgcatctgtccgaccgccacttccggaccatcgccgaactcatcgaggggcaggtcggcatcaagctgccgcagggcaagcggctgatgctggaggggcggctgcacaagcgcgtgcgcgcattgaacttctccgacctcaatgaatacgtcgagagcctgttcgagggcgatcatttcgacaccgagcttacgcatctcatcgatgtagtaacgaccaacaagaccgacttcttccgcgagccccagcatttcaccttcttgcgggatgtcgcggtccctgccttgctcaagtcgcatggacggaagaacgcgaatctgaaggtctggagctcggcgagctctaccggaatggaagcctacacggccgcgatggtgttggacgacatgacgcggaacggctcgcgctttcagtatcgcatcctcgggacggacatctcgacggcggtgctgcgcctcgccaagaccgcgatctatacccgtgacgtgctcgctccggtgccggagcctttcgtgaagcgctatttcctgtcgtcgcggaacaaggccagcggtgaggtgcgggtggtgccggaattgcggcgcatgacgcatttcatgaggatgaacctcatggacaagtcctatcccgtcgatcgcgacgtcgatatcatcttctgccgcaacgtcctgatctatttcgagcgcgagactcagcgcaaggtcgtcgagcaattgtgcagccatttgcgtccgggcggttatctgctggtcgggcattcggaatcgatgattcacagcgcggtgccgggtctgaagcaggtccagcccaccatcttccaggtttga

SEQ ID NO: 1146 - DNA, 1092 bp, BradyrhizobiumColbertium
atgccgaaggagaaagttcgcgtactgatcgtggacgattcggcgtcggttcgccaaatcctgctgacgatcctgagtgaggatcccgagatcgaagtgatggccacggcatccgatccgttcgttgccgccaagcggctcgagaaggagctgcccgacgtcatcattctcgacctcgagatgccgcgcatggacggcatgaccttcctgcgcaagatcatggcgcagcggccgattccggtgatcatctgctcctcgctcacggaggagggatcgagcgtcatgttcgaggcgttcgaagcgggtgcggtcgacatcgttccgaagccgaagatcgacacgcggcaggcactgctcgaatgctccacacggctgcgagaggccgtgaagtcggcagcccgagcccgggtgcgtccgcgtgccgcgcgccgggagatcgagaagaaactgacggccgatgccatcatccctccgccggtgcagggcaaggtccgtccgacgacggaacgcatcgtgtgcatcggcgcctcgaccggcggaaccgaagcgctcaatgacgtccttgaaatgctgccggcccactgtccgccgatcgtgatcgtccagcacatgccggcaggcttcaccgcggcctttgccaggcgtctggacagtgtctgccagatcagggtcaaggaggccgaggacggcgagccggttctgccgggctgcgcctatatcgcgcccggtgcccggcacatgctgctccagcgcatcggcgtgcgctatcagatcgcgatcaaggacggcccgccggtatcgcggcatcggccgtcggtcgacgtgctgttccgctcggcggcccagcatgcaggcgccaacgcgctcggcgtgatcatgaccggcatgggcgatgacggggcgcggggaatgctggagatgcgcaagctcggcgcctcgacccgggcgcaggatgaagagagctccgtggtgttcggcatgcccaaggaagccatcgcccatggcggcgtcgagaaggtcgtctcgctgcaccagatcccgcgcgaaatcatgctctggtatcaggccgggcaccccgcggtggcaggttga

SEQ ID NO: 1147 - DNA, 1728 bp, BradyrhizobiumColbertium
atgtccgtgattccggccagcacgctcaccgaggcgatcgccgcgatcgagaacgtctcctcgcgcatcgaggacgtgttcgcgcgcgtcggtcacgagcttggacgcgggcatctcatcttcaaggagctgaaccagggcctcgcggcgctttcctccgagctctcgggtgcggagatcgaaggagctgcgaccgcattgcaggagatcgccgcgcggctcagcgagctcgcccaggcgctgccggccgagaccgccctgctggagacgatcggcaagagcacggcggaggcgtccgctttgctcaagccgctgttcaagcacatccagatgatcaccatcatcgcccgcagcgcgcgaatcgaggccgctgcgctcgacggcgaccgcgagggctttctcgccttcacgcaggaggcctacgatctcggcaaggccgtgcagggcgcgatcgagggctgcgcgcgggatcagcagcgcctgtctgaagcggtcgccaccgcatgcggccggcagcgggacttcgagagccgctaccggaatcaactggcggcggagagcgtcgagctcggctccgcctattccgggttgcgcgatcagcgcagcaacagcggccatctggccgatctcgccagctccagcaccaggaagatcgccgaggcggtgggcagcgcgatcatctccctgcaggccggcgacagcacacgccagcgtctcgagcatgtctcgcacggtcttggcctcgcctccggacgggctccgagcctcgttcccggactgatggcgggcgaggacggcgcgcgcgcgatttgtcagttgcaggcggcccagctcagggatgctcaacgcgagttcagcggcgacatcggccagatcgttcgcgcgctgaccgccatcctgcacgatgcgggcagcgtggtcggccatggccgcacgctgatcggcggcgaggacggccgttcgtcgtcgttcctggcgcgcatcaagcagacgctggcgcacgcctcgaacctgatcacgacctgcgagggcgccggccgctcggtcgacgaggcgctcgcgatcgtcgaggatacgctgatgaagtttcgtcaggcgatcgcagggctcgccgaggcgaccgtcgacatcacgctgatcggaatgaatgcgggcctgaaggcaagtcatctcggcagccgcggcagcgccttcgtggttattgcgaacgagctcaaggccaccgccgaccaggtctcggcgggggcggggcgcctgaggcccgtgctcgacgccatcgagcgatcggccggggaattgaagatcctccgcgtgcagggcgatcccacgcagctcgccaagctcgaaccgcagatcctccaggcgctgcgcgaggtcgaggccggcaacgagcggctcggcaagctgatgggccggctcgtcaatgaaggggcggaattcgagggactcatcacgtcggcgcaaaatctgatgacgacgctcggcgaaggctccgcggcgttgccggcggccgcggcgcggctcgagaccgcgagcgcgggcgcgcagaagccgcagccgcaagcgcaagacgaagcgatgctcgacgagctgtttgcgcgctacacgatggagcgcgagcgggacgtccaccggcagtttctgcaaacgctcgggctgacgtcggtcgccaccacgcgccgtgtcgaagtcgcggaaactgctgacgacggcatagaactgttctga

SEQ ID NO: 1148 - DNA, 453 bp, BradyrhizobiumColbertium
atgctgaaagagggcaaatacgcggcgtggttcaggaccgcgcaagcgcagggcaccggtatcgtgaacctggccgagggccgcatctccggcagtgacagcttcttcacctatgacggctcctatcaattcgatgatgaccggcgcttcacggctgttctgaccacgcggcggcatgccgagggaccgccgacggtgttcgggctcgacgaggtcgaggtcgagctctccggcgtgtataccggcgcgatggcgacctgttcgggcacggcccgccaagcgcccggcgtgaatttcgaggcgacgctgatctacagccaggaagacgctccggccgctatcgacgcccgaagcgcggtggtgaagctcaaggccgacaagctgcccaagaggctcgacggccgttcgcgcgggcggcatgcgtttgtggctccaaagacgccggtatcatga

SEQ ID NO: 1149 - DNA, 156 bp, BradyrhizobiumColbertium
gtgatatctgttgctatcgggcttgagcttgcacagttactgatccctgatggcgttcatgcgttcacggacgtgctgcagaagacggccggcggaatcatgggtgtcctggtcgctcagacaatcctgtcgttcctgcccaggccgccggcctga

SEQ ID NO: 1150 - DNA, 180 bp, BradyrhizobiumColbertium
atggcgcgcaagccctggtcattcaaagaggaccgccggctcatggaactggccaagtcttcaaccacactggagaatgctgcaaagcagcttgggcggtcgccggacgcgatcaagcgcatggcgctgcgactcggtctttcgctcaagtcgagagaagctggcacaaagaagggctag

SEQ ID NO: 1151 - DNA, 189 bp, BradyrhizobiumColbertium
ttgacgatcgaggagacacgagaattcgaaggcctggatcgggctcatgccgacctcagcgcatgcttcgtggaagaagctgccattgcttccttcggtctggttggacagagatggtcggcgctctacgataagcatgagagcgcctggcagaactggatagccaacgggcctgtttgcgcccgttaa

SEQ ID NO: 1152 - DNA, 174 bp, BradyrhizobiumColbertium
gtgttgatctgtttcgacatcccggtcggccgagcggacacgaaattcggacactccaacacgccgaaggaaattctggccgcgggctctcaggaacaactggaacatggtcgtcatttctttagaggtcagcgtccggagaacatcgctcttctgtggttaacgaagatttaa

SEQ ID NO: 1153 - DNA, 306 bp, BradyrhizobiumColbertium
atggctgccatcgaggatgcccttcaagccgctgaacgcgagcgagcagggctaggccgcagagtcgatgacgttctcgcacgggccgccgtcacgcttgggaatggggacgacgagtatttgcatcgcgaaccgctggatagccatcatcaggatctgttcgacgcggaaatcgtcaacggccagaagcggctaagggagttgggggcggcgattgctcacttcaggttcataaaggccgcgatgcagagccgcttcccggactatcggtctcggccgtgcggcggtgacatcaatagtcagtaa

SEQ ID NO: 1154 - DNA, 117 bp, BradyrhizobiumColbertium
gtggcgcgctcgcgaggctcggcacccagggcggagttgtcgtacagattccgagtcagcttcggcaatcgtgatgatcgggcaagcctctgggcgctcgaccgccggctcgcctag

SEQ ID NO: 1155 - DNA, 1221 bp, BradyrhizobiumColbertium
gtggtcaccgagacaagaaaatcatcgatcccgatcagcattcatttcgcggcgctgatcttggtccctgtgatgacaaccggctgtgcgggcttcattccgatggacgcccctaactctgctgccgttcacgagaatgctgcgatcgtgacggaaccatccgcgccacttccctacattttgatgccgatcaacccagccattctcaatgcctcaaacgcgatcaccaacgcgaccggcatgtccttcgcttcaataccgggaggacactatcgtgaagcacctgtcagcgttggcgatattctgactgtcaccgtgtttgaggcacaagcgggcggccttttcattccgggcgaagccggcgtcagggctggcaattttgtcgacataccgcggcaacaggtcgatcaatctggcagcatcaacattccctatgctggctcaatcaaggttgcaggtcagaccccccgcgccgtgggcaacatcatccgcgagcggctcaaggagcgcgcgatcgatccgcaagtcgtggtcgccgttgccgagcaacgcggcaatcaagtcagcgtcttgggagaggtcaactcaccttctcgcttcccaatcgatccgggagggctacatctgcttgcagccatcgcaagggctggcggccccaagttcccggactatgaggtcactgtaactctaaagcgcaggaaccggacatacacgcaatacgtctcgagcgttgtccagcggccttcggaagatgtattgctgtctccgggcgacgtcgtcttcctgacaagggtaccgcgagtgtttatggcgtttggttccaccccgactccaggttcgatcggtggcaccaacaaccgtcgtttcacgtttgagaatgccgagatgtcgctcgcggaggccttggccaaggctggcggtctagacggtagtcgcgccaattcaagatcggtctttctttaccggtttgagcctaagcggctgttggagagcgttggcctcgatgtggctggatttccgaccgtacaggtccccgcagtctacaagttcgatatgagcaagccggacggctggttccaagcagattcatttagaatgcgggaccatgacgtcatctctgttgccgagtccccgtcgactgagttcatcaagctcatgaatccgttggatgcagcgacgaccaacgcggccaatataaacgccatcgtgacctcgaggtaa

SEQ ID NO: 1156 - DNA, 1440 bp, BradyrhizobiumColbertium
atgcttgttgcaggcgtcatcattgccgtatccagcttcgacgatctcgtggtcgatatcctgtactggaccggcagattgttcggcacggcaagaaccagagacctgccggacgtcgaaattctggagcagctgccggagcggccaattgcgatcatgattccgtgctggaaggagcacgacgtgatcttctcgatgttgtcttcaaactctcggctccttcgctatcggcaggcccactatttcgtcggcgtctatctcaacgatccccagacccaggacgaaatacgaaaagcgcaaggcttgtatccgaacatacatatggtcttggtgcctcgtgacggaccgaccagtaaggctgactgcctgaaccagatcgtctcggacattttcacgttcgaagcggagcaatcgattcgctttgcgggcgtcgtcatgcacgattccgaggatcttattcatccgctcgaactgaagctcttcaaccaactcgtcgaactctacgacttcgttcagctgccggtctattcattctcgcgtcccattctgtctctgatcggcggaatctacatggatgagttcgcggagatgcacacaaaggatctcgaggtccgccaacgcatctccggcgtcattccttgcgctggggtctccgcctgcttcagccgtgaagcgatgcttcatctcgttgaccagaaccatggcgaagcgttccgcgttgcatccttcaccgaagactacgacatcgcctttcgcgtgtccgagcttggcttcaagtccgccttcattgcctatcccgcgaagtacgccatcgacattgacatcgacacaggcaatccgggtgtcctccaccggactcttccgatcgcgacacgcgagttctttccttccggactggaggccgcctatcggcagcgtgcacgatggctgcttggaattgtctttcagggaactgaagagatcggatggaaggggaagctcggtacgaagtactttctcgcccgcgaccgaaaaggcgtcattaccagtccagccatcatgctcgcttatttttcaatggcaaatctcgttttgtttgaggtgttccgctcctatctcgatcccaccatgacactgtcttacaccctgttgtcttctgattggacaagaacactgttctggtggactttcggatttctcgtctggcgcctgctaaatcgaatgatctttacaggcatgatctacaacatgcgccacgcattcatgtcggcgccgcggctcattgtcggaaacttcgtgaattttttcgctacttggcgagccgttcgtatctatgtgggccaccgcatttccgggaagccactcgtgtgggataagacgtcgcactcttatcccgttcagattggcgagttggagcttcctagtgagagtgctcaagtgtccggcgcgagtgtatcctag

SEQ ID NO: 1157 - DNA, 1233 bp, BradyrhizobiumColbertium
ttgcgcggcacgccgaccgcactggcgcgtcgatttagggcttcggacatgcatcaccctcatcgcgacgagttctcgcgttctattcctattcgagcttttctcatcgtcatcgggacccgtccggaagtcatcaagctcgctccgctcgtccggcgcctccgtggtaccggctgggcgagcgtcaagatcgtgacgagtggtcaacagagcgatcttcttgatcagacactggtcgaactcggccttgcagcggacatcgccatccggcatcgcggggcgcctcatggccccgcgcagaccgcaagccgtcttctcggcaggctggaccgcattctcgaaaatgaacggccggattgcgtcatcgcgcagggcgacacgaccacggcatacgcggcctcggttgccgcattttaccggaagatcccattcgttcacatcgaagccggcctgcgaacgccagaactcgatgcacccttccccgaagaatttcatcgtcgggccatcgccgtttcaaccgctctccattttgccccgacgacagccgcggctcaaaacctgatccgcgaaaacgtgccgaaggacaaagtctttgtgtctggcaatacggtcattgactcgttgctggaaattgccgccacaaagctcccccctccgccggaatttcaggcgcggcgcactattctgttgactgcacaccgcagggagaatttcggcgcgaggttgcgtgacgctctcaccgcggtgagagcttttgtcgatctcacgccggacgttggcgtctacttccccgtccaccccaatccgaacgctcgcgaggcggccgaggtcctcaccgggcatccgagaattcatctcgtggagcccctgaactatcgcgccatggtcgcagcgattcagaatgcctggtgcgtggtgacggacagcgggggattgcaggaagaggctccggcgctggccaaaccggtccttgtcctccgggatgtaaccgagcgcccggaggcagtcgcgtccggcgttgtgaagcttgtgggaacctcccgtgaggccgtcttcaagtcgctttacgagcttcacaaaacgccggcagaatacgcgaggatggcgcgccctgtttttccttacggcgacgggcacgccagccgccgaatcgtggatgtcctctaccgccattttgtgaccgaccgagactcgaacccagcaatgatcgctccacttcagcatgcatcctga

SEQ ID NO: 1158 - DNA, 1026 bp, BradyrhizobiumColbertium
gtggtctatcgggaagccccgaaatcgttcctcgtcagctttctcttcactgcgaggcgattactcgggatcgcgacatttgctcttgtgcttgccctgcttgccccgaagctttttctctttttcgataacccgaagggcgccagcttctcttctgcgctgctggagacgcgtgatgttattctccacaagtcggcaccgctccttcatcgctacatacccacgaatatagccggggctgatcgttctgattggattctgattgccctcgcagtactcaccactttcctggttggatcgctagcccagagctgccagcaatctctcaaccgtcgcgtgctcagagcctccgcgcaggagtggcgcaagaacgagggagtcaaacccggctcggccctcgacaaggagctggaaagtacactgagggtggctgagagcggcaacgcggtgaatcgacaggacctcctgcgtgtgttcgctgaaaccaagaaaaagctcgattcgttcggacgagaagttgcatttctggcggttgacgtcgttggatcggctcagatgaagaacggcgaggatccagcctcagtgcagtatgactttgccgagtaccgaaaacttgtagagcgcatctttcgggcgcgcggcgtcttgaagacggcctggacacccgacggtgtcatggcctgcttcgctcatgtcgaagatgcctgccaggctggcaaagatgtgatcaagagcctcaagacgttcaaccgcgacgttaagatttcaaaggccgacttctcggtgcgctgcggcgtcaatgctggcctcgtctattttgacgatgcgacccccctggagaccatttccgatcgggttatcgatgttgctggccatatgcaaaagcacgccgagcccaacaccgtcctcattgcgagaaaagtcatcgaaccgctgcgccagctcgaagaattcacgcatacgagccagattatagacggctatgaggccagtgtatggcgcgatcccgaaacctcttcgcgctga

SEQ ID NO: 1159 - DNA, 1464 bp, BradyrhizobiumColbertium
atgtcgattgggtcggatatccgcgagaaagcgcgtcaagtcggccagacgcaaggcgaacggggaacattttggtcgtccgacctcattccctatgtgctctctacttccgatgctctcgtcatcattttggctagcataggtggcggactggtctatcatctggtcgcgggcagtcccgtaccgaacttgttgccgtgttgcgcggtaggcctaatggctgcctttatacacatcctgcgcatgagcgggatgggttattacgacctgccggacagcgctaagccaggggtcgagatcaccgggattcttgtctgttggtttagcaccggggtcctgctggcattctttgcatttcttcttaagatcggcggtgattatttgcgcggcgcggttttcgctttttacctcgtgacccccatcggtctccttgctgtccgcaaggccactaagacccatttggcatccgctgtcgaccgaggcggaattagacgcagagatgcggtccttgtcggggatcgcaacgaactcgtcgctctcgctccgcgggatcgcctcgcgctatttggggcaacggacgtcaaggaatttcggctgagcagtgagattgattccgagcaccgatgggctgccgacgaggccgtgttcgaccagctgggggcattcgttcggcggaataactgccgggaggtgctcctcgtgctgccgtggaacgacgatgcacgcatagagttcgcccgcgacaaggtcaagaacttacccgtttcgtcgcggctgctgcccgatcggcatgtccgatccctgtccaatttcgtgtcgtcggcgcggcaacgggtgcttgctatcgaaattcagcgcgctccgctgagcgcgattgagcgggtggtcaagcgtgccatggacatcttggtggctggaccggccttatttgcactgctcccgatctttgttctcacggctgtggcaatcaagctggatagcagcggtcccgttattttccgccagcgccggaaaggcttcaacggcaaagaattcgtgatgctgaaattccgcaccatgagagtgcaggaagacggaccagtcgtggttcaagcgacgcgggaggatccgcgcgtcacttcgattgggcgattccttcgcgccacgagcattgacgaattgcctcaactgctcaatgttctgcgcggcgagatgtcgttgatcgggccacggccccacgcccttgctcatgacagctatttcgaaaaaatccttgaagactacgccttccgtcatcatgtaaagccgggtctcaccggatgggcgcagtgcaacggttcgcgcggcgctacaccaacggtggaacatatcgccgaacgtgtgaaattggatctttggtacgtcaacaattggagcctctggcttgacgtccagattttgattaagacgattttcgaggtcgctcgaaaacggaatgcctattag

SEQ ID NO: 1160 - DNA, 861 bp, BradyrhizobiumColbertium
atgaacgtggacattgacgcactgcgcaagcacatcgggacgaaaatcgtcgagcacgatgtcgccacccaggcgccgctgcgcggacttgcggtgaccttcgatcggcaggaccagattccagggcccggggatccgatccagccggggtggcatctggtgtatttcatgccgctgtcgcccaaggctactctcggtgacgatgggttgccgatctctggcggcgttctgccgccgatgccgtttccacggcggatgtatgcgggaaccgaactgaccttccacgatccgatccgcctcggcgatgcgctcaagcgcgagacggagttcaccgatgtctcgctacggtcgggcggtaccggagcgttgatattcgcgacgcagacccgtcgcattttcacgcctcgcggcctttcgattgtagaacaaaatcacacagtgttccgcgaagaagtgaagcctggagagaagagcgtcacaccgaaaaggaacaagccgccagccgatacaccgtggcgccgaacgattacgacggacccggtttccttgttccgctattccgcgctgactttcaacccgcaccgcattcattacgaccgggactatgcgatgcgcgtcgaaggttatcccggccttgtcgtgcatggaccctactcgcagcagtgcctgatcgaccttgcgcgcgatcacgctccggaaaaaacgctaaaatcgttttcgcagcgcgcccgtgcaccactgttcgacacggcgcctttcagcgtcgttggccgcgccgttgacggcgaaaaaggagcggagctgtgggccctcacaccggagggaaccatcgccatggaagtcacaatacgatacgcgtga

SEQ ID NO: 1161 - DNA, 426 bp, BradyrhizobiumColbertium
atgatcgcaatgactgcggagacctacctcaagcccgttcctgagccgacccatgagtcgaagccctattgggatggcctccaaaatggacggctgctccttcagaaatgcgggcaatgcggaaaaatccgtcactatccaaggccggtttgtgacgtctgttattcgtttgaagtgaaatggatcgaggcctcgggccggggaacggtccacagctggaccatcacccatcacgccttcaatcccgggttcaagctcgatttaccttacattctggccactatcgacctcgaggagggcgtacggatgcaagtccctcttcgcggcgccagggagacggacgtcaaacttgggctgccggttcgtgtcattttcgaacaggccaagcccgatctggtgactcccgcctgtgtaaccgcgtcgtga

SEQ ID NO: 1162 - DNA, 1152 bp, BradyrhizobiumColbertium
atgtcactgaaagaaaaggccgccatcactggcgtgggagagaccgagtacacgcgcatgtcgggcaagagcatacttgcgcttcagctcgaggcttcgttgaatgcgattgcggatgcggggctcagtcccaaggaaatcgacggcattattccatactcgaattcgccggtcgtagccgaagactttgtcacgaatttcggtatatccgacctgcgcttttcggccactgcgccgctcggcggagccagctgcgtcgcggccatacaatgtgcgctgctcgcgatcagcggcggcgtgtgcagcaacgtgctgatcccgatcggtcgtaacggctcgtctgcgggtcgcatcggcacgcgcgttcagcaaatgccccagttcaaggtcgttggtgagcatgagatgccggtcggcgcgatcgccccggcacagctatatgcgccgatggcccgtcgccatatggaactgttcggcacgacgagctcgcagcttggcgaaatcgccgtgtctacccgtcacaacgcaattctcaatggccatgggatgatgacgaagccgctgacccttgaggatcaccagacgtcacgcatgatctccgatcctttgagactttatgattgcagcctggaaagcgacggcggcgcggcgatcgtggtcagtggcgcggaccgggcaaatgatcttcgcaaaccaccggtctacgtcatgggggtcgccgaaggccatccggattcaccgagcgtcatcacgcaacgcccggatatgacgcgcctcgggatcgcgaaggctgcgccgaaggcgtttgccatggccggtgtttcgcctggagatattgacgttgccgagatttacgactgcttcacctacatcgtgctgtgtcaacttgaagacctcggcttttgcaagaaaggcgagggcggtccgtttgttgcgagcggagcgattcggcttggaggaaaattgccgatcaacacccacggcggactgctttctcaggcgcatatggtcggcatgaaccacattgttgaacttgtgcgtcaactcagaggcgaggccggcaaggcacaagttaggggagccgagatcggccttgtgactggatacggcgatatgggcgacggatccgtcgcgatcatgcgcaaaggatga

SEQ ID NO: 1163 - DNA, 1218 bp, BradyrhizobiumColbertium
atggacctccgctacagcgcccgacatcgcgccctccaggaggaagcgcgcggcttcgtaaagaaatacggccacctttcgccgaaaacggggggcggacggaagcggcctgacgcgcgagccctggattggcagaagcttctgctggagcgcggttattttgcccgcaacattccccgcgaatatggcggcttcggcctgccggtcgacatcctggaattggcgatcatcgccgaagaattctcgaacgcgggcgtgtctccgggcatcatgaaccagggcatttccatgctggtgccgacattgctcgaggtcggaacgaaggagcagtgcattcaatggatcgggcctaccatccgcggtgacatcatttggtgccagggctattcggagcccggttcgggctccgaccttgccgccgccaaaaccagcgcccgtgtcgaggatagccaattcatcgtcaatggccagaaaatctggacgagttctgcccactacgccgacatgatgttcctcctctgccgtactgagctcgacaagagcaagcacgatgggctgtcctaccttcttgtccccatgaatgcgcctggcattgaggtgcgcccattggtcacgatgaccggccgcgccgagttcaacgagacgttcttcacggatgtccgcgtgccaaccgaccagattgtgatgggacgcggcgacggctggcatgtcgccaatgtcaccttgaagtacgaacggatgctgctcggcgacgccaacaagctgacctaccgtctggcgagggctgtcgaattgatgaaaaaaacgacgctcgatggctgccgattcatcgacatccccgagtatcgcgagcgattgctcaaactccagggcgaggtgatggcctcgaaataccacggtcttcgattaatgaccgagcaggcgaagggagaggattcgggggtcaaacgcctgatcgtcaaactgaacgggacgatgattgcgtatcggctgtcatcgctggtcgttgacgtgctcggcgcggcggggctcgcttacgaaccggtcggcgaagcggcggaagacgacgaagccaccacctggcagatagataacatgtacgacatcggcctcatcatcggtggcggctcatcgaatatccagaaaaacatcatcggcgagcgcggactgggtctgccgcgcgagccgaaatccgccccgccaaccgtcagaggataa

SEQ ID NO: 1164 - DNA, 1095 bp, BradyrhizobiumColbertium
atggagttcggcctcagcgaagagcaattgatgctagcggattccttgcgcggatttctggaccaaagactgcccatgagcaagttgcgcaagatcgcggagggcggcttgggcttcgatggtgaactatggtcgggcctcacggaacagggcatcatgggcatcatggtccccgaggactttgggggtctgggcctctcgctgcttgatgcggctgttgccgcggaggcgcttggatatcacgcgacaccgacgccattcgcggctgcgctggtcatggcccccctcgccctgattgccagtggcgaccgcgcccagcagaaagcatggctgccgcggatcgcaagcggcgaagtccggatcggggtcgggttcgccggcatgtcggggcagaccggcgaggcggctgtccgcctcgccggaaatatgctgtccggatgcgtaacgggtgtgctcgatggcggaaacgcgacgcatttcattgtctaccttgatgacggccgtgccggcctgttcgccgcggtcggggaacccggtgtcagcgtaagcacgcatcgcagtcttgatcgcacacgaccgttgacggctttggtactgcatgatgcgggggttgagatccttggcgccgccaacgatccgaaggcagcggcgaccgccgtgctcgacgctggccgcgtcatgctcgcggccgacacgctaggggcggcgcagtccatgtttgacaaggcgctgctctattccaaggagcgggtgcaattcgaccgcgtgatcggctcgtttcaagccgtcaagcatacgctcgccgacatcatcaccatgctcgagccgtgccgctcgctggtgtggtacgcggctcacgctcaggatgggtctcctgaggaagctcgcgttgccgcgctgcaggcaaaggcgcatctaggtgatgccggccgcgaaatctcccgtctggcgaccgagattcacggcggcatcggatttacggacctgctcggccttcattactggttcaagcgcattgcgttcaaccggcagcttctcggggctcccgagcgctgcagacaccaggccgccgtagcgcaagagtgggtgagttga

SEQ ID NO: 1165 - DNA, 957 bp, BradyrhizobiumColbertium
atggacgatacgaattttgccggtccacctgtcggaggccgacgcctgaccgttgtcttcagccaactccaacacgcgatcgctgccgaagattacgggagttttcggcaagctgcccatgcattgtcgatcaagcaatcgacactcagtcgttctgtccagctccttgagcactcgattggcgttgtcatctttgagcggtcaagcggtggcgttcgagcaacgccggcaggtcgtcactttctgcgcatgacgcgctcgatacttgaacaagtcgaggcgctgactgcatcaacaagagcgcacgggtctggcgaagcgggtcgtctcgtcatcgggttctgtacttcgctgacggcaggcaatctgcgcgcaacattactcgacttcaagaagctttttccgcacgttgagcttgtaaccgtcgagaggtcgagaacgcggctcacaaccgcgctccgcaacagtgtcattgacgtgagcatcctaacgggcgacccgcaagccctcgatagcaaaacaacgccactctggagtgaacgaattctggccgttctgccgagtgagcatcctttggctgcgcgcgaagtcatctactggacggatctacggaatcagactgttttgctcagccactacgatccagggcgcgagcttgaggatctcttgaacgcaaagctaatctctcccgatgaccgaccgcggatcgaacgtcatgacgtcagccgcggggtcatcaagagcttgatcgccgtggggttcggcatcagtctcgtgctggagtccgatatcggggccaatttttccggtctagtttatcgggagttgcgcgacggaacggggtcgagccgcatcggcttttcagcggtttggcgagcggacaacgaaaaccctgctctccaaaacctcctgaaattgcttggcgagcgctatcccctcggtccggtggctccgtaa

SEQ ID NO: 1166 - DNA, 243 bp, BradyrhizobiumColbertium
atggcgaaactcaagctcggtgccatcgcggacgataaacccgtgaagttgacgatcgaacttccggcagccgtacatcgcgatctgcttgcttacgctgaaatcctcgcgcgcgagagcggccagtctgcgtatgatccggtaaagctgatcgcaccaatgttggcgcgattcatggcgacggatcgcgcttttgcaagatcacgaaagacgccttacggagccaccggaccgaggggatag

SEQ ID NO: 1167 - DNA, 1191 bp, BradyrhizobiumColbertium
atgagcaacaccgaacaggaggccacaaaccggacgggtgctccgccggcgctcgagacagaaacgagttcttttcggttgcggccggagcgcccgcacgtcacgcggctctcgcgcaaagcactgatcgggggcacggcgctggtgctgatcctcttgaccgctgccgttttcctggcgctgcaaacacgcgagaagcgggctcccgccccggacgaactctactcaaccgatcaccacaatgtggcggacaagcttgcgagcttgccaaaggactacggttcaattcccccggacgtgccacgactagggccgcctttgccaggtgatctaggccgtccaattgtcgcggcacaggcccaaaacggcccgctagcggttgacgccgagcaacaacgagcaagccaggaaagtgaagctgcacgaaccagcaaagtttttgccaatacggtgacccgaccatcgcctggccaagcggcgccagccgagacctcgccaacgggagccacttcaactgacgacgcatttgcccagaacggtcaagaccgtaaactcgcgttcgtcaatgctttgatcgatcgacgcaccactagtcctgaccgtttggccaagccggcttcgccattcgtaattcaggccgggaccatcattccggcggcactcatcactgggatccgctccgatttgccgggccagatcatcgcgcaggtaaccgaaaatatttttgacacgccgaccggtcgggctcgtcttgtcccgcagggagcgcgcttgatcggtctctatgatagccgagtatcgtttggacagtcgcgcgtccttctggtctggacgaggctgatcatgccgaatggtcgctctatcgtactcgaaagacagacgggggcagacaccgcggggtattccggccttgaggatgaggtcgacaaccattggaaggagttgctcggagcagcggccttatcgacattactcggtgtgggttcagagcttggatctggcgccgacgctggatccagcacggccgttcttcaggcgctccggcatggggccgccaattctctcaatcagaccggacagcaagtggtccgacggaacctcaacattcaaccgacgctcacaatccggccaggtttccctgtgcgtgtcatcgtcaaccgtgacttgatgcttgagccatacaaaggatag

SEQ ID NO: 1168 - DNA, 372 bp, BradyrhizobiumColbertium
atgccatcgttctcctggttctatcctgaagaccgagccgcgcgcggtcgtgcgcttccgccaaaacccttcattccggatcctgcccaacggcgctatcgatacaccttcgagggcgacaatcctccctggcgccccgtcagcgcctttgacgatggccgcaaggtctacatcgagttctcgccgggcatcgggcagggcgaaatgcctccgctgttcgtcattaactccgacggcaagccgggtctcgtcaactaccgggcattcggcaacgtcctgattgtcgaccggttgttcgcggccgccgaactgcggctggggggcgaggaacagcaaaaggtccgcatcatcagaaccgatgggagatcttga

SEQ ID NO: 1169 - DNA, 678 bp, BradyrhizobiumColbertium
atgttcaaacgatcggccgttcattatggccgcacacctcagccggttacgccttaccaaaaagccgcgcaggtttgggatgaccggatcggctcggcgcgtgtccaggccaggaattggcgcttgatggcctttggttgtctgttcctctctgccggcttcgccgctgctctcgtctggcagtcagcacaggggtccattacgccttgggtcgttgaagtcgatcgcctcggcgaagcaaaggcggtcgcgccagcaaattcgacctacaaggcaaccgacccgcaaattggcttccatctcgcccgcttcatcgaacatgtccgcggcctcccgatggacgccatcgtgctacgcgaggattggcttcgggcgtatgatttcacgaccgatcgcggtgccgccgcgctgaacgactacgcccgcaacaacgatcccttcacaaaagtcgggaagatccaggtcgccgtcgaagtatccagtgtcatcagagcttcgcccgacagcttccgtatcgcctggatcgaacgccgctacgagaatggtcagcttgccgcgaccgagcggtggagcgccatcgtcagcgttgtcgtggaaccgccgcgcgacatcgatcggctgcgcaagaaccctctcggcatctacgtcaacgccatcaactggtccaaggagttttga

SEQ ID NO: 1170 - DNA, 1230 bp, BradyrhizobiumColbertium
atgggtggtacaggcatcatcgaccagtttctggaaacattcacccgctatatcgactctggcttcggcctggtgggaaatgaggtcggacatctcgcgtccacgcttgttgccatcgacatcacgctggcgggattgttctgggtctggagctccgatgaggacatgatcgctcggctggtcaagaagaccttgtttgtcggcgtcttcgctttcctcatcgggaactggaatggcctggcccgcatcgtcttcgagagctttgccagtctggggttgagggcctctggcacgggcttgtcgtccgcagatttcttgaggccaggacggatcgcccaggtcggcctggatgccggacggccgatccttgaatcgatttcggggctgatgggctacgtcagcttcttcgagaattttgtacagatcgtggtgctgctgtttgcctggatcgtcgtgctgctgacgttcttcatcctcgccatccagctctttatcaccttgatcgagttcaagctgacgaccctggccggtttcgtgctgattccgttcggcctgtttgggaagaccgccttcgcagccgagcgcgtactcggaaacgtcatctcgtccggcgtcaaggtattggtgcttgccgtcatcgttgggatcggatcgaccctgttctcccagttcacctcggggtccggcggtaaccagccgactatcgaaaatgcgatggcactggtgctcgcggccctctcgttgcttggcctcggtatcttcgggccgggaattgccaacggcattgtatctggcggtccgcaacttggggccggtgcggccgtcggaaccacgatggccgcaggtggtgtggttgccgccggagcagcactcgcagcaggcggggctgctctcaccggcagcatggttggaggcgcggcgaggggaggcagcgcgctcataggcggcgcggcatccgcctttcggacgggcgcgcagaccggggaggcgggcgccacttcggcagcgagtcccctgcgatcgctggccgcccgctttggcagatcaaatgccgcgggcgatgaagccggcggcgcggatgcgtcatctggaggcgcacccgcctgggttcgccgcatgaaacgtggacaggctgtcagtcatggtgtctcggcgacgacgcaggcgctgcggtccggggatcgcggcggaggtggggcctccgtcgatctcaaggattcagagcgctga

SEQ ID NO: 1171 - DNA, 738 bp, BradyrhizobiumColbertium
atgaaccgcttccgccgtgttgctgccgctggcgtggtggcacttgccgtgcttgtcggttccaaaccggccttcgcgcagttggttgtgtttgatcccaacaactatgcccagaacgttctgaccgccgctcgagccctgcagcagatcaacaaccagatcacatcgctgcaaaatcaggcgcagatgctggtcaatcaggccaggaatctcgcgagcttgccctattcgtcactgcagcagttggagcagtcaatccagcgtacgcagcaactgctcgcccaagcccagcgcatctctttcgacatccagcaaatcgatcgcgcgttctccaccacgtacgcgccggcatctcccgacgccacggaccaggcgctgatcgcgaatgcgcaggtccgttggcaaaactcggttgcaggctttcaagatgccatgcgggtgcaggctacggtggtcagtaatctcgacaccaatcgcgcccagatgtcgacgctcgtcaccgccagccagggcgcgaccggcgccctgcaagcgagccaggctgccaatcagcttcttgcgctgcaggcacaacagcttgccgatctcacggcaacagtcgccgctcaaggacgcgcccaaaacctggaatctgcccagcgaacggccgctcaggaccagggcagggagcaactccggcgcttcctgacgcagagccgaggttaccagcccacaatagtgcagatgttccaccaatga

SEQ ID NO: 1172 - DNA, 2442 bp, BradyrhizobiumColbertium
atgatgaatcttgccgaatatcgttcctcgaatgcgcgcctggccgacttcctgccctgggccgcccttgtcgacgagggcattgtccttaacaaggatggctcgtttcagcggacggcaaaattccgaggccccgatctcgacagcgcggtacctgccgaactcgttgccgtcgccgggcgcttgaacaatgccttgcgtcgccttggatctggctgggccctgtttgtcgaggcacaacgccatgccgcgggggcctatcctccgaacacgttcccggatgtcgcatccgccttggtcgacgccgagcgcagggcccagttcgaagaggccggcgcccattacgagtccagctactatctgactttggtttatctgccgcctgccgaaggagcggccctggccgagcggctcctttacgagggcagcaaccggcccgtcggtgcagacgcacgtgaggtgctggccgggtttgtcgatcggaccaaccgtgtcctgcagctcatcgaaagcttcatgccgaaatgtggctggctcgatgatcaggaaacgttgacctatctccactcgacgatctcgaccaagcgtcaccgggtgcgcgtcccggaaatacccatgtatctcgacgcgctgcttgccgatcagccactgaccggcggtcttgagccgatgctgggcaccgcccatctgcgggtgctgaccgtcgtgggatttccgaccgcaaccgtgcccgggattttggatgatctgaaccgactggcattcccttatcgctggtcgacccgggcgctcatgctcgaccggaccgatgccgtgaagctagtgacgaggattcggcgccagtggtttgccaaacgcaagtcagtcgccgcgatcctgaaggaggtaatgaccaacgaggcgtctgcccttcttgataccgacgcccacaacaaggcgatcgatgccgatgcggccctccaggaactaggcaccgatcaaatcggggaagcctttgttacggcgaccgtcaccgtctgggacggagatccccgggctgccgacgaaaagctccgcctggtcgaaaaggtcatccaggggcgcgatttcacctgcatgatcgagaccgtgaatgcggtcgaagcctggctcggcagcctgccgggccacgtttacgccaacgtccgccagcccccgatatcgaccctcaacctagcccatatgatccccctgtcggcggtttgggcgggcgaggtgagggaccatcacctcaaggcgcccccgctgttcttcgccaggacggaaggatccacgccgtttcggttctcgctccacgttggcgatgtcgggcataccctggttgttggtccgaccggggcgggcaagtcggtgctcctggcgttgatggccctgcagttccgccgctatccggacggacaggtcttcgccttcgatttcggccgctcgatgcgcgcggcggcgttggccatggacggcgactggcatgacctcggtggcgcggtagcgggcgaaacggatggatttatgtccctgcagccgctggctgacatcgatgatgtctccgagcgcggctgggcggcgcaatggatcgcctcgatcttgtcgcgagaaaagatcgacgtcaccccagagaccaaggatcatgtctggactgcgctgacctcgctggcgtcggctccgcacgaggagcgcaccctcactggcctctcggttctcctccaatcgaatatcctgaagcgggcgctccagccctattgcctcggtggtccctatgaccggctgctcgatgcggagaacgagcacctcggtagctcatcggtccaggtctttgagaccgatggattgattggaaccgccgttgcgccggcagtgctggcttatctattccatcggatcgaaggccgcttcgacgggcgtccaacgctgctcatcatcgacgaaggctggctcgcgcttgatgatgcggactttgccggcaagctccgggagtggctaaaaacccttcgcaagaagaatgcgtcggtggtgtttgcgacccaatcgcttgcggacatcgatggctcggcaatcgcgccggccatcatagaaagttgtccgacccggattctgctgcccaacgatcgcgcgatcgagccgcagatcatgacgatctaccggcgatttgggctcaatgaccggcaaatcgaaatcctggcgcgggcgattcccaagcgagactactactgccagtcacgccggggcgatcgcctgttcgaactcggacttggcgaggtagcgcttgccctcaccgccgcttcctccaaagccgaccaggctttgatcgagcaggtgttggctgaacatggccgcgaaaacttcgtgagtggatggctgaaggcccgtgatgtcgcttgggcgaccgatctcatcccacacctcgctgaactgggggcttccaaatga

SEQ ID NO: 1173 - DNA, 264 bp, BradyrhizobiumColbertium
atggatgagcagatcccagggtttgttgcgcccgtgcatcgcgctttgaccgagccgatcctgatgggaggcgcaccgcgggccgtcgcaatcttaaacggcaccttggccgcggcactgggcctcggtctgcgcctttggcttgccggtctcctgctctggttcatcggtcatatggcggccgtctgggccgcgaaacgcgacccggagttcgtcgaggtcacgcgccggcacattcgtatccctggtcacctctccacgtga

SEQ ID NO: 1174 - DNA, 327 bp, BradyrhizobiumColbertium
atgaactgccgatcgcctctcggccgaagggccgttacgaccgcatcaattgcggccttctgcctgttcgcttcgccggcctggtccgcaggctcgaatatgccgtgggagcaaccgctcaatcagatcctgcagtcggtcgaaggcccggtcgccaagatcgtcgccgttatcatcatcatcgtgaccgggctgtccctggctttcggtgacacgtcgggcggttttcgtcggctggttcagatcgtgtttggtctgtcgatcgcgtttgccgcatcgagcttctttctgtcgttcttctcgttcggcggcggagtggtgatctga

SEQ ID NO: 1175 - DNA, 978 bp, BradyrhizobiumColbertium
gtggggacggtggtgacaatccattccattcaatcggaggcaatatctcgcggcgcgcgcatgctgcgcactgcacttggccccgcgatctcgcgctttctggaagatccttcagtcgtcgaggtgatgctaaaccctgacggccgattgtggatcgaccgtttgtcgagcggtctgacggacaccggtgagatcctgtcagcgccagacggggagcgcatcattcggctggtcgctcaccacgtgggtggtgaagtgcatgcgggtgcaccccgtgtatcggccgagctacctgaaactggcgaacgttttgaaggtttgttgccgccagttgttgcggctccagcgttcgcgatccgcaaaccggccgtcgctatctttacgcttgatgactacgtcttggcagggatcatgacgtcagaacaggctatagcgctgcggcaagccgttagttcacgcaagaacatcctggttgccggcggaacatcaaccggcaaaacgacgctcacgaacgcgctgctcgcggaagtcgccaagacttccgatcgcatcgttctcatcgaagacacaagagagctccagtgcaaggcgccaaaccttgtcgctctgcgcaccagggacggcgtggtgtcgctttcggatctcgtgcgctcatcccttcgcttgcgtcccgatcgtattccaatcggcgaggtccgcggggccgaagctctcgacctgctcaaggcctggggtaccgggcatcccgggggaatcggtaccatccacgcaggcagcgcgctcggagccttacgccggctcgaacagctcatccaggaggcggtggttacggtaccgcgcgccctgatcgccgagaccgtgaacgtcatagccgttcttgctggccgtggcgctgatcgccgcctttccgaacttgctcacgtcgccgggctcgggacgtcgggcgactacagcctctcagcatcaggagaccagtga

SEQ ID NO: 1176 - DNA, 1092 bp, BradyrhizobiumColbertium
gtgttgctggtgatggcggccggcggcgcgaccctgttcgggaccgcaacgggattttcggagcttctggttgcgcgcgccatgataggacttggggttgcagcctcattgatggcagggctcaaggccgtggtcatctggtttcccagggagcgtatcgccctcgtcaacggctgcatgatcatgctggggtcgcttggagccgtcaccgcaacggcaccgaccgattgggtattggattggatcggttggcgaggtcttttcgaagtcctgacttttgcaacgatcgccgtagctgccttcacttactttggcgtaccggaaagctccagcaatgaagcagcgtcgacgacctcccggcttactttgtggtctgtgtattccgacgcgcgattcctgagacttgcgccactgtcggcagcctgcatcggctcgtcatgggccctgcaatctctgtgggctgcgccctggcttacggatgtggaagggcttgatcggcatagtctcatgacgcagctgttcatcatggctctcgcaatcagtttcggagcgttgctgctgggcgtgatggcggatcgtctacgcagacgcggcacaacaaccgaaatcctgatagctggcatggcaggggtgttcattgcggccgaacttgcacttattctccgggtgccaatgccatcgctactgccctggtgtgccgtgtcagttatgggagcggcaacagttctcagctatgcgatgatcgccgattattttccgcaaggccttgccgcgcgagcaaatggggcgttgaaccttgcacattttggttcggcgttcgcggttcagtacgggatcgggcttgttgtcggacaatgggcacctcaagacggtcattatccggtaatggcgtatcagtttgcgtttggtctcagtgcagcctttcaggcagccgcattgctctggttcgctgtgccttggctccgaacgttgagcaggcacctttacgcgtcgcttacgcggccgtttgcagagcgagacagccaagcggaatttgtcatggtgcccgtcgagggatctatcctcgaggcgcgtgaggcggtggaatggtag

SEQ ID NO: 1177 - DNA, 666 bp, BradyrhizobiumColbertium
atgcagctccacggcgaacccgagttggaggccagccaggccgcggtggcaaaatcgccacctcacaaacggaattccgcggcaacccgcaaggtaaccgtccggatcaccgagaagattcacgagcaactcgaagctgcgactgaacgtccgggcgtgggcaagagcatgatcgtggaggctgcgcttgcacaatttctgaatccacgccctccagaaaatgcggtgcatgacggttttgacgacatacacgcccgattcgattctctggagcgcaatttacggacaatcgctgagacggtcgcgctgcatgcgcgatatcacctcgccgtgatgccgccgctgtcgcaacagcaacagcgagaagcctgccagctcggtgatgagcgcttcaaggtcctggccgagcaagtcgatcagcgggttcagcaggaccgttcgcttatccaggagacgatcgatcgcctcaatgcgacacgatttaacggcttgaaatcgataatcgatcaggatgagacagtcgacctcaagccgacagacaccccaaacggcgccggtttgcgaggcgatgcaaatataaagcaggaatcatccgctgccgcccaggagggcggcagcaattccaactttcgtcacctcccgaacgccttctgctggccggcatga

SEQ ID NO: 1178 - DNA, 462 bp, BradyrhizobiumColbertium
gtgagcatgaaaaaggcccaactcagcatctatctcgatccagagaccttcgctggcctggaggccttcgcaaagcgtcacagcaagtccaagtcgctggtcgcggaggctgccatcgcctccttcctttcgcccgacgaatccgaccggagggaggccgcgatcgccaagcggctggatcggatcgtgcgcgtcctcgaacggctcgaacgaaacgataccgtcacgctggagacgatcgcgctgttcatccgcttctggctgacatcaacgccagcgctgccggagcaatcgagcccagcagcgcgcgccaagggcgcggagcgctatgatcgttttgtcgaagctctcgggcggaggctatccagcgggtcgaccatgctgaaggaggtgagtatcgaatcgcacgacggggagaacgccgtgcgtggcaacgacgacgccggcgccggcgcgagctaa

SEQ ID NO: 1179 - DNA, 1110 bp, BradyrhizobiumColbertium
atgttggcgacgccgcacctcggagagcgcgttcatcccgtggtggcttcggcatcgcgcgagctcctcaacaagagcgagaatgaacgctcaggtgttttgtcaaccacgatgagtttcctggggctctatcgcgatcccgtcgtcgccaaggtcacgggacggagcgactggcgcatccgcgatctcgttgacggaccccggcccatctcgctctttcttgtcgtcccgccatccgacatcgcccgcacaaaacccctgatgcggctggtacttaatcagatcggacggcgattgaccgagagcctggacaccgatcggcgacgacagaagctgcttctgatgctcgacgagtttgcagcgctcgggcggttggatttttttgagagccagcttgccttcatggcaggctatggcattcgcagctttctgatcacccagagcctgaaccagctcgaacgcgcctacgggccgaaccacgctatcctcgacaactgccacatccgggtcgctttttcgaccaacgatgagcgcaccgccaaacgcgtgtcggacgcccttggaaccgcgaccgagatgcgcgcgatgaagaactatgccgggcatcgcttaagcccttggcttgggcacctcatggtcagccgccaggaaacatcgcggccgctgcttacaccgggggaagtcatgcagctctcacctaacgaggcgattgtaatggtctcgggggtgcaccccgtgcgcgccagcaaggtccgatactatgaggatacgcagctaaagcgccgggtcttgaatccatcccgcgccaatccggtcgccctggtcgcgcaggcagacgattggtcaggccgtccgcaaatcccgccctctgccgaactcctcgcgaaggtgacgcggagatcccgtgatcccaacggcggcattcgccgtgagcccgagctgccgcagcacgaggatgtcgtcattggggctcccctggccgagaacgagttcgatgccgcgccagatgatggcgacaccgatgcggtgcaggcgagggctctgagccgttcgatgcagggcatcgcgcgttccgtcaccatcgacccggaggatccgatggatctctag

SEQ ID NO: 1180 - DNA, 1773 bp, BradyrhizobiumColbertium
atggcgctgttcttgctcggttttcgacaccttgcggcgggcaagatgagccgcaacgacgatttccgcatccgtccaggccgtatccgttcgacgcgcgcgcccaaggcaaaatcgtttctcgcgcaggccctcagagccgcgcagaaggcaggcggtctctcacacggcggagtcaggaggagtgggtccttcgggcgcggccgtgcggcgagcgttgccgcggcacggctcctcaacaaccgcgcccggggcgccatggtcaaggcgcgtgtcgtacgccggatgcggtcgcccggcgcactgcgagcccatatcggttatctcaaacgggacggtgtcacccgcgatggatcgcccggtgagctcttcgatgctgccggggacgatgcagacggccgggcttttgcggaacgctgcgacggggaccggcatcatttccggttcatcgtctcgccggatgatgccactgagctggaaagcctgcggagctttacccgtgagctgatggatcaggcctcgcgtgatctcggcacgcggctcgactgggtcgccgtcgaccactggaataccgagcatccccatatccacattctcgtgcgcggtcgcgcggacgacggttccgaccttgtcatcagccgcgactacatcggaaccggcctgcgggcgcgcgcaggtgatctcgtcacgcgtgagcttggcccgcgatctgagctcgagatacggcgcggtctcgaggcagaggtcacgagcgaacgctggacgcggctcgatcgggtgcttgcccgggaagcgggcagggcggaaggggtggtcgatcttcggcccgaacgcgatgtcgcgcgcgatccgttgcgggagatccggatcggccggatgcggacgcttgagcggctcggacttgctgaaccagccgggcccgcgcgctgggttctggccgctgacgcggagcagcgcttgcgtgcgctcggggagcgcggcgatatcatcaagcggctgcacaagagcctagccaaggatggtgcatctcgcgcgccgtcatcctgggcgctcgagggcgaaggccatggcggacccgtgatcggccgtctcatcgcccgcgggctggatgacgagttaaggggaacagcgtttgccgtggtggacgggatcgacgggcgtgtgcatcatctgaagctccccgacatcgatacagccggcgacggtccgatcgggggcattgtggaactccgtcgttttgaggatgcgaggggccggccgcggatcgcgcttgccgtccgctccgacctcaacctcgaccaacaggtagtggccgaaggggcgacctggctcgatcggcgcctcgttgcccgcgaacctgccgatctctcgcgagccggtttcggtgccgaggtccgccgcgcgcttgatcgtcggattgatgcgctggcggaacggggcctcgtgcgccgggacggagacaaggtcatcatcggccgcaatcttatcagtaccctgcgtacccgcgagctcgattcagcgggtaagcgtttggctgaagaaacggggctggcgcatatgcccgccgaggcaggccagtcggtttcgggagtttatcgccgaaggctgtcgctcgcctcaggccggtttgctatgattgacaacggcctgggcttccagctcgtaccctggataccgtcccttgagcgcgaacttggcaggcaagtaagcggcatcgccggtcccggcggcgtcgactggagttttggacgcaagcgcgacctttcgctctga

SEQ ID NO: 1181 - DNA, 312 bp, BradyrhizobiumColbertium
atgaccggccgaatgacgaccattctcgcgacgtttggaagcgtcgccctcgtgctggccggaagtgaaaaagagacgccttcctacatttggaacgcctcggagagcgtacccattggcctgtatcgattgcaaccagtcgaccgactgagcgtcaccgacctcgtcgcaattcgaccgccggagccgctcggaacctttctcgatttcaatgggtatttgccgatcggcgtgccgatgctgaagcggatcctcgcgctctggacagaccgtctgcagaaccgggctcaaaattgctgtcgacgacgttga

SEQ ID NO: 1182 - DNA, 309 bp, BradyrhizobiumColbertium
gtgaatgacgttacgactgtcgagcttctctggctcgaaaagcggattgagaaccggattcggtttggtcatccgatctctgaaaagatcgtcgaccttcatcggcgtgtcctctcattcgcgcccggcagcatctttgcgttcgtgcgctggacgtccaacgacttcgggaccgtgctgtcccggatcgacatcttgcgtgcggcggcaccggccagcgctactcaaccgtcccttggatcaaccctggcggcgagagtctgctgcgactatctggctggccaaaggtcgagcgcgttctgcagctga

SEQ ID NO: 1183 - DNA, 903 bp, BradyrhizobiumColbertium
atgtccgagagcaatttctcagcacgggggcgccgtcgctctgagcgcgatcaactcgatctatttcgtgcattgcccggcgacttggccgcacgcgatgcgcaagatttgatggcctatccgttcttctcgctggcaaagtccaggcggatcattccgatcgattttcgcgtcgggaccatcctgatccgcgtcgaggccgtgccagagcacggcatggcgacgatctgggacgcggacgttctgatatgggcggcttcgcagatcgttgaggctcgcgacgctggcctgaagacatcgcgtctgatggccgcgacgccatacgagatcctgacctttgtcgggcgcggcaccagcgtgcgtgactatgaccgtctcaaagctgcactcgatcggcttcagtcaacgaccgtcgtgacctcaatccgccagccgacggagcggcggcggcatcgcttctcctggatcaacgaatggaaggaaacggcagattgccacggcaagcctcgcggacttgagttgatcctgccggattggttctacacgggcgttctgaacgatgcgctcgtgctgaccatcgaccgtgggtatttcgatctcaccggcgggctcgagcgatggctttatcgtctcgtccgcaagcacggcggccgtcagggcggaggctggagcttcgacgtcgtacaccttcacgccaagtccggcagcctatcgccggtcaagcactttgcttatgacctgcgccagatcgtgcgccggcagaccctgccgggctacgaactcatcatcacgcaggatccaaacggcgcggagcggctgaactttgcacctactgcgatcgacccgctcacagagcggctgcgaaagcgcgggctcgtacctcacccaggggaaaagctgtga

SEQ ID NO: 1184 - DNA, 279 bp, BradyrhizobiumColbertium
atgggcgatcctaccgccggcttgccgccacgatacttgcgcaccgccgaggcggcccgattcctcagcctttccggccgtaccctggaaaaacacaggacttacggcaccggaccggcttaccgaaaaatcggcggtcgcgtcgtctatgcgctcgacgacctcaaggcttgggccgaccgtggcaccaagacgtcaaccagcgatcccggtgccggcaccgtgctgcctgcaaagcggcacgcacccgttccttatgcggggaaggagcggcgctga

SEQ ID NO: 1185 - DNA, 402 bp, BradyrhizobiumColbertium
ttgcagaaggtagaacatcgcgtttggttcaaggaagcgccggtcgttgccggtacctatgcggtcgaactgccgctcgaccctgactttgaattccgcgcggatgcaggcaagcggctgtggcgcgccctcaatggcaggcctccggggccgccgctgcatgcgctttccacgcatcgccggcgccggctcgcgcttgctctgcgcgcgctcgatgcgcgcacggacggcagtacctaccgggaaatagcagaagtcctgttcggcgccggacgcatttccgaacgcgactggaagactcacgacctgcgcaatcggaccattcgcctggtccagagcggtcttgcgctgatgcgtggcggctatcgcgcattgttgcgtccgacatctcgcaaaaaatag

SEQ ID NO: 1186 - DNA, 225 bp, BradyrhizobiumColbertium
gtgtacgatgaggagcacgtcatcacgtatctacgaatgctcgatgcggacgcggaaggagcagactggcgcgaggtggctcaactggtactaaagatcgacccagagcttgagcatgatcgcgcaaggcgtgcgttcgatacccatttggctcgtgcgaaatggatgacggagaaaggatatcgtcatttgctgcgcggcggcgcatcaaatccgaatctttga

SEQ ID NO: 1187 - DNA, 120 bp, BradyrhizobiumColbertium
gtgatcgccgacaccgtcttgactccgccgcgcaccatcgcatttccgatgcggcaggtcgcgatctcgccatgctgcattgatgccggcgttccggttacagccgcaagagaatattga

SEQ ID NO: 1188 - DNA, 1128 bp, BradyrhizobiumColbertium
atgatcctcaccgagactcagattagtatccgcaagaccgcccacgctttcgcgcaggcacggctagcccccggcgcagcgatccgcgacagggagcgagcattccccagggatgagctcaaagccatcgccgaactcggctttcttggcatgctggtgccggaagcctatggcggctcagaagctggcgcgatcgccttcgccttggttttggaggaagtcgccgcagcggacggggcctgttccaccattgtcgcggtgcactcctcggtgggatgcatgccgatcctgaagttcgggacggaggctcagaagagggagttcctgcccaagctcgcctctggtgaatacatctgcggctttgcactgaccgagccgcaagcgggttccgacgccgccgcgatccggacccgcgcccgacgggacggcgattactacatcatctccggcgccaagcagttcatcacctccggcaagaacgggcagatagtaatcgcttttgcggtcactgatccgagcgccggcaagaagggtatctccgccttcatcgtgcccaccgacacgcccggctacgaggtggtacgggtggaggagaagctcggccagcattcctccgacacctgccagctcgccttcaatgacatgcgtatccacaagagcctgcggcttggggcggagggcgaggggctgaagatcgccctctccaatcttgagggcgggcgcatcggtatcgctatgcaagctgtaggcatggcgcgggccgctttcgaggcagcccgttcctatgccaaggagcgcgtgaccttcggcaaacccattatcgaacatcaagcggtggctttccgccttgccgacatggcgacccgcattgaagccgcgcggcacatggtgctccatgcggccgaactgcgggaagcggaaatgccgtgcctcaccgaggcatcgatggcgaagctctttgccaccgagatggccgagcaagtatgctcggcggcgatccagatccatggcggctacggctatctcgccgatttccccgtggagcgcatctaccgcgacgtgcgcgtgtgtcagatctacgagggcaccagcgacgtccagcgcatcgtcattgcgcgtgcgctctga

SEQ ID NO: 1189 - DNA, 1191 bp, BradyrhizobiumColbertium
atgacggcatcggatcccattgtcatcgtcggcgccgctcgcacgcccatgggcggtttgcagggcgacttcaaagacgtaaatgcctcctcccttggtgccaccgctatccgcgcggcactcgagcgtgccgggctcaccgccgatcaggtggatgaagtggtgtttggctgtgtgctcccggccggtcaaggacaggcaccggcgaggcaggccggtctcgcagcgggactaccgctgtccgccggcgccaccaccgtgaacaagatgtgcggttcgggcatgaaggccgcgatgtttgcccatgacctcttgcacgccggctccgcccatgtggtggtggcaggcggcatggagagcatgaccaacgccccctatctcctcgaccgcgcccgcgccggctatcgcatgggccatggccgggtcatcgaccacatgtttctcgatggtctggaagacgcctacgacaagggacgcctgatgggcactttcgccgaggactgcgcagaggcgtaccggttcacgcgcgaggcgcaggacgccttcgcgatcttgtcccttaccaaagcgcagaacgcaatctcggacggttcgttttcatcggagattgtcccagtcgtggcgaagacggggaaaagcgaggtcgcggtctcaattgacgagcagccgcccaaggccaagttcgacaaaattcagaccctgaaacctgctttccgcgagggcggcacggtgactgcggccaactcgtcttccatctcggatggcgcggcggcgctcgtgatgatgcgccggtcggacgccgagaagcgcgggcttgcgccgcgtgccgtcctcgtcggccatgcgactcatgcccaggctccgaacctcttcaccaccgctcccatcggcgccatggagaaactggccgcgcgcacggggtggtccctgaagggcgtggatctgttcgagatcaacgaggcgttcgcggtggtccccatggcggcaatgcgcgacctcgatctgccggcggacaaggtgaatgtgcatgggggtgcctgcgctctcggtcacccgatcggcgcctcgggaacgcgggtgatggtgacgctgcttgctgcgctcgagaaatacggcctcaagcgcggcatcgcgtcgctttgcatcggtggcggggaggccaccgccgtggcgatcgagcggctgagctga

SEQ ID NO: 1190 - DNA, 768 bp, BradyrhizobiumColbertium
atgcagatcaaggaccgcgtttttctcgtcaccggcgccggttcgggcctaggtgcggctgtcgtccgcatgctggtcggccaaagtgcaaaggtagtgggcgtcgatatcaatgctacggcgctcgctgagagcgctgtcacgttcggcccgaacttcaagggccagaaggcagacgtcaccagcgaggagggggggcttgccgccgtcaagctcgcgaaggaggcattcgggcatgtccacggcctcgtgaattgcgccggcgtcgctcccggcgagaagatcgtgggccgtgacggacctcatcggcttgacagctatgcgcgggcgatcgccatcaatctcatcggcaccttcaacatgctgcggctggccgccgacgccatcgccaaggaggagcccaatggcgagggcgagcgcggcgtcatcatcaacactgcctcgattgccgccttcgacgggcagatcggccaagcggcgtacgcctcgtccaagggcggagttgcggcgctcactttgcccgcggcgcgtgaactcgcacgctttggcatcagggtggtaacgatcgccccgggcatatttgaaacgcccatgatggcgggcctgccgcaagacgttcaggattcgctcggcaagagcgtgccctttccgccgcgcctcggccgtccaccggaatacgccgcgcttgccagacacatcatcgagaacaccatgctgaacggtgaagtcgtacgtctcgacggcgcgctgcgcatggcgccgcgctga

SEQ ID NO: 1191 - DNA, 1683 bp, BradyrhizobiumColbertium
atggctgaccccgcctatcccgctgcctttggttcattcgactacgcgaacgccgcgcgaaatttccggctcgatgctttggccgcccagctggagggaggtcacgaagcaggcatcaacgcctgtatcgaatgctgcgaccgccacgtgcacaagggcggcgtcatcctcgattgggagagcgccgacggacgcaaggcgagttacaccttcacgcagatgaaagaactgtccgcccgctttgccaatttcttggtggctcagggcattcagcccggcgacgtggttgccggccttctgccgcgcaccccagaacttctcatcaccatcctcgggacttggcgggcgggtgctgtctaccagccgctcttcaccgctttcggccccaaggccatcgagcatcgcctgaggacgtcctcggccaagctggtggtcaccgatctcgccaaccggccaaagctcgatgaggtggaggagcgcccgcgggtcactctcgtgaccaagcctggcgaagcaacagtcaacgccgcagacctcgacttccatgccgagctcgcgcgccaggacgcggagttcgaaccggtgctgcgcaagggcagcgacctcttcctcatgatgtcgacgtccggcacaacgggcctcccgaagggcgtgcctgtacctctcaatgcgctgctcgccttctatgtctacatgcgtgatgctgtggacctgcgcccggacgataagttctggaatatcgccgatcccggttgggcctacggtctttattacgcggtcacgggcccgctgctgcttggttgcgcgactacattttacgacggtccattttccgccgcctccacctacgacatcatcaaacgtcacggcatcacgaacctcgcaggcgcgcctaccgcgtaccggctgctgattgctgccggtcccgaggccgcggagccggtgaggggcaagctgcgcgtcgtctccagcgcaggtgagccactcaatccagaggtcattcgctggttcgccgagcatcttggtgcgccgatccatgatcactatgggcaaaccgagctgggcatggtggtgaacaatcatcatcgcttgaagcatctggtgcacccgggctccgctggcttcgccatgcccggctaccgcgtagcggttctcaacgaggaaggccaggagctgccgcccaacattcctggtattcttgccgtggacatcgcaaactcgccgctgctctggttcaccggctactggcagcagacgacacctgctatctctggcggctattacctcaccggcgataccgtggagctcgaaagcgacggccgtatcagtttcgtcggccgtgccgacgatgtgatcacctcgtccggctaccggatcggtccgttcgatgtggagagcgcgctcatcgaacatccggatgtgattgaggcggccgtcatcggtaagcccgatccgcagcgcaccgagctggtgaaggccttcatcattctccgcaagggcaccgagccgacggaagcgctggctgaggagctgaggcaatacgtcaggcatcggctttcagcccacgcgtatccccgcgagatcgagttcgcggaggagttgccgaagacgccgagcggcaagctgcagcgctttctgttgcgcaatcgcgaggcggagaagcagaaggacgccaccgcctga

SEQ ID NO: 1192 - DNA, 990 bp, BradyrhizobiumColbertium
gtgaaggaacggcagatgatctccccaggcttcgtggacgacgccctcgtgggtttgcgccgacgggggatcaatgaggtcccgcttcttgcccgcgcaggtcttccgccagtggttttgcagccggtctcggcccagcagtatggagcgctgtggcttgcgatcgctgatgcgatcgacgacgaattcttcggcgagggggctcggcccatgcgctcgggcagcttcgcgttgctgtgccacgccatcctttcggctgcgacactagagcaggcgtttcggcgttcgctccgtttcctgcgtgtggtgctggacgatccctttggcgaactcgtggtggcacagggactcgcacatatcgtattgaaggatgcaggtgcgccgcgctcggcattcgcctatcgcaccttctggattattgtgcacgggatcacctgttggacggtcggccggcgcattccccttcgaggtgtggatttccgctgcgcctcaccaccccatgacgcggactatcgtctcttcttcggcgcaccggtttgcttcgacaggccggagagccggctctccttcgatgccgagtttctgaagctccccaccattcgcaccgagcgggccttgagagagtttctgcggcgagcgccggcgaacatccttgtgcggtaccgccatgattcaggcctcgccgccaaagtgcgtaaccgcctgcgcgaaacggtccctgtcgactggccggacttcactggccttgcctcgcaattgcgcgtctcagcgcccacgcttcgcagaaagctgcggatggagggacttagctatcgcgacgtcaaagacgagatccgccgcggacttgccatagagagcctgctgcgcggccagcgcgacgtcggcgacatttccgcggatctcggcttctcggagcccagcgctttccaccgcgcctttcgcaaatggacaggcaagagccccggcgtatttcgccgcgaccggggttag

SEQ ID NO: 1193 - DNA, 279 bp, BradyrhizobiumColbertium
atgatgagcggcgtctggcgttccggaaagggaatcgccagctcgtccgtcgacgcgaaaggatcgctagtcgcgccccataccggtacgctgggcgatgaagcgaccccgctgctcaagggtgaggtggatgttgtgcagaccgagagcggaaaggagtactcgttccaggccggtgacgtgatcggactgaggttcagcatgcacctaacgtggacatccaaaggtcaatttgtgaagaagctgtggctggtcacccgcgccgcgctgcccgaatag

SEQ ID NO: 1194 - DNA, 1566 bp, BradyrhizobiumColbertium
gtggccagcggcgcgggttcgactgcgaacactctggcgggcattcgcggtcgtgcggcgtccttgacggagcaaacgcgcgatgcacagacgacggctgagacatttacgctggcttcggagaaatttacgcggtctgcgcacgacataggcaccgaggtggccgacgctggtaagctcgctgaccaggcccgcgaagcggcgcgagaggcgagcttaaaggttgagcagttgcgcgtatcgtccggtgctatcggtaatgttgtcgatctgatcgccgcaatcgccaaacagaccacgcttttggccctgaattcgacgatcgaagccgcgcgcgcaggtcctgctggcaaagggttcgcggtcgtcgcaacggaagttaaggcgctggcagtgcagacccaaaacgctaccgaggaaataaagcggaggattgaggcactccagcaagattcctcggcatcgatcgatgccgtctataggatcacgaaggctatcgacgccatcagaccggtcttcgaacatgtccatggtgccgtcgccgagcagaaggagatcacgggcgagatggcgcagaatgctgcgtcggcctcccagtttatcgtttccgtcgccgcgagcggtagcgaaatcgacagcgcgacgaaagaagctgagatccatggtgaaagtgtcgcactggccggtaaggccgtgaagatgttcgcggaaaagctaaaaatgcgctgtgcgatcatgctccgccacgatgggcgtgacgagagcagggccgagcgagtgccgtgccgattccagatactgatcgatgcgcctccgtcaccgatcaaagccgaggtgttcgagatttccgtttccggcatgctgctctgtggggaaaatgcggcggcaatagctatgaacaaagtgctgaatgccactgtggagggcgttggcccctgccggatccgtgccacggagtatacccccgctggtgcccaggtggagttcgtgtcgctggacgccgagctgaaggacaggattgaagacaaggtctggagcatccacgacgagaacacagaattcattacgcgctccttagaggcaggcgacgcgctggcaaagatcttcgagaacggcattgtggcaggagacgtaagtatcgaagagttattcgacgagagttacgttgagattgatgagactgatccggtgcaatatcgcgtcggcttcctcgactgggctgaacgcgtgctgccatccttcctggaggcgttttcggcgcaggattcgcgcgttgtaaccagcgtggtgaccgaccgtaacggttatgtaccggtgcacagcaaggctgcatctcaaccgcaacggcgaggccaattcgcctggaaccaagcgaattcacgcaatcgccggatttttaacgacgcagccgggctggcggcgagccgtaacatacggtcctatttgatccaaagctatccgcgagacctgggcaacgacaagccagtgatgatgcgtgagatcgacgttccgattcgcgtcagcggccgacactggggtggattccgcgcagtctacaaattgtag

SEQ ID NO: 1195 - DNA, 1728 bp, BradyrhizobiumColbertium
atgtcagtattccggcaggcgcgcgattatctcctcgcgaacagggaggactatgctgctgccacaactggcttttgttggcccgaccttccgtcgttcaattgggcacttgattggtttgatgccgaacttggcggcaccgcagaaagcatgaacaacaccgcgctttggctcgtcgaaagctcaaccggcattgaatccaagttcagcttcgtgcaattaaaagatcagtcgaatagggtcgccaatcactggcgtaagctgggtcttaggcgcggcgatcatctgttgatacttctcggcaacgtcccggcactatgggtagctacccttgcagcgatgaagctaggcgttgtcgtgatacctgccacaaccatgttgagttcagacgaactttccgatcgaatcgagcgcggcaatatccgagccatccttgccggtgttgatcagcgtcaaaaatgcgacggactagcggctaagaatgttctacgcatagtggtcggtgaaggcggtgattcaagctggcacgcctacacggatgccgccgaccactcggcgtcgtttgctcccgacgagccaactcgggcaagtgatccattgctgctttatttcacttccggtaccacggccaaaccgaagcttgtgcgccatagccatcgcagttatccggttggctccttatcgacgatgtactggctgggcgttcgtccggacgacattcatctcaacgtctcctcgccgggctgggctaagcacgcttggagttcgttgttcgcgccctggaacgctggcgcgaccattttggtcgtagatcaagctccgtttagtgccaagttgttactggccgaattgaagcgctgcaaagttacgacgctgtgtgccccgccaaccgtttggcggcttttgattcaggaagatctcgccgctcacaaaatgtcgttacgcgaggtttgcagtgctggcgaacccctaaatcctgaagtgatcgatcgcgttcgagaagcgtggaagctcaccatccgcgatggctacgggcaaaccgagacgacagcgcaggtcgccaattcgtcgggacaggcggtcaaggtcggtgcgatggggcgtccgctgccaggatatgatgttcggatccttgatccggacggtgcgccggcgactgaaggcgaggtctgtatcgcgctgggatcgtcgcgtccggctggactgatgcaaggatatcaagaggcggatgggcagctaaaggggcttgatggcgatttctaccgcaccggagacgtcgcattcgtcgatggcgacggttacctcaccttcgttgggcgagccgacgatgttttcaagtcctccgactaccgcatcagcccgttcgaactagaaagtgttctcattgagcacgagggagtagcggaggccgcggtagtcccatcaccggatgctatccggctgtcggtacccaaggcctacatcctgctaacggcgtccacgcaggcctcccggcagactgcgctgtcgatctttcagtacgctaacgaacgcctcgcgccgttcaagcgtattcgccgcatagagttcgtcaccgaactcccgaaaacgatatcaggcaagatccgccgggttcaacttcgtcgattcgaacacgagggcgatcggaccgcgccgttccgcggtgtagaatttttggaacctgaactgcccgaactggaagtcggtcgtaagcgcagcaagtcgtag

SEQ ID NO: 1196 - DNA, 396 bp, BradyrhizobiumColbertium
atgaacgaggagcttgcggacgtagcggttcccgcgcttgctgataccgaggagcttctgcttacctccggtggagtgttcccgcggaacaagtcccagccatgcagccagatcgcgagccttctggaactggcgcccgttaccgacggccgcaagaactgcggttgcgcccagcgccccgatttcggggattgtcatgagccgacgggcaacatcttctcggtctgcaatcgcggcgatctctctcgtcacctcatcgatgcgctgctccagccggcgcaagtcggcaaacaagtctccgagaagtctgcgcatcgccgacgagaggtcgttcgacgcatcttcgagaaccagcggcaagtcgagcttgaacagaccagctccttgcctcaatga

SEQ ID NO: 1197 - DNA, 777 bp, BradyrhizobiumColbertium
gtgcaaagaatcttctatctcgcgatcggaggaatgggcagctacgccatcgcgaattatctcgacgaacagaaggtgccaaccttcacccagtcgcctaattgggatcacaccaccattgattacatgctcaggaatcgagcgacctatggtgagtaccaaccgaaatcctttgccgggggtaataagaagggtattccgagcggccctcccatttctaactattacccggcggtcgtagacaaggcgacttttgacgctgcgcaaattgctcgtcagcaaaacctcgcccttcgcggccgcaaaggaaatgatctcgcgaacattttcggtggcttatgctggtgtgcttattgcggcagcaaagttattttccatcggatctcgaacgtgcaggttctggtgtgcgagcaggtcttgagcgagggcgcatgcagccgatcggcctggtcatacagcgacttcgagaccaccgttctcgcctttctcgctcacccagccttgctcgactgcgtgggccgagaggagagggctgcgctatgcgaccttgtgcaggaaatcgaggctctctctttagatcaagatcaacgttactctaggagagtaaacatcaccgtcctactcaaacagatcgtcaccggattaaacgttcacagcgccggaaagctcacgccgcctagacattcatcggcccaaatccgcaaagacatcaacggcaggtttgttgagatccaattgcgggatggaccagtctaccgctgcatttcaattggctaa

SEQ ID NO: 1198 - DNA, 1527 bp, BradyrhizobiumColbertium
atgaagttggtaaagagccttttgctcggctctgcggcgggtctgatcgccgtgggcggagcgcaggcagccgatctccccgtgaaggccaaggcggtcgaatacgtgaagatttgttcgctctacggcgcgggtttctactacatccccggcaccgacacctgcatcaagctgggtggttatctgcgcgctgaagtcgcgctgaacaccaacagcgtctacaccggcaactattccggcgtcgcgggcgcgcacaacgccctcagcaactattacaccatgcgggctcgtgaagacctcaacattgacacccgtaccgcgacggaatacggcgtggtccgcacgttcttcgatgcgacgttcagttggaccagcggtggctacagcggtagcggaaccaccgcttatgacagcaacaaccccgccggaactggcagcggacaggtggctggtggtgcgctcggcgtgtactacgccttcatccagttcgctggcttcacgatgggtaaggcggtctcccagttctccgctccctggaccaactatcccggcaacaacttcgacggtctcgtcggtggcggcggcacggtcactggcgtcaaccagttcacctacaccgctgacttcggtcagggcatcacggcgtcgttctcggcgcaggatcaggtcgcctactatcaggcaggcatcaacaacctcggtgctccgggcggcttcggttacggcaccagcaacatcggtggatcgcgctctcctgatctggttgccatgcttcgcgttgaccaagcttggggtttgttccaggcatcggtggccgcacatgagaaccatgctggttacaatactggtgccggcgaattctcgggtcgcgccagcgacaagtggggttgggctgggcaacttgctttgtcgatcaagaacatcccgacaggcgcgggtgacacgatcaacgttcagggcgtctacacgaacggcgcgacccgctacaacatccaagaccttgccggtggtgcgggtgcgtggacaacctacagcggcactggcgtggctggcgcctaccagagcctcggcatcgcgttcgctcctgatgcagtgtacgccccgggcggtgaccttcagctcgttgagacttggggtatgcgcggcggtttcacccataactgggatccgtactggaacaccggtatctacggtgcatacgctgcagttcgctacaatggcgcatcaaagacgctgatgtgcggtgtcggtggtgtcggtggaacggtgagggcggcactgggtgctgctggtctcaccaactgcgacccggattacaacatcgcccagctcggggtaatcacccgatggaccccggtcaaaaacctcacgttctcggctgatttcacctacacccgcttggatcagaagtactcgggcgtcaccggcgctggtgcgaatgctgctgtcggtaagccggtagcggcgtatgagttgaaggaccaggatacctatcagttgctcctccgcgctcagcgcaactggtaa

SEQ ID NO: 1199 - DNA, 213 bp, BradyrhizobiumColbertium
ttgacagagcttcgccgtcagctgccgatttcgctccagggcatcgataccaacaatgattctgttttcataaacgagacgctgaaagcgtattgcgagcaggcgaacattgtcttcacgcgttgccgaccttaccgcaacaatgaccaggcatttgtcgaacagaagaacggagccgcggtccgacggatgattggttatcggcggttttag

SEQ ID NO: 1200 - DNA, 315 bp, BradyrhizobiumColbertium
atgggcctggcgcctgaaatccgcgcgaagctgctggcgatgagcgcgtcgacggtcgaccgggcgctggtcaagatccgacaggagggcgggcgccagcgccgtcggccggtggcgagcgcattgcgacggagcaacccggtacggacgtccgccgactggaaggatccggcgccggactttgttgaagccgatctagtcgcccacagcggaccctcggcgcgcggcagttttatccagacgctggtgctcacggatattgcgaccggttggacggagtgtgcgccgttgctggtgcgcgagcaacgctcctga

SEQ ID NO: 1201 - DNA, 147 bp, BradyrhizobiumColbertium
atgagcggaaaatacctcaacgatgcgctcatctatctccaggcgcggggtatcggtgccagcatattgacagggaatgttggcgacttcgacttcctgaaccaacttgctcctggcgttccaatcattctgtatcggcctgcgtga

SEQ ID NO: 1202 - DNA, 291 bp, BradyrhizobiumColbertium
atgcggaaccgcccgtcgacagaaaccgaggagcacattgcgcttaagcgcaaccggctcgtgctcgaacaggcccgtgcgctcgggctgctcggcgagaaaaagaacacgcgcttgtccggccgcgtaccggcaggcctgatagaagctgcaaagaagcgggctcacgtatcttccgataccgaacttctagagctcgcgttgtcgcgtctggcgctcgaggacgatttcggcgcgcgtttagtcaggagcaagggaagcctcccggcagatatcgatcttgccatttga

SEQ ID NO: 1203 - DNA, 855 bp, BradyrhizobiumColbertium
gtgtcgaaaaagacgattgccgactttgagcgcgatcaacgcaatcagcaggtgcgaacaatcgatgcgatcgaagcagccttgaactcggctggcatcattttcataccgcagaatggcggcggcgaaggtgtacgaaagagaggagcaatacctcgtctttttcgacgcgatgacgttgagcatcgcgaatgggtcgcttttgcattcgactacaaacagcaacgctttaccggatttgtaagctatcaggcgttggcaggcattgcgctgtccaacatcgcgccgatcgcagcctttgaccgggacgtggcgcgaatcctgataacggcagccgacaaagtggataaatctgacttcgatcccgagggtcgtgtgctgttaactcgcaacgatctgccgccgatagagttcgacccgaatgtcgttggaaagacaatcggcagaacgaggcttcatcttattggacgtcggaggttcacggcgattaccggcgcggtggtggaacctatcgactataatggctttcgcgttcggctcgacgacggtagcactaggacataccttaagctccgcgccggcgatggggatcatgacgcattagatgttagcgccgagatcgctgcgggctttttcattgtcagcgagcgcaacgactgccccttctcagttggagaccaagtccgactgatccgcggacaacagaggccggagattagtgcaggcgacatcggcaccgtctgtgagatcgaggattatcccatcatgatgggcccagcaccgcgcatccgcgtcaaattcggaagtcacatcacagcatgggaaaccccgacgcagtttgagatggcgacttag

SEQ ID NO: 1204 - DNA, 1767 bp, BradyrhizobiumColbertium
atgtgggccgacgcagacgccaaagttgactacttgaacttttctgaggttgctgaactcgccgccgagatggtgggaacagagcgcttgcttcctctctccctcggaatttttggcacttgggggacgggaaaatccactgtgctcaacctcatgaggggagagctatcccagcacaagcacaaattcctcttcgtagagtttgatgcctggttacaccaagactacgacgacgctcgagccgcgctcatgtcagtgatcgcaaaagcgttgctcgatgaagctcctgagggcttacgtgaaaaggcattgagcctactcaagcggaccaacaaactccgagttctcgggtacgctgctgaaggtgcagccgctttttggggtgtcccgaccttcggtttgatccggaagggagtcgagggactcggagacattctgtccggtgatgccaacgaagatgacgtcaaagctatcgaagaaggcgctaaagacgcaaagaccaagtcagaaggcttgatcgctccggagcccaagaaaagtccacccgaagagatcgtagcctttaggcaggaattcagcgaggtcctgtcgggtctcggcaagaccctagtcgtcttgatcgacaatatcgatcgctgcacgcctccgaataccattcacacgctagaggccatacgtctcttccttttcttgccgcgcaccgccttcgttatcgcggcagatgaggacatggtccgtcatgccgttgccacgcatttcaggaacccctcgcttcgtctggttgaggactacctcgataagttgatccaggtgccgatcagggtcccgaagctcggcgtccaagacgtgagagcctacatgctgctgctgttcgctgaggcttccggagcgaatggggacagtctggagcagctccgagcttttctcgttgatcagctgcgacaagcctggaagccagatgccaagtttggtgtcgatgaagtgctctccatcctcaagccggacgatccaaggacgctccgctcgacgctcgatctcgccgaccgaatggctcctcttctcgcgtattccgctaacgtcaacggcaatcctcgtattattaaacggatgctgaacgttgttcgcatgcgggcgtccgttgctcggaagcgaaagatggagctcgatgaatccgtcatcgctaagttggcactctttgagcgatgcaccgatgcaaaggctgttgacgctttgcacaccgcaatcaacgcctccgcaggaaaacctcactttcttgccactcttgaatccgggggcaccgatggcgatcaggcgatcgaaggatgccctccggaaatcttgaagcacgttgactttgtccgtgattgggccgcgcttgagccgaagctgagcgaagtagatttgaggcctgctgtttatctggcacgcgaaactgtcccgctccgggctacagcaacgaaattgtcagaggccgcgataaaagcggtcgatgtgttgcgacaagttcgaactgaagcatctccgaccgcgaaagctgccatcgagtcgatcacgacggaacagccggccgttatggaagagctaatcaggcgaatgaggttgaatccggagtggtcgcgctcccgggacgacttccgcggcgctgtgctgctggcgagagcgaacgaggatgcgggcaagatgctcgcgtcgtttgtgaattcgcttggcgagaaggcaccacgatggatgacgatgatgatgagcggcaaagcgaaagaggtgtga

SEQ ID NO: 1205 - DNA, 171 bp, BradyrhizobiumColbertium
ttgccgatccattgcgattttgatcagatcgaagagttcattctctgcttcaatggtccgagcttcggatggagacctattccaagccgacccggcatcttccgtcacttggtgaaagagaattcgtgcgaggtaatcgacaatgacttctacgatttgatccgcggataa

SEQ ID NO: 1206 - DNA, 123 bp, BradyrhizobiumColbertium
atggatcggcaattgggtccaaaactggcaaacggcgtcggaaggatctcgaagctagacgtcgagcccgcgcagctcaatgctatgcaggaagtctggcgagaatgggagactttcgaatga

SEQ ID NO: 1207 - DNA, 1311 bp, BradyrhizobiumColbertium
atgacgaaggtgatctgccatgccgacgcagcgggtctaccggttactcgcaaagcttcagacgttcacgtcatcctgtacgggaaaggagctatgccgcccaaggtcgctcgtatcggctccatgttgctcgatccggttagtcgactgaaactcggtatcaggagcgacgcgtttgacttcctgaccatcgggctcgcggtaaccgccgctgacacgttcgtactccgaagcgatgccgatgatagatggtgccgacgcctagagctgacggttcccctgatcgatcccaggccatggaacgccgtacgctcaatgctcgagagtgctctcaatttcttgagcggagaccactggacgctacggttcaaacgcggtggccctcgtccgcccagcaaggctgttcgagatcgtcgaaggatctttatcgacctttcgaaagcagaatgcgcctgcctcttttctggcggcctcgacagctacgttggagttctcgacctgctctccgaaggccgtcgcccaattcttgttagccatgcctataggggtgaccggaaataccaagccaacgtcgcaaccttcctcccgactttgtgtcctcggttcgcggcgaacgcgcatccgacttggaccggtgcaaccgagatcagcatgcgtagcagaagcctcaattttctgacctttggagtgttgacagctacggccattgcagaatttagaggactctcgcgtgtagacctcattgttcctgaaaatggacacatcgcactaaatccccctctgacaccacgtcgcattgggtcgcatagtacgagaactacccacccgttcttcctgaatgcgatccagcacattttggaaggggtcggtcttcccgtcgtcatcagcaatccgctgcggcatcagacgaagggagaaataatggcacggcatgcaacaacgacggctgacttcgagctggccgccgccggcacggtctcgtgcggaaaatggaagcggaagaacaagcagtgtggtcactgcgtaccgtgcctaatccgtcgggctgcctttcacgccgccgctatcgctgatgacacggaatatcgcgagccaaatctcttaaagatcgcaaacgatccgcagattcgtgacgaccttatctctgtcttgacggcagtctctcgttcgcgcaccttccggatagaaccttgggtaatgcaagcaggaccactgcctgaagacgagcaagaacgttccgcgtgcgtcgacgtattcaagcgtggtatcagcgagcttggcaactttctgcgggcgagtggcttcccttga

SEQ ID NO: 1208 - DNA, 1116 bp, BradyrhizobiumColbertium
gtggtgcccggcacgccagccgcagcgccgccgcccgacagagcgcaatacgcgccgcccacggtgaagccagccttccgcgccgcgccgacgatctcggccccgttgccgccgccgccgcgcccgccgcagcgtgacctgaccccgctcgcggtcggtgcaggcgtggtagccggcgccgtcatcggcgcgaccattgccgacctccacaaccagcgacgcgagaccgtcgaaggcggccgcaccatctacacagagccggaccgcatcatcatccgcgacccgggcgggcaggcctatgtccgcggcaacgatctctatcgcttccgctatggtgcccgcgacatccgcaccgacaccgtcggcggcgagacccgcacggtcgtgattcgtcctgacggcagcgagatcatcaccgtagtcggcgccgatggccggctgctgcggcgtatccgcagggacccccgcgggcgcgagatcgtcatcatcgacaacagctaccgcgatccgcgtgccgtcggcggcttctatgtggacctgccgccgccggtcgtgaacatgccctatgatcgctacatcgtcagcgctgaggacgcatcgccagacgtgatctacgcgaccatgcaggcaccgccggtgcagcggatcgatcggcgctactcgctcgacgagatccgctacagccccaatgttcgcatgcagatgcccagcatcgacgtcaacacgatcaacttcgagacgggatcgtccacgatcccgccggaccaggcggcccggctgcaggtgatcgcggacggcctcaaccaggcgatccagcgcaatccgcgcgaggtgttcctgatcgagggtcacaccgatgcggtcggcaacgaggtcgacaacctgtcattgtcggaccgccgcgcgcagtccgcagccgaattgctgacgcagcagttcggcgtgcctgccgagaacctgacgtcgcagggctatggcgagcagtatctgaaggaacagacgcaagggccgagcctgatcaaccggcgcgtcacggtccgccgcatcacgccgctgctcaacggcggcacggcctcgctgccgccgcccccgcccggcacggcgccgccgcgctga

SEQ ID NO: 1209 - DNA, 957 bp, BradyrhizobiumColbertium
atggccagatacagacatggtctgccgcagcacggcggcggcattttcctgaccgacggcggcatggagacaaccctcatcttccaccacgggctggaactgccccacttcgcggcattcgtgctgctcgacagcgcggatggccgcgcccatttgaggcagtactacgaagcatatctgcggatcgcccggcagcacgggctcggcttcgtcctcgacagtccgacctggcgcgccaaccctgattggggcgccaggctcggctatgatgcggccgggctcgaggccatcaacatgcgcgccatccgcttcctcgacgagttgcgcggcgcctgggagtccccccgcatgccttgtgtcatcaacggcgcgatcggtccgcgaggcgacggctacaaggccggcaacatggacgcggcggaggcggaagcctaccactcgggccagatcgcggccttcagcgaggcgggcgccgatatggtgactgcgttcacgctgaacagcatcaacgaagccgtcggtgtggtccgcgcagccaagaggcaggatattccggtcgcgatttctttcacggtcgagaccgatggtcgcctcgtcaggggagagacactgcgcgaggcgatcgaagcggtcgacgacgcaacggagcgtgcctgcgaatacttcctgatcaattgtgcgcatccaactcacttcgagagtgcaatcgcgaccggcgagacgtgggtccagcgcatccacggcatcagagccaatgcatcggtcaagagccatgccgaactcgacgaatcggagaccctcgacagtggcgatcccgcagatctcggccgccgttacctttcgctcaggcgcgcattcccgggcatgcggattctcggcggctgttgcggcactgatcaccggcatgtcgccgccgtttgcgaggcctgcctgccgtcagacgcgttgacggtgtga

SEQ ID NO: 1210 - DNA, 621 bp, BradyrhizobiumColbertium
atgggaaagggcgaagcgacgcgcgagcgcattcttgagatcgcggaagcggcggtgctcgcaaagggcttcggcgcgacctcgatcgacgaggtcattgcagaggccggcctgaccaagagcggcttcttctatcacttcagggacaagaacgcgctcgcacgggagatgctgcgtcgctacgtggagacgaatgatcgcctgttcgacgagatcttcaggcggggacgcgagctctccgacgacccgctgcaatcgttcctgatctcgctgaaactgctcgccgaaatcatggccgatctgccgaacggccaccccggctgcctaatcgccagcatctgctatcaggagcgcttgttcgaccgcgaggttcgcgatctgaccgcgcaatccgtccggagctggaatgcgcatttccgcgagattctcgacggcatcgctgccgtccatcggccccgcgagccgatcgacctcgacgatctcgccgagatgatctcgtgcgtggtcgacggcgcgatcatcatgtcgaagacgctcaacgacccgaagcggctggagcggcagatcctgctcttccgcagctgtgtgaagctgatcttcgcgccgcctctctcatcgtga

SEQ ID NO: 1211 - DNA, 1758 bp, BradyrhizobiumColbertium
atgatcaagacatcggcactcgcctccctcatcgtcctcggctggacctcgtcgctgtcggcgcagaccgtctacccgatcgatcgtgccgagatcctggccggagccaaattcgacttcaaggtcgagcttcccggcccggtcgatgcgaccaagttgaaggtgacgatgaacggcgcggattatgcgacggccttcggccgtgccgggactttcatcgagcgcgaggatggcaaggaccagtcggccctgatcctgcgcgacgtcacgctggccaggcccggcaacgttgtcgtcgacatcagcgacggcacgcgccagcgcagcgtcacatggacggtctacgacaccggcccgcgcaaggcgaagaatgtcatcctgttcatcggtgacggcatgtcgcccgcgcaccgggtcgcagcgcgaatcctctccaagggaatctcggagggcaagagccggggcaagctcgccatcgacgacatgccccatatggccctggtggcaaccgcaggctcggattcgatcatcaccgattccgcgaactcggccagcgcctatgcgaccgggcacaagagcgccgtcaacgccctcggcgtctatgcggaccgcactgcaagcccgctcgacgatccccgtgtcgaaaccatcgccagcctcgccaagaggcggctcggcatggcgatcggcatcgttaccaataccgaaatcgaagacgcaacgccggcggctatggtagcgcacacccgccggcgcgccgcctatgacgacattgtcgagcagttcttcgacgcgaagccggatgtgctgatgggcggcggcagcgcgaactttctgccgaagtcggtcgccggctcgaaacgcaaggacgagaccgactacatcgcgaagtttcgcgatgccggctatcaggtggcgaccaccgcgagcgaactcggcgcgtccgccgcaagacaggagaccaccaagctgctcggcctgttcgcgaccggcaatatggacggtgtgctcgaccgcaaattcctgaagggcggcggcgtcaggaaattccccgagcagcctgatctcaccgagcaggtccaggcggcactcaacatcctttcgaagaacgagaacggtttcttcctgatggtggaatccggaatgatcgacaaatatgcgcatctgctcgacatggagcgcgccgtctacgacacgatcatgctcgacaacgcggtgcgccagacgcgcgaatgggcgcgcgcacgcggcgacgacactctcatcatggtggtcgccgaccacaatcatcccaacagccttgtcgggacggtgaatgacgacatgggcaccgtgcccaatgttcccttgcgcgagcgcgttgcggtctacgacaaggccggatttcccaactatccggcgccggatgcggaaggttatccggcgcgcatcgacgtgagtcggcggctcgcgatcttctcggccagcctgcctgatcactacgagacgttccgtccgaagctggacggccccaaccagccgaccatcaaggcgggcgacgacggaaccttcaaggccaacgacaaatacaaggacgttccgggcgcggtgctgcgccccggcaatctttccgcgctgatcggcgccagcgtgcattcgggcgaggatgtcatcctgaccgcgactggaccgggcagcgagcgcgtgcacgggtcgatggacaatacggaagtgttccgggtcatggccgacgcgttgggattggcagcggggcaatga

SEQ ID NO: 1212 - DNA, 1338 bp, BradyrhizobiumColbertium
atgaccacgatcctgaaaagcctgcccaagggcgagaaagtcggcatcgcgttttcgggcggcctcgacacttctgcggcgctgctctggatgaagcagaagggcgcgcgctgctacgcctacaccgccaatctcggccagcctgatgaggccgactacaacgagatcccgcgcaaggcgatggaattcggcgccgagaaggcgcggctggtcgattgccgcactcagctcgtccatgaaggcatcgccgcgatccagtccggcgcctttcacatctcgaccggcggcatcacctatttcaataccacgccactcggccgcgccgtcaccggcacgatgctggtcgcggcgatgaaggaagacggcgtcaacatctggggggatggctcgacgttcaagggcaacgacatcgagcgcttctaccgctatggcctgctcaccaatcccggcctgaagatctacaagccctggctcgaccagcagttcatcgacgagctcggcggccgcgccgagatgtcggcgttcatgacggcgcaaggtttcgcctacaagatgagcgccgagaaggcgtattcgaccgacagcaacctgctcggcgccacgcacgaggccaaggatctcgaaagcctcgacagcggcatcaagatcgtcaatccgatcatgggcgtgccgttctggcgcgacgactgcaacgtcaaggcggagaaggtcgtggtgcgcttcgaggaaggccagccgaccgcgctgaacggccagaccttcaccgatcccgtggcgctgtttctcgaagccaacgccatcggcggccgccacggcctcggcatgagcgaccagatcgagaaccgcatcatcgaagccaagagccgcggcatctacgaggcgcccggcatggcgctgctccacgtcgcctatgagcgcctcctcaccggcatccacaacgaggataccatcgagcagtaccgcatcagcggcatgcgcttgggccgcctgctctatcagggccgctggttcgactcgcaggctctcatgctgcgcgagactgcgcagcgctgggtcgcgcgcgccgtcaccggcgaggtcacgctggagctgcgccgcggcaacgattattcgatcctcaacaccgagagcccgaacctgacctacgcgccggagcggctcagcatggagaaggtggaggacgccgccttcacgccggccgaccgcatcggccagctcaccatgcgcaacctcgacatcgccgacacccgcaccaagctgaagctctacagcgagaccggcctgctctcgggcagcgaaggctcgcagatcttccggctggagagcgatagaggctga

SEQ ID NO: 1213 - DNA, 777 bp, BradyrhizobiumColbertium
atgaaccggaccggactcttcatcgccctagcgctgtggctcgtgatcggcgtcgttttcggcctctatcccgaactcgatctcaagctcgcggcgcttttcttcgaccccgcaaccaggacgttcccgctcaagctgaacggctgggccggcttcgcgcgcgatgcggcgatgtggatcgcctgggcattcgccttgccctcgatcgtcgcgctcgtggtcaagatgatccggcccgaccggccgatgatggtgcggggccgtacggtcgtcttcctgctggtgacgatgaccatgtcggccggcatcctgaccaacctgacgttcaagacttactggggccgtccgcgtccggtggtggtgaccgagtttgccggcgatcagcaattcgtgccgtggtgggatccccgcggcggctgcggacgcaactgctcgttcttctccggcgagggggcgacggcattttggacgctcgcgccggctgcgctggcgccgccgccgtggcgcccgatcgcctatgccgccgcagtggtgttcggggccttgacgagcgggcttcgcatggccttcggtggccacttcttcaccgacgtttccatcgccggcctcgtcaccttcgtcgtgatctggttcgcctacgcgctgatttaccgctggccgcggacgaggttctcggacgaggcggtcgacgccgccttgacccggctgagctggcccggctaccggctccgccagcgcctgttcggccgcaagaccggtcccgagccctcggtttga

SEQ ID NO: 1214 - DNA, 495 bp, BradyrhizobiumColbertium
atgtccctgatcggccgtctcgtcgtcatcttcatcggcttcctcgccgcctgcttcgtcggcggcatgatcatcgtcgtcgcgctgctgtttccggaattcgccgatctgggcgcaggtcccgtcgaccagggcacgatcgatgtcctgctcggtttcggtttcatcttcgtctccggctttgcgctggtgccggcggcggtgatcgtcgcgatcaccgaagcgctctacatccgcagcgcgctcgcctatgccctcggtggcggcctcgtcgggctcgcctgctatctcggtctcgtccccttccatgccgacacgttccagttcgagggcatcgtgcggcggcatctggagatcatgaccggagccggcatcgtcgccggcgtggtctactggttgatcgccggccgcaacgccggcgcctggcgcaacccgccacccccgcggaagccgccgccgcccttgccgtcgaactcgaggccggatgcgcgataa

SEQ ID NO: 1215 - DNA, 153 bp, BradyrhizobiumColbertium
atgccatcaacgttcgtcatggccgggcttgacccggccatccacgtcgggccgcgattggaaaagtcgtggatgcccgggtcaagcccgggcatgacgaccgggggcctggtgacactgccggtcaccaattcgcttgcgccatgtccctga

SEQ ID NO: 1216 - DNA, 1221 bp, BradyrhizobiumColbertium
gtgatcctaggcgctttgatgcaaacctcgaccgagccgcgcaacgctatcctggtggagaagactccgctcgaaacctatgtgccgccggccaagccgtcgctgatcggcctgtcgcgcaccgagcttgccgatcgtctcggcgagatcggcgtcgcaccggcgcagcgcaagatgcgcgtgcagcagctctggcactggatctatttccgcggcgcccagagttttgaggagatgacctcgatttcgaaggggatccgcgccgatctcgcccagcatttcaccgtcgatcggcccgaggtcgtggccgagcagatctccaacgacggcacccgcaaatggctgctgcgcttgccgagcggcgattccgttcagaaggcgcatgaggtcgagtgcgtctacatccccgagaccgaccgcggcacgctctgcgtctcctcgcaggtcggctgcacgctgaactgttccttctgccacaccggcacgcagcgcctggtgcgcaatctcaccgccggcgagatcgtcggacaggtgatggtggcgcgcgatcgcctcaacgactgggccgatcgcgaggacggcacgcgccgcgtcaccaacatcgtgatgatgggcatgggcgagccgctctacaatttcgacgcggtgcgcgatgcgctgctcatcgtcggggacaacgagggcatcggcatctcccgccgccgaatcacgctctcgacctcgggcgtggtgccgaacatcgtgcgtgccggcgaggagatcggcgtgatgctggcgatctcgctgcatgccgtgcgcgacgagctgcgcaacgagctggtgccgctcaaccgcaaatatccgatcaaggaattgctgcaggcctgccgcgactatcccggcgcctcgaacgcccgccgcatcaccttcgaatatgtgatgctcaagggcgtcaacgattcgctcgacgatgccaagctgctggtgaggatgctcaagggcattccggccaagataaacctgatcccgttcaacccctggcccggcaccgcctatgaatgctccgactgggaccagatcgagaagttctccgaatacatcttcaacgccggctattcctcgccggtgcgcaccccgcgcggccgcgacatcctcgccgcctgcggccagctcaagtcggagaccgagaagctcagcgcgcgcgagcgccaggcgctgcgcgccatggcgatgacggattga

SEQ ID NO: 1217 - DNA, 651 bp, BradyrhizobiumColbertium
atgtggcgggtgctgattttagctttgatgactgtcgtcatggccgggggaatcgccgattccgcgcgggcgcagacggcgcccaagtctgctccaagagagacggcaccgaagtcggctgcgccgtccaatacgaccgccaaggcggccgcaaagcccgagagcaaaccgggcgggccacccgcgggcgttgcgggtggtgctgagccgaccttgatcgggcagttcggcacctggggcgcctattcggcgacgcccaacggcaagaaggtctgcttcgcgctggccaagccctcgtcgtcgaagaccaatccgccgaatcggccgcgcgatccggcctacgccttcgtctcgacccggccggcggagaaggtgaacaacgaagtctcggtcatgatcggctacgcgctgaagccgggctccgaatcgacggtcgaggtcggcggcgcatcctatgccatgtacacgcagggcgacggtctctggatcaagaacgcggccgaggaggagcggatggtcgaagccatgcgcaaatccgccgatctcgtggtcaaaggcgtctcggccaagggcacggagacgaccgacactttctcgctgaagggcctttcccaggcgctcgacaagatcgcgcaggactgtcggcgttaa

SEQ ID NO: 1218 - DNA, 840 bp, BradyrhizobiumColbertium
atgtttgaaacgggcctgctgaagaacaagcgcatcctcgtcaccggcggcggttcgggccttggtgccgcgatgggtcgtcgcttcctcgcgctgggcgccgaactcgtgatctgcggccgcaagctcgaccggctcgaggcgactgcgagcgagatgcgcgcgcagatcggcggcaaggtgaagacgatcgcctgcgatatccgcgatggtgccgcggtcgacgacatgatggatcagatctggcgcgaggcgccgctcgacatcctcgtcaacaatgctgccgcgaccttcattgcgcagaccgagcacctctccttccgtgccgcggacgccgtcctggcgccgacgctgcatggcgcgatgtattgcaccctcgctgcggggaggcgctggatcgaggccaggcgtggcggtgtcgtgctgtcgatcctctcgacgtcgaccatcaccggccgtgcgttcaccgtgccgtcggccatggcgaagtcggcagtgctggcgatgaccaagagccttgcggtggagtgggggccgaagggcatccgcaccgttgcgatcgcgccgggtccgtttccgaccgcgggggctaccgggcagctccgtcccgaaggccgcgacgacagctggacggcgcgcaacccgctgggccgcactggggagcacagcgagcttggcgatctcgccagcttcctggtctccgaccgcgccgcctacatcaacggcgagatggtcgtgatcgacggtggcgcgcatttgcgcagttccggcgccgaggatttgctcggctggaccgaggtgcagtggaccgagcaacgcgccgcgcgatccaaggcctag

SEQ ID NO: 1219 - DNA, 975 bp, BradyrhizobiumColbertium
atgaaagccatcctctgctcgcaatactgccagcctgacgatctcgtgctgacggaggtgccggatccggtggcaggtccgggcgaagccgtgatcgcgatcaaggccgcggcattgaacttcttcgacctcctgatgatccagggcaaataccagatcaagccgccgttcccgttctcgccggctgcggaagtcgcgggcgtgatcgagagcatcggcgcgggcgtgaccgatctgaaagtcggtgatcgcgtggtcgcatcttgcggccacaacggcgcgcgcgagaagatcgcattgccggcggcatcgatcgtgaagattccggacaatctcgattacgaccgcgcggccggcatcatcatcatctacggcaccgcgctgcatgcgctggaagatcgcgccagccccaagcccggcgagacgctcgcggtgctgggcgccgccggcggcacgggccttgccgcctgcgagctcggcaagctgatgggcctgaaggtgatcgcttgcgcctcctcggacgagaagctcgaattcgcgaaggcgcacggcgccgagctgacgctgaactacgccaaggaagatctgaaggagggcctgcgcaagctcaccggcggcaagggcgtcgacatcatcttcgatccggttggtggtgcctatgccgagcaggcgctgcgctcgatcgcctgggagggccgctttctcgtgatcggcttcgccgcgggcgacattccgaagatgccgctgaacctcgcgctgctgaaaggctgcgacatccgcggcgtgttctggggcgcctggacccggcagaatccggagaagaaccgcgtcaacctggaaaagctcgtgaagtggaccgcggaaggaaagatctcatcgcatgttgaccgcaccttcccgctggtgcagacggccgacgcgctgaaggtgctggcggggcgccaggcgatgggcaaagtgatcctgcatccgtga

SEQ ID NO: 1220 - DNA, 393 bp, BradyrhizobiumColbertium
atggctgccgagcacagcgtcggcttcgagccggccgatcggctcgcggaagatcgcgaaagcgtgcgccgccgcttctggcgcaagctgaagcgcgtcgccgcccaactgccgttcgcggaagatctgcttgccgcctattactgcgcgttcgaccggcagacgccgcggcacgtccaggcctccctgctcggcgccattgcctacttcgtcctgccgttcgacttcgtcgctgacgtgatgccgatgctcggcttcgcggatgacgctgccgtgctcgcggccgccatccgcatggttgccggccacatcacgaacgagcaccgcgacgctgcgcgcgctgcgctgaagcgtggggtggaggaggcggccggcacagcagaagtcgcgtag

SEQ ID NO: 1221 - DNA, 291 bp, BradyrhizobiumColbertium
atggcagagcggttgacggctgacgcgcgcaagcaggcgctgggcggaatcccgggctggaccgacgtccaaggccgcgacgccattgggaagacctttgtcttcaaggatttcaaccaggctttcggcttcatgacccgcgcggcgctggtcgccgagaagatggatcaccatcccgaatggcgcaacgtctacaagaccgtcgaggtggtgctgtcgacccatgatgccggcggcgtcacgacgctcgacatcgagctggccaaggcgatgaacgccatcgcgacctga

SEQ ID NO: 1222 - DNA, 1335 bp, BradyrhizobiumColbertium
gtgtctctggcgctcgtgcttgcgatcatcggcgcccttgccggcgcctattacttcgcaatgcgcccggtgacgctgaagatcgcggtggggcccgccaacagcgacgacgtcaaggtggttcagacgctgacgcaggcctttacgcagagcaagggccaggtgcggctgcgacctttccagaccgacggcgcgaccgccagcgcggacgcgctcaaggaaggcaaggtcgatctcgctatcgtgcgcggcgacgtcgacgttcccaagaacgcgcaagcggtcgcgaccctgcgcaagaacgtcgtggtgctgtggtccgtgcccggcaaaggcaagaagcggggtccgaagatcaccaagatcgcccagctcgccggtcatcgcgtcggcgtggtgggtcgcacccaggccaacgtcaatttgctcagggtgatcctccagcaatacggcgtcgatcccgccaaggtcgagatcgttcaattcccggcgaacgaagcggccgaggcgatcaaggcacaaaaggccgacgtctatctcgccgccggccccgtcaacagcaagattacggcggatgcgatcgccgcctccaccagggatttcggcgcccctaccttcctcgccatcgattcggcagacgcgatcgcgcaaaaccatccggtctacgaagcgtccgagattcccgcaggcgcctatggcggctctcccgctcgcccggacgacgaggtcaagaccatcagcttttcacatcacatcgtggcgcgcagaggcgtgcccgaaagcaccattgcggcattcacgcgccagctcttcgccgtgcgccagcaacttgtgaccgagttcccgctggcggcaaagatcgagacgcccgacaccgacaaggatgcggtgatccccgtgcatcccggcgctgcggccttcgtcgatggcgaggagaagaccttcctcgacaagtacagcgattacatctggtggagcctgatggcgctgtccgccatgggctcgatcggcgcctggttcgccggctatctcaagaaggacgagcgcgacaacagcaaccaccagcgcgaacgtctgctcgacatgatcgctgcggcacgcaaatgcgacacgaccgaagagctcgaccagatgcagaccgaagcggacgacatcctgcgcgatacgctgcgctgcttcgaccacggcgcgatcgaggaagcagcgctcaccgccttcaacatcgcgctcgaccagtttcacgccgccgtcgcggaccgcaagacggtgctgatgagcctgcctcagaacctgcaacgcgcaggcgcgcaattccgggccgccggcaacgcgtga

SEQ ID NO: 1223 - DNA, 156 bp, BradyrhizobiumColbertium
gtgagcgcttgcgcgcgcaattgccgcgtcacattgtctcaatatagcgttcgttaccatccggggcgatgcatcagcatcgaacccggaatctcgatactccccggtgcgcaattgcgcacccaaggtccagcccttcggatcatcccggactga

SEQ ID NO: 1224 - DNA, 180 bp, BradyrhizobiumColbertium
atgaacatcaaattctcgcgccgccgctttctcgccaccagcgccggtgcgctcggcacgattgcaatgccatatctttcgcgcgcagccgatcggccagcggtcactcacggcgtacagtctggtgacgtcacggccgacggcggcatggtgtgggcgcgcaccgatcgacccgcgtag

SEQ ID NO: 1225 - DNA, 1362 bp, BradyrhizobiumColbertium
atgctggtcgaggtggcgacgacggatacgttcagggatgcccgtgcgctgccgccgatcgcggcgctgcccgagagcgacttcaccgcaaagatgctggttgaaaatctccccgccggccaggacatcttctaccgcgtccgcttccgggatctctcgcacagcgctgtcgagggcgcgccggtaaccggccgcttccgcaccgcgccggccgaccgccgcgacgtcagcttcgtctggggcggcgacgtcgccggccagggttggggcatcaacccggatgacggcggcatggtcaccttctcgacgatgcgccagcaccggcctgacttcttcctgcattccggcgataccatctatgccgacggtccgatccaatccgaggtgaagcttgccgacggcaagatctggaagaacctgacgatccccgagaaggccaaggtcgccgagacgctcgacgagtttcgcgccgcgcacaaatacaatctcgccgacgacaacctccgcgccttcaatgccgaggtgccgatcttcgtccagtgggacgaccacgaggtcaccaataactggtcgctctcgaaggagctgccggccgcctacaagctgcgcgacatctcgctgctcgccgcgcgcggcgcgcgcgccttccacgagatgtacccgatgcgcgagagcatcactgagcccggccgggtctatcgccagatctcctacggtccgcatctcgacgtgttcatgctggacgagcgcagctatcgcggccctaacggcgccaatctcgaaaccgcttacggtcccgccagcaatttcctcggaccggaccagatcgcctggctcaagcgcgccctcctcaattcgcgcgcgacatggaaggtgatcgcctccgacatgccgatcggcctgatcgttagggacacgccgaagggcggctcggaggccatcgcgcagggcgacggcccggtgcggggccgcgagttcgagatcgccgagatcctgcgtttcatcaaacttgcaccgatcagcaacacggtgtggctgaccgcggacgtgcattatgcggccgcgcatttttacgaccccaaccgggcgcagttccaggatttcgacccgttctgggaattcgtctcaggcccgctacatgccggcacgttcggtccgaacacactcgacaacacctttggcccggaggtgcgcttcgtcaaggcgccgggcaaagacagccagaacctgccgccgtcggccggcatgcagttcttcggacacgtcaagatcgacggcgcctcgggccagatgacggtgaccctgcgcgaccgcgctgacgttgcgctttggtcaaccacgctcgatccgaagcagagctga

SEQ ID NO: 1226 - DNA, 333 bp, BradyrhizobiumColbertium
gtggaggacgatccgatcatcgccatcgatttcgaggaccgtcttctcggcttcggggtcagcggcgtgcggaccgtcggttcggtgacgcaggcgctggacgccatcgcgaagcgtacgccggatttcgcgctccttgacgtggagctgatccgcgagacgagctttgcggtcgcccagcggctgatgacgttgaaggttccgttcattttcgtcaccggctacggtgccgaggcgcgaattccgcccgatctggcgggccggccgcggttgcagaagccgtgttcgagcgaggcgctggaagcggcgattcaggcaggcgccgccgactaa

SEQ ID NO: 1227 - DNA, 765 bp, BradyrhizobiumColbertium
atggatgcgcgtaccggcaaggtcaccgaggtcgagagccggccggccaacaatctgctgcggcgcttgagcccggcggactacgccctgctggcgccgcacgtgatagtggaggacgccgcagcgggccagttgatctacaatccgggcgatgacgtccaggtcgtccactttccctgcgggccgtcgctcgcgacgttcctcgtgcccaacgaggacggccgcgacgtcgaaaccattctggtcggccgcgaaggcgcggtaggcgggatcgtcagcgagggattcctgccggcctatacccggatctgcgtaaagttcggcgggccgtttgcccgcattcacgttggcaagctggaagcggccaaggttcgctcgtcctcgctgcgcaacatcttcgcccgctatgccgattgcatgctggcccagatcttccagtcgaccgcctgcaacgcgatccattcgatagagcagcggaccgccaaatggattctggccgcgatggagcggaccggcgacgaaaccagcgtgccgctgacccacgaacagctcgctacgctgctcggcgtcggccgcagctacgccagccgcgtgcttcagtcgttcaaggctgaacgaatcctcgacaccaggcgcggttcgatcctggttcgcaaccgcgacggcctgaagcttcgcgcctgcctctgcaacgaggccgtaaaaatgcacttcgaagaggtgctgcgcggcgtctacccgaccgaggagcgggaggccgggtag

SEQ ID NO: 1228 - DNA, 717 bp, BradyrhizobiumColbertium
atgggcggggctttgcttcacattctcttcgacattgccgcgtggctggcggccgcggcggctgtctactggctgacgcgacaaggcttacggtttccggcgcaatccttcgagctgccctacatcgccgcgctggtgttcggcgccggcctcggcgcctatctgttcggctccgccaatctctggttgtccggtcagagcggcattgcgcgctcggtcgagggcgcgctggccggcggcatcgtggccatcgagctctacaaatggttcgcagggatcgcggtccgaaccggagcccggtttgcgctacccctggcactcggtatcgcgatcggtcgtctaggctgctacttcgcaggcctcgaggatttcacctacggcacgccgacgacgttgccattcggccatgatttcggcgacggcgttctccgccatcccgtgcagctctacgagagcgcggccatggccgcatttgcgctggcctatgtgctggcgatcttgaaccgggagacgttcacggtcacaaatggtttctacctggtgctcgcctattacggagcgcaacgcttcctgtgggaattcctcaagccctacggcacgctgatcggccccctcaccctgtttcatctgctgtcgctgttcatcctgctctacgccgccttcatgctggcgacggcgcccaaagcgagacccgtgcatgaacgcgccgctgcgtaa

SEQ ID NO: 1229 - DNA, 336 bp, BradyrhizobiumColbertium
atgcagatgctggagctgcttggccttacagcggtcgccgacaagctgcccgacgaattgtcgggtggccaagcgcagcgcgtggcccttgcgagggcggtcgtcctcaaacctcggctcgtcctggccgacgagccgaccggccaattggatcagccgaccgcacgccaaaccatcgagaccttgctcaattcaatcgatgggagcgatgccgcattagtcatcgcaacccacgatcccatggttgcggaacggatgaaagtcacctggctcatggaccacgggacccttcgggcaccgcaaatagggtgtgcaaatgatcaagctgtggcttaa

SEQ ID NO: 1230 - DNA, 2568 bp, BradyrhizobiumColbertium
gtggggctgctgggcgcgctgggggcgttcatcgtcgcctcctcggagagcatggcgcggcgtgcggtggccggcgtgcccgtcgattggcaggtcctgatcgctccgggagccgacgtcgcagccgtcaccaaggcggtcggcgaggctgcgaccacaacggcgctcgcacctgtcggctatgccgacagcgccggcttcgcggccacgaccggcgatacctcgcaaatgacgggaccgggcaaggtgctcggtcttgaggcgggctatcgcaatcattttccagatcaaattcgttccattctcggctcagcggacggcgtgctgatcgcctcacaaaccgccgccaatcttcacgtcgctcctggcgataccgtcacgatcgaccggatcggtgcggcgccggtcgacgtcaagatcgccggcgtcgtcgcactaccgaacgccgactcgatgttccaggcgatcggccttcccaagggcattgctcctcaggcgccgccggataacgtcctgctcatgcccatggccgagtggcaggccatctttgatccacaaaaggcggctcggccggacacggtgaagaccgaaattcatgttcagctcgcacgcaatgctttgccacccgacccgagcgcggcgttcatccaggcacagcggctggccaataatcttgaagccagagtcgccggcagcgcggtcatcgccaacaatcttgccgcacggctcgacggcgtgcgtgctgacgcgctctatgcccgggtgctgtttctctttctcggagttcccggcatcgtccttgctctcctggttacgcttgcggtcgcggcgtccggctcggatcgccgccgccgcgagcaggcattgctccggatacgtggggcatccttgttgcaggtcttgggcttagccgggaccgaagccgcagcgatcggactgctggcgatcgtgctaggtcttgctcttgccggcacaacggcaattgcctggtggcatctcgcagaccttcgtctcgcaatcccgtggttcgcgttggccgctggcgttggctttgttctcgccatggcagcctttctggtgcccgcttggcgcgacgcgaagctcttgacggtatcggcggcgcgcgtcgacgctaatcaacagttcccgctctggcagcgactttatctggaccttgccttcatcatgctgggtgccatcgccttctggagcacggcgaagagcggctatgagatcgtcttggcgcctgaaggtgttgcgcagacctcggtgcactacgaggcgtttctcgcgccactgtgcttgtggctcggcctcggtctcttgtcggtacgattatacaggctgatgcttggacccggccggcgtgctgtggcagttgcgatagcgtcaatgtcgtacgacctctctccgctggtcgctgcctcgttatcccgccagcgcctgcgcattgcgcgcggaagcgcactggtcgcgcttgcattcgcgttcgccacggccaccgcgattttcaacaccacctataacgcccaatcgcgcgtcgatgcggaactgaccaatggcgccgacgtcacggttaccggaacgtcgacacatccggccggcaccttgctgaaggaactgcaagccattccccgagtcgtcacggccgagccgatgatgcaccgctttgcctatgtcggctccgacctgcaggacctattcggaatcaaccccgcccatatcgggaaggcgaccacgatttcgaacgcatattttgcgggcggaaacgccgccgagactctcgcccttttggccgggacgcccgatggcgtcctcgtctcgcaggagaccgtcaacgatttccaactgcagcccggagatcgattgaacctgaggctgcaaagtgccgccgatcatcaatatcacgtcatgccattccggtttatcggcgtagcccgggagtttccgacggccccgaaggactcgtttctcgtggccaacgcgaactacatcgcagagaagaccggatcagatgttgccgaagtggtcctaatccggacctcagcgaatgccgagagtgttgcggcggcagcgcgccagaccgctgcgtcactgccgggcatgaaggtcacaaccctccgagagacccaggccctcatcagttcgagcctgacggcaatcaatcttcagggcctcaccaccctcgagctcggattttctgtcttgatgatcgtgggcgtcacggggctgatcatggcgctgggtctcgctgagcggcgacgtaattttacgattctctcggcgctgggtgcgcggccgggtcagcttggcgtctttctatggagcgaagggctcttggtcgtcatcggaggcgcgatattaggcatcgtggccggttttggccttgccgaggcgctggtcacgatcctgaccggcgtattcgatccggctccggaagctctttccattccctggctttacttggcgctcgctgttgcgatggcactcgcctgcggtgccgccgccataggcggcgcgcaggcactctccaggaagcccgaccttgaagccctgcgtggcggctga

SEQ ID NO: 1231 - DNA, 672 bp, BradyrhizobiumColbertium
atgttgcgatggcacaatgcggtgatgatcggatctatcggcctgtatctggcagctcgccattacggctggaattttgcctcctatcctgcgggcgtttggtacttcaatccgcttacctggcagttgctctttgttttcggagcttggctggcactcgggggagctgcggcgaatcgagggcttctgcaatttcgcagcctttacgtcctgagtatctgcttcgtcctgtttgctgtcgccatcacgctggctgagcggattcccgaattgcggcagaccgttctcgacgcgatcgcagagacattcattccgaacgacaagacgaatctggcgccttaccgggtgatccatttggtgagcctgatgttcatcgtcgtctcgctcattccggtcgattggccagggctgaaatggccgatcttcaggccgatgattagatgcggtcagcagtcgctgcctgtattttgcgttggcctgttcctgtccttcatcgcgcacttcgtgctggagttcgcgtcagtgggagtagcggcccagctcctggtcggtgccgcaggtctttggatcatgaccatggtcgcgtactatcgggcttggtcgaaggaggtcgacaagggtctgccttcgggcggcaagttgccgaaaggagaggctcgggctgagccataa

SEQ ID NO: 1232 - DNA, 135 bp, BradyrhizobiumColbertium
gtgcgttatcgatcaggtttcgagaagtatcgcaaaggcgacgggttcgccacgcacccggttcgtctcgatccgcgcgaaacccaggtcgatcgagcggttctgggccgccgggcgcagatcggcgacccttga

SEQ ID NO: 1233 - DNA, 168 bp, BradyrhizobiumColbertium
gtggacctaagcctgttgcggcaaaacgatgctgtcatcctggaggtcgccgataccggcccgggcatccctgcttcggaaatcgaccgcatctcgaaccgttctttcgtggaagtcgctcgcgaggtgatggaaccggcctcggcctttcgattgtgcgtcgtgtag

SEQ ID NO: 1234 - DNA, 156 bp, BradyrhizobiumColbertium
gtgaagtcgctaaagctgcccttcgctctcgaagcttttgctatactgtacgtcgtccgttcccgcgatgatcttcttgagctcggcctttcgctcgaggtggggcagcttccgaatgtcgcggccgttcagataggggaggccgaaggctattag

SEQ ID NO: 1235 - DNA, 270 bp, BradyrhizobiumColbertium
atgggcgagatcgttcaatttgtccgtctcgggaagagatcggccgagacgccagttcttcaggctccgtttgattcgattgcgtcgcccgccgcacgctcgaaggaggcgctcgtcaatattctacgacatatgaaattgcagcacgaccggcttgatcaggtgatcgaggcagtgcgtgacgagccgacacgtctgcgctttcggcacacactgcgcgtgcttcagcagcagattgaactggttactgttgccgcgaagcttatctga

SEQ ID NO: 1236 - DNA, 183 bp, BradyrhizobiumColbertium
gtgcagcaagcggcgcaaggcacgcaccaagtggcttcaagcgtcacggaggtgcaacgtggcgccagcgaaacgggctcggcgtcgtcgcaagtgctcgcctcggctcagtcgctctcgtctgaaagcaaccggctcaaggtccaagttgcggagtttctcgaaagcgtgcgagctgcttaa

SEQ ID NO: 1237 - DNA, 144 bp, BradyrhizobiumColbertium
atgtcggaggcgcttctcaagaacacaaaggatacagacactgccaaggaagcgcgcaagaccctccagcagaatgaaaaggatttgaaagagcttcaagcaaaaatgaagaaggaagagaagaaggaggataagaaaggctag

SEQ ID NO: 1238 - DNA, 675 bp, BradyrhizobiumColbertium
gtgaggaaagtcttaactgcggcggctctgctcgtcatcggcgttgcaataggagccgttttgtttatcacatcaggcacatacgacattggcgccgatacgccccactgggcgcttacgcgacagatcatggaggtcacgcgcgagcgctcaatcgcggctcgcgcgacgtctctcaccataccgaatctatccgacgagcaacggatactcaagggagccgggcagtatgccgcaatgtgcgtaaactgccattcggcgcccggcaaacccgataccgaattgggcgaggggctgtatcctaagccaccgaatctctatcaaatgagcttggatgccaagacgatattttgggtgacaaagcacggaatcaaaatgacgggaatgccggcgtgggggcggacccacgatgacgatacgatctggaacgttgtggcgttcgtcatgaaattaaagggaatgtccggcccacagtacgaagacatcgtcgcgaaagctccacctgacgatgacatgcaagacatgcccaatatgcaatcgcaaggtggacccgaaaagcccaacaaggcatcgaccggcgaagctaacaagccaacgagcgaagccaacaaatcgtccagcgaagcaaacaagcctatgggtgaagcgaacaaaccggcggggcaccagcactga

SEQ ID NO: 1239 - DNA, 393 bp, BradyrhizobiumColbertium
gtgcccgcagacgcgccgcttccgttcacgcacgaggcgttcgatacgatcatctgcaatttcgcgctgcatcggctcatgccagcaaacaaaattgcattgctgcggggtcttgcgcccttgttgcgcgccgacggtcgtctccatgtcgtcgagctggaccggccggcctcagtccgagagggcaagatgctcggttttgcagccctgctttggggaactgacgctgttgcgccgcattttgatgacacctggcgcaaatgcctgcctccagcaggcctgcgagtgcttgcgcatgatcggtcattttcgatcgtcgcgggcagagtttcggtcatagtggccggccacaagcgcagcggcgctaaaccgatgcgaagaactcaaagataa

SEQ ID NO: 1240 - DNA, 1110 bp, BradyrhizobiumColbertium
gtgaggcttgatctgtttcgcgggctggcgaactggacgatctttctcgaccacatcccgaacaatgcggtcgcttggctaaccaccaggaactatggctttagcgacgccgccgatctctttgtcttcatctccggctacacggcggccttggcctactccaaagccatgcgccgtgacggcttttgggcaggtgcagtcaaactgatgcggcgcgtctggcagctctatgtggcgcacattctcctatttgtggtctacgtcgccgccatcggctgggtcgcccaaacctaccgtcattctcacctcttggacgaattcaacgtcgccggtctcatcgccaatccgattgaatacctcactgcgggattgctgctaaagttcaagccgttgaacatggacgtcctgccactttacatcgtgctgatggcggtttttccggtcgtgctccgcgcgatgttggcgaggcccaacacgacgctcttttgctcgctcagcctgtacgtttttgcgcgcctcttaggctggaatctgcccgcttggcctgagggcgtctggtatttcaatccgttcgcctggcagctgctgttcgtgcttggtgcctggtgcgctctcggcggcgcgaagcaattacactggttgctaacctctccggccgtactgaggttctgtatcctttacctcgttttcgcactcattggtagcactgccgcaaatctgggtatgcaatcatccgccctcgcctggttgtcagatggtttggccatcgacgacaaaaccaatcttgcgccgtcacgtcttctgcatttcattgcgctggctgttcttacgatcagcctggtccctcgtgaccgaccctggcttcgcagtccgcttcttcgcccgatgatgctctgcggacgccgatcgctggaggttttctgcgtcggtattttcctgtcgttcgtcgctcatttcttgctcgaactcatctccaattctttgctgatgcagatcgcggtgagcatcggcggtatcgcccttctagctgctgtcgcctggctgagatcttggccggccaagaataactctccgggtccaggcccctccagcgctggcgcaatccaatga

SEQ ID NO: 1241 - DNA, 117 bp, BradyrhizobiumColbertium
gtgccaaatctgcgtgccgaccgcggcgatgaactgcatgacgaatataccggtacgagcggtgcaggtgcgtgctggcaggacgccggctggcgacggccgggacgtgaggcttga

SEQ ID NO: 1242 - DNA, 348 bp, BradyrhizobiumColbertium
atgaacaacgcttcgaccaagctgatggacgaggatttgtcgacctgcgtcgacgacggcctgcgctgctaccggacctgcctcgacacggacgtgaagcgcggcctggccgaagaggcgaatagaatcgcggcgaagcacattcggctgatcttgacatgtgccgagatgtgtcgcaccgccgcacacctcatgctgttgagatcgcctcaccaccgccaactttgcgaggaatgtgcggcaatctgctcggagtgtgcgagggaatgcgaacgtgtcggcggcatggacgaatgtgccgaggcttgtcgtttctgtgccgatagctgccaggcgatggcgatctga

SEQ ID NO: 1243 - DNA, 1704 bp, BradyrhizobiumColbertium
gtgcttgccgacaaagagccgcgtccgggcgagcatgagcatttcacctcgccgctgtggaaacagggcatcggcagcacgatccattgtgtcgctggcgatgcgaccggaatcatcctggcggcggccgtcacagcctctctgggattgccgatgtggatcgacctgatcgtcgaatacatcgccggcttctctttcggactgttcattttccaatccctgttcatgaaaaagatgatgggcgggacctactgggaaaacgtccgcaagagttttatgcccgaatttatcagcatgaacgccatgatggcgggcatggcgccaacgatgagcctgctgatgatgggccgcgacatgcgcgcaatggacccgctcgaattgatcttctgggccgtgatgtcgctcggcgtcatggtcggatttgcaaccgcccatccgtttaacgtctggatggtgaagaaaaagatcaagcacgggctgatgaccgagcgggatgagggcgggcaaggcggtcctcggggtcacgaagggcatggggaggcaaaggctccatcagccgccgggggccatgcggggcatggagccggacagcagatgaccagcgacgccaccacgcctcaactggcggcgctcgcaggcgtgacatcgttcctgctgatttcggggatggttctgccgggcttctcggtcaatcttcggctgagcttgcgtgacgtcgatgcctccatcatgccgcctggcatgatcaacacgttcgaccttccgggcgaagccatgaaagacatggcggccgtcaagcctaggaaagtgacatatgtcgcgccgaaagacgccaaaggagatcaaatccttcaaccgcgcatcgagaacggcgtcaaggtcttcgatatcgaagcgtccgtcatccgatggaatatactcccggacgtcgcagtggatgcctacgcctacaatcggcaggtcccgggaccacgactgcaattgacggagggcgatcacgtccggatcaacctccgcaacgcgctgccggagagcacgacgatccattggcacggtctgatcatccccaacgaaatggatggacccgcaaaaatcacgcaagatccggtgccgccagggggctcctatacctacgacttcgaggtgggccagagcggcacgtatttctaccatagccacgatcatccagaccggcagcaggcgctcgggctttacggtgcgctgctcatctcgccgaaggatccgtcgacggagattaaggcggatctggactacaccatccagcttcaggaatggctgaagcgggagtggttgacctatccggccatgctgatggaaggcgcactgccgaactatttcacgatcaacggcaaggcctatccgtcgactgacaccgtcgccatgaaggtcggccagaccatcaagctccgcttcatcggcaccaacaacaacttcgtgcacccgatgcatgttcacggcgggccgttcgaggtcgtcgcggtcgatggcgtcaacctaaaggacagcgcgcgctatcaggccgacaccgtcaacgtcggtccggggcagcgctacgacgtagtatggacggcgcgaaagcccgggaagtggctggtgcactgccacattccacatcacacggccaataacaacgtggagcagcatggcggcggcgggctgatgctggttctcgacgtgcggtag

SEQ ID NO: 1244 - DNA, 486 bp, BradyrhizobiumColbertium
atggtctgcgaacccggcggcatctactcattcgaacgatgtgtggtcgccgtcgccggcaatgccgttgtgggaatggccaatgcatttccggcgggcctcattcacaacgagtatcccgtccgcagtccgacctctcgcgatgttctgctcaagccccggttcgagctgaacgattggaaaagctatctcctcaacaacatctgcgtcggccccgaccatcgtcgtgagggcgtcggaaccgctctgttgaaggcggtcgtccgcgacgcaagacgccaggggcacgcctctctaacgcttcatgtatgggcggacaatcacggtgccgtcgccttctatcgaaggtttggctttcgtcaacgcggccgcgccccgattccatggcacatcgatttgccacacgagggcggaagtttgctcatgaagctgccgctacgtactgtccccgatgtgcccgctttccaagacgaggatcacccatga

SEQ ID NO: 1245 - DNA, 792 bp, BradyrhizobiumColbertium
atggcgccgcgcgaactccttgtgcgattgaatgaggatgcgctgtttgccatgccattctgcgatgcgtattggagcaggctacttaattgcagctatcactacgaacaagagatcgaagcgcttttacgtgtcgcacgccatgatcgctatacctttgtagattgcggtgccaattttggctattggtcgatccttgcgtcgagccgcgcttttggtgtgcaacaggcgattgcaatcgaagcatccggaccgaatcttgggcagctcaagcgcaatgcagaactgaatgggaatcgctttcgctacttgcatgccgccctcgcaggccgaagcggcgactttgtccgtattcacggcgctagacatgaaaagttcgcaaccgttccgctcgcacgagcagagccggggtgcgtcgagacagtgtcgcttgacggattagccgaggccgggctgatcgacgcgtctgttccgcttgtcatcaagttggacgtcgaaggcgtcgagatcgaggcgttgcgcggcgcgcgcggtttgctcgcgggtgattgcctcgtgatttgcgaagagcatggttctgataagacgcatgccgtgtcgcgctatctggcggaacagacttcgctcgagcgttttatcttcgacgaggacaatggcgtcttcatgcagcttgatcaactcaagggtcttgcacgaatgaagaagcatagctgggtcggatacaacgtcttcgcgacctcgagcgaacactggagcaagaggcttctttccgcaagctggccacccaaatga

SEQ ID NO: 1246 - DNA, 306 bp, BradyrhizobiumColbertium
atgaaacggaacaagctcgcaatgaccgcgcttgcgctgacgctcgcatggtcgtccaccgtcgcattcgcgcagaccgcgatggtcaacggcgaagtcaagaagattgatgaagccgctggaaaaatcacgctcaagcatggtcccatcaagaacctcgatatggacgatgatggcatgacgatggtgttccgtgtccaggattcgtcgatgctcaagcaggtgaaggtcggcgataaggtccagttcgaagccgaacgggcctcaggaggcatcaccatcaccaagctgcaaaaggccaaatga

SEQ ID NO: 1247 - DNA, 291 bp, BradyrhizobiumColbertium
atgagaagcctgaagattgccgttctcctgaccttgatcgtccctttcgggtcggcattcgctgacaaccccgtggtcaagggcgaggtcaagaatatcgatgctgccgccggcaaaatcactctcaagcacggggcgatcaaaaaccttgaaatggacgcaatgaccatggtgctgcgcgtgagcgatcccggcatgctgaagaacttgaaggttggcgacaaggtcaggttcgaagccgagcgggccccggagggagtgactatcacgaagatgcagaaggctaaatga

SEQ ID NO: 1248 - DNA, 531 bp, BradyrhizobiumColbertium
ttgggaaacaaggccgcttcaaccaacaacacggggaacaagatcatgaaacacgcaacgctcactttgatcgctttcgccgcggtgacgtccatctccgcaaccgcttgggcaggcgaaggtcctaagggccacagccacgacgaatcgttttcggccggcgaacccggcgatcctcagaagccggcccgcgccgtgcaggtcacgatgggcgagatggacggcaagatgatgttcatgccgacgaagatcgatgtgaaaaagggcgaacagatcaagttcgtcctgcgcaacaacggtgaactcgaacatgaattcgtgcttgccacgaccgccgagaacctcaagcacgccgaagccatgaagaagaaccccgacatggagcacgatgatccgaacgcaaagcggctcgcgccaaaaaaggccaacgagatggtctggaagtttaccaaagccggcgagttcgagtattcgtgtctgattcccggccatagggactctggcatggtcggcaccgtgaccgtgaagtaa

SEQ ID NO: 1249 - DNA, 1374 bp, BradyrhizobiumColbertium
atgctatcccgaagaggtcttttgacagctaccgccgcgatcagcgcaagcgctgtcagcgggcgggttcaggccgcgagcattcccgaagcgccgaccatggacaaagccgtgatgcagccgccgctgcgtccctcgagtggacccgattacaatccggtcgtcactctcaacggctggacgctgccttggcgcatgaacggcgattggaaggaattccatctcgtcgccgagccggtcgttcgggaatttgccgaagggatgaaggttcatttgtggggctataacggtcaatcccccggccccaccatcgaggcggtcgagggcgacaaactgcgcattttcgtcaccaacaaactcccggaacagacgaccattcattggcatggcgtgcttttgcccaacggcatggacggcgtcggcgggctcaatcagccccacattccgccgggcaaaacctttgtctacgaattccagatgaagcacagcgggacgtttatgtatcatccgcactcggacgaaatggtccagatggcgatgggcatgatggggatgatcgtcgtgcatccacgcgatcccagtttccgcccagtcgatcgcgacttcgtgttcatcatgagcacctatctcgtcgatcccggcacgtacctgccgaagatcacggagatgaccgacttcaatatgtggacctggaacagccgtgtgtttccgggcatcgatccgctggccgtccggctgaacgacaaagtgcgggttcgcatcggcaacctcaccatgacgaaccatcccatccaccttcacggacatagctttgccgtaagctgcaccgacggaggctgggtgccggaaagcgcgcagtggccggaaacgacgatcgacgtaccggtcggtgccatccgcgcttttgatgttgtcgccgacaatcccggtgactgggcatttcactgccacaagtcgcaccacaccatgaatgcgatggggcacgatgtgcgcaatttgatcggtgtgtcgaaaaaggatctcgcaagagccgtcggaaagctcgcgccagatgcgatggtgatgggatcgaccggcatggcaatgggcgaaatggagatgccgatgcccgataacaccttgatgatgatgaccggctccggtcaattcggtccgatcgagatgggcggcatgttcacggtcatgaagatacgtgaagacttggcgcgtgacgattacaaggatccgggcccctacaaatatcccgccggtaccgtctcctatgaggtcgacgcgccgtcgcagccccctgttcgcaaggacaagccagcgggggctccgaaagagggcgacatgaaggctatgaaaggcatgaagggaatgaaaggcatgtag

SEQ ID NO: 1250 - DNA, 348 bp, BradyrhizobiumColbertium
ttggtgacggaaaaagctgtcaacgtccgctccgaggcgcgagaggcctatcgagtctatcgatcgagttacgatatcgcgggccattatcaacgcgaagtcttgccgctccggaaaatcatctcagacgagatgcagctccgcttttcgagcatgcaggtcgatattttcacggttctgcaagaggcccgccagcggctggtggcgatgcgggccgcgattgaagccaaacgagagttttggctggcaaaggccgaactacaaacggccgtcaatggtgggggcagcgcagagacgcgtcggcagacacgtccttctatcacgcaagcgaacgcagctaccaactga

SEQ ID NO: 1251 - DNA, 918 bp, BradyrhizobiumColbertium
atgaccggcccgttgcttgattgcatcgtcgtcggtggcggtccggccgggctgactgctgcactttatctggcgcgatttcgacgcagggtctgcgtgattgacgcgggcgaaagccgagccgcatggattccggtttcacataatcagccgcttttccctgccggcatcagcggcacagagattttggggcgcatgagagagcatctcacgtctttgggcagcgaaatcctagccgacaaggcgatcgctcttgcgcggatcgaccagggatttctggtcgaactcgccaaagaagctgcagcggcgcggacgcttcttttggcaacgggcgttgtcaatcaccagcctgacatgggtgcgcagatccaccgcgatgccgttgcagccggacttatccgctattgtcccatttgcgacggctttgaagccaaagaccaaaaaattgtcgtattgggcagggggccccacggcgtacgcgaggcgttttttctgcacacgtacagccaggatgtaacgctcttttgtgatccttcagcaatagatgaccgcagttcgacacagcttgcagccgcaggcatttcgctcatcaaacagcccgtcgcttgcctgaccgtcgatcaagccaaaatactcatccaaaccgcgtccggcgcgcgcctccggttcgacaccctctatccggcgttgggctccagcagcaacacggacctgtttttgtctttgggaggttctctctcaagtcagggatgcattcccgtcgattcgcatcagatgacgaatgtggagggtctttacgctgccggagacgtggtgcagggcctcgatcagatcagcgtcgcctgcggccaagccgccatcgccgcaactgccatccataatcggctacgcgatcttgacggcttcggcgatccctag

SEQ ID NO: 1252 - DNA, 255 bp, BradyrhizobiumColbertium
atggacgaaaagcgcgacgaatttcgatcccgcgtgttgaaggccgcaaccattagatttggcaatggtggtgccatcagctgtgttgtccgcaacatgtcctcgcgaggggccgcactcgacgttgagagctcgctcgacatacccgacaagttcgagctggtcatcgatcgggatggaggccgttatcagtgccatctggtctggcggaaagcaacgcgcatcggcgctcgcttccagcctggagcgaagtga

SEQ ID NO: 1253 - DNA, 423 bp, BradyrhizobiumColbertium
atgtccgtgttccacaaatcatcgcagcgcttggcaatcgccagcctcttcgcaatgacgattgcaacctcggcatccgcggccccgttggcaccgaattcgccagccgccttggcgtttggacaaactgcggcgagccaatatgcgcagccggtccaccttgtctgcgatgactatggcagatgctatcggtcacgccgctatgttcgaactccttattatagtggcggttactatccgggcagttacgtttatgcgcccggcttcggcttcggcggacatcattacgatggcggccatggttttggcggtcatggatttgctgaccacggattcggaggccacggattcggaggtcacgggtttggaggtcacgggtttggaggcgggtttggcggacacggcggcggtcaccacgactga

SEQ ID NO: 1254 - DNA, 741 bp, BradyrhizobiumColbertium
atgggcgaaaccacgcttattcacctctcacgtctgatcgcgcttgaacgcaagcttgacgtcgtcgcccacaatgttgccaattcgaacagcacaggatttcgggcgcgcgagctggcgtttcgggaatatctgaagcccgaaaaaggagtcgatgagacaggcaaaagggagcgtccgctatccctggtcgatccgcgcttccagttcggaagttccagtcagggcgcgctccagccaaccggcaacccacttgatgtgaccattcaaggcgaggggtatttggttgttcgaaccgcgcaaggtgatcgctatacacgagccggcgccctgacgatcgacagttcaggacagatcgtcacccttgcgggccaaccgattttgggcaagagcggcccaatccaaattccctcgaaagacggcgaggtcagcattgccagcgatggtatcgttagcaccaagcgagccattttgggtcagcttcgcctggttagatttgcagaccgggagcgcctgcaaccggccggcgaaagtctgctgcgaaccgaccaaccgccgatcgagcttggcttcggccaagtgaccctcgtcagcggcgccctcgaacaatccaacgtcgccaccgcgcgggaaatgagccgcctggctgaaattacacgctcctacgagatggtcggaaaacttctgaaaagctcccaagacccggacgatctcaataagctcagcaacgtgccggagtga

SEQ ID NO: 1255 - DNA, 1257 bp, BradyrhizobiumColbertium
atgtcgcgtttgttcgccatcctgatgcctttcattcttggtctgttgacgatcggcccggtgacggctcaggagccaacgctcgagctgggccgcgcggcgtttgaggccaagatgcgtggacaatttgcgctcgcgattgggctttttgatcgcgccctgttggagagcaatctttcggcggctcaacgaggaatgctctattatggtcggggcgccagttacgagcaactggaggtgagggggcgagcgctgtccgatctggattcagccattgtcctgttgccggagtttccgaattcgtatctctatcgcgccctcatctgggttgctgaacgccagtatgatcaggccatcgaagatcttcattacgcgcaaaagctcgtcccgcatgaccccaccattctcatgaatttggcgggcgcatttgcgcgccttgggcaagtcgatcgcgccatagagacatacggacaggcaatcgcagagcgtcccgacgcagcgaagctctattatagtcgggcggtcgcttacatccagaagaacgatcgtgcaagagcactcagcgacctcaatcaagcgattatgctgcagccgaaatttgctgacgcctatgagaatcgcggcgtgttgatgagcatcgatggggaggccgaacaggctctcgccgatttcgataccgctattgctctctcgccaaatgatgtcaagttcaaggagaaccgcgccaatgcgctttcaacgctcggccgttacagcgaagcgcttgatgagttcgatcgcgcattaaagatcgatcccggtcaccccgcgctctatctgggacgcggaaaagctcatctttttcttgaagatttcaaagccagcatcgaagatttcaaagtggcggtgcgcttgcggccgctcaatccctactccgtcatctggcttcacatcgcccgcttgcatgcccacgatcgggacgatgacgaatttgcagaaaatgccgccaagcttaaacgggacctttggcccagcaaagtggtcgatctctacctcggcacatctgacgcggaacaagtcgtctccgccgccctggcgacaaacgacgatacgggcaagcacgggtgcgaagccgatttcttcgtcggcgattatgaaggtcatcggggcgattcaacacggtcgaaagagctgctgcaacgggtggtgaccaagtgccgggcattcgatgccgtcttcagcgcggcgcagtcggaacttcaacttgccggccgttaa

SEQ ID NO: 1256 - DNA, 264 bp, BradyrhizobiumColbertium
atgacgggcgcggaagtaatcgcttcggccgaagacgctctctttaccgtcgttctcgtgtccgcccctctgatggtggtgggaaccatcgtcggagttctcgtgtcgctctttcaagccctgacgcaaattcaggagcaaacgctgatttacgttccaaagatcgtagccacgtttctcacgtttctcattgcgctcccgttcatggcggatgaatctcatcggcagttcttgcgcgtgatgacgcgcatcttggctccctag

SEQ ID NO: 1257 - DNA, 1131 bp, BradyrhizobiumColbertium
ttgcacgttggtcgaggcttcctccgaagctccggcaaccgtggtcgccagtttctgggagcgctcggctgttcccgtgagggtggtggcggacgcctccagctgtgtcgaagcagaggacaccgttccgatgatctcgccgaccgcgctctcaaagtcatccgcaagcctgatcatgtcacgtttgcgctgctcgacattgcgacgctcggtttcagcctgttccgccttcagccgctcgacctcgatcgcattggtcttgaagacctgaacggcctgggccattgcgccgatctcgtccttgcgttctgtgcccgacaccaccacggacgtgtcgcccctcgcaagaatctccatctcggtcgtgatgtgctggatggggcgagtgaccgcgaaggccacgccgaaggcgcccgcaagcgacagcagcagcgtgacgaggcctccgatcaacatggacagtgttgcgttgccggaagcagcgttggcagcctcggcccgcaccgacaacagcgatcgttcttccttgtccatctcctgcaccaccgcgcgcaagccatccatcgctttcttgccggcgccggatgcttcgagttcgcgggccttcgcctgagttgccggatccttcatcagtgcgatttcgcgctgcgcgatgctggtcgcccagtcgctggcgaatgccttgacttgctcaagccgcttctgttgcgccgcgttgtccgaggtcaggctgccgaccttggccgccgccgcctgaaactgcttctgcccggcctcatagggggccagaaagccggcatcgcccgagacgagatagccgcgaacaccggtttcctggttgaccatagcggcgacaaggccggaaagctgctcgagcacctcgtaggtatgaactgtcattctcgacgtcgaattcattacgctcagggaatggtagatcgccccggtgctgccggcgacgatcaggcagatcgcgacgaacaccgcagaaaccttgatggaaatgcgcaaattattgatccaggacatcagatacccccaagcttgccggcgcacctattgctcatcgagcgcacaattccccgagttgcgcacgaagttcggccctgtttttatgcgcacgatgtatga

SEQ ID NO: 1258 - DNA, 225 bp, BradyrhizobiumColbertium
gtggaagagcagggcgccgcgacccaggagatcgcccgcaacgtgcaacaggccgcgcaaggcacccagcaggtgtcttccaacatcaccgacgtgcagcgcggcgcgaccgagaccggcacggcctcctcgcaggtgctgtcggcggcccagatgctgtcgaacgattcgagccgcttgaagaacgaagttagcaggttcctgaccaacgtccgcgcggcgtag

SEQ ID NO: 1259 - DNA, 1695 bp, BradyrhizobiumColbertium
atgcgcaagaattttcctatcaccgagatcgaatatccggtcagcgacgagacgttgatcgtctcgcggaccgacctcaagggcaagctcacctacttcaacgaggatttcgttgccgccgccggcttcacgtcggcggaactcatgggccagccgcacaacatcgtccgccaccccgacatgccgccggaggcgttcgacaatctctgggacacgctgaaggcgggcaagccctggcttggcgccgtaaagaaccgtcgcaagaacggcgacttctactgggtgctggcgacggcctctccgatccgtgagaacgggcaggtcaagggctacacctcgatccgcaccaagctgccggccgaccagcgcaggctcgcggaagaggtctacgccgcgatccgcgagaagaagccgcatggctatcgtatcgacgccggcatcatccgccgacgctcgtggcttgatcggttcagcatcttcaccgggacgctgaaggcgcggttggtcacgacgatggcgctccaggcgctgttcatgctggcgctcggcatcggcggcgcgctctccaccggcggttcggtcagcctgatgctggcgtctctggctgtcttcggtgccgccatcgtcggctttgccggccttgcaacgatgcatgcgatccgcggcccgatgcagcagctcaacgacactttgctcaacctcgtgcaggacaagctcgacaatcgcatcgtgatcgagcgcgacgacgagatcggggaggcgctgcgcaacctccagaccgtgcaaaccattatccgcttcagccgcgacgaggtgcaggcagtgcagcgccgagccgaaagacagcgcaaagccgacatgacgaagcttgctgacggcttcgaggccgcgatcggcgaaatcgtcgagaccgtgtcctcagccgcaaccgagctcgaggcctcggcctcgacgctgtcctcgactgcgggccgggcgcagcaattggcgacggcggtcgcagccggctcggaggaagcgtcgaccaatgtccattcggtggcttcggccgccgaggagatgtcctcctcggtgcgcgagatcggccggcaggtgcaggattcctcccgcatcgccagcgaggccgtcagccaggcacaagccaccacggaccgtgtcagcgaattatctcgggccgcttcgcggatcggcgacgtcgtcgagcttatcaatgcgattgcgggccagaccaacctgctggcgctcaatgccaccatcgaggcggcgcgggcgggtgaggccggtcgcggattcgcggtggtggcgtccgaggtcaaggcgcttgccgagcaaacggccaaagccaccggcgagatcgggcagcagatcggcggcattcaggcggcgacgcaggattccgtcaatgccatcggcgagatcagcggcaccatcgcccgcttgtccgagatcgcttcggcaatcgccgcggccgtggagcagcagggcgcggctacgcaagagatcgcccgcaacgtgcagcaggcggccaacggcacccagcaggtctcgtccaacgtcggcgacgtacagcgcggcgcctccgaaaccggatcggcgtcctcgcaggtactttccgcggcgcagatgctgtctcgcgactccaaccgcctcaagctcgaggtcggcaagttcctcaactcggtccgtgccgcctag

SEQ ID NO: 1260 - DNA, 2097 bp, BradyrhizobiumColbertium
gtgcacgcgcgaattggaacgatcctgcctctgattgtctcggcgctcgccctgatgggcgtggccgccaccggttttgcggcgcttggcgcctatcgcgaccgacaggaggcgcacgcttttgtcgagctcaatgccatctcgcaacaactgctgcacagtgccggacaatgggccctggaacgggggatgaccaacgcggcgctgaacgcgccggagaccatcaccgcagaccgccgcgccgagattgacaggatccgcgcagattccgatcgcgcgttccgcgatgccgctcagcgcctgcgcagcctgcctgtgatgaaatccgccgagtcccgcgttgcggaggcagaacgcgtacttcagggcatcgacagcctgcgtcgcaaggtcgatgcggatctgaccaggcaaaaggccgagcgtgatcctgccgtcctcggcgcgatcgttccggccatgaccgagctgatcgagatcgccgccaatcggctgcgcctcactctggagacattgaccgattcgccatcggcggcgatgacccggctcgtagggcttcgccacctcaccgctgagatggccgaaaatgccggccgggagcgggcctttctcgcgggcttgatcagcggccgtacgaagctcaccgcagatggcatcggccagatatccggcctccgcggtcatgtcgatctagcctggacgaccatctcgcctgtcgcccaacgcgccgatgtttcggtcggcctcggccgggccatcaaggacgtcgaacagaaatactttgacagctacggttcgctgcgcacggacgtgatccgggacggcaacgcgggcgaatacaagatctcgagcaacgattacttcgcgggagcgaccagcggcatcaacgcgattctgcagcttggtgaggctatcgccgcggacgctgatcgggaagccgccgggcttgcctcaagaagcacctctcatctggtggtcagcggcggggttctccttgcgagcattgctcttgcactgctcagcttctgggtcgcgttctcgcggatcttgcggccgctgtccgcattgaccactgcgatgggcgagcttgccgcgggcaatttctccatcgttctacccggccttggtcgcaaggacgagatcggcgacatggcgcatgccgtcgaggcgttcaaggtcaaggctgaagagaaggcgcgcctggaggtcgacgaaaaggtcaggcaggaccagattgccgctgagcagcgcaaagctgacatgcacaggctcgccggcgcgttcgaggccgccatcggcgagatcgtcgacacggtgtcatcggcctcgacggagctcgaagcttcggccggcacgctgaacaccactgccgagcgcgcccaggagctggcggtcgtggttgcatcggcatcggacgaagcgtcctccaacgtgcaatccgtcgcatcggcgaccgagcagctttcgtcctccgtcaacgagatcagccggcgagtgcaggatcaggcccggatggccaacgaagccgtcggacaggccggccagaccaacgacaggatcggcgagttgtcgaaggccgccgccagaattggcgatgtcatcgaactgatcgatcagattgcagggcagaccaacctcctggctctgaacgccaccatcgaggccgcgcgggcgggcgaggcgggccgcggcttcgcggtggtcgcttccgaggtcaaggcgctggccgagcagacggccaaagccaccggcgagatctcccagcacatcaccggcattcaagcggccactcaggactcggtcagtgccatccgggaaatcggcggctccattgccggcctgtcggagattgcctcggcgatcgccgcagccgtcgaagagcagggcgccgcaacccaggagatcgcgcgcaacgtgcaactggcggcgcagggaacgcagcaggtgaccgccaatgtcggcgacgtccagcgcggcgccacggagaccggttcggcgtcgtcgcaggtgctgtcggcggcgcagacgctgtcacgcgactccaaccgcctcaagctcgaagtcggcaagttcctggagacagtccgcgccgcctga

SEQ ID NO: 1261 - DNA, 1509 bp, BradyrhizobiumColbertium
atgacgactgtttcccctgaccgtatacccgtcatcgtcggcgtcggcgagatcgtcgaccgtcccaaggagatcgccgacggcctcgagccactcgatctgctcgagcaggccctgcggcgcgccgagcaggacgccggcgcaagcctgctcggcgacgtccagtcgctcgacgtggtgaacttcctgagctggcgctatcgcgatccggaaaaacttctggcgcagcggctcggcatctcgcccgcgcattgctattacggccccgtcggcggagagagcccgatccgctacatccacgaggcggcaaagcgcatcgcgcgcggggagtgcacagtggcggcggtctgcggcgcggaagcgcagtcaactgccaccaaggcggagcgcgcgggcgtcaaactgccatggaccccgtttgcgcacgacgtcgaggagcccaagcgcggcgcggcgttccagaaaccgctcgcggtggaactcggcgtgttccggcccgtgacggtctatccgttctatgaggcggcctcctctgcacattggggccagacgccgcgcgaggcgatgacggagtcggggacgctgtggtcgcgctattccgaagcggccgcacagaatccgaatgcctggctcaaacggcgttatgcacctgaagagatcacgacgccgaccgccgaaaaccgcctgatcgcctggccctacaacaagctcatggtggcaaaccccagcgtcaacatgggcggcgcgctgctgctcacgagccttgccagggcgcgggcagccgggattgccgaggacaagctggtctacccgctcggcggcgcctcggctgaggagccgcgcgactatctcctgcgcgaccagttttacgagagccacccgcagaacgcggtgctgaaggccgtgatggacctcgtaggcggaaacggcaggaagttcgatgcgatcgagctctacagctgtttcccctgcgtgcccaagatggcgcggcggacgctgggcttaggcgccgacgtgcagccgaccgtgaccggcggcctcaccttcttcggcgcgccgctcaacacctacatgacgcacgcggcctgcgcgatggtgcggcgtgtccgcgacggcgcaaagctcggcctgctctacggccagggcggcttcgtcaccaagcaccacgcgctggtggtatcgaaaaccccgccgcgcgaggcgctggctcaggagacgagcgtgcaagcggaggcggaccgcaacaagcacgccgtgcccgagtttgtgacggaggccacgggaaaaggcaaggtcgagagcttcaccgtgctctacggccgcggcggcgatgtcgagcacggcgtggtgatgctgcgcacgaccgacgaccggcgcacgctggcgcggattccggcgagcgatagtgcgacgctggagcatctgctcgacatggagcgcacgccggtggggtcgctcggggatatcgcgatggccgccgacggcgtaccggagtggcgggtagcgtag

SEQ ID NO: 1262 - DNA, 1134 bp, BradyrhizobiumColbertium
atgaaatcgccgatctgcgacatgctgggcattgaattcccgctgctcgccttcagccattgccgcgatgtcgtcgcggccgtcagtcgcgccggcggcttcggcgtgcacggtcgcgccgagcacacgcctgacacgctcgaacgcgagttgaagtggatcgacgatcacgtcgatggcaagccctatggcatcgatgtcctgattcccgagaacatctcgactgcgggcgagaaggacgtcacctggaagagcctggaaacgcgcgtgccgcaggagcatcgcaactacacgcgcgatctcctgaagaaatacgacatcgagctcaccaccacggaggtcgcagccgaccagccgcagccgtttgatgcgaaaactgcgcttcggctgctcgaggtctccttcaatcacccgatccgcctgattgccaatgcgctgggcgtgccgccgaaggcgatgatcgagatgggcaagaagcacggcgtccccgttgcggcgctggtcggtgccaaggagcacgcactgcgtcaggttgcggccggtgtcgatattctcgtggtgcagggcaccgaggccggcggccattgcggcgaagtctcgaccatggtgctggtgcccgaggtgatcaaagcgatcaagcccatccgcgacgtgccggtgctcgccgccggcggcatcatgacggggcggcagatggcggcctgcatggcgatgggcgcggccggcgcctggaccggctcggtttggcttgcgaccgtcgaggccgagaccacggaaatctttcgcgaaaagatgatcaccgcgtcgtcgcgcgatgcggtgcgctcgaagggccgcaccggcaagccggctcggcagctccgctcggtctggaccgatgcctgggaccgcgctcccgacagccccggggcgctgccgatgccgttgcaaagcatcatcagccgcgacgctttcagttcgatcgaccgagctgccgccagtggcaacgccaaagcgcgcgatctcgtcagctatttcgtcggccagggcgtcggtctgatcgacagcgtgaaatcggcgggcgcgggggggcaggagttcaaggaagagttcgccgaagccgtcgagcacatgaatgcgctggtggcggagtaa

SEQ ID NO: 1263 - DNA, 876 bp, BradyrhizobiumColbertium
atgaccgacgcccctgcctacgtgccgcccaaagtctggacctggaacaaggagaacggcgggcagttcgccagcatcaaccgcccgatcgccggcccaacccacgagagggagctgccggtcggcaggcatccgcttcagctctattcgctggcgaccccgaacggggtgaaggtcacggtgatgttggaggagctcctggcgcttggtcacgagggagccgaatacgatgcctggctgatcaagatcggcaatggtgaccagttcggcagcggcttcgtcgacatcaatccgaactcgaaaatcccggcactgatggatcggtccggtcgggagccgatccgggtgttcgagtccggctcgatcctgctctacctcgccgagaagttcggcgccttcctgccgaaagacatcaacgcccgcaccgagaccatgtcctggctgttctggcagatgggcagcgctccctatctcggcggcggcttcggccacttctacgcctacgcaccgttcaagatagaatacgccatcgatcgcttcgcgatggaggtcaagcgccagctcgacgtgctcgaccggcgcctcgccgataacgagtatctcgcgggcaaggagtacacaatcgcggacatggcggtgtggccgtggtatggcgcactcgccaagggactggtctatggcgccggggaattcctgtcggtccaggactacaagaacgtgcagcgctggaccgacgagatcgccaagcgcccagccgtgaagcgcggccgcatggtcaaccgcgtctccggcgatcccgccagccagctccacgaacgtcatgatgccagcgatttcgagacgaagacgcaggataagatcgcgccggcgacctag

SEQ ID NO: 1264 - DNA, 726 bp, BradyrhizobiumColbertium
atgccggaagcctttcgagacaacgaagaacgcaaccggttcgagctcgacgtcgacgggcctgtcgccttcgtgacttaccggaagagcgacggtgcgatcaccctcgtgcacaccgaagtgccgccggagctcggcggccgcggcatcggctcaaagctcggccgcgccacactggacgcggtgcgagcgcaagggcgtaagctttcggtcgaatgcgatttcatccgcaatttcatgcgcaaggatcccggctataacgacctcctggcggatgacggcgatgcgcaggccgaaccgcaggcgagctatcgcgccggctgcttctgtggagccgtcgaggtcgaggccaccggcaaaccgatatttgcaggctattgccattgcgccgactgccaagcgtggtcggccgctccaatcaatgctttcagcctgtggaagtcggacgatgtgcgcatcaccaagggcgaggcagagctcggaacgttcaacaagaccgagcattcctatcgaaagttctgcaaacgctgcggcggccatgtcatgaccgagcatccgcggatgcggctgatcgacgtctacgccaacctgctcaagggataccagcaccggccgaccctgcacgcgaactacgcgagcaagatggtgtcggtcagggacggcttgccgaaatatgccgacctgccggcggacttcggcgggtccggagagatgctgccggattga

SEQ ID NO: 1265 - DNA, 618 bp, BradyrhizobiumColbertium
atggaatacgccgccagcgacctgacgccacgcgagcgttacaaggtgctgacctccttcattctgccgcgtccgatcgcgtgggtgaccacactcggaccgaccggcgtcgtcaacgctgcaccattcagcttcttcaacgccttctgcgaagatccgccgctctgcatgttcgcggccaaccgcaagccgaacggcgaggacaaggatacgtttctcaacatccagcgaaccggccaattcgtggtcaacattgccgacgagccgctggcgcgggcgatgcacgagtccagcggcgactttccgcctgagatcggcgagccggactatctcggcctgaagctcgcgccctcgacgaaaattgccgtgccccggctggccgacacaccctgggccatggagtgcaagctctggaagctgatcgacgtgaacgacgatcgtcgcctgatcatgggtgaaggcatccactttcacatccgcgacgaactctgggatcccgaggcgatgcgggtgcatatggaccgctatcatccgatcggccgcatgttcgccgaccgctactgccgcacggacgaccgcgtggcgtttccggcggcggagggcgtgaagagcaaatag

SEQ ID NO: 1266 - DNA, 1278 bp, BradyrhizobiumColbertium
atgacaaaacacacctacattccccgcaccaccaactacaccctcaatcccggcgacgacctcaacgacctccgcatgtcggatcaggtcaggccgctctatgaccacgtcaagaagttcatccgcgacaccgtcgagccgatgtcgatcgagtttgccaaggccggcgaaggcaaggaggatcgctggagcttcacgccaaagcagctcgaggtgctggagaaggcgaagaacaaggccaagcaggaaggcctctggaacttcttcctgcccgacgacgagaccggtcagggcctgaagaatctcgactacgcctatatcgccgccgagctcggcaagagcccgctggcgtccgagacgatgaactgctcggcgcccgacaccggcaacatggaggtgctggagcgcgtcggcaccaaagagcagaaggagaagtggctgaagccactgctcaacggcgagatccgctcggcctacgtcatgaccgagccgaatgtcgcctcctccgacgccaagaacatctcgaccacggccaagctcgtcggcgacgaatgggtcatcaacggcgagaagtattacatctccggcgtcggcgatccccgctgcaaaatcctcatcgtgatggtgaagaccaatccggacgcggcgccgagcaagcagcagtcgcagatcctggtgccgcgcgacacgcccggcgtcgaggtgctcggaccgatgtacgtgttcggccaggatcacgcgccgcggggccacatgcatatgcgcttcaacaatgtgcgcgtgcccaaggagaatatcctgctcggcgaaggccgcggcttcgagatctcgcagctgcgcctcggacccggccgtatccatcactgcatgcgcaccatcggcaaggccgaaaaggcgctagacctgatggtgcagcgtggcctcacccgcgaggccttcggcaagaagatcgctcatctgggcggcaacatgcagatcatcgcgcaggcgcgctgcgagatcgaagcgatgcggctgatggtgctgaaggccgccaaggccatggacgtgctcggcaacaaggaggcccgcgtctgggtctcgatggtaaaagccatggtgccggagcgcgcctgcaagatcatcgaccaggcgatccagatgcacggtgccacgggcatctcgcactggaccccgctagcggagatgtaccaggatgtgcgtcacctgcgcttcgccgacggtccggacgaggtgcactggatggtggtcggccggcacgagctgagcatggcttga

SEQ ID NO: 1267 - DNA, 381 bp, BradyrhizobiumColbertium
atgttctcgcacgtcatgatcggcaccaacgacctcgacaaggcaaaggcgttctacgacaagctgctcggcacgctcgaggtgcgaccggcgaaagtggacggccatcgcatcttctacatcaccaagaccggcgttttctcggtgtcgaagccgatcaacggcgagccggcgacctgcgcgaacggcggcacgatcggctttgcctgcaactcgccggagcaggtcgaccaatggcacgcagccggtgtcgcagcaggtgggacatcgatcgaagatccgcccggcgtgcgccagggccctggcggcaagctctatctggcttacctgcgcgacctcgacggcaacaagatctgcgcgatgcaccggatgcctgcttga

SEQ ID NO: 1268 - DNA, 780 bp, BradyrhizobiumColbertium
atgaaccttttcgacctctccggccgcgtcgccgtgatcaccggcggcaatggcggcatcggcctcggcatcgcgcaggcgctcgcggcccaaggctgcaacgtgtcgatctggggccgcaatgcggacaagaacaaggctgcggccgcgagcctggccggtcttcccggcaaggtcgacacccgcgtttgcgacgtcaccgacccggcctcggtcaatgccgcgatgaaggcgacgctcgacacgttcgaccggatcgacggctgcttcgccaatgccggcatcggcggcggcggccggcgctcattcatcgagcgaaccgaggaagaatggcgcacgatgttcgcgaccaatctcgacggcgtgttccatgccttccaggctgcggccaagcacatgacggatcgcgccaatgccggcgatcccttcggccggctcgtcgcgacctccagccttgcctcgatcttcggcaccgcgcgcaacgagcattatgccgcgaccaaggccgccatcaacgccctggtgcgcgcgctcggcgtcgagctggcgcgctacggtgtcaccgcaaatgcgatcctgccgggctggatcaagagtgacatgaccgcgggactcatggccaacgacaagtttgtcgccaacgtcatgccgcggattccgatgcgccgcttcggcgaagcatccgatttcggcggcatcgccgtgtatctgatgagcaaggcgtcgtcctatcacacggcggatacgttcgtgatcgacggcggctacacggctttttga

SEQ ID NO: 1269 - DNA, 789 bp, BradyrhizobiumColbertium
atgcagttcaaacacgtcgcgctcgatttcgatggcgccgtcgcgatcctcaagctcgaccatcaggaggtgatgaacgcggtttccgtcgacatgttgagcggtctttccgaggcgctcgatgcgatcgaggagaagaaggacgaggtgcgctgcgtggtgctgaccggcgcggggcgggcgttctgcacgggagcgaacctccagggccgcaacaaccagtcgaagaagaccaaggccggcctgacgctggagaccggcttccaccccttcctgcgccgtattcgcaacctgcactgcccgatcgtcaccgcggtgaacggcccggcggccggcgccggcatgagcttcgcgttgctcggcgacatgatcctgtgcgcgcgctcgtcgtatttcctgcaggcgttccgccgcatcggtctcgtgccggactgcggctcgacctggctcctgccgcgcctcatcggtcgagcgcgctcgatcgagctgtcgctgatgggcgagcgcctcccggccgagaaggccctggaatggggcctggtcaaccgcgtctatgacgacggcgtgctgatggaagaggcgatgaagctggcgcgcgaactcgccagcggcccgacggtcgcgctctctctgatccgcaagctgtattgggacagcccggaaaattccttcgagggtcagctcaatctcgagttccagtgccagctccgagccggcgatacccaggacttccgtgaaggcgtcggcgcattcctggagaagcggcccgcgcagttcaaaggcaaatga

SEQ ID NO: 1270 - DNA, 987 bp, BradyrhizobiumColbertium
atgatcgaagcggagctctcgcgcagcgttaggcgctggtgcccgggcgcgactggcgtcaccggcgcagcaaagctgtcgggcggcgccagccaggagacttggcgctttgacatcctgcaccccaatgggccgatcggtgccatcctgcgtcgttcgcccaaaggctacggagcggctccaacgcgcgcggccggtctgggtgccgaagcacagctgatgcagctggcctatgagggcggcgtgccgtcgccgcgcgtgatgcacgtgctcacgccggaggacgatctcggcaccggcttcatcatgcagcgggtcgagggcgagaccatcgcgcgcaagatcctgcgcgacgacgaatacgcggcggcgcgcccgattctggcgcggcagatcggcggtattctcgctggtctccatcgactgccgaaggacaagctgcccgagctgcgcagccgtggcgcgacccaggaaatctccgaattcgagcgcgactaccgcagcctggactggcccaagccggtgttcgagctggcgctgcgttggctgcgtgaccacgacccgggcccatcagccgagaccacgctggtgcacggcgatttccgcaacggcaatctgatcatcggcgccgacggcgtccgtgccgtgctcgactgggagctcgcccatctcggcgatcccatggaggatctcggctgggtctgcgtcaattcctggcgtttcggcgagatcgacaagcccgtcggcggctttggctcgcgcgaggaactgttcgccggctacgaggccgccggccgcaaagtcgatgtagcgcgcgtcaaattctgggaagtgatgggcacgctgcgctggggcatcatgtgcggcggcatgatgcagcgctttcgcgaggggccggatcattccatggagcgcgccatgatcggccgccgcgcctccgagaccgagatcgatctgttgcggctcttggcgccgcgcgggagctga

SEQ ID NO: 1271 - DNA, 378 bp, BradyrhizobiumColbertium
atgcaggacgagccgaccccgatcgagctgaccaaggcggtcgctgatttcctccgcaatgacatcacgccgctgatctccggccaccaggccttcaagctgcgcgtggccatcaacatcctcgatctcgtgacgcggcagctgatccgggaggacgagggcgatgccagggaggtcgagcgcctccgcgtgctgctcggcatcgaaggctcggtcaccgaactcaaccgcgcactcgccgggcgcatcgccaaaggcgaggtggatctcgcgactccaggtctcgccgagcatctgtgggcgaccacgatggacaagcttgcggtcgatcagccgaattacgcctcgtacaagcgggagctgtcgcgcgacagctag

SEQ ID NO: 1272 - DNA, 780 bp, BradyrhizobiumColbertium
atggagctgaagttttccagagtggaacgcaaggggccgatcacaatcgtcacgctgtcgcggcccgaggtctacaacgcgctgcacaccgatgcgcacttcgaactgcagaaggtgttcgacgatttctcgggggatcccgagcagtggatcgcgatcgtcaccggcgccggcgacaaggcgttctgcgccggcaacgatctgaagtggcaagctgccggcggcaagcgcggctgggacaagggcggctttgccggtctcacctcgcgcttcgactgcgacaagccgatcatcgcagccgtgaacggcgtcgcgatgggcggtggcttcgagatcgcgctggcctgcgacctcatcatcgcctcggagaacgccaccttcgccctgcccgagccgcgcgtcggccttgccgcgcttgccggtggcctgcaccggctgccgcggcagatcggtctgaagcgcgccatgggcatgatcctcaccgcacgccatgtcagcgccaaggaggggctcgagctcggcttcgttaacgaggtggtgccgcagggcgaggccctcaacgccgcgctgcgctgggccgacatgatcgccaagaattcgccgatgtcgatccgcgcctcgaagcaggcgatccagaaggggctcgccgtctcgctggaacaggcgatcgaggagcagcgcgagtatccggcggtcaaggcgatggtggcctcgcaggattatatcgagggcccgaaggcgttctcggagaagcggccgccgaaatgggtggggaagtag

SEQ ID NO: 1273 - DNA, 1275 bp, BradyrhizobiumColbertium
ttggatttctcactgcctgccgatctcgtcgcctatctcggagagctcgaccgtttcatcgaacgcgagatcaagccgttggaacaggccgacgacaacatccgcttcttcgatcaccgccgcgaatgggcgcgcaccgatttcgagaatggcggcctcccgcggcatgaatgggaggcgctgctgcgcaaggcgaaggatcttgccgatgccgccgggcatctccgctttccggtgccgaagcaatatggcgggaaggacggctccaacctctggatggcggtgatccgcgagcacttcgccgcaaagggtctcggcctgcacaacgatctccagaacgagcattccgtcgtcggcaacttccccgtcgtcaccatgctcgaccgctacggtcgcgacgaccagaaggcgatgatcgacggttcgatcaggggcaagtaccgcatcacctttggcctgaccgagccgcatcacggctcggacgccacccacatggagacgcgcgcggtgccggccacccgcgataacgtcaaggggtggatcatcaacggcgagaagatgtggaccaccgggatgcacgtcgcaacgcattgcgcgctgttcgcgcgcaccagcggcaatgacggcgatgcccgcggcatcacctgcttcctggtcccggccaagagccccggtgttaaggtcgaggaatacatgtggaccttcaacatgccgaccgatcatccgcgcgtcagcttcacggacgtgttcgtgcctgaggatgcgctattcggcgaggtgggccgcggcctctcgctggcgcagtgcttcgtgcaccagaaccgcatccgccaggcggcgagttcgctcggcgcggccgtgtactgcatcaacgagagcgtgaaatacgcgcgcgagcgcaagccgttcggcaaggccctcgccgagaaccaggcgatccagttcccgctggtcgagctcgccacgcaagcggaaatgctgcgccttctgatccgcaagaccgcctgggagatggaccagctcaccgaggagcagatcgagcgtacgctgtccgaccgggtctctatgtgcaattactgggcgaaccgcctctgctgcgaatccgccgaccgcgccatgcaggtccacggcggcatgggctattcacgccacaagccgttcgagcacatctatcgccatcaccgccgctaccgcatcaccgaaggcagcgaggagatccagatgcgcaaggtggcggggttcctgttcgggtatatgggaccggggaagcattga

SEQ ID NO: 1274 - DNA, 1545 bp, BradyrhizobiumColbertium
atggtgcgcgagcgcgcgaagagccgcggcaacgcaatcgcctacgagttcgaaggccgcaccaccagctttgccgaattcgatatcaagaccaacaaggtcgccaacgcgctgcttgcgatgggcgtgaagaagggcgatcgcatcgcctatctcggcaagaacagcgacacctatttcgagctcctgatgggcgcaatgaaggctggcgtcgtgatggcgccggtgaactggcggctcgccgggccggaggtcgccttcatcgtttcggactgcagggcgcctgtgttgttcgtcgggccggagttcatcacgctcgtccgccagatcaaggaccagctccccggcgttcacaccatcatcaccacggaaggcggcgcgccggaatggcaggatttcacggcctggcgcgatgcgcagagcggtgacgacccgaaggtgccgatcgacaccagggacatcgcgatccagctctacacctccggcacgacaggcaagccgaagggcgcgatgctgagccacgcgaacttcctcaacctggtgcagacgggcaacgccgaagacaaaccggagtggaaccggtggtcgaccggcgacgtctcgctggtcgcgatgccgatcttccacatcggcggctccggctggggcgtgatgggcctctatcacggcgcccgcggcgtcatcgcgcgcgagttcgatccgaccaaggtgctggatttcttcgagcagtcgggcatcacgaaactgttcatggtgccggcggcgatgcagttcgtggtgcggcagccgcgcgcgaagacggtcgatttctcgcggctgaagtacatgctctacggcgcctcgccgatccccgcggcgctgctgaaggagtgcatcgaggtcttcaaatgcggctttgtgcagatgtacggcatgaccgagaccacgggcacgatcgtcgcgctgccgccggaggatcacgtcgaggggctggagcggatgcgctcggccggcaaggcgcttccgggcgtcgagatcgcgattctggatgtcgacggcaaaccgctgccgccgcggcaggtcggcgagatcgcgacgcgctctggctccaacatggcgggctattggaacctgccggaggcaactgccgcgacgctgcgcggcgacggctggctgcgcacgggcgatgccggctacatggacgaggacggctatctctacatccacgaccgcatcaaggacatgatcatctcgggcggcgagaacatctatcctgcggaggtcgagagcgcgctgtgcgaccatcctgatgtcgccgaggccgccgtcatcggcgtgcccgacgacaaatggggcgaggcggtgaaggccgtcgtggtgatgaagccgggcaagcaagcgacggccaccgacatcatcaacttcacccgcgagcgcatcgccggctacaagacgccgaagagcgtcgagttcttgccggcgctgccgcggaatccttcaggaaagatcctgagaaggcagctgcgtgagccgtactgggcggggaaggatcggcgggtgaactag

SEQ ID NO: 1275 - DNA, 873 bp, BradyrhizobiumColbertium
atgttcaaggaaaatcttctcgccggccggcgcattctcgtgaccggcggcggcaccgggctcggcaagtcgatggcggcgcgctttctccagctcggcgccgaggtgcacatctgcggccggcgcaaggtcgtctgcgacgagaccgcgatcgagctgatggacctctacggcggccgcgttaccagccacggcgtcgacatccgcaacgcgctcgcggtcgaggagatggtcgagaacatctttcgcgagggtcccctcaccgatctcatcaacaatgcggccggcaatttcatctctcgcaccgaagagctgtcgccgcgcggcttcgatgcggtcgccaacatcgtcatgcacggcacgttctacgtgacgcacgcgatcggcaagcggtggatcgccttgaagcagcctggcaatgtcgtttcgatcacggtgacctgggtgcgcaacggctcgccttacgtggtgccgtcggcgatgagcaagtcggcgatccacgcgatgacgatgtcgctcgcgaccgaatggggccgctacggcatccgcctcaacactatcgcgccgggcgagatcccgacagaaggcatgagcaagcgcatcaagccgggagacgaagctggcgcgcgcaccaaggcgatgaatccgatgggccgggtcggcacgatggaggaactgcagaacctcgcagtgttcctgatctccggcggctgcgactggatcaacggcgagaccgttgccatggacggcgcccaagcgctcgccatgggcggaaatttctaccagctccgcgactggagcgacgacgactggaagaccgcgcgcgacagcatcatggcgcagaacgagaaggaccgggcgaagcggggataa

SEQ ID NO: 1276 - DNA, 810 bp, BradyrhizobiumColbertium
atggaagatcgcgtctcgatctcgatctcggaaggcgtcgccgacgtgcgcctgatgcgcgcggacaagatgaacgcgctggatcaggccatgttcgaagccctcgtcgctgcaacggaccggctttcgaaggaaaaaggcgtgcgcgccgtcgtcctgtcgggcgagggccgcgccttctgtgccgggctcgacatggggcgttttgccgccatgaaggagaagggcggcaacggaattccgggcggcgaaaatcgcgatctcaccaagcgcacgcacggccaggccaacttcccgcaacaggcggtatggggctggcgccagctcccggtgccggtcatcgcggccgtgcacggcgtcgccttcggcggcggcttccagctctcgctcggcgccgacatgcgcttcctcagttcagatgcgcggatgtcgatcatggagatcaaatggggcctagtccctgatatggcgggcacgccaatccttgcctcgctcgtgcgcgacgacatcctgcgcgatctgacctacacagggcgcatcttttccgcgcaggaggcgatgacgtacggcctcgccacccgcatctgcgacgacccgcgcgctgcggcgctggaagtcgcgcgcgagatcgccggcaagagccccgatgcgatccgcgcggtcaagcggatgctgaacaacctctcggtcgatccggggccggcgttgctcgccgagtccgtcgagcagcagaaactgatcggcagcccgaaccagaccgaagcggtgcgcgccaacctggagaagcgcgcgccgaattttgcggattag

SEQ ID NO: 1277 - DNA, 1545 bp, BradyrhizobiumColbertium
atgagcgaaacgtcccccttcctcggcatcgtctccggcgaccgccgccgcagccattcagaggtcgccgaccgcgctgaccgcatcgccgccggcctcgccaagctcggcgtcaagccgggcggttgcgtctgtatgctgatgcgcaacgacatcgcgttcctggaagccgcctacgccgcaatgcggctcggggcctatggcgttccgatcaactggcacttcaagcctgaggagatcagctacatcctcggcgataccggcacgtccgtgctgatcggacacgccgacatgctgcatgccctgcgtgatgcgattcccaacggcgtcaccgtgctcagcgttccgacgccgccggagatcctggccaactacaagatcgatcccggtcatttggcgacgccggactttgcgatcgacctcgaatcctggcttgcgcagcaccagccctatgacggtccggtcgtgccgcagccgatgaacatgatctacacctcgggcacgactgggcatcccaagggcgttcgccgcaacgcgccgacgccggagcagcaggccgccggcgagcgcatgcgcgcgatgatctatgggctaaagcccggcgcccgcgcgctgctgccgggtccgctctatcactccgcgccgaactccttcggcatccgcgccggcaagctcggcggcgcgctggtgctgatgccgcgcttcgaggccgaggaatttctgcaagcgatcgagcgttacaggatcgacaccatcttcatggtgccgaccatgttcatccgcctgatgaagctgccggaagcggtccgcaagaaatacgacgtctcttcgctgcgccacgtcatccatgccgccgcgccatgcccggccgacgtcaagcgcgccatgatcgaatggtgggggccggtgatctacgagttctacggctcgaccgaatccagcgccgtcaccttcgccacctcagaggacgcgctgaagaagcccggcaccgtcggcaagatttcgccgggcgccgagctgcggttcatcggcgaggatggccgcgtgctgggggtcggcgagatcggcgagatctattcccgcatgggcgagcttgccgatttcacctaccacaacaagccggagaaacgcgccgagatcgagcgcgacggcttcatcacctccggtgatgtcggctatatcgacgaagacggctacgtcttcatctgcgaccgcaagcgcgacatggtgatatcaggcggcgtcaacatttatccggcggagatcgaatccgtgctgcatgcggtgcccggcgtgcatgattgcgcggtgttcggcatccccgatgccgagttcggcgaggcgctgatggccgtggtggagccgcaagtgggtgtcacgctcgacgccgccggcgtccgtgccgcgctcaaggcgcatctggcggattacaagatacccaagcacatcgagatccgctcaggactgccccgcgaggattccggcaagatcttcaagcgtcgcctgcgcgatccctattgggagcaggcggggcggaagatttga

SEQ ID NO: 1278 - DNA, 801 bp, BradyrhizobiumColbertium
atgatcatgaccgacgccgccaacgaagtcctctacaccgtcgccgaccacatcgcgaccatcacgctcaatgcgccggagcggatgaatactatttccggcccgatgctgaacgatctggcgcggttactcactgaagccaatgaggaccagaacgttcgcgtcgtgatcctcaccggcaagggcagggcgttttgcgccgggctcgatctgcgcaaggagcgcgacggcaacggcctcagcgcggcgtcttcgtcgaccacgatcaacctccggaacacgccgccgacggtgttgcaggccatggacaagccgaccatctgcgccgtcaacggcggcgccgccggctatggaatggataccgcgctcggctgcgacatccgcatcatggcggaatccgccaagctcgccgccgccttcgtcaagcgcggcgtggtgccggaatccggcggcacctggctgctgccgcgcatgctcggctgggccaaggcctccgagctgatcttcaccgggcgcacgctgagcgcccgcgagtgcctcgactggggcctcgccaacgaggtcgtgccggatgccgagctgatgagccgcaccactgcgatcgcccgcgaaatcgctgcgaacgcgccgctcgcggtgcaggcctccaagcgcatgatgcgcatgggcctcaatgagaatttccacgaccatgtccaccacgtctatctccagctcctgccgctgttcaaaacccaggacatggccgaaggcatgaaggccttcatggagaagcgtgagccgaagttcgaggggcggtaa

SEQ ID NO: 1279 - DNA, 405 bp, BradyrhizobiumColbertium
atggctcccgtctccatcctgctcaacctgctctggatcctcttcggcggcgcctggatggcgttcggctgggtgatcgccgcggtcatcatggccatcaccatcatcggcctgccctgggcccgggcggcgttcaacatcgccgtctacacgctgctgccgttcggctcgcgggcggtcaaccgctacgaggtgaccggcgtcgaggatatcggcaccggcccgctgggggtgatcggcaacatcatctggttcgtgctggcaggctggtggctggcgctcggtcatgtcctgacggcgctggcgcttgccgtgaccatcatcggcattcctttcgcttgggcccatctgaagctcgcgggcatcgcgctctggccgatcggaaaggtgatcgtgccggcttga

SEQ ID NO: 1280 - DNA, 2730 bp, BradyrhizobiumColbertium
atggaggccgatgcgcggctgcgggacgacatccgcctgctcgggcgcatcctcggcgacaccgtgcgcgaccaggagggtgcggacgtgttcgatctcgtcgagcgcatccgccagacctcgattcggttccaccgcgacgaggatcgacttgcccgccgcgagctcgagcagatcctggacagcatgtcgatctccgagacggtgcgcatcgtccgtgccttcagttacttttcccacctcgccaacattgccgaggaccagaacaacatccgccagatgcgcgcccgcggtgccggcaagaacggcggctccggcgtgctcgcggaaacgctggcccacgccagggacgccggcatcggcgcggatgcgctgcgcagcttcttcaagtccgcgctggtcagcccggtcctgactgcgcacccgaccgaagtccgccgcaagagcaccatggatcgcgaaatggaggtcgcccgcctgctcgaccgccgcgagcgcgtggcgctgaccgcggaggagcttgatgccagcgatgagcagcttcgccgcgaggtgctgacgctgtggcagaccaacctgctccgccggaccaagctcaccgtgctcgacgaggtcgccaacggcctgtcgttctacgactacactttcctgcgcgaggtgccgcggctcatcaatacgctggaggaccgtctggaggagggcggcgagcaggcggccggtgagctcgcctcgttcctgcgcatgggcagctggatcggcggcgaccgcgacggcaatcccttcgtcaccgccgacgtcatgcgcggcacgctgcggctgcagtcgagccgggtgatgcagttctacctggaagagcttcacgtgctcggctcggaactgtcgattgcggcccatctcgccgatgtctccgaagagctgcgcacgctggcggagcgctcgccggacacctcgccgcaccggagcggcgagccctatcgtctcgccgtgtcgggcatctatgcgcgcctgaccgcgacggccgaaaagctggaggtcgagatcacgcgccggccggtcggcaaggccaagccctatgaaagcgtcaaggagttgcaggctgatctcgatgtgctgcaccgttcgctgatttccaacaacgcacgcgtcatcgctcggggccggctgcggctgctgcggcgcgcggtggactgcttcggcttccatctggcgcggctcgacatccgccagaattcggcggtgcacgaacgcaccatcgccgagctgatggacgccgccaatcccggcatgtcctatctcgcgctcggcgaggacgcgcgcatttcgctgctcaccaacgagctgcgctcgacccgcgcgctggtgtcgcctttcgtcaaatacagcgacgagaccatgggcgagctcaatgtgttccatgccgccgcggaagcgcatgcgaagttcggctcggacgccattccccaatgcatcatctcgatgtgcaagggcatgtcggacatgctcgaggtggccgtgctcttgaaggaggtcggcctcgtccatccctccgggcgtagcgccatcaacatcgtgccgctgtttgagaccatcgaggatctgcaggcgtccagtggcatcatggaccgcatgctgtcgctgcacgattaccgccgcctcgtggacagccgcggcagcgtgcaggaggtcatgctcggctattccgactcgaacaaggacggcggcttcgtcacctcgggctgggagctgtacaaggccgagatcaacctcgtcgaagtgttcgagcgccatcacgtgcggctgcgcctgttccatggccgtggcggctcggtcggacgcggcggcgggcccagctatgacgctatcatcgcgcagcccggcggcgcggtgaacggccagatccgcatcaccgaacagggcgagatcatctcgtcgaaatattccaacgccgaggtcgggcgcaacaatctggagatcctcgcggctgccacgttggaggcaagtttgctgcatccgcgccaaagcgcgccgcgcagcgaatatctgaccgccatggacgagttgtcgaaccttgctttcaaggcctatcgaagtctcgtctacgagacagacggcttcgtcgattatttctggtcatcgaccgtcatcaacgaaatcgcgacgctcaacatcggcagccgtccggcctcgcgcaagaagacccgcgcgatcgaggatctgcgcgcgattccctgggtgttctcctgggcgcaatgccgattgatgctgccgggctggtatggcttcggcagcgcggtcgagcagtggatcgcggaacatccgcaacagggcatgccgttcctcaaggaactctacagggagtggccgttcttccgcatgctgctgtcgaacatggacatggtgctggccaaaagctcgatcgcgatcgcctcgcgctatgccgagctggtgcccgacgaggcgttgcgcgaaaagatcttcggccgcatccgccgcgaatggcacgcctcgatcgagagcctgctcgacatcatggggcaggaccgcctgcttcagagcaacccgctgctggagcgctcggtgcgccaccgcttcccttatctcgacccgctcaaccacgttcaggtcgagctcttgaaagagcatcgcgcccagaacccggacgagcaggtgctgcgcgggatccagctgacgatcaacggcatttcggcggggctcaggaatacgggttag

SEQ ID NO: 1281 - DNA, 1113 bp, BradyrhizobiumColbertium
atgacaagaatactgaccaaccccaaggacatccgtgcgaccggcggcctcggccgtcgcgacctcctcaagggcgcggcaacactcgccgcctcctctgtcctggcatcacaggccaatgcccgcgacttcggcgcccatgccgagccgcaacgctatcccgaccccgacatcgtcgtcatcgaccccaaacgcttcaaggccaaggtcggcaacaccgcgatcaagcggctctacaccggctgcctttgggcggaagggccggcgtggaacgcgcagggacaatatctcgtctggagcgacatccccgccaaccggcaactccgctatctcgacgacgacggccacatctccgagcagttccgtaaaccgtcgaatgagtccaacggcaactcgttcgataccgagggccgtcagctcaccgccgagcgcacccgcctcgtccgcttcgagcatgacggctcggtgaccccgctcgccgagcaggcgaacggcaagccgctcaacgggccgaacgacatggtggtgcatcccaacgacaaggcgatctggttcaccgatcctggatatggagcgatcagcatctatgaaggcaagctcgccaagaccggctcgccccagccccatcagaaggaagccgtctatcgcctggacacgcagaccgggcaggtcgcgaaggtcgcggacgagccattcaagccgaatggcatcgccttcagccacgattacaggaagctctatgtctgtgacaccggcgtcacgcattatccgcaagcggagaacgtggtgtggtcctatgacgtcgacggcccgaagctgtcgaacgcgaagaagttgatcgacatgaagctcgacggcaaatcaggctttccggacggccttcgcgtcgacacggagggcaatatctgggtcggcgccggttgggtcggacccggctacgacggcgtgcaggtgttcgcgccgaccgacggagcgcggatcgggcagatcctgttgccggagacctgcgccaatgtctgcttcggcggcaagaagcgcaaccgcctgttcatgaccgcgagccagtcgctctacgcggtctatgtggagacgcagggcgcgcatttctgttga

SEQ ID NO: 1282 - DNA, 369 bp, BradyrhizobiumColbertium
atgggccgcttcaacgtccgctccaactgcgtctcgcccttcgcctggacgcgcatgatcggcaccatcccgaccgagacggaagcggagaaggcccgcgtcgagaagatcaagcagatggggccggagaagatcgctccgctctgcggctatctgctcggcgattccgccaaggacgtcaccggccagatcttcggcgtgcgcatgaacgagatcttcctgttcagccagaaccgcccgatccgctcggtgcagcggagcgaaggctggacgccgcaatcgatcgcggaacacggcatgccggcgctgaagggttcgttctacaagctggatcgttcggccgacatcttcacctgggatcccgtgtaa

SEQ ID NO: 1283 - DNA, 1140 bp, BradyrhizobiumColbertium
atgcgcaagaaccaggttgccgtcgtcggcgcggccgagaccaccgagctcggcgtcattccgaacgcctcgcagctccagctccatgcggacgccgcgctcaacgccattgccgacgccgggctgaaactgtccgacatcgacggctttgccactgcggtcgagacgccgcagcaggtctgccactatctcggcatcaagccgacctgggtggacggcacctcggtcggcggctgctcgttcatgctgcacgtccgccatgccgcagcggcaatcgaggcgggcctgtgcaagaccgtgctgatcacccatgccgagagtggcaagtcgatgatcggcaaggcgccgcgctcgatccctgccgacagcctgcaaggtcagttcgaggcgccctacggcgtctacggcccgcccagcatgttcccgattcccgtgctgcgcttcatgaagacctacgggattacgcacgagcagctggcgtcagtggcggtggtgcagcgggaatgggccgcgaaaaatccgcgcgcgatgatgaaggacccgatcacggtcgccgacgtgctcaactcgcgcatgatcgcctatccattccggctcctgcagtgctgcctcgtcactgacggcggcggcgcgctgatcctgacctcggccgaccgcgccaaggactttccgcgcaagcccgtctacatcatgggcaccggcgagagcgtggagacgccgatggtcagccagatggagaccttcaattcctcgcgcgcgttcaaggtcgcagggcctttggcattcaaggaggccggcatcgcgcacaaggacgtcgatcatctcatgatctacgatgcgtttgcgcatctgccgctgttcggcctcggggatctcggcttcatgccgtatgaagagaccggccagttcatcgccgacggcaatacgcggcccggggctaagctgccgctcaacaccaatggcgggggcttgagctacatgcattcgggcatgtacggcatgtacgcgctgcaggagagcgtgcgccagatgcgcggcatcgcgcccgcgcaggtgccgaatgcgaagatttcggtgtgccacggcgtaggcggcatgttcgccgcgagtggcacgatcgtgtttacgaacgagaggtaa

SEQ ID NO: 1284 - DNA, 414 bp, BradyrhizobiumColbertium
atggccgaaccgcagcgcgcgcgaccgaaaccgacgccggagacccagcatttctgggatggcacgaaagctggcgaattgcgcctgcagcgctgcgacgcctgcgcgcatgtgtacttcccgccgcgtccgttctgcccatcctgcgcctcgcgcaaggtctcggtcttcaaggcgagcggcaagggttttctctacagttacgtgatcaaccaccgccccgccgcgcccggcttcacgccgccttacgcgatcgcggtggtcgagctcgaggagggtccgcgaatgatgagcaacatcatcgactgtccgcagacgccggaggcgctcgagctcgacatgaagctcgaggtcgcgttccaggagctcgacgacaagatcaccctgcccgtcttccgtccggccaagggataa

SEQ ID NO: 1285 - DNA, 1350 bp, BradyrhizobiumColbertium
atgcccgattttccgacactggcgaagctcgccgaagacctcgaaagcggccgcacgaccgcacgcaagctggtcgaggcgtgcatcgccaggatcgccgaccccgccggcgaagggcagcgcaccttcatccatgtcgacaacgacgccgcccttgcggccgccgacgcgatggacgccttgcggagggccaaggcggcgccgtcgccctatgccgggattccgatctcgatcaaggatctcttcgacatcaaggggcaggtgacacgcgcggggtcccgcgccctcgacgattccccgccggccgagcaggatgccgcgacggtggcgcggctgcgccgggccggcttcgtcgtgatcggccgcaccaacatgaccgagttcgcctattccggcatcggcatcaacccgcattatggcacgccgaagggggtctggaaccgggccgagggccatgtgcccggcggctcgtcctcgggcgcggcggtgtccgtgctcgacggcatggcgcatgcttcgctcggcaccgataccggcggctcctgccggattcccgccgccttcaacgggattgtcggctacaagccgacgcagcgccgcgtgccgctcgatggctccgtgccgctctcgttttcgctcgacagcatcgggccgctggcgcgatcggtcagctgctgtgccattttggatgccgtcctcgcgaacgagccgatcagcgcgctcaggccgcggccggtgaaaggcatgcggcttgcggtcccgaccacgatcgcgctcgacgacctcgatactgaggtcgccgcgaccttcgaacgcgcgctgaaatcgctcgccgatcacggtgcgatcatcgagcgcatcgagatggccgaattccacgacatcggcccgatgaacgccaagggcggcttcgcggcgtccgagagctatgcctggcatcgctatctcatcacgtctaagggcgacgtctacgatcccagggtctcggtgcggatcatgcgcggcgaggcacagagcgccgccgactacattgatctcctcaatgagcgccgttctctgatcgcccgcgtcaacgcgcgcgtcgcgccctatgacgcgctggtgctgccgaccacacccaacacgccgccgaaaatcgccgacctcgccgacgatcaggcattcacccgcgaaaatatccgcgccttgcgcaattgcagcctgatcaatctgatcgacggctgcgccatctcgctgccctgtcatcgcgacggcgatgttcccgtcggactgatgctggccggcgccggcggctccgaccgccgcatcttcgaacttgctgccggcatggagaccgtcatccgtgtttga

SEQ ID NO: 1286 - DNA, 687 bp, BradyrhizobiumColbertium
gtgtttgatctcaccttcaccatcgacgcgcagggcaccaccacgccgctgacgctggcgatcgaccaggccgtcatagcgggttggaccggacgcgatcccgtggcccgcgacaagcacatcgctgaactcgaagccgtcggcatcgcacgtccggcctcgacgccgatctactaccgctgctcggcgcggcggctaacccaggaggacgtcatcgaggtctgcggcggcgattcctccggcgaggtcgagttcgtgctgatcggctggcagggccgcattttcgtcggttgcggctccgatcacaccgaccgcaaggtcgaggcctacaacgtcacggtctccaagcagatgtgcgacaagccgatcgcctcgacgctgtgggagatcgaagacgtcatcacccattgggacaagatgatcctgcggtcctacgccacaatcaatggcgagcgcgtgctctaccaggagggcacgctggacgcgatgctgccggtcgacgatctcatcgcgcgcggctttgacggcggcaagctgcccgatggctgcgccatgttcggcggcaccttcgcggcgaaaggcggcatccgtcccgccgaccgattcgacttcgagctggaagaccccgtgctgaggcgcacgatcaggcacggctacgacgtggtgacgctcccggtgcggggctga

SEQ ID NO: 1287 - DNA, 813 bp, BradyrhizobiumColbertium
atgaatggatttcgtgttcgcgcatcgtcgcgtcgcggaatgacggaagtggagaaggtcgtcgccatggcaattgcgaaacgtgttcccgctgccgatgcggcgactgacatcaccgcccacgtcgacaccctcgactggtcccggatcaccggcgaactcgacgtccaaggctgcgcggtcttgaagggcttgctcacgccggaccagtgccgcgccgtcgccgcactttacccgcaggacacgcacttccgcagccgtatcgtcatgggccgccatggttttggccgcggcgagtacaagtacttctcctatccgctgcccgagctgatcgcgcagctccgcccggcgctctatgcgcatctgcaaggcgtcgctaatcgctggaacgaggcgatggggatcgacatccgctatcccgtcacgcccgccgcattcctgaagcgctgccacgacgccgggcaggcgcggccgacgccgctgctgttgcaatatgaggccggcgactacaattgcctgcatcaggacctctatggcgagcacgtgttcccgctccaggtcgcgatcctgctgtccgaacccgggcgcgatttcacgggcggcgagttcgtgctgaccgagcagcggccccgcatgcaatcgcgtgcggaggtcgtgccgctggggcagggcgatgcggtcgccttcgccgtgcatcaccgcccggtgcaggggacacgcggcacctaccgcgttaatctgcgccatggcgtcagccgtatcaggtccggccagcgccatacgctggggatgatctttcacgatgcgaaatga

SEQ ID NO: 1288 - DNA, 654 bp, BradyrhizobiumColbertium
ttgacaggtgatctgttcgacagtgttgccgaggcgcagccgtcgcgcgaggagatcgccgacggcgccgtgctgctgcgcggcttcgtcacgccgatcgagagcgagctgatcgaagcggtgcgcgccatcgtggcgcagtctccgttccggcgcatgaccacgcccggcggccaccagatgtcggtggcgatgaccaattgcggcgagcgcggctggatcaccgatcacaccggctatcgttacgacccggtcgatccgcgcaccggcgcgccatggccggcgatgccgcctttgttccgcgatctcgcccgccgcgccgcggagcagggcggtttcgccgactttgcgcccgatgcctgcctcgtcaaccgctacgagcccggcgcgcggctgtccttgcatcaggacaaggacgagctggattattcggcgccgatcgtctcggtctcgctcggcctgcccgcgaccttcctgttcggcggcccggcgcgcagcgacaagccgcgccgctttcgcctggtgcatggcgacgtggtggtctggggcggcgccagcaggctctcctatcacggcgtggcccctcttgccgatggcgagcattcgctgctggggcggaagcggcttaatctgaccttccgcaggacgcgctga

SEQ ID NO: 1289 - DNA, 1242 bp, BradyrhizobiumColbertium
atgacaaccacacagctctcggccggcacgggcgcggcgaatcggacaggcctctatctcgctgcgctgcaactgatgttcacgctggggtggacgacctatgtcgtttatctgccgagactcgcggccgaggttggcatcgctccgagcgccgtcatcctcatcctcatgctggaccaaggcatcttcaccattgccgacacggcgatgggtatcgcggcggacaagctgacgccccatgtcgggcgactcggcctgttcgtcgggctcatggctgcgatctcctgcggcgccttcgtcgcgctccccttcgttgccggcgccggtccggccgcgcaagtctggttcattgcactgatcgtgatctggtcgatcacgtcctctgcgctgcgcgcgccgccgctcactcttctcggaaaataccgcgccaagccccaggtgccgttcctcgcggcgctggcgatgctgggctacggcgtcgccggcgcggtctcgccctatctcggcgtggtgctgcgcgagcacgacgcaaggttgcccttcgtcatctccagcttcgtgctgctgctcaccgcgctggcgctgtcacggatcgagtccgatgtcgcgcaggatacgccgccgccgacgccggccgaggcggccaagccgcttggcttggtgccgatcgccttcatcgtcgcgatggtggccctggcgttcgggtatcaactgcactttgccatgaacagcggaccgtcctatctgcgctttgccaagcccgacgagctgcaatggctgatgccggtattctggataggcttcaacatcgcgatgtttccggcgagcctcgtggtcaagcatcgcggcggccttatcgtgatgggtgctgccggcctgttcggcgccgcggcgatcgcagcggccgaattcgccggcagcctcaatgttctgatcgccgcacaattcctcgccggcgccgcgtggggctgcatgctgataagcgcggtctcggcggcgctcgccatcggctccaccggcgcagaaggcaaggtgacgggcctcgtcttctctgcgctcgcgctcggaaccttcgcgcggatggcagcggttgccggcggcctgcagaagatgccggaatacgcgccgctgctgcattgggcgccgatcgcctgctggtcagtcgcaggcgccggcttgctggtgattgcagccgcgcgcttgcagggcgctgctcatatcaaggcttcggcgggtggatga

SEQ ID NO: 1290 - DNA, 1629 bp, BradyrhizobiumColbertium
atgaccaccctcaccggcggcgaagcgatcgtaagcgggcttgttgctcacggcgtcgacaccgtattcggcctgcccggcgcgcaggtctacggcctgttcgacgctttccaccaggccgagctcaaggtgatcggcgcgcggcacgagcaggcctgcggctacatggcattcggctatgcgcgttccagcggccggcccggcgtgttcagtgtcgtgcccggccccggcgtgctcaatgccagcgcggcgctgctcaccgcgttcggctgcaacgaaccggtgctctgcgtcaccggccaggtaccgacgcagttcctcggcaagggccgcggccatctgcacgagatgccggaccagctcgcgactttgcgcacctatgtcaaatgggccgagcggatcgaatatcccggcaatgcgccgacgatcgtcgcgcgcgccttccaggagatgatgtctggccggcgcggacccgcctcggtcgagatgccctgggacgtcttcacacagcgcgccgatacggcggcagcccaaatgctggagccgctgcccgcgccgcagccagacccggacttgatcaagcaggcggccacgctcatcaagaacagcaaggcgccgatgatcttcgtcggcagcggtgcgatcgaagcaggcgaggagatcctcgagcttgccgagatgatcgatgcgcctgtcgtcgccttccgcagcggccgcggcatcgtctccaacgcgcatgagctcggactcaccatggccgccgcctacaagctctggcccacgactgacctgatgatcgccatcggtacccgagcagaattgccggcatctggcttccgctggccgtatcagcccacgggactgaaatccattcggatcgacattgatccggccgagatgcgccggattatctccgatgccgctattgtggccgacgccaaggcaggcacggccgatctcgtgacggccgtgaagaaggcgggctatgtgaggagcagcgaccgacgggagaaaatccgggaggcgacggcgtcagcgcaagccgaaatccagcgcatccagccgcagatggcgtacctcaaaatccttcgcgatgtgttgcccgcgaatgcgatcgtcaccgatgagctgtcgcaggtcggcttcgcctcctggtacggcttcccggtttaccagccgcgcaccttcatcacgtcgggctatcagggtacgctcggctcgggctttccgaccgcgcttggcgccaaggttgcgaaccccgacaagccggtggtggcgatcaccggcgacggcgggttcatgttcggcgtgcaggagctttcgaccgcggtgcagttcaacatcggcgtggtcaccctggtgttcaacaacaacgcctatggcaatgttcgccgcgaccagcgcgaacgtttcgacggccgcgtggtggcatcggacctcgtcaatccggatttcgtcaagctcgcggagtcctttggcgtcgccgctgcgcgcgtcaccgcgccggatcagttcaaggccgtgctagagaaggccctcaaccacaatgggccgtctctgattgcggtcgaggtgcccagggattcggaagtgagcccctgggcgttcatccacccgccgaagccttga

SEQ ID NO: 1291 - DNA, 867 bp, BradyrhizobiumColbertium
atgctgcctcgcttcgcgacctattccgtcaatggtgcaaccaggtatggcgccgtcgtggacggcggcctcgtcgatctctctgcgcgtcacgccaaggactatcccacactgcgcgaggtgatcgcggccggcaagctcgtgagccttgcggaggaagccggcggccgcgcgccggatcatgcgttcgccgacatcgcctggctgccgccggtgcccgcgccggagaagatcatctgcatcggcgtcaactatcccgaccgcaatgccgagtacaaggatggccaagacgcgccgagatatccgagcatgttcatgcgctcgccccgctcgttcgtcggccacgacacgccgctggtgcgcccgcgcgcgtccgcgcagctcgactatgagggcgagatcgtgctcgtgatcggcaagcaaggccggcacattccggaaagcgccgcgctcgaccacgtcgctgcgctcacgctctgcaacgaaggctcggtacgcgactggctgcgccacgccaagttcaatgtgacccagggcaagaatttcgattccagcggcagcttgggtccgtggctcgtgccctacactcaggaatcgcagattgcggacgtcaggctcaccacgcgtgtcaacggcgagctgcggcaggacgaccgcaccagccggttgatgtttccggtccgctatctcctgaactatatctcgaccttcgcgacgctcgttcccggcgatatcatcgtcacgggcacgccgaccggcgcgggtgcccggttcgatccgccgcgctacctgaagcccggcgacgtcgtcgaggtcgaggccgagggcatcggactcttgcgcaacggtgtcgtcgacgaagcctga

SEQ ID NO: 1292 - DNA, 984 bp, BradyrhizobiumColbertium
atgccggtaccgcagcacatcttcgagccgccgttcaacatcatccgttccagtcacgtcgtactcgacgtgaccgacctgcagttgagccgcgcgttctacgagaccacggtcgggctgcatgtcgaagatgcggacgatcaggtcgtctatctgcgcgccgccgaggagcatcagcatcattcgctggtgttgcgcaaagccgccgctccggcctgcgcgcgacttggcttcaaggtgggcaatgatggcgatctcgacaaggccgccaagttcctctccgagaacggcctctcctattcgttcgccgaccagcccttccagggccgcacgctgcagtttaccgatccgttcggcttccagatcgagctctacgcgtcgatggaccggcggccgcatctcttgcgtcgctacgatctctaccggggctgccacccccagcggctcgatcatttcaacgtgttcgctgccgaagtgcaggacacgatggaattctacgccaaactcggcttccgtctcaccgagtacgccgaggaggatggacccagcgggcgcatcgccgcagcctggatgcatcgcaagggcaacgttcacgacttcgccatgaccaacggcaggggcccacgcctgcaccatttcgcctattggacgccgaccgcgatgaacatcatccatctctgtgacgtcatggcctcgcaaggcttcgtgaagaacatcgagcgagggccaggacgccacggcatctcgaatgcgttcttcctctatgtgcgcgaccccgacgggcaccgcctcgaactctacaccagcgactacttcacgggcgatcacgatcacgagccgctgcgctggtcgctgcgcgatccgcgccgccagacgctgtggggcgcccctgccccgcgctcctggttcgagcagggctcgccgttcacgggccaggcggtgcgcgagccgaaattcgtcgccgacgtgctggtggcggattga

SEQ ID NO: 1293 - DNA, 1539 bp, BradyrhizobiumColbertium
atggataagcccgctccgaaaaccgatgtgttccaggccaaccgcgaccgcgtcgcgccgttgatgaagaagctgcgtgccgacggcatcggccacatgatcgacggcaagaccgttgcctccatctcaggcgagacgttcgagaccaaatcgcccgtcgatggcacgacactggcgagcgtcgcgcgcggcaccgccgaagacgtcgatcgcgccgcaacggccgccgcgctggccttcagatcctggcgcgacatgggcccggcgatgcggaagaagctgctgcaccgcgttgcagatgccatcgaggacaatgccgaggacatcgcggtgctcgaatgcatcgataccggccaggcctatcgcttcatggccaaggcggcgatccgcgccgcggagaatttccgcttcttcgccgacaaatgcgcggaggcgcgcgacgggctcaacacgccgagcgacgagcactggaacgtctcgacccgcgtgccgatcggcccggtgggcgtgatcacgccgtggaacacgccgttcatgctctcgacctggaagatcgcaccggcgctggccgcgggctgcaccgtcgtgcacaagccagcggaatggtcgccggtgacggcgtccatcctggctgagctcgtcaaggaggccggcgtccccgacggcgtgctcaacaccgtgcacggtttcggcgaagaggccggcaaggcgctgaccgagcatcccgccatcaaggcgatcggcttcgtcggcgagagcgcgaccggttctgcaatcatgatgcagggcgcgccgaccctcaaacgcgtgcatttcgagctcggcggcaagaaccccgtgatcgtgttcgacgacgccgatctcgaccgcgcgctcgatgccgtcgtgttcatgatctactcgctcaacggcgagcgctgcacgtcgtcgagccgcctgctgatccagcaaaccatcgcggataaattcgtggagaggctgacctcgcgcgtgaaggcgctgaaggtcggccatcccctcgatcccgcaaccgagatcgggccgctgatccacgagcggcacctcgccaaggtctgctcctacttcgacgtcgcgcggcaggacggtgctgtgatcgccgtcggcggcaaaacccatgacggcccgggcggcgggcactatgtcgagccgacgctggtgaccggcgcgcacggcaagatgcgggttgcgcaggaggaggtgttcggtcccttcctcaccgtgctgccgttcaaggaagaagcagacgcgatcgagatcgccaacgacatccgctacggcctcaccggctatgtctggaccaacgacatgggccgggcgctgcgcgtcggcgacgcgctggaggccggcatgatctggctgaattcggagaacgtccgccatctgccgacgccgttcggcggcatgaaggccagcggtatcggccgcgacggcggcgactattcgttcgacttctacatggaaaccaagcacgtctcgctggcgcggggcacgcacaagattcagaaactggggatctga

SEQ ID NO: 1294 - DNA, 399 bp, BradyrhizobiumColbertium
atgccgcatttcacgatcgaatattcagccaatctcgacggccgtctcgacatcgcggcggtgtgcgaggtcgtgcgcaaggccgcggtcgaaaccggcatcttcccgatcggcggcatccgcgttcgcgccatccgctgcgagcactatgcgattgccgacgcaaggcacgattacggctttctcgatatggtgctgcgcatcggcgagggccgcgatctcgagacgcgtcagaaggccggcaggcatgtctttcaggcgctctcgaaacacctcgatcctgtctttgccgccagcaagttcgctctatcgttcgacatgcagatcaacgacaaggacaccagctggaaacgcaacaacatccacgacgccctgaaagcggaggccgcccatggataa

SEQ ID NO: 1295 - DNA, 807 bp, BradyrhizobiumColbertium
atggcgctttccagcgacgatatccaagcttgcgcgaggcgtctgcaccaggcggagaagacccgcacgcagatccggcagctctcgcaggactttcccgacatcaccatcgctgacgcctacgcgattcagaaggcctgggtcgacgtcaagatcgccgagggccgcgtggtgaagggccacaagatcggcctgacctcgaaggcgatgcagagcgcgctcgacatcgacgagccggattccggcgtgttgctcgacgacatgttctttaccgacggcgggatcatcccgaccgaacgcttcatcgcgacgcgcgtcgaggccgagctcgctttcgtcatgaccaagcgactctccgggcctagttgcacgatgttcgacgtgctcaatgccaccgatttcgtcgtgccggcgctggagattttggacacgcgtatcgagcgcgtcgatcccaggaccaaaacgacgcgaaagatctatgacaccatcgccgacaatgcggcgaatgccggcatcgtgctcgggggacggccgatccgtccgctcgacacggacctgcgctggatcggcgctctgtgcttcaagaacggccagctcgaggagaccggtcttgccgccggcgtgctcaatcatcccgccacggccgtggcctggctcgccaacaagatcgcgccgcttgggctcgcgctggagccaggccaggtcgtactggccggctctttcatccgtccgatcgagacccgcaagggcgacacaatccaggccgattatggcgcctacggctcggtgagctgctacttcgcttag

SEQ ID NO: 1296 - DNA, 519 bp, BradyrhizobiumColbertium
atgacgaagaaacttgctgatcccgccgacggaaacgcgcctgccgcccggcacgtgccgatgcgcgacttctcgcgttcgttgcccatgtcgttgctgcgggcccgggaggcggtgatgcggcagtttcgtccctcgctgcgcgagcacggtctgaccgagcagcaatggcgcatcctgcgggcgcttgcggccatcgaggcggtggaggtcacggaacttgcccgcaccgcattcctgctcggaccgagcctgtcgcgcattttgcgcgaccttgaggcccgcaatctgatcgaacggaagacagcgaaagcggaccagcgccgcagcatggtctcgatctcgaaagagggcgtgaagctgatggccgccgtggcgccgacgtcggaggcaatctatgccgagatcacgcgccgctttggggcgcgcaagctcgtcgaattgcaggagatgctcggcgaactcgaacagagtctggcggggcgcggaagcgcggatgagacaatagccgaggggtga

SEQ ID NO: 1297 - DNA, 777 bp, BradyrhizobiumColbertium
gtggcgaacaaggtcaaggaaatctggaagtcgggcaaggcggtcgtcaacgcttggctggcaatcccctccggcttctcggccgagatgatcgcgcaatgcggctttgacagtgtcaccgtcgacatgcagcacggcgtgcaggactatctgtccatggtgcagtgcttccaggccatggacaagcatccggtcacgccgatggtccgcgtgccctggaacgagccggggatcatcggcaaggtgctcgatggcggcgcctatggcgtgatctgcccaatggtcaacacgccgcaggaagcccggaacctggtctcttattcgaagtaccccccgaagggcgtccgctccaacggtccaatccgcgccggcatgtacggcagcgcgggctcataccagaagacggccaacgatgagatcgtgctgctgccgatgatggagaccaggacggcagtcgagaacatggaagcgatcctcgacgtcgaaggcatcgacggcgtttatatcggtccgtccgatctcggcttctcctacggcctcgagcccaagcttgaccggaccgagcccgagatcctcgccatctatgagaagatcatcaaggagtgcggcaagcgcggcctcaatccgggcatccactgcagcggcgccgaaggcgcggcgcgcgccatcaacatgggcttcaagctggtgacgttgtcgaacgaagtcggcctgatgacgacctacgccaggatgcaggtcaacgcgacccgcaaggattccggcggcaaggcttaa

SEQ ID NO: 1298 - DNA, 1524 bp, BradyrhizobiumColbertium
atggccatcagccccgtcatccgcctgcatccagatgatggtgtggtgatcgcacgcgcgagcctgccgccgggaacggtggtcgccgacggcgtgaccacggtcgatcgcattccctccggccacaaggtcgcgatcaagccgatcgcattgggcgaaccgatcaagcgctatggccagatcatcggctttgcgacccaggccattacgccgggccagcacgtgcacgtgcagaattgcggcatgggcgacttcgccaaggactacgcctattgcgcggacgtcaagccgacgccgaacttcgacctgccggcgacgttcgaaggcatccgccgcccggacggccgcgtcgccacccgcaactatatcggcatcctcacctcggtgaattgcagcgcgcatgtcgcaagcctcgtcgccgacgtcttcaagaagaaccccttcagcggcgacaatccgttggccgacttccctaatgtcgacggcgtggtcgcgctgacccacaagaccggttgcggcatgacgcagaacgagccgctggcgctgctccgtcgcacgctcggaggctatgcgcggcacgtcaatttctcgcatgtcatcgtgctcggcctcggctgcgaggtgaaccagatcggcggcctgatggaagagcagaagctcgccggccgcctgcgcgcaatggacatccaggaggtcggcggcacccgcaagaccgtggaggcgggcatcgccttcgtccgcgaggcgctcgccgatgccaacacagtgaagcgtgagacggtgccggcgagcgagcttaccgtagcgctgcaatgcggcggctcggacggctattccggggtgtcagccaatccggcgctcggcgccgcgagcgatctcgtcgtccgccacggcggcaccgtgatcctgtcggagacgccggagacctacggggcggagcacctgctgacgcgccgcgccgtcagccgtgaggtcggcgagaagctggtcgacctcatgcgctggtgggacgaatacacgacgcgcgaaggcgccgagatgaacgccaatccgagtcccggcaacaaggccggcgggctcaccaccatcctggaaaaatcgctcggcgcgatggcgaaggccggcacaaccaacctcgtcgaagtgctgcgctatgccgagcccgtcaccaagaagggctttgtgttcatggacacacctggctacgaccccgttgcagccaccggtcaggtcgccggcggcgccaatctcgtgtgcttcaccaccggtcgcggcagcgtgttcggctgcaagccggcgccttcgatcaagctcgccaccaacacgccgatgtacaagcgcatggaagaggacatggacgtcaattgcggcaccatcctcgaaggcgaggagagcgtcgagcagtgcggacagcgcatcttcgatctcatcctcaagaccgcctcgggaaagccgaccaagagcgagagcttcgacttcggcggtgccgagttcgcgccctgggtgctgggcgcgacgatgtag

SEQ ID NO: 1299 - DNA, 495 bp, BradyrhizobiumColbertium
gtggagaatctcctcggtgaggaggagttgatcgtatcgaagaccgatctgaaggggcgcatcacctatgccaatgatgtcttcatccggatggcgaagtactcgtggaaggaactgatgggcgcgccccacagcctgatccgccatcccgacatgccgcttgccgtgttcaagctgttgtgggacacgctccagtccaagcaggaaatcttcgcctacgtggtcaatctggcgaaggacggcagccattactgggtgttggcccacgtcacgccgacattcgacgagcgtggtaatgtcgtcggctatcactccaaccgtcgcaagcccgaccccgcgcagatcgatcgcatcaagccgatctacaagacgctatgcgcggaggaagcgcggcatgccaatgccaaggaaggcatgcatgcgagcttcgaggcgatggtcgggctgctcaagcaacagggtgtcggttacgatgaatttgtgctctctctctaa

SEQ ID NO: 1300 - DNA, 1107 bp, BradyrhizobiumColbertium
gtgtgccgcaaggcggcgcgcggcgatctcgaggcccggatcatgaccgagcgccaggccgggcggatcggtgcgatccagaagtccgtcaacgacatgctcgacatcaccgacgccttcgtccgcgaggcttcggcgtcgatggactatgcaagccgcggcaggtatttccgcaagatcctcgcgcgcggattgcccggctcgttccgtcgctcggcggtcgtcatcaatgccggcaccgacagcctcggccgccgcgttgtggagatcgccggcctcgcgcgagagttcggtacgcatctcgacgcagtcgcgggcggcctcatgtgcgccgcgaccgatctcgaatccgacgccggtcagatggccgcggcggcggagaagaccagccggcagacctccggcgtgctcagtgcgtccgaccaggcctcgcgcaacgtcgccaccgtcgccagcgccgcggagcagctcgcatcatcgatcgccgagatcaaccgccaggtggccggctcgaccgcgagcacggggcgggcggtgaacgaggccaatcgggccggcagcgagatccgcacgcttgcggatgccgcgatgcagatcggcgacgtcgtcaagctgatcagcgagatcgcctcgcagaccaacctcctcgcgctcaacgccacgatcgaggcggcccgcgctggcgaggccggccgcggcttcgcggtggtggcctccgaagtcaagagcctcgccaaccagaccgcgaaggcgaccgaggagatcagcgccaaggtcggcgagatgcagcattcgacgaccaattcggtcgcggccgtcgaggcgatcgcgcagaccatctccgagatcaacggcatcacggccagcattgcagcatcgatcgagcagcagggcgccgcgacgcgcgaaattgcccgcaacgtccaagaagcctcggtcggcacgtcgcaagtttcctccaacgtgacgggcatcagcgaagctgccgccgataccggccgcgtcgccggccgcgtcaacagcgcctccgagcgcgtctatggcgaagtcgagacgctccggcgcgaggtgacgcagttcctgcagcggctgacgtcggcggcgtag

SEQ ID NO: 1301 - DNA, 3270 bp, BradyrhizobiumColbertium
gtgtcgatctacgtcgcgctacaccacgtcacgcactacaaatacgaccgtccgatcgatcttggcccgcagactatccggctgcggccggctccgcacacgcgtaccccgattttgagctattcgctcaaggtcacgccctccaatcatttcgtgaactggcagcaggatcctcaaggcaactgggtcgcgcgttatgtctttcccgagaaggccaccgagctgaagttcgaggtcgatttcacggcgcggatgaccgtggtcaacccgttcgactttttcgtcgagccttacgccgacagctttccgttcgaatatcccgatgatctcaagaccgagcttgcgccttatctcgagaccatcaagcccgatcgcctgttcgccaggtttctcgactcgatcccgcacgaggccccgaacaccgtcaacttcctggtcgagctcaatcgcgagcttcagaagaaagtccgctacatcatccggatggaaccgggcgtgcagacgccggaggagacgcttgcctccggcgcaggatcatgccgcgactccgcctggcttctgatccagacgctgcgccatctcgggctggccgcgcgcttcgtctccggctatctgatccagatccgtcccgacatcgatccgatcgagggaccgccggaagtcgagaacgatttcacggatctgcacgcctgggccgaagtctatctgccgggcgcaggctggatcggattcgacgcgacctcgggcatgcttgccggcgaggggcatattcccgtcgctgccacgccgcactatcgctcggcggcgccgatctccggcggggccggctttgccgaggtcgaattcagcttcgacatgagcgtgaagcgtatccgcgaggcgccgcgcatcacaaagccgttctcggacgaatcctgggcccgcctcgacgatctcggcgagcaggtcgatggcgatctcgccagcgcggacgtgcgtctcaccatgggcggcgagccgaccttcgtctcggtcgacgatcccgaagctggggagtggaatacggaagccgtcggcccgaccaagcgcgcgctcggcgacgatctgatccgccggctgcgcacgcgctttgcgcccggcggcctcctgcactacggccagggcaagtggtatccgggcgagagcctgccgcgctgggccttcggcctgtactggcgcaaggacggcgtgccgatctggaggaacgccgacctcatcgcgaagatcgagaatccacggcgtcccgaggtccgggatgccgaggccttcatggaaggcacagcggcgcggctcggcctcgatctcggctacatcatgccggcctatgaggatcccgcctattggctgcagaaggaggccgagctcccggtcaacgtcgaccccaccgattccaaactgtcggatccggaggcgcgcgcacgcatggcgcgcgtgtttgaccagggcctgaccacgccgcgcggcttcgtgttgccggtccaacgctggaatgcgccgccgcgctggcgcagcgagcgctggtcgctgcggcgcaatcatctattcctgacgccgggtgattctccgctcggcctgcgcctgccgatcggttcgctcgctcacgtcccgcccaaccagtatccctacatcgtcgagcaggacccgatggagccccggggcaagctgcccgtcttcacgcgcatggcccggccgccagcgccgccgcgtacggctcccgagcatctcaacacggcaattcctgtgcgcaccgcgttggcgatcgagattcgcgacggcgtgatctgcgccttcatgccgccggtcgagcgcatcgaggattatctcgagctggtctcggcgctggaagataccgccgaagagatgcagcttcccgtccatgtcgagggctacccgccgccgttcgacccgcgcatcgaggtgattaaggtgacgcccgacccaggtgtcatcgagatcaacatccagccggcgaggagctggcgcgacgcggtggagatcacctccggactctatgaggacgcggcgaaggtgcgcctcggcgccaaccgcttcctggtcgacggccgccacaccggcaccggcggcggcaatcacgtcgtggtcggcggctcgagcccgcaggattcgcctttcctgcgccggccggatctcttgaagagcctcgtgctgtactggcagcggcatccatcgctgtcctacttcttctccggcctcttcatcggcccgaccagccaggcgccgcgcatcgacgaagcccgccatgacagcatctacgagctcgagatcgcgctctcgcacgtgccgccgccgggcacccagacgccgctgtggctggtcgaccggctgttccggcatctgctcgtcgacatcaccggcaacacccaccgcgccgagatttgcatcgacaagctctattcgccggagggcccgaccggccggctcggcctcgtcgaattccgcgctctcgaaatgccgcccgatccgcgtatgtcgctggcgcagcagctcctgatccgcgcgctgatcgcgaagttctggcgcgagccgctggcgggcaagttcgtgcgctggggcaccgcgctgcacgaccgctacatgctgccgcatttcatctgggaagatttcctcgacgtactcaccgagctgaagcagttcggctatccgttcgagccggaatggtacctggcccagctcgaattccgctttcccgccttcggccgcgtgcatcatggcggagtgaccctggaactgcgccaggcgctggagccctggcatgtgctcggcgaggagggctcggccggcggcaccgtgcgttatgtcgattcatccgtcgagcggctccaggtcaaggccgagggcttcgtcgaaggccgccacatcgtgacctgcaatggacgccgcctgccgatgacctcaaccggccgctcgacggaagctgtggccggggtccgcttcaaggcctggcagccggcctccggtctgcacccgaccatccccgttcacgcgcccctgacgttcgatctgatcgatacctggaacggacgctcgcttggcggctgcgtctaccacgtcgcccatcccggcgggcgcaattacgacaccaagccggtcaatacctatgaggccgaggcgcggcggctggcgcgcttccaggaccatggccacacccccggtccggtgcagccgccgccggaggaacgcacaaatgagtttccgctgaccctcgacttgcggaccccgctcctgcaatga

SEQ ID NO: 1302 - DNA, 2538 bp, BradyrhizobiumColbertium
atggagacgcgcatgggcgagggcgcagccgaacaggacgacaaggcgggcagggcgcagagccagcgcgagggccagcgccggctcgcacaatgggtgcgcgactatagccggctccccggtattcccgacgagttcttgggcccgaacggcacgccgcgcgccgtgtggagccgcttctttgacgcatttggtgcgctcgcgcccgacgagatcgagcggcgcttcggcatggccgaccgtcacttgcgcgaggccggcgtcacctatcgcgcgccgggcgatagcgccgaccggccctggtcgatcagccatctgccgcttttgatcgacgaggccgactggcagcagctctgcgccggcatcacccagcgcgccgagctgctcgagcgcgtgctgcgcgatatctatggcgaaggccggctcgtggccgaaggcgcgctgccggcggccgcgatcgccggcagccccgaatatcttcgtcccgtgtgcggtgtgccgccgccgggcggacgctatctctcgctctatgccgccgatgtcggacgcgggcccgacggtcgctggtgggtgctcggcgaccgcacccaggcgccgtcgggcgcgggctacgcgctggagaatcgtctcgtgctctcgcgcgccttctccgatctttacaagtcgatgaacgtgccgcgggttgcgccgttcttcgaggccttccgcgattccttgcgcgcgcgcgccgaccgcgacgagcccaggatcggcgtgctcactcccggcagcttcagcgagacctatttcgagcatgcgacgctggcgcgctatctcggtttccttctggtcgagggcgaagatctcgcggtcagcgacaaccgcgtccacatccgcactgtcgccggcctcaagcggctggacgtgctgcttcgccgcgtcgattcgaattcgctcgatccgctcgagctcgatgcctcctcgcggctcggtgtacccggcctgatcgacgtgctgcgcaaggatggcgtcgtcgtcgccaacatgccgggctcgggtgtcctcgaggcgcgggcgctgctcggcttcctgccggcgctcagccgccgcttgctcggcgaagacctgaagatgccgcatatcgcgacgtggtggtgcggccagcgcgcggcgcgcgacgaggtgctggcgcggctcgacgaggtcgcgatcgaaggtgcctaccggcgcgacgttcccggtttcgacagcaatggtcccgtgctcgcgagcgagctcgatgccgccgaccgccagcgcctcatcgacgccatcaccgcgcgcggcatggactatgtcggccaggaggtggtgcggctctcgaccatgccggtctgggagaaggggcaactcacgccgcgccccttcgtgctgcgcgtgttcgcggccgccacgcccgacggctgggcgatcatgcccggcggcttctgccggatcgccgagcagccggacgcccgcgcggtgtcgatgggtgacggcgcccgcgccgccgacgtctgggtggtctcggacaagcaggtctcgaccgcgacgctgctgcccgcgaccgacaaggtgcgcatccgccgcatcgccggcgtgctgccgagccgtgccgccgacaatctgttctggctcggccgctacctcgaacgcgccgaggcgacgctgcggctggtgcgcgctttgggctcgccgagcgggcccaacaagggcaccgcggcctcggtgcaatcggctgaacgcatccagcgcctgctggtggcctggggcgcgatctcgcagacatcgcgcaccgcctcgggccgcatcacggcagaagcgctgcagagtgcggagcgtttcggctcggcactgtcgctggtgcgcgcggcccagcgcacggcgacctcgctgcgcgagcggctgtcgcccgatgcctggcaggtcatcaccgagatggtcgagcgtctcgccctggaggtcgaggacgacgacagcgtgttaagcgccgccgagctcacgttgcaggagctggcgagctttgcggggcttgcgcaggagaacatgaaccgcgccgccggctggcgtttcctggacatcggacgccgcatcgagcgcgccatcaacaccacccgcttcacgcgccagttcgcctatgatgaggccggcgacgaggatctcgacatcctgctgacgctggtggactgccagatcacctaccgctcccgttatctgctggcgccgatcctggccccggtgcgcgacctcgccgtgctcgacggctacaatccacggtcggtggcgttccaggtgacgacgttgaacgagcacatcgccgcgctgccgagcctgagggagcacggcctgatcgagaagccgcagcggctcgcggtggcgatgcaggcgatgcttgcgacggcggaggccgagaagctcgaggtcaagacgctgttcgcgctggagcaggatctgctcagcctcgcggacgcgatcgggcagcactatttcccacacggtcccaacgccagccggccggaaaagctgacggggctggcgtga

SEQ ID NO: 1303 - DNA, 879 bp, BradyrhizobiumColbertium
gtgatctacgacatccgtcacgtcaccacctacgagtacgaaaatccggtcagcttcgctcgctgcacgctgcggctcgagccgagaagcggaggcggccaggaactgatctcgcacgatgtcgagatccatccacggccggccgagcgcaaccagcggcgcgatttcttcggcacactgacggaaagcgtcacgatcgaagccgcccatcgcagtctgcgcatcgactcgcgctcgcgtgtctcggtgtcacgccagcctcccgcccgtagtgcggccggcccgtcctgggagagcattcgggacatcgccatcgaggcgacgagcctcgggccgtcctcgcccgtcggctatgtcttcgcgagtccgctggtaccggtgctgcgcccggtcagcgcctacgccgcggaaagctttgcatccggcaccggcattctcgagggcgcggtcgacctgatgcaccgcatccgcagcgaatttcgctacgacccgaaggcgacggtgatcacgacgccgctcgaggaggtcttcgacaaacgccatggcgtctgccaggactttgcccatgtgatgatcgcggggctgcgtgggctaggcctgcccgcagcctatgtcagcggctacctgcgcaccattccgccgccgggccagcggcgtctgcagggcgccgacgccacccatgcctgggtgtcgctgtggtgcggggcggagcttggctgggtcgatctcgatccgaccaacgatctcctgatcggcaacgatcacatcgtgcttgccgtggggcgcgatttttccgacgtctcgccggtcgacggcatcatcgtcggctcgcccaggcagaagctcaatgtcgccgtcgacgtgctgcttgtggagtag

SEQ ID NO: 1304 - DNA, 813 bp, BradyrhizobiumColbertium
atgccaattttccttgaccggcacgatctctcggggctgaccgccgccgatatcgccgaggcgcatcgcaaagatctggaagtgcaagatcgatacggcgttcgttttctaacgtactggtttgatgaatcccgcggtacgggcttctgtctcattgacgcaccggatatccgaacggcgatgagggttcatgacgaagctcacggcgacgtagcgaaggatgtcatcgaagtggacctctcggcggtccaggcgtttctggggagggtgtccgacccggcacctggcggcgcggcagacgacatcaaattcgattctgcgctgcgagctatcatgttcaccgacatcgttggctctaccagcatgacggagcgtcttggcgatgcccgttcagtggagatggttcgggctcatgacgcgctggtgcgccgggcgttgaaggacgagggcggacatgtggtgaagcacaccggcgatggtatcatggcatcctttgccgacgcctctgcctccgtgcaatgcgcccgcgccatccagcgcgcatttgaagccttcaatctggcgagcaaggagaagcttcaggtgcggattggcatcgatgtcggcgagccgattgctgacagcaacgacctcttcggtgcgaccgttcaactggccgctcgtttgtgtcagttggccgaccccgatgccattctggtgtcaaaggctgtacaggattgcatccgggatcgcgtgcaagtgtcaagcttgggtgcccaccatctcaaaggctttcagcagcccattgatgcataccgaatcgaatggcgttaa

SEQ ID NO: 1305 - DNA, 219 bp, BradyrhizobiumColbertium
gtgacctgggcggacggcgattggacgctgggcttcgacggatgtcccgcccacacgtatgggagcatccttgctgatctgtctggtctcgatgagctcaccgcagtcgaacgctatctcgctgacgtcatcggcaacgtcagcgttattgctctcaggcgattttctggtgttccaagcgatggttggttaactgatgtcctgccgaagaagtggtga

SEQ ID NO: 1306 - DNA, 324 bp, BradyrhizobiumColbertium
atgctcgtggtcttggttggcggcatcacacccgtgaacactgacctggtgttcgacaagttcgcggattgcctttcggccgaagagcagatgcgcaagcactattccgacgcgttcgaggcctgggaccgttgggcggcggccaacattgagcgccggcgcgaatactcgaaagcgcgagaactgcaggccaagagacttctcagcaatatcgggacctgtgtgccccatggggccgatgatcagaagcccgtcgcgtctcccaatccctctgctcccgcgacgtcaccctcgccagcccctcaaccaaatccgcggccctaa

SEQ ID NO: 1307 - DNA, 243 bp, BradyrhizobiumColbertium
atgagattcattctgacaatcgtcagcctcctgggagtgctcacgtcgcccgcgcttgccgatcactggaaagatgaaagcggtaaggggcgctggggctacgaccgtggtcattaccgcgcttacaactacgaccgcgaatacaagcaagagtaccgccgaggcccctgcaagatcgagcgcaagtggggcaagcacggcgagtacaaggaggcgacgaagtgcaaaggttatcgcaactag

SEQ ID NO: 1308 - DNA, 825 bp, BradyrhizobiumColbertium
atgaagctgctgcatctgagcgacattcacctgacggcgcctggctcgaccatcgggggccgcgacccgcgcatcaatttcgaacgggcgctcgcgcatgcgctgaatgatcatcacgacgccgaattgatggtgatcaccggcgatctctcggactggggcgacctcgccgactatcaatggctcaagcagcgcctcgacgcatatccgctgccggtgcggctgtgcatcggcaaccacgaccggcgcaccgccttcctgagcgtgttccccgacctcgccgacgacaacggcttcgttcaaggcatccacgacaccgtcgccggccgctgcctgttcctcgacaccgcccatccggaaacgcacgccggccgctattgcagcgatcgtctcggctggctcgaggcgcggctttccgagcatgacgggccgttcctgctcttcatgcaccataacccgatgccggtgcatctcgtcccgttcgaccagatcggcctgctcgacgatgctccattccggcatctcatcagccgccatcgggcgaagatccgccacgtgttcttcgggcattgtcacttgcctcttgccggctcgattgcgggcgtcccggtctcgtcgctgcgcggtaccaaccatgcgagctttccgctgttctccgagacgagcctgctgagcgcttgcgatctgccgcaatcctatggcgtcgcatttcttggggaagattatgtgaccgtgcacatggtggagtacggctacgacggtcccatccgcatccagggttcgcctgattacaaggcctgggatcgcgagaccatggttcggtga

SEQ ID NO: 1309 - DNA, 1281 bp, BradyrhizobiumColbertium
atgctgaagaccatcatcgccgcagcggctctgtcgctcgtggccggatctgcgctcgcgcagacccagaccgagatcgtgatgcagtatccctatccggagctgttcaccgagacccacaagcgcatcgccgaggaattcgccaagatacacccggagatcaaggtcacgatgcgggcgccttacgaatcctacgaggacggcacccagaaggtgctgcgcgaggccgtgaccaaccagatgccggacgtgtccttccagggcctgaaccgcatccgcgtcctggtcgacaagaacatcccggccgcgctcgacggttacatcgccgccgagaaggatttcgacaagcagggctttcatcaggcgatgttcgacatcggcaccgcgagcggcaaggtctacgccctgcccttcgcgatctccctgccaatcgtctacgtcaatctcgatctggtgaagcaggccggcggcgacgtgaacaacctgcccaagacctgggacgacctgatcgcgctcgccaagaagatcaaggcgctcggcaacgacaccaacggcgtcacctacgcctgggacatcaccggcaactggctgtggcaggcgccggtcttcgcgcgcggcggcaccatgctcaacgccgacgagaccaaggtcgcgttcgacggagcggaaggcaagttcgccatcaacacgattgcgcggctcgtcaacgaggccggcatgcccaatctcgaccagccgtcgatgcgcgcgacgttcgctgccggcaagaccggtttccacatcacttcgacctccgacctcaacaaggtcacgcagatgaccggcggcaagttcgcgctgaagacgattccgttcccggacgtcgcgtccccgaacggcaggctcccggccggcggcaatgtcgtgctgatcctcgccaaggacaaggccaagcgcgacgccgcctgggaagctgtgaagttctggactggcccgaagggcgccgcgatcatggcggagaccaccggttacatgcctccgaacaaggtagccaacgacgtctatctgaaggacttctacgtcaagaaccccaacaattacaccgcggtcagccagctcgcgctgctcaccaagtggtacgccttccccggcgacaacggcctgaagatcacggacgtcatcaaggatcatctcaactcgatcatctcgggcgcccgcaccaaggagcctgaggccgtcctcgccgacatgaccgcggacgtgcagaagctgctgccgaagaccaccggcgcggcgcgctga

SEQ ID NO: 1310 - DNA, 792 bp, BradyrhizobiumColbertium
gtgctgctgatcgccggcgcggcaatcatgctggcgcccttcatctggatgatctcgaccgcgtccaagccgcaaaccgagatcttctcaagcgaactgcacctgatcccacaccagttcgcgctggcggagaatctgcgcgaggcattcgccaaggccaatctgctgcgcttcctgctcaacggcgtcatcgtcacggtctcgatcttcctgctgcaggtcatggtggcgctgccggcggcctatgcgctggcaaagcttcgcttcctcggccgggagacgatgttcgcgctggtgctgttcgggatactgaccccgccgcaggcgaccgcggtccccgtcttcctgctgctgcacaaggcggggctgctcgacagctatgccgcgctcgtccttcccttcacgatctcggtgttcggcatcttcctgatgcgccagttcttcaagaccgtgcccgacgatctcgtcgacgccgcgcgcatggacggcatctcggaattcggcatcgtctggcgggtgatgctgccggccgcgatcccggccgtcaccgccttcggcatcttctcggtggtcgcgcattggaacgattatttctggccgctgatcgtcctcaacagcgagcacttgcgcacgccgccgcttgcggtcgcccatttccgcaacaacgaggccggcacgagctacggcccgctgatggccgcggcgatggtgatcatcgcaccgctcgtcatcgctttccttttcgcccagcgccgcttcatcgagggcatcaccctcaccggcatcaagtaa

SEQ ID NO: 1311 - DNA, 948 bp, BradyrhizobiumColbertium
atgtctgacggctcgatgacaatggacgccgcgatcgcgcctgccagcgcggcaaggcgcgcggtgccggtccacggcagccgacgcacgtattccgcctacgccttggtgacgccggcggcggcgctgatgctgatcatgctgctcggtccgcttgccggcgtgatcgccctctccttcacagattaccagctcggcgcgccgcatttctcctggatcggtctcgccaactaccaggaccttttcgccgacaaggtgttctggactgcgctgcgcaatacgctgacctacgtcgtgatcgtggtgcccggcgccgtgatcgccggccttgcgatcgcgctcctgatccagagcggcaccagcctgcgcagcctctaccggacgatctatttcctgcccgtgatggcgaccctgatcgccatggccgtggtctgggagttcatgctgcatccgcaattcggcctggtgaacgggatgttgcgcggcgcgggcctgccggcatttgcctggctgcaggaccgcaacaccgcgctctatgcgctgtgcgcgatcggcatctggcaggcggtcggcttcaacatggtgctgtttctcgccggcctcgtctccattcccaagcagctctacgaggcggctgaaatcgacggtgcgtcgagcggctgggcgcggttccggctcgtgacctggccgatgctgggaccggtcacgaccttcgtcgtcgtgatctccggcattcgctccttccaggtgttcgacaccgtccacgtgttgaccaagggcggcccgtcgaaatcaaccgaggtcctgatccacaccatgtacacggaaggattcgagttcttccgctcgggctacgccgcggcgatcaccgttgttttcctggtcttcgttctgctgctcacgctgatcaaatcgagactcgccgatcgcggggtgcactacacatga

SEQ ID NO: 1312 - DNA, 1152 bp, BradyrhizobiumColbertium
atggcgcagatcgaactttccgcaatccgcaaatcctttgacggtaccgacgtcctgaagggcatcgatttccggatcgaggacggcgagttcatctcgctggtcggtccctccggctgcggcaagtcgaccctgctccgggtcattgccgggctggagccgcagaattccggcgaggtccgcatcgacggccgcccggtggacggcattcgcccgagcgcgcgcaatcttgcgatggtttttcaatcctacgcgctctatccgcacctaaataccttcgacaacattgcggtgccgctgcggatgcgtcgcctctcggcgatcgagcgcctgccgctcctaggtgcggtgctgccgggccggcgcgccaaggaacggcacattcgcaatgacgtcgaagccatcgccgagcagctcgacattgctccgttgctgcggcgcaagccggggcaattgtccggcggacagcggcaacgcgtcgcggtcggacgtgccatggtgcgcgagccgcgggccttcctgttcgacgaaccgctctccaatctcgacgcaaagctgcgcgtccacatgcgcgcggagctcgccgagctgcaccgccgcctcaaggcaacgttcgtctatgtcacgcacgaccaggccgaggcgatgaccatgtcgagccggatcgccgtcatgatggacggcgaattgatccaggccggcacgcctgcggagatctacaacgatcccgaggacatccgtgttgccgaattcatcggcagccccaagatcaacatccttccaggccggatccggaaggacggcggcgtcgatgtgctggggactgccctgaaattatcctgccgggctgcggccggcgactgtcgggtcggcgtccgcccggagcggatcgacctcggcgccgggccgttctccggaacggtcgtccatctcgagaatctcggcgccgaggcattcgtgcaccttgcgatcgaaggctccgggttgcgcctgatcgcgcggctggcggacgtccggcatctgcccgggatggccagctccgtcaccttcggtttcgcccccgacgcggtacggattttcgatccggccgggaagcggatcgagctcaaggtggagcagcccgagcgcgttcgtgagcccgcccatgtctga

SEQ ID NO: 1313 - DNA, 900 bp, BradyrhizobiumColbertium
gtggcgttgacgtcctcgcgtgtccgggcggtcaatgcggtgttcgagaccggcagcttcgcggccgcagcaaggcggctcggggtatcacagccggccgttgcgcagctcgtgcgcgacctcgaggccgagttcgcagtggcgctgttcgaccggcacggacagactctgatcccgacgccgctgtgccggcggctctacgctgcaacgaaccgcatgcaagccatcgaggcggatgcgctggcgatcctgcagcagcgcgatgagctcacggggggcgagctgcgcatcgggcttggcaatgccatgccgggcatggcgctgattgcggcgttccgcaatctgtatccgaagatccagatcaacatcgagatcggcagctggtcggcgatcatggccgcggtggtcgaccagcgtgttgacgtcgcagtattgcccgaggtgccgcaggacaatcgcttccggcgcgagtcctgcgtccagcagcgcgtcgttgcgatctgccatcccgttcacgagctcagtcgccaatcgcgcgtgtccatcgccgacctcgtgcgatatccgctggtgtttcgcacccgggattccgcgacccaacgcgccgtggacagggcgtttcgcgccgtcaacctgcgcgccagtccggcgatcatcgtcaatacgcgcgaggggatgctggaggcggttgccaatcggcttggtgtcggctttgtgtgggagcacggctcgagccgcatcgatcggatcgcgaaggtggcgatcgccgaaatcgaggcggactcgcccgagtacattttctcgctggccggcaaacgcggcaagctggtcgagctgttctatctggccagaagcctgtcgcgctcggctgaaggcgccgccatcctgtccgctccttga

SEQ ID NO: 1314 - DNA, 828 bp, BradyrhizobiumColbertium
atgatgaccttaccgagactggcggctgaatccctggaggaattcctcggcaggttcatgcgccgccggtacgatgagacttctgcaagtatcgtcgagagcgcgacccgcaccgcgatggaatgcatcggcaacagcgatgcgctctaccacaacatcgagcatacgatgctggtgacgctggcggcccaggcgatcctccgcggccgaagtcttcatacgcatctgtcggccgaggactacgtccatgtcctgatcgcctgcctcgcccacgacatcggctatgtccgcggcctgttcgaggaggacgacgccgaaggcttcatcatcgatgcggccgacaccaagatctcgttgccgcgcggtgcctcggatgcgagcctgatgatgtatcacgtcgacaggtcgaagctctacgtgacgcggcggctccggcatattcccggcctggatccggaccgcattgccagcgccatcgaaggcacgcgctttcccgcccgtgaagggcaggaatacgacgaggaagcctcgatcctgcgcgcggcagacttcatcggccagctcggcgatcccaactatctgcgcaaggccaacgcgctctactacgagttcgaggaggtcggcatcaaccgccagctcggctacgactcgccggccgacatcgtgaaccgctatccgcagttctattggaacagcgtcgccccgcacatccagaccgagatcggttatctcaacaagacggagatcggccggcagtggatcgccaatctctacagcaacgtgttccgcgccgagcgcgacatttcgctgtccggcccgcagagatag

SEQ ID NO: 1315 - DNA, 891 bp, BradyrhizobiumColbertium
atgcaacaaaaaacagtcagcacggacatcctcgatattgcctatcgcgaatacggcgcggcggatggctggccctgcatccttggccacggctttccctatgatgtgaacgcctatgccgagaccgcgccgatcattgccgaagcgggcgcgcgggtgctggtgccctggctgcgcggttatgggccgacgcggtttcgctccgccgggacgctgcgctccggcgagcaggcagcgcttggcgccgatctgctggccttcatggatgcgctcggcatcgagcgggcactcgtcggcggttatgattggggcgggcgcgcggcctgtgtcgtctcggcgctctatccggagcgcgtgatcgcccttgtgtccggcaattcctacaacatccagaacatcgcccgcgccatggagccggcttcgccgccggaggaggcagctctctggtatcaatatctctttcacaacgagcgcggccgccgcgcgctcgagcgcaaccgccgcggctttgcccgccagctctgggcgatgtggtcgcccaaatgggcgttcgatgacgcgaccttcgaggcgagcgccgaagccttcgacaatcccgatttcgtcgacgtcgtgatccactcctatcgccatcgctatgcgctggttgatggcgaccccgcctacgccgcgatcgaggcccggctcgccgcgcagccgccgatccgtgtcccgacaattgcgatcgacggcgacagcgacggcgtcaatcccggcaccgcccaccacgcgcacaagttcgcggggtttttcgagcggcgcgtcttcaccaatgccggtcacaacctgcctcaggagcggccggccgaatgggcgcgggcggtgctcgatgtgcgcaaggcggtggcttag

SEQ ID NO: 1316 - DNA, 627 bp, BradyrhizobiumColbertium
atgacgtcacgagcgcgcaagttggagcgggtcgcggttgcgcaggcgccaagcgagcggcccgatcgggcggaggtcgagcaggcgatccggaccatgatccgctgggccggtgatgatcccgcgcgcgacggcctgcgcgacacgcctgatcgtgttgctcgtgccttcgaggagtatttttccggctatgcccaggacccgacggagatcctgcagaagaccttcgaggagattgaaggttacgacgagatgatcgtattgcgcggagttcgcttcgagagccattgcgaacaccacatggcgccgatcgtcggccgcgcctgggtcgcctatattccgcaagggcgcgtggtcggcatcagcaagcttgcgcggctcgtggacgtctatgccaagcgccttcagatccaggagaagatgacggcccagatcgccaacacgatcaacgacgtgctggagcctcaaggcgtcggcgtcatcatcaaggcgacgcatcactgcatgaccacgcgcggcgcgcacaagccggggacggatctcgtcaccagccgcatgctcggcgtgttccgcgacaatgcggtgacgcggcaggagctgttagggctcgccaactcggacagctga

SEQ ID NO: 1317 - DNA, 612 bp, BradyrhizobiumColbertium
atgacaactgcttcagacgcgtctcatcattccagtctcggctcaagtatctctgcgctacatgccaaatgggggtggatcgtcgcgctcggcgtcgtctacctcattgccggcttcgtcgcgctcggcagcatggtgatggcaacggtggcgagcgtgatcgtggtcggcgcgatgatgatcgtcgccggcgtgaccgaggtgatcggcgcattccagctgaagagctgggggaagttcttgatctgggccttgctcggggtgctctacatcattgccggcttcctcaccttccagaacccgttattggccgcagttgtgctgacgctctttctcggcgcggcgctgctcgcgtccggcgcggtgaggctatatctcgccttcagcatgaagcgcgaaagtccgtggggctgggtggcgctgtcgggcgcaatcacgctgctgctcggcctcctcatcgtggcgcgctggccggtgaacagcgtctacatcctcggcctgttcctcgggatcgacctgatcatggccggcgccggctggatcagcttgggctttgccttgaagcggcgcggccaggcgagccatcagcaactcgacgcaagaccatcttga

SEQ ID NO: 1318 - DNA, 1212 bp, BradyrhizobiumColbertium
atgaaagccgctttggccctggctgcagcgctcgctgccgcttgtctgtccacgcccgtcgctgcgcaaaaatcctacggccctggagtcaccgacaccgagatcaagatcggcaataccatgccctatagcggcccggcatcgccgctcagtatcacgggcagggtgatctccgcttatttcgacgagatcaacgagaagggcggcgtcaatggtcgcaagctcaatctgatctcgctggacgacgccttctcgcctccgaagaccatggaggccgcgcggcggctggtcgaaggcgagggcgtcgccttcatcttcgcgacgatgggcaccgcgccgagctcggcgatcgcaaagtatctcaatagcaacaaggtgccgcagatcttcctgatcagctcggcttcgaaatggaacgatcccgccaacatgccctggtcgatcgcgttgccctgggcgccgaactacaccagcgaggccgcgatcgacgtcgcttacgcgcgcgccaagaatccgaatgcacgttttgcggtgctctatcagaacgacgacgccggcaaggaatatctgcgcggcgtcaaggaagccctcggcgccgacgccgacaaggcgatcgcgatggcctcgagcttcgaggtcgcggaccccaccgtggattcccaggtgctgacgctggccaacaccaaggccgacgtcttcctgatctattcggtgacgccgcgcgcctgcgcgcaggcgatccggaaagcgcatgaggtcggctggcagccgatgcgctttatcgcgagcggttgcgccaacaaggcgaccgtgatggtgccggcggggctcgatgccggcaagggcgtgctctcgctcggctcgctcaagccctttgtggccgagcccaagagcgacccggcgatgacggcctatatcgatttcatgaagaagcggctgccgaacgccgacgtcaacaacgtcgcgggactctatggctacaccgtcgccgaggcactcgtggtcctgctgaagcagtgcaaggacaatctgacgcgcgaaaacatcatggcgcaggcggcaaacctgaagaacgtgccgctgtcgctcttgatgcccggcattaccctcaacacgacgccgcaggatttccgcccgatcaaggacggctacatgctccagttcgacggcaacgactgggttgtcgctagcgagctgttgcgcgggacgtga

SEQ ID NO: 1319 - DNA, 1215 bp, BradyrhizobiumColbertium
atggattttcaccactccgcccgttcgctggagctgcaggaccgcgtccgccggttcatgcgcacgcacgtcgagccggtcgaggatctctattacgagcaggtcaagccggaggcggtgcgctacaggacgccgcctgtgcttcaggacctgaagaagctggcgcgggagcaggggctctggaacctgtttctgtccggcgagcacggaccggggctcaccaatctcgaatacgcgccggtgaaggagatcatgggccgcatcctctgggcgcccgaagtgttcaattgctccgctcctgatgtcggcaacatggaggtgctcgccaattacggcaccagcgcgcagcaggagcgctggctgaagccgttattggatgggcgcatccgctccggtttctcgatgacggaaccccaggtcgcctccagcgacgccaccaacatccagtgcgagatcaggcgcgacggcgacgactacgtcatcaacggccgcaagtggttcacctcgggcgcgatgaacgaggattgcgagatcctgatcgtgatgggcaagacggcgcccgatgatcccgaccgccaccgccagcaatccatgatcctggtgcccaggaacacgcccggcgtccgcatcgtccgcgacatgctcacctacggctatgacgacgccccggtcggccaccccgaaatcgtctacgacaacgttcgcctgcctgccgaaaacatcctgctcggcgaaggccgcggcttcgagatcgcgcaaggccggctcggccccggccgtatccatcattgcatgcgcctgatcggctgcgcccagcgcgcgctggagttgatgtgccagcgtgcggtgtcgcgtatagccttcggcaagccgctggccgagcagggctcggtgcgagaggatatcgcgcactccttctgcgagatcgcgcaggcgcgtctgctgacattgcaggccgccgacaagatggaccgcgaaggaaacaaggccgcgcgcgacctgatcgccgccgcgaaaatcgtggtgcccagcatggccgcccgtgtcatcgaccgcgccatccagatccacggcgccgctggcgtctcccaggacacgttcctcgcgcgcgcctacgtttacgcccgcttcatccgcatcggcgacggcccggaccaggtgcacctggcggcggtcgggaaggaattgatcaagcggggcggggtgatgctgtag

SEQ ID NO: 1320 - DNA, 138 bp, BradyrhizobiumColbertium
atgacgattgcgcgcgtgccgggccaacggttcacggccgcaccgctacacgcggacacagtcggcgaccgctcgccgtacagccgttgcggctggttctcgtggttcgggcttgggcggccgccgcgcgcctggtga

SEQ ID NO: 1321 - DNA, 264 bp, BradyrhizobiumColbertium
gtggtggttcgcgcgtgccatgagcacggtgccgaagcggtcgcatgcgcggccgatctgaccgacccagctgcagtcgagcgcatccgtgacgcggcggtcgcggcgtatggccggatcgatgtttgggtgaactgcgcggcggttctcatggttggtcgattcgaagacatgccgatcgaggccttccggcgcgtgatcgacgtcaatctcatgggatgtgtcaacggctcccgggtggcactgtcacagtttcggacgtaa

SEQ ID NO: 1322 - DNA, 555 bp, BradyrhizobiumColbertium
atgacgggagagcctctgctcagcccttatgttgcgaccaagttcgccgttcgaggcttcacggcctgcctgcggcaggaatttgagcgggcggccgacatccatgtctgcctggtcatgccatgggcagtggacacacccgtctacagcaaaatgggcaacgtattcgggcggcaggcgcgctcgatcttcccggtgattgcggccgggcgcgtggcacgggccatagtaggtctctcggagcggcctcgtcgcgaggtcatcgtcgggatctcaggttacatgctgggcatcgcgctgaagcttgcacccatgctggtggagcgcattgttgcgcgcgtggcgccggtgctccagttcaagccagatccgcagccgcccacgatgggaaacctcttcactccgatagggccatacagcgtgggtggtggatggaaaagctactgggccgagcgcgcaacgcgcctcttccgtccggcctccgcgaacgtccagacgcaggatactccgccgaagcgcccttcacgcccggaaggtcgcgcggaggcagactag

SEQ ID NO: 1323 - DNA, 240 bp, BradyrhizobiumColbertium
atggtgaccatcaagatcctcggctccggctgcgccaactgcaagaagctggaaactgttgcgcgcgaagctgccggccgcgccaacgttccagccgaattcgtcaagatcaccgatttcaaggacatcatggcctatgacctgttgtccacgccgggtctcgtgatcaacgagaagctggtcagcagcggacgcattccgacagtcgccgaagtgcagaagctgctggcgacggcttga

SEQ ID NO: 1324 - DNA, 1446 bp, BradyrhizobiumColbertium
atggaactcgcgatcaaattgctcatcggcggcacgggcagcctcgcctcctatctggcggcgcatgtcctgctgtgcttgctgccggccttcttcattgccggggcaatggtggcactgatccccaaggccagcattacacgctggcttggacgcaacaccccggcctatgtgtcttaccccgcggcagccgcagccggctccgtgctcgccgtgtgctcatgcaccgtcgtgccattgtttgcaggcatctaccggaaaggggcaggcatcggaccggctatcgccttcctgttcttcgcgcctgccggcaacattatggcactcacctacaccggcagcatcctgggactggaatttgccgtcgccaggggggtgatgtgcttgctgtttggcattggcattggccttctgatggcgctgctgttctggcgcgatgacatcggccatgacacccaaactgacgccctcttcagcgagcaggccgacatttcacccgcagccttgggcgttctgctgtcgctgatagcggtgctgattgctggcaccataaagttgtggccgttcacggctatcatggccaccgtccacctgcccttgccatgggccgctgcgtggcaggccgcgctgttcgagtggatgccattcgatgtcgccaaaggcgaggagggcatcggctttcacggatcggttctgattgccctgctgttgctcattgctgcaaccgcctggagggggctggagaacatcatcgaaggcgcaaacgtctggacctggctcgcactcggcctctcggccaccaccttgttggtggccgccgcgcgtctgaccccgcagcccggcggattggaagtggccctgactggccgagtcctggccgtagcgctcgccatgtgggcggtatggtacttcgcgagcatgctcgctcaagatgactggcggtcatggctatgggagtcctggcgcttcgtgacgcaaatcttcgtactgcttctagtgggcgtattcgtggtgggcatggtccgtcaggtcattcggcccgaatggattgagagcctcgccggcagcaacactctgctcgccaatgcactgggggtcggctttggcatcttcatgtactttcctactcttgtggaagtaccggtggcacgcatgttcctcgatctcggcatgcatcgcggtccgctgctggcctacctcatggcggacccggagctgagtcttcaaagcgtgttgatggtggccgtcgtgatcggccgtgcgaagaccgcagcctatgtgggagcggtggccttgttcagcatcagcgccggcctgatttacggcgcctgggtggatggcatgagctgggcatcgctggctctcacgctggtctccatcatggctgcaatatccggctccctggcctggctgcggcagcgccagcgcgcggccgctaccgcctag

SEQ ID NO: 1325 - DNA, 120 bp, BradyrhizobiumColbertium
atgattgtgggtttcgcccgccccgcactcggcgatcgagtcgctcaacaaaaaccagaaaacaaccccatgcacagtagcaatcgccagcatcttcaatgcctggcgggcaatttctga

SEQ ID NO: 1326 - DNA, 1740 bp, BradyrhizobiumColbertium
atgacatccgaccgatctgggaatgccacgaagctggcaggccgattcacgcttgccaccaagctgtacgcgatctttgggctgttcgcgctgctcacggcggcgatcgcactgctgtccgactacaacagccgccgcagcgccgacctcgccaacgcgatcgagacggcgaacgccgccgcgctgaacgtcgaacgcgtcaactcgctcgtttatgccgtcgtgatggaatcgcgcggcgtctacatgtcgaccgagccggcggtggtgaagaaatacggagacgggctgctcaagttcaacgcccagatcctcgacgtcgtgaagcgctgggagaccatcgtcaaagccgacgatgccgaacagttcgccaccttcaggaagcgcatcgagcagttcgtcgagttccgcaaggaactggtgcgccgcggcgtcgagatcaatgcagccgcaggccgcgaatggggcgacaacgacgccaaccgcgccgtgcgttccgcgctgaacaaggatctcgaggcgctgtccaaggtctatgccgagcgggccaaacagatcgcgcagcagaccgagaccagtcgcgagctgtctttcgtgctgacctgtctcggcggcgtggcgctggccctggtcgtgctcggcatcgtcatcatcgcccgctcgatcgcccggccgctcgccgcgatcaccggcaccatcaagcaggtcgccgacggcgccgaaaacgtcgcggtgccgtactccgaacgcgccgacgagatcggcgcactggcccgcgcgatccaggtctttcaggaggcgatgggccgcaatcgcgacctcgcctcgcaggtctcgcaggactcggctgcgcgcgaggagcgtgcccgccatatcgaacgatccgtcgaaacgttccgcgaggcgatcggcgcggtcatgcgcggcctcagcgacaacgcctccaccatgcgcgagaccgcacagaccatcacgcgtgtcaccgcggacgcgagcagccgtgccggcaccgcggcgaacgccaccgaacaggcctcgcacaacgtcacggcggtcgcgggcgcggcagaggaactgtctgcctcggtggtggagatcggccgccaggtgcggcagagtgccggggcggtcgagcagaccggccagcgcacagagaaatcgatctccgagatcgagagcctcgccgcggccacccagcgcatcgacggcgtgctcaacctgatccaggcgatcgccgagcagaccaacctgcttgcgctgaacgcaacaatcgaggccgcgcgcgccggcgatgccggccgcggctttgccgtggtcgctcacgaggtgaaggcgctggcaggacagaccgccaaggccaccgccgagatcagcgagaacgtctcgatgatccaggcctcgacgcgcaacgcggtcgacgctgtccgcgagatcggcggggcggtgcgcgagatcaacgaggtcacctcggcgatcgcgggcgccgtcagtcaacaggacgccgccacccgcgagatctcctcgaacgcgcaaagcgcagcccaaggcaacgagacgcttgtggcaaacatcacctcgctgcgcgatgccatcggcgagacggacacggcggctgcctcggtgctgacggcggcgagcagcgtgacggagacggcgcagacgctgtcgcgggaggtggagaagttcttccagaacttgcgcggaggatcggcggacagccggatcgccaaggcgggatga

SEQ ID NO: 1327 - DNA, 138 bp, BradyrhizobiumColbertium
atggccgagggcagatcgatcttgaaggcgatcccggccgcagggaatacgcccttggcggccggtgtgcacgccgatgttcgcggcatcccgctgctgcagccggccgaaaccgacgatgctccgtcaacgcactga

SEQ ID NO: 1328 - DNA, 1383 bp, BradyrhizobiumColbertium
ttggtctaccgccacaccatcgacgccacgagctacacgttcccggacctgcgcgatctcctggccaaggcgacgccgccgcgctccggcgaccggctggccgcggtcgccgccgagactgcggcgcagatgatcgcggcgcggatggcgcttgcagacgtcccgctcgggcagttccttcaggaagcggtcatcccctacgaggccgatgaggtcacccgcctcgtcatcgacagccatgatgccaaggccttcgcgccggtcgcctccttgacggtcggagcttttcgcgactggctgctgtcggactccgcaacgccggaggtgttgaagacgctcgcgcccggcatcaccccggagatggcggcggcggtctcgaaactgatgcggaaccaggatctgatcctggcggcgcggaaatgcgaggtcacaaccgccttccgcaacaccatcggattgaaggggcggatgagcacgcggctgcagccgaaccatccgttcgacgatgccaaaggcatcactgcctcaatcctggacggcatcttgttgggtgccggcgatgcctgcatcggcatcaatcccgcgagcgacgatcccgccgtcatcgggcaattgctacggctgctcgacgagatcatcgcgcggctgcagatcccgacgcaaggctgcgtcctcacccatgtcacgacgacgctgtcgctgatcgggaagggcgtgccggtcgatctggttttccagtcggtcgccggcacggaggccgccaaccgtagtttcggcatcgatctcgcgcttctgaaggaggtgcagcaggccgggctgtcgctcaggcgcggcacggtcggacagaacgtgatgtatttcgagaccggccagggctcggcgctgtcggccggcgcccatcacggcgtcgaccagcagacctgcgaggcgcgggcctatgcggtcgcccgcgcctttgcgccgctgctggtcaatagcgtggttggcttcatcggcccggaatatctctatgacggcaaggagatcatccgggccgggctggaagatcatttctgcggcaagttgcttggcctgccgctcggggtcgacatctgctacaccaaccacgccgaagcggaccaggacgacatggacaatctgctgacgctgctcgccgccgccggcgtcaccttcatcatgggcgtcccgggtgccgacgacgtcatgctgaactaccagtcgacgtcttttcacgacgcgctctatgtccgcgacgtcttcggcttgcgccgcgcaccggaattcgacgcttggctggcacgctcgggcatcgcgggagccgattcccgacttgcaagcgatgcaggcctgctgccggattttgccgcgcggctgatcgcctga

SEQ ID NO: 1329 - DNA, 1545 bp, BradyrhizobiumColbertium
gtgtttccgcgctacacttcatcattcggcacgttcgagcattcctatccgctgaccgatggcgtccgcgccttcatgccgccgcaggggctgctgctgatttccgcctaccttccgcaggagtggcaggtcaaattcgtcgacgagaatctgcgccgcacgacgaaggaggagttcgaatgggccgaagcggtcttcgtcagcggcatgcatatccaacgccagcagatgaacgacatctgccgccgcgcccatgatttcgacctgccggtcgcgctcggcgggccctcggtcagcgcctgcccggactattatccgtccttcgactatctgcatgtcggcgagctcggtgatgccaccaaccagctgatcgagatcctgtcgcgcgacacctcgcgcccggagcagcaggtcgtgctcacgaccaaagaccgcgtgcccatgacggaatttccgattccggcctatgagctggccgacgtgaagaaatatttcctcggcagcatccagtattccagcggctgtccgtatcagtgcgagttctgcgacatccccggtctctatggccgcaatccgcgcatcaaggcgccgcagcagatcatcgccgagctcgaccgcctgcgcgaatgcggcatgaccgacacggtctatttcgtcgacgacaatttcatcggcaatcgcaaagcggcgctcgacctgttgccgcatttgatcgaatggcagaagaggacgggctatgtggtgcggctcgcctgcgaggcgacgctcaacatcgccaagcggcccgagatcctcgagaagatgcgcgaggcctacttcgtcaccatcttctgcggcatcgagacgcccgatcctgatgcgctgaaagcgatgcagaaggaccacaacatgatggtcccgatcctggagggggtgcgtaccatcaactcctacggcatggaggtcgtctccggcattatcatggggctcgacaccgacaagccgaacacctcggaagcgctgctcgctttcgtcgaggagtcccggattccgctgctcaccatcaacctgctccaggccttgccgaagactccgctgtgggatcgcctggagcgcgagggacgcctggtccacgacgacggccgggactccaatgtcgatttcctgttgccctatgatgaggtcgtcgcgtcctggaagcacgcgatggcggccgcttatgcgcccgaaaaggtctacgcgcgctaccaatatcagtgcgacaatgtctacgcccgccgcctcaagatgccggtgccggacgagatgaagacctggcgcaacatcaggcgcggtctcgtcatgctgcgcaatatcttctggaaggtcggtgtgctcggcgactacaggcgcgtgttctggaaattcgcactgggacgcatcaagcgcggcgatatcgaaggccttatcggctgcacgctgatcgcgcaccatctcatcacctttgcgcgtgccgcctccagtggcgagcagaacgcctcgaactattcgatccgcctgcgcgaggcggccgttcccgccgaatga

SEQ ID NO: 1330 - DNA, 786 bp, BradyrhizobiumColbertium
atgtctgatccggctgtcccgcgccgttcgacgcttgacttgcggaccttcacgcccgcgcgggtggcgctcgggcgcagcggtgcgagcctgccgaccaaggcgctgctcgatttcacgctggaccatgcccgcgcccgggatgccgtgcatgccgacttcgatgcggcgcgcttgatcgccgacctcggcccgcttggacttgccgtgaccgaagtcaggagccaggcgctcgaccgcagcgactatctgcggcggccggatctgggacgccggctcgaacccggctcggcgcagcttctggcacgaagcgcctcggcgccatgccagctggcggtcgtggtcgcagacggcctgtccgcggcggcggtccacagtcatgcggccgacgtcgtgaggcgcctgttgccttcgcttgccgaggacgaggctgtcgcgatcgaccatgtcgtcgtcgcgtcgggcgcgcgcgtcgcgctcggcgacgagatcggtgccattctcggcgcgcgcatggtcgtcatgctgatcggcgaacggcctggtctctccgcgcccgacagcctcggcgcctatctgaccttcgcgccccagcccggtcgcaccgatgccgagcgcaattgcgtgtcgaacatccatcatgccgggttgagccatgacgaggccgccttcaagatcgcctggctgatccgcgagggactcgcccgggaggtgaccggggtggcactgaaggatgagagcgcggagcgcgcgccgcgtcgaatcggcacattctcgtccggctga

SEQ ID NO: 1331 - DNA, 2367 bp, BradyrhizobiumColbertium
atgctcgaaaagcacagcgagaatgaggttcatgtcgacaaggtcgagcagggacctacgtcctcgatcgccttcgggctggagcggctcgggctgatcgccgtccgcgccccgattgtgtcctgcatcgtcctgcttgccctgatggtcggcgccgttttcggcatctaccgcatcaagatcgacgattcgctgtcgcagctcttccgctccgacacccgcgaattccgccagtacgaagaggtcacgaagaagttccctgcggaggagttcgacgttctcgtcgtggtcgagggcaagacccttctggaacggagcaacctggagaagctgcgcgatttcgtcactgacctgcaactggtcgaaggcacgcgtggactggtctcgctgttctcggcgcgtcaggcgccggccccgggtaagctgccggcggcgctgttcccggctgagttgccagagggcgacgcgtacaacaagttcatcgagaccgtaaagaacaacgagatcatccgcggcaagctgctgtcggaagacggcaccctggcgctggtcgtgctctcgctcgatccgaaggtggtcgcttccaacaagctgaccaagaccgttgccgacatccgcgacctggtgaaggaggacctcggcgacaccgggctcaacgtgcagctctccggcgtgccggtgatgcagcttgagatccgcaacgcggtcgagcgggatgggctcacctacaatgttcttggcatcctcgccggctgtatcatcgccatcatcttcttccgcaagatatcgttcatgatcgcggcggcattcccgccgatgattgcgatcctgctggctctcggtgcgctcggctgggccaacttcaatctcaacatgttcctgaacgtgatgacgccgctcatcatggtcatcagcttctcggactcgatgcagctcaccttcgccgcgcgcgaccggctgatcgcaggccaggacaagttcaccgcgttcaagaatgcggtgctggtggtgggcccggcctgcgtgttgacgcacggcaccgccggcatttccttcatcgcgctgcaattctcagactccgacctgatccgcaaattcggcgaggcgggccttgccgccaccatcatcgcgctgttcgcggtgctctcgctcgtaccggtgttcggcgtgctgctcgtgcgcaacgagaaggtcttcgcggtcaagttccagggcgccgatgccggcgtccaggccctgcgaaatttctgctactggatcgcggtgcgcatggtcggccggcccggcctgttcagcctgatcgcggtgctcttcgtcggcggcctcggcgtcatctacgccaatctggagccgcgctaccggctcgccgaccaggtgccggacaagcgccaggcggttgccgcaagcgaccggctcgacgccaagctcaccggcgccaatcccgtcaacgtgctgatcgcatttcccaagggcgagtcgctctactccccggagacccttcagaccatcgccgacgtgcattcgaccgtggagaagacggctggtgtcggcaacgtctggtcacttgagacgctgcgtcgctggctggcggagaaggcggggagcgccgatgtcgcgacactgaaggaatatgtcaacgtcattccagagcatctggttcgacgcttcatcgacgccgagcaggacgccgtcgttgtggccggccgagtgccggacaaggactccagccaattgctgccgattgtcgacaagctcgattccgagctcgacgccgtgcgcaagaagcatccgggctacgagatcgcggtgacgggtcttgccgccatcgctgcgcgtaactcggcgaacatgatcgagaagctgaatcacggcctcacgatcgagttcgcactggtcgcgatcttcattggtctcgcgttccgctcctgggtggtgacgctcgcctgcatcctgccgggcatcttcccggtggtgatgtcgggagcggtgctgtgggctatgggcgaggggctgcaattcgccagcgtcgtcgcgctcaccgtctcgttcggcctcggattgagtgccaccatccacttcctcaaccggctgaggctggagaacaagccgggcgtcggctcggcgctggcggtcgagcgcgccaccgtgctggttggcccggcgctgatcctgaccacggtggtgctggcctgcggcctcgtcgtcaccgtgttctccgacctgccgtcgctgcggctgttcggctggctgagcgctttctcgatggtcatggcgctcgttgccgacctcttcatcctcaggccgacggcaatgtggttgatcaatctgcacgacaagcttcaaggccccaacaagccggcgatttga

SEQ ID NO: 1332 - DNA, 180 bp, BradyrhizobiumColbertium
atgggacgctcgttcggtgtgtgctgggacggcgtgtttcagaaagcccagtccgaagcggacaaaatggccctgttcaaccacacgggcgtgctctacctgctgagcctgcgggagcaggactacgccccgggcgacttcaagttcgatcgttgcggcatcattcggatcgaggcgtga

SEQ ID NO: 1333 - DNA, 498 bp, BradyrhizobiumColbertium
atgacattctttgggcgatctggactggcactcaggacggccggcatcggggcggcgctgctcttctcagtttcggcgagccatgctcagtcgtccggaccgtttgccggtttcgacggcgcgtggaccggcaccggcacggtttcattgtccgacggctccaccgagcgcatccgctgcaaggcggactacaaggtcgccggcagcggcctcaacctgaagcaggcgctgaattgcgcatcggacagctacaagttcaatctaaccagtgacgtgaccagccagggcgaacgcatttccggcaattggagcgagtcgagccgcaacatcttcggcaatctccagggcaccgccggtggtggccagatcgacgtgttcgtcgaagccaacggttttgccgccaacctgtcgctgcgcaccaacggcaccaagcagacggtgcagatctcctccaagggcgagatccgcggcgtcaacatcacgatgacgaagggctga

SEQ ID NO: 1334 - DNA, 234 bp, BradyrhizobiumColbertium
atgcgtaagcttctcgtcgctctcaccctgctgtcggcctcccttccgacggcggcattcgcccaggcaggacgcggcacggacgccgagcagaaggcctgcacgcgcgacgtgcagaagttctgccgcccggtcattgatcagggcgatttcaccatcctggcctgcctcaaggagaaccggagcaagatctcgcaggcctgcgaccaagtcctgaagaaccacaaccagtaa

SEQ ID NO: 1335 - DNA, 939 bp, BradyrhizobiumColbertium
atgagcccgcgcgagcgaaaagccttcctgtccacgattgtaaaccagccctcgatgacctctgcgagcgaattgcgatccggtaagggtgaccgcgacgagaattttcccgtcgcgtcctggatcattcatccgcgtcatcgtgctctgatcctcgcgtattacaatttcgttcgcactgccgacgacatcgccgatcacgcgacgctgccccctgaccagaagctcgcttatctcgatctgcttgaggcggaactgctcggcaagggtgacacccaggccgaggccgtcatcctgcgccgcgcgctggccgagcgcggcatggcgccgcgccatgcgctcgacgtgctcatcgccttccgcatggacgtgaccaagctgcgttacgagacgtgggacgaggtcatccattattgccgctattcggcgatgccggtcggccgcttcatgctcgacgtccatggcgagagcacctcgacctgggcggcatcggacgcgctctgtgcaggcttgcagatcaacaaccacctccaggattgcggcaaggatttccgcgagctcaaccgcgtctacctgccgcgcgatgcgctggccgcgagcggagcctcggtcgagcagctcgggcttgcgcagtcgccgccggcgatgctggcgtgccttcaggggcttgccgcgcgcaacgaggcgttgctcaagcagagcaagtcgctgagcacggagatccgagattttcgcctcggcatcgacgtcgcggtgatccaggcctatgccgatcgtatcgtgcgcctcttgaaagtgcgcgatcccctgcgcgagcgcgtgcatttgaacaagttcgagcttctcaccttcagcctcgccggcatgatcggcgaagtcggccgccgcgcgatcggacgcaaggccatttccagaccggggactgcacatgacgcttga

SEQ ID NO: 1336 - DNA, 840 bp, BradyrhizobiumColbertium
atgacgcttgaggcgaccacgcccggcgccaattacggctcgactgcatccggcagctcgttttatgccgcgatgcgaatcctgccgcgtgatcagcgcgaagcgatgttccagatctacagcttctgccggcaggtcgacgacatcgccgattccgacggcccgcgtgaggagcggcttgccgcgcttcaggagtggcgcaacgacatcgatgctctctatcggggcaatccgccgccgcggctgaaggattacgtcgcctcggtgaagaccttcggcctcaagcgcgatgatttcctcgcgatcgtcgacggcatggagatggacgtgccgcaggacatccgcgcgcccgacatggcgacgctggatctgtactgcgaccgcgtcgccagcgccgtggggcggctgtctgtgcgggtttttggcctgccggaggaggagggcatccagctcgcctaccatctgggccgtgcgcttcagctcaccaacatcttgcgcgacatcgacgaggatgccggccttggccggctctatctgccgcgcgaggcgctgctgcatgccggcatcacctcgagcgatccgaaccgcgtcatcgccgagcgcgcgctgccgaaggtctgcatgccgctgacgcagcgggccaaggcgcatttcgagaaggcggacgagatcatgaaccgcaacaagcgccgcgtcgtgcgcgccccgcggattatgtcgaaatattatcattccatcctggacctgctgatcgcgcgcggtttcaccgcgccgcgcgagccggtgcgtgtgtcgaaggtcacacgggtcctgatcctgcttcgttacgctttcatctga

SEQ ID NO: 1337 - DNA, 1257 bp, BradyrhizobiumColbertium
atgcaaaacacagcgcacatcatcggtgccggaatttccggcctctccgccgccgtgcggctcgccaatgccggcttcaaggtcgccgtgcacgaggcgacgcaccaggccggcggccgttgccgttcctatttcgacggcgccaccaacctcaccatcgacaacggcaatcatctgctgctgtcgggcaacaaccatgcccgcgcctatgcgcgtgcgatcggcaccgaggcgggccttgtcggtcctgagcgtgcgcagtttcccttcgttgacatcaagaccggacagcgctggcagatcgatctcggcgatggccggctgccgacctgggtgctcgacgagagtcgccgcgttcccgataccggcctcaccgactacctcaagctggcgccgctggtctgggcatcggaggagacgctggtcggcaaatgcattccgacagaaggcgtgctctatcagcgcctggtgcagccgctgctgctggcggcgctcaacgtcgacccacccgagggctcggccgggctcgctggcgcgatcgtgcgcgagacgctgcttgcgggtgggcaggcctgccgtccgctgattgcgcgcgatggcctcagcgcggtgctgatcgagcccgcggtgaagttcctggctgagcgcggccacactgttcaactcggccatgagctgcgctcgtttgccaccggcgacggcaaggccagtgcgctgaatttcggcggcgacgatgtgatccagctcgatgacggcgatgtcgtcgtgatggcggtgccgccgcgcgccgcctccagcctgctgcccggcgtgaagacgccgaccgaattccgcgccatcgtcaacgcgcacttccgttttgagccgccgccgggcgcgccgcccatcctcggcgtgatcggcggcgtcgtggaatggctgttcgcgttcccgaaccggctctccgtcaccatcagcaacggcgaccgtctggtcgacagaccccgcgaggaactcgcgcaggcgatctgggatgatgtctgcaaggcgggcggtgtatccggcgaactgcctccctggcagatcgtccgcgagcgccgtgccacatttgcggcgacgccggcgcagaacgccctgcgtccgggaccggtcaccgcgctgaaaaacctgtttcttgccggcgactggactgctacgggattgcctgcaaccatcgagggatcggtgcggtcgggcgatcgcgccgccgatctggttctggccgccaaaggatcctga

SEQ ID NO: 1338 - DNA, 2031 bp, BradyrhizobiumColbertium
gtgaatgtcccggtcaatttcaatggactatcggagcaatcgagcgacatggattccgtgaacgcgaccagccgcgaggcattgaactcgaagggtttggattcgaaggtattggaatcgagcattgcatcggcggccgaaggcgtcctcggcttccagcagcccgacggccattgggtgttcgagctcgaggccgatgccacgattcccgcagaatacgttctgttgcggcatcatctcgccgagccggtcgatcccgtgctcgaggccaggatcggcaattatctccgccgcatccagggcgcccatggcggctggccgctggtgcatgacggcgagttcgacatgagcgccagcgtgaaggcgtatttcgcgctgaagatgatcggcgattccattgacagcccgcacatggtgcgcgcgcgcgaggcgatccgcgcgcgcggcggcgcgatccacagcaacgtcttcacccgcttcacgctggcgatgtacggcgtcgtgagctggcgcgcggtgccggtgctgccggtagagatcgtgctgctgccgttctggtcgccgttccatctgaacaagatctcttattgggcgcgcaccaccatggtgccgctgatggtgatcgcggcgctcaagccgcgcgcgaggaatccgaagggtgtcggcatcgacgagctgtttctccaggacccgcgctcgatcggcatgaccgcgaaggcaccgcaccagagcatggcctggttcctgttgttccgctcgctcgacgcgatcctgcgtgttgtcgagccgatgtttccgaagagcctgcgcaagcgcgccatcgacgcagcgctcgcattcaccgaagagcgcctcaacggcgaggacggcatgggcgcgatctatccgccgatggccaacatcgtgatgatgtacgacgcgctcggcaaggacgagaactatccaccgcgcgcaatcacgcgccggggcatcgacaagctgctcgtcatcaacggcgaggaggcctattgccagccctgcgtctcgccggtgtgggacaccacgctgaccgctcatgcgctgctggaagccggtggcgacaaggcggtgccggcggccaagcagggcctcgactggctgctcccgaaacaggaactcgaggtgaagggcgactgggcggtgaagcggcccaacgtccgccctggcggctgggccttccagtacaacaacgcgcattatcccgatctcgacgacaccgccgtcgtggtgatgtcgatggaccgcatgcgccgggagcacggcgcgaccggctatgacgccgcgatcgcccgcggccgggagtggatcgagggcatgcagagcgacgacggcggctgggccgccttcgacgtcaacaacctcgaatattacctcaacaacatcccgttctcggaccacggcgcgctgctcgacccgccgaccgaggacgtcaccgcgcgctgcatctcgatgctggcccagctcggcgagaccgagaagaccagcaagcacgtggctgacgggatcgcctacctgcggaagacccagcacccggagggatcctggtacggccgctggggcatgaacttcatttacggaacctggtcggtgctgtgcgcgctcaacatggccggggtcgatcacaaggaccccatgatccgcaaagccgccaattggctggcctcgatccagaacgaggacggcggctggggcgaggatgcggtcagctaccggctggactacaacggctgggagcccgccccctcaaccgcctcgcaaacggcatgggccttgcttgccttgatggcggccggcgaggttgatcacccggccgtcgcccgcggggtggagtacctgattgcaacacaaaacaaaaaaggactgtgggacgagcagcggtacaccgccacaggcttcccccgcgtgttctatctacggtatcatggttacccaaagttctttccgctgtgggcgttggcgcggtatcggaacttgcggaacaccaacagcagggtggtaggggtcggaatgtga

SEQ ID NO: 1339 - DNA, 639 bp, BradyrhizobiumColbertium
atggccgtcatctgctcatccagcagcccggcccaattgcgggcgctgctgacggtggtggaccctgaaacgattcgcggcgtgatctcgttcggcgtggccggcggcctcgacccgagcttgcgctccggcgacgtcgtgctggcgaccgaagtgctctccggcgacacccgctgggcggccgggctctcgctcggcgacgacctcatcgagcgcctgacgtcgggacgccgccgcgtcgtgcgcggcagcctcgccggcgccgaggaggtggtcacgggccggtcctgcaaggcggcgctccattcggagacgggtgccttcgccgtcgacatggaaagccacatcgcggccgcctacgccgccgaggccgggctgcctttcgccgcggtccgcgtcatcagcgaccccgcccatcgcgcgctgcccgcgctcgcccgcgccgccatcaagccgaacggcaagatcgacctcgcggccgtgctgcgcggcgtcgtccgcaatccggcaacgctgcatgcgctggtctcgaccggcatcgacttcaatcgcgcgctgcggtctttgcgcggctgccgcgaccatctgatcggcactgagctggtcgagagcgaagtactggtctccaaggccgcctga

SEQ ID NO: 1340 - DNA, 1161 bp, BradyrhizobiumColbertium
atggctatcccgttcttcaaggaaatgcgtatcggcggctatttgctcaagcagagactgcttggccgcaaacgctatccgctcgtgctgatgttggagccgctgtttcgctgcaaccttgcctgcgtcggctgcggcaagatcgattatccggatgcgatcctcaaccgccgcatgacggcgcaggagtgctgggacgcggccgacgagtgcggcgcgccgatggtcgccattcccggtggcgagccgctgatccacaaggagatcggcgagatcgtgcgcggcctcgtcgcgcgcaagaagttcgtctcactctgcaccaacgcgctgctgctggagaagaagctcgatctgttcgagccctccccttacctgttcttctcggtgcatctcgacggcctgcgcgaccaccacgacaaggcggtgtcgcagaagggcgtgttcgaccgcgccgtctcggcgatcaaggcggccaaggcgcgcggcttcaccgtcaacgtcaacgccaccatcttcgacggccatccggccgaggagatcgccaagttcctcgacctcacggtcgagctcggcgtcggcgtctccatgtcgccgggctacgcctacgagcgcgcgccggaccaggagcacttcctcaaccgcaccaagaccaagaagctgttccgcgacgtcttcgccatgggcaagggcaagaagtggaacttcatgcattccgggctgttcctggacttcctcgccggcaaccaggagtacgagtgcacgccgtggggcatgcccgcgcgcaacatcttcggctggcagaagccctgctacctgctcggtgaaggctacgccaagaccttcaaggagctgatggagaccaccgactgggactcctacggcaccggccgttacgagaagtgcgccgactgcatggcccattgcggctacgagccgacggcggcgaccgcagcgctcaacaacccgctgaaggcaatgtgggtggcgctgcgcggcgtcaggacgaccggcccgatggcgccggagatcgacctctccaagcagcgcccggcgcagtacatcttctcggagcaggtgcagaagaagctctccgagatccgcaaggacgaagcggccgcggcgcaggcgaagacggcgcagaaggcttcgactgcggcctga

SEQ ID NO: 1341 - DNA, 927 bp, BradyrhizobiumColbertium
atggaggtttatctggcgcaaccgcgcggcttctgcgcgggcgtcgtgcgtgcgatcgaaatcgtggagcgggcgctggagaagtatggcccgcccgtctacgtgcgccatgagatcgtgcacaacaaatacgtcgtcgagaacctgaagaacaaaggcgcgatcttcgtcgaggaactctctgaggttccaccgaaggccgtgacggtcttcagcgcccatggtgtggcccgcagcgtcgaggaagaggcgaccgcgcgggatcttccggtgctcaatgccacctgccccctggtcacgaaagttcacaatcaagggaagcgctacgtcgccaagggccgtaccctgatcctgatcggccataccggtcatcccgaggtcgagggcacgatgggccaagtcccggggccagtgcagcttgtccagagcgttgaagaggttgaggcgctgacgctgccagcggatacgccagtggcctacatcactcagaccaccctgtcggtcgacgataccaaagacatcatcgcggcccttcacgtccgctttacagacattcaaggtccggatatccgggatatctgctatgcgacacagaaccgccaatctgcggtaagggacttgagcaagctggtcgacgtgatcttggtggtaggcgctgccaacagctcgaattcgaaccggcttcgcgaaatcggcaccgaggccggcgtcgcgagttatttgattgccgatggcagtgagctcaatccggagtggttgaaaaatgccaggaccgtcggcgtcaccgccggcgcttcggcgcccgaggtactcgtggatgacgtgatcgaagcgatgcggcggattggaccagtgaaggtctcggtactgccgggccgcgaggaaaacatcgaattccggcttccggcccagctggccgcgagctga

SEQ ID NO: 1342 - DNA, 2589 bp, BradyrhizobiumColbertium
gtgctgcaaagcgtcgtcgtcgccatcgtcagggcttgcacccggtttgcctccctcgtcgtcgttctcgggctcctgctgtcggtcggagcgggctattacgccgcgcgccacttcgccatcaacaccgacatcaattcgctgatttctcagaatctcgactggcgcaagcgcgaccagcaattcgacaaagcgttcgatcagaacgaaacgatcctcgctgtggtcgaggcccggacgccggaaatggcgagcgcggcaacagacgcgctctatgccaggctgaaggacgacaagaccaacttccagtcgatgcagcaactcggcggcggcgagttcttcgagaaaaatgggttgttgttcctgccgacggaagaagtcgccaagatcaccggccaattcgaagccgccgcgccgctgatcgagatcatggccggcgatccctccatccgcggcctgaccggcgcgctggaaacaggacttgctggcgtcaagcgcggccaggtcaagctcgacaacaccgcgcggcccttcaatctgatcgcgcagacggtcgagaccgtgctcaacaagggcaatgccagcttctcctggcgcgaactcgtcagcgacgagccgttgaaggattcggacaagcgcaccttcatcgagttcaagccgatcctcgactacaacgcactggagcccggcaaggatgcgaccgaggcgatccggaaagcggcggccgacctcgattttccaaacaagtatcaggcgcgagtgcggctgaccggcccggtcccgatcgccaacgaggaatacgccaccgtacaggaaggcgccgtcgtcaacggcattggcacgatcctcgtcgtgctgctcatcctctggctggcgctgcactcggcgaagatcatcttcgccgtcttcgtcaacctcttcgtcggacttgcgatcacgaccgctgcgggcctgatgatggtcggctccctcaatctgctgtcgatcgcgttcgcggtgctgttcgtaggcctcggcgtcgatttcggcattcagtacagcgtgcgctatcgctccgagcgctacaagcacgatgatctcacgggggcgctggtgctggcggccaagcgttcggcggtgccgctgtcgctggcggcgatggctaccgcagcgggcttcctctgcttcatgcctaccgactacaagggcatttcggaactcggccagatcgccggtgtcggcatgctggtcgcgttcatctcctcgatcaccgtgctgccggcgctcttgaagctgttgaacccgcccggcgagccggagcccgtcggctacgccttcctggcgccgctcgatcacttcctggagaagcaccgcgtgctgatcgtcgggggcacgctgctgctggcgcttggcggcatgccgctgctctatttcatgaagttcgacttcaatccgatgaatctgcgtaacccgcacgccgagtcgattgcgaccttcctcgacctgcgcaaggatcccaacaccggcgcgaatgccatcaatgtgatggtcacgtctgaggagcaggcaaagcaagtcgaggcgaggctggagaaggtgcccgaggtgctcagggtgatgtcgctcaacagcttcgtgccgcaggaccagggcccgaagctgaagctgctcgcgcagggcgccaaggtgctgaaccccgcgctcaaccccgagcagatcgacgcgccaccgacggaccaggaaaacgtcgagtcgttgaaatcttcggtcgacactctgcgccgaacagcaggcgacgcgaagggaccgggggcagttgcctcgcgccgattggcggacgcgctcgagaagctcgccaatagcgacgagactacgcgcaacagggcgcaggatgtattcgtcacgccgatgaagatcgtgttcaaccaactcaggaacgcgatgcaggccgagccggtcaccctgcaatccttgccgcccggtctcgtcagcgggtggaagagcaaggatggcatcatccgcgtcgaagcgttgcccaagggagatcccaacgacaacgaaacgctgcgcaaattcgcggcggcggtgctcgcggccgagccgaccgcgatcggcggacctgtgtcgatcctgaaatcaggcgacaccgtggtgaaggcgttcatccacgccggcatctacgcgctgctggtgatcgggctcctgctgtggatcacgctgggacgcttcgtcgacgtgctgatgacgctggtgccgctgctggtcgccggtgcggtgacactcgagatttgcgtgttgattgggctgccgctcaacttcgccaacatcgtcgcgcttccgctgctgctcggcgtcggcgtcgccttcaagatctattatgtcgtggcttggcgctctggcaggacaaacctgctccagaccagcctgacgcgcgcgatctttttcagcgcgctgacgacggcgactgcgtttggcagcctgtggctgtcgagccatcccggcacgtccagcatgggcaagctactggcactctcgctggttacgacgctcgccgctgtcctgctgttccagccggccctaatgggcaaaccgcgcgatctccgggagtag

SEQ ID NO: 1343 - DNA, 516 bp, BradyrhizobiumColbertium
atgtggggcgcggtttcctgggaaaagcagcccggtgggcgcgacgagaacaatccggatgcctcgaaaaagaacaggccgacgctgggcatggcaaccctgatcgacatgaagaagaagcccggcatcgatcagtgggaaggccaagtctacaacgccaaggacggccagctctacagcgcgaccatcacgccggctggtcccgatcaactcgaaatcaagggctgcgtgatgggcttcttgtgcggcggcgagacctggacccgagtgagcccgccaatccccgccagtccggctaacgccatggccaagggcgcgccgaaatccagcggcgctgcaccgagggcccaaggggcccaacaaggagcgcaagcagcccaagccacgacaggcgccaccgcgcctgcgcctgcaactccgaaggccgccggtacagccaagtccggtcagaagaacgccgccgacccggtcggcgacatctgcctactcccggagatcgcgcggtttgcccattag

SEQ ID NO: 1344 - DNA, 1392 bp, BradyrhizobiumColbertium
atgcacagcccaaatccagacatgtctcagcttttcgcggaccgtcaggcccagcgcagcaccctgcataaccggtatctgaacgaacagttcgttcgggtgctcaagaccatcggctacgatgtcggcttccagaaggggcaggggcagtacctctacgatcgcgagggcgctcgctatctcgacctgttgtccggctttggcgtgttcgccatcgggcgcaatcatcccgtcatgcgagaggcgctcaagagcgtgctcgatgccgatctgcccaatctggtccagttcgacgtctcgacgctggccggcgtgctggccgaacggctgctgaaatacgtgccctatctcgacaaggcgttcttcgccaattccggcgccgaatgcgtcgaggccgcgatcaaatttgcgcgcggtgccactggccgccccggcatcgtctattgtgcccacggttatcacggcctgacttatggcgcgctgtcgctgaccggcgattcgaattttcggaccggcttcgagccgctgctgccgggctgcaccccgatccccttcaacgatctggccgcgctggaaaaggctttggcctcccgtgaggtcgcggctttcgtggtcgagccgatccagggcaagggcgtgaacatgccgacggacgagttcctgcccggcgccgccgcgctctgcaagaaatatggcacgctgttcgttgcagacgagatccagaccggcatgggtcgcaccggccgctttctcgcggtcgagcactggaacgtcgagcccgacatggtgctgctgtcgaagtcgctgtcgggtggccacgtgccggtcggcgccgtgctgacgcgcaaggccatcttcgacaagatcttcaaccagatggaccgcgcggtggtgcacggctccaccttctccaagaacgacctcgccatggccgcgggcatcgccacgctggacgtcatggagtccgagaagctgatcgaatcagcggcaaagcgcggtgccgagttgcgcctcgcgctgacgcgcatggtgcccggctacgagctgatgaaggaagtgcgcggcaagggcctcatgatcggcgttgagttcggcccgccgaaatcgttgcgcctgcgcgcctcctggaacgtgcttgagaccgccaataagggcctgttctgccagctcatcaccgtgccgctgttcaaggaccacaagatcctgacgcaggtggccggtcacggcagccacaccatcaagctactgcccccgctcaccatcaccgaggaagactgcagctggatcgagcgcgccttcgatgacgtgatcgccggcagccacaaggtcccgggtgcgatctggtcgctcggcaagacgctggtggacaacgccgtgcgaaggtcggcgtaa

SEQ ID NO: 1345 - DNA, 888 bp, BradyrhizobiumColbertium
atgatccatcggcgcttttcgatcggtactgccggcgcagagctcgccatgctgcaatggggcgagcgcggaaagccccctgcgctgctcttacatggcaccggcttcgtcgccgacgtctgggacgaggtcgcacgcgcacttgcctcaacccacaccgtgtacgcgctcgatcgccgcggccatggcgccagccataagcccggcgcctatcaatttctggactatgcagaggatgtctgccgggtggtcgacgcgctcgatctccacgacatctacgcaatcggccacagcgcgggtgcgacggatctccttctcgcggcgagactcttgcccggtcgcttcacacgcctgttcgcgatggaaccgaccatcatggatccgcgcgcggcgcgcgccggcggattgagcgaggaatcccaatccctcgtggcgggcacgttgcgccgacgcgccgagttcgacagtgccgacgccgtgctcgaacgctaccgcacagcgccggcctttgctgattggaccgagacctcgctacgcgcgtatgtacgccacggcttcgtaccgctcggcgatggccgcatccggctctgctgcacccccgagatcgaatccgcgatcctgcgtccgatctttgaggcgatggagcaggtgtatattggggacgctcgcggcaacccgttcgcctggctgacggagatcgaatgtcctgtgcgcgtcacgaccgccgcaaagtcggatgcgatctacaaggagatggcgcaacgcgccgtgtcgctgattccccgcgtcagcacgcaggtctttgatggcgcgggacattgcgtcgcgcaggaaatgccagaacgtgtggtggaagccgtgcgggactacgcgaaagccggcacctga

SEQ ID NO: 1346 - DNA, 1620 bp, BradyrhizobiumColbertium
atgccaagacggctcgaaggtgagtttgactacattgtcgtcggagccggtacggcgggctgcatcgtcgcgaaccggctgtcggccatgccaagcaatcgcgttctcgtcctcgaagccggtggcgacgacaattggatctggttccacatcccggtcggttatctcttcgcgatcggcaatccccgttcggactggatgttcaagaccgaggccgagccaggcctgaacggccgatcgctcgcctacccccgcggcaaagtgattggcggctgctcggcaatcaacgccatgatctcgatgcgcggacaggctgccgactacgatcactggcgccagcttgggctgaccggctggggctatgaggacgtgctgccgctgttcaagcggctggaggaccacttcctcggcgcgagcgagcatcacggcgccggcggcggctggcgtatcgaggcaccgcggctgtcatgggccattctcgacgcagtcggcgacgccgccgaggagatgggcatcaagcgcatcccggacttcaacaccggcgacaacgaaggcaccagctatttccacgtcaaccagaagcgcggccgccgctggtcgtcggcccgcggcttcctcaagcccgcgttgaaccgccccaatctgcggctcgagaagcacgtcctggtcgatcgtctcatcatcgagcagggccgcgccgtcggtgtccgcttcatccagaacggccagatcatcgaggcgcgtgcgaagcacggggtgatcctctcggcagggtcgatcggctcggtgcaggtgctgcatcgttctggcatcggacccgccgactggctgtcgccgctcggcatcgacatcgtcatggacaagcccggtgtcgggcgcaacctgcaagatcatctgcagcagcgcgcgatctacaaggtcgaaggcgtgcgcacgctgaacgagacctattacaatctgctccgccgcggcctgatgggactcgactatgccttccgtcgccgcggcccgctgaccatggcgccgtcgcagctcggcatcttcacgcgctccgatgcaacgcgcgcccgcgccaacatccagttccatgtgcagccgctgtcgctcgacaaattcggcgatccgctgcaccgcttccccgcgatcactgtcagcgcctgcaatctccagcccacctcgcgcggcaccgtgcgactgcgcgcggcaacgccggaggagaagccgatcatcgcgccaaactacctgtcgaccgacgatgaccgccaggtcgccgccgacgccatccgcaccacgcgacgcctgatgcagcagaaggcgctggccaggtaccgccccagcgaatacctgcccggcccctccgtcggcgacgatgacgcctcgctcgcaaaagccgccggcgacatcggcaccacgatcttccatcccgtgggcacggcgaaaatgggcgcggcgaacgatccgatggcggtggtggacgaacggctgcgcttctacggcctcgacggtctgcgcatcgtcgatgcctcgatcatgccgaccatcacgtcgggcaacaccaatacgccgaccgcgatgatcgcggagaagggggcgacgatgatcctggaggatgcgaagtag

SEQ ID NO: 1347 - DNA, 1173 bp, BradyrhizobiumColbertium
atgcccatcgtgaaccgcgtcgccgaccttcagcccgacatccaggcctggcgacgggacatccaccagcaccccgaactgctatatgacgtcgaccgcaccgcagcattcgtcgcggaccggcttcgcgagttcggctgcgatgaggtcgtgaccgggctcggccagaccggcgtggtcggtgtcatcaagggcaataagccgcccggcgaggggctcaaagtaatcgggatgcgtgccgatatggacgcgctgccggtcgaagagcagaccaacctgccttacgcctccaagatccctggcaagatgcacgcctgcggccatgacggccacactgcaatgctgctgggagccgcccgctacctcgccgaaacccgcaactttgccggcgatgccgtcgtgatcttccagccggccgaagagggcggcgccggcggcgcggcaatggtcaaggacggcctgatggagcgcttcggcatcgagcaggtctatggcatgcacaatgggcccggcatcccgatcggctcattcgcgatccggccgggtccgatcatggcggcgaccgacgaggtcgatatcatgatcgagggcctcggaggccacgccgcgcgcccgcacaaatgcgtcgattccgtgctggtcggtgcgcaggtgatcacggccctgcagacgatcgtcgcgcgaagcgtcgatcccctcgaatcggcggtgatctcgatctgcgaatttcacgccggaaacgctcggaacgtcattccgcagacggcgacgctgagaggcaccatccgcacgctgtcgccggaggtgcgcaagctggtcgagaagcgcgtgcatgaagtggtcgcaggcgtggcgcagatcactggcgccaagatcgacctgcgctacaagcgcaactatcccatcgtgaacaatcacgcggcggagaccgaggtggcgcggcgcattgccgggcaagtcgcgggcgaagccaatgttcacgagatggcgccgctgatgggcggcgaggatttcgcctacatgctggaagcgcggcccggcgccttcatcttctgcggcaacggcgacagcgccggcctgcatcaccccgcctacaatttcaatgacgaggcgatcgtctacggcacgtcctactgggtcaagctggtcgaggagcagctggcggcgtcctaa

SEQ ID NO: 1348 - DNA, 1443 bp, BradyrhizobiumColbertium
atgcaatacatcatcctcgacaccgaaaccgatttcgacggctggcgcaaagccgcgcgtagcctcgtgcttcaccacgtgcggcccagcgacgtcacctggagcgtgcaaggccgtgaagcggagttgttcgcaccgccctcgccatctccgatcctcgaggtgaacgacgccaccttcaccgtctcgacaaagttcatcgagcttgcgaaggccgcaatcctgcatcgcgatgccgagcgctttgcggtcctctatcggctgctctggcgattgaaggacaatcacgacctcatcgaggtcgcgaccgaccctgatgtcgcacaggtcactgccatggcgaaggcggtctatcgcgacgagcacaagatgcatgccttcgtgcgcttccgcgagatcggccgggaacgccaggcgcattacgtcgcatggttcgaaccggatcatcacatcgtcgagctcgccgctcccttcttcgccaagcgctttgccgacatgccctggtcgatcctgacgccggacctctgcgcgcattgggatggccatgcactttcattcacatccggtgtcagcaagagtgaggctccgagcgaagaccggctcgaggaaacctggcggcgctattatgccagcatcttcaatccggcccgcctcaagccgaaggcgatgcaggccgagatgccgaagaaatattggaggaacctgccggaggcttcgatcattaagcctttgatcgaggatgccgagcgcatgaccggtgctatgatcgccaatgccgcaaccgatccgcacaagcctcaaaagcgaccggaggctccgatgaaacgcaagactgtcggcgacgatctcgaagcgcttcgcgaggaggctgcgcattgccgcgcgtgccatctctacaaggatgcgacccagaccgtgtttggcgagggtccgaaatccgccaatatcatgctggtaggcgagcagcccggtgacaaggaagacctcgccggccatccctttgtcggtccggccggccagatgctcgatcgcgcgctggaggaagccggcgtcgaccgcaagaaggtctatgtcaccaacgcggtcaagcacttcaaattcgtgccgcgcggaaaaatccgcctgcatcagaaaccgaacacacctgagatccgggcgtgccgacaatggtatgagcgggaagttgcggcactccagcccgatctcatcgttgcaatgggcgccactgccgcgcaaagcgtgttcggcaagatcactccgatcggcaagaaccgcggccggctcatcgaccttcccgacggtcgcaaagcgctcgtgacggtgcatccctcatatctgctgcgactgccggatccggaagccaaggtgctggagtatcgacgctttgtcgaggatttgaagatcgccgccggcttacagaggaagtccgcacgagctgcgtaa

SEQ ID NO: 1349 - DNA, 1236 bp, BradyrhizobiumColbertium
atggacgtacaacgcaagctggagattctggcggatgccgccaaatacgacgcgtcctgcgcctccagcggcaccgaaaagcgggattccagtgatcgcaagggcatgggctcgaccgcgcccggcatggggatctgccattcctacgcgccggacggccgctgcatctcgctgctcaaggtgctgctgaccaacgcctgcaattacgattgcctctattgcgtcaaccgcgcctcctccaatgtaccgcgcgcccgcttcaccatcgacgagatcgtcaagctcacgctcgacttctaccggcgcaattacatcgaaggcctgttcctctcctccggcatcatccgtagccctgattacacgatggagcaggtcgtcagcgtcgcgcgcaagctgcgcgaagagcatcatttccgcggttacattcacctgaaaaccattcccgaagccgacgatgcgttgatcgcggaggccggcaagtatgccgaccgcctctccatcaacatcgagatgcctgaggaaaccagcctgcagcaattcgcgccgcagaagaatgttcgcgcgatccgccgcaccatgggccggttgcggctgaagctagacgaggccgaggacagccatagcgcaaagacgagagccaagccgcagcgtttcgcacccgctggccagagcacgcagatgatcgtcggcgcagacgcggcctccgatcagaccattctccacaccagcgccaatctctacggcgcctaccggctgcggcgcgtttattactccgccttcagtccgatccccgacgccagccgcgctttgcctctggtacagccgcccttgctccgcgagcatcggctctaccaggccgactggctgatgcggttctacggcttcgacgtcggagagatcgtcgatggcagcgcgatgctgccgctcgacatcgaccccaagctcgcctgggcgctgcgccatcgcgaccgcttcccgctcgacgtcaaccgcgccaaccgcgaagagctgctgcgcgtgcccggcttcggcaccaaggcggtcgaacgcatcattgcgacgcggcgcaccaccacgatccgcgtggccgatctcgcgcggctgcacgtgccccgcaacaaggcactgccgttcatcatcctcagcgaccaccgcccctctccgcatcgtctcgatgccgccggactgatcgaacggttcaagccaaaagcgacacagctgggatttggcttctga

SEQ ID NO: 1350 - DNA, 753 bp, BradyrhizobiumColbertium
ttgcgcggccagatcgagcgcatcgagaccgcggtcgtgcatcagcacgagcgcgtcgcgctcggccatagcgaggcggacagcgcgctgaagggcgggcttgcgcgcgcggcgatccacgaggtgttttgcgaaggacgtcagggtgctgccgcgacagggtttgtcatgggacttgcggggcgcgtctcagcgcgtcggccgctgctgtgggtgcggcaggatttttcggatatcgaaaccggcgcgctgtcgatgagcggactcgccgaactcggcctcgatccgcgtcgcgtggtgatggtgcgtgccgccgatgtcgagagcgcgctgcgcacctcggccgatgcgcttgcctgcgacgcactgggcgctgtcgtgctcgagctctggggcgatatcaagcagttcgatccggtggcgagccgcaagctgacgctggccgcgcaaggctccggcgtcgtcggcctgatgttgcgcatggccgcgcagccgctgccctcgaccgcggagacacgatggatgctgcgcgcggcgcattcgccgccgggggcagcatggagtgcctggggtgcgccacgcttcgatgctgaactcctccgcaatcgtcatggcccgtgcggccggtggatcatggaatggaattgtgatgagtgccagttcaatgagccgtcgacgtattctcagcctgtggctgccgcgcctgcccatcgatcggatccaacggttctttgggaaagtcggtctgcataa

SEQ ID NO: 1351 - DNA, 1443 bp, BradyrhizobiumColbertium
ttgattcatgcgctggacgaggccgccgagcgcctcggcctgtacattggccagcctctggccaatgcgcgtgcgatgtgtcctgacctgaaggtgttcgacgccgataccgtggccgatgcgaagacgctcagcgatatcgccgactggtgcgaccgcttcacacctctggtggcgctcgatccgccgcacgggctgttcctcgacatcaccggctgcgcacatctgttcggcggcgaagccgcactgttgcggacgctggtccgggcgctcggccggcagggctttgccgtcagtgccgcgattgccggcacctcggtctgtgcacgcacgctgacgcggcaggccacgggcaccatcgtggccgatggcgaggaggcggtcgcgatcagttcatttccggtgtccgcgctaggggcgggcgaggcgatcaccaccggtctgcgccgcgccggtctgaaaatcatcggcgatgtcgcctcgcgcgcgccgagcgagatcacggcgcggttcggcgcgcgcttctccacgctgctcgcgcatgcgctggggcagggcgatgcgccgatcagcccgcgcaagccgttgcccgactacatcgtcgagaagcgctttgccgaaccgatcgcgaccgacactatgatcgcgatgacgctgtcgcggctggcggacacgctgatcgcatccatggagaagcagggcaagggcgcgcggcgtctggaggccgcgttcttccgcaccgatggcgcggtgcgcgcgatcacggtcgagaccggacgtccggtgacgcgaagcgccgtgatcgaccggctgttccgcgagcgtctcgatgcgctcgccgatccgctggaccccggctttggcttcgacatgatacggctgtcggcgagccgcaccgagatcgtggtacaggagcagcgcgatctcgatgcccatgtccatgacaatgacgagcttgctgcgctgatcgaccgcatcgccgcgcgcatcggcggaaagcgtgtcgtcgtacatctgccgcaggacactcatatccccgagtgtgcggtgctcgccgcacaggcgcagcatcatctcgccgccgccatgcaggccacatggccggcgcgcaccgagagcgagccgccgctgcgtcccttgcggctgttcgacaagccggagccgatcaaggtgcctttcgcgaccgtgccggatggtccgccgcatcaattcacctggcggcgcgcgctgcatgcagtggtgcgggtggaagggcccgagcgcatcgcgatggagtggtggcggcaggacggcaagcagctgacgcgggactatttccgcatcgaggatgccgaaggcctgcgcttctggatctttcgcgacggtctctacgagggggaagtgttcgacggcgacggcaagcccgcttctcccggctggtatgtgcacggtcttttcgcatga

SEQ ID NO: 1352 - DNA, 3459 bp, BradyrhizobiumColbertium
atgatctcgcccgcttatgccgagatcggcatcaccacgaacttctcgttcctgcgtggcggctcggacccgcgcgcctatgttcatcaggcgagcattctcggcatctccgcgatcggcattgccgaccacaacacgctcgccggcgtggtgcgggcctacaaggaactcgacaatgatgaggtgctgcacaagccgaagcttttgatcggcgcgcgcatcgtcttcgtcgacggcacgcccgacattctggtctatccgcgtgaccgcgcggcctatggccggctctgccagcttctcacccggggcaagcgcggcgacgacctcacgcggatcgagaaaggcgaatgccgtctcaccttcgccgacctccttgagttttcggaaggtcagcttctggtcctgaccctgccgcatcgcttcgacaacccgcaggcgctggatgttctcgcaaagcttagggatagccgtgccgcgggtgtgtggctggcggcgagcctgatctatcgcggcgacgaccggcgtcgcctggcgcggctcgacgatctcgcagcaagagccaaagtgccgctgctcgcgaccaacgaggtgctctatcacgatccccgccgccggcctctccaggatgtgctcacctgcatccgggaaaagaccacgatcgcggcggttgggaagaagctggaagccaatgccgagcgttttctgaagacaccgcgagaaatggcgcggctgtttcgcgatttccctgatgcgatcgcggagaccatgcgttttgcgggcaaggtcgatttctcgctcgaccagctcaaataccagtatccggatgagccggtgccgccgggcaagaccgcgcaagggcatctggaggatctgacctgggcgggcgtcgacaaatatttcgacggtaagatcggcgacaagctgcgcgcaacgctcaacaaggaactcgcgctgatcgccgagctgaaatacgcgcattacttcctcaccgtgcacgacatcgtccaatacgcgcgcagccagaacattttgtgccagggacgaggatcggcggcgaactcggccgtgtgctacgtgctcggcgtcacctcggtcgatccgaccaaggtcgatctgctgttcgagcgcttcatctccaaggagcggctggagccgcccgacatcgacgtcgatttcgagcattcgcgacgcgaggaggtgatgcaatatgtctatcgccgctatggccgccatcgcgccgcgatcatcgccaccgtcatccattatcgtccgcgcagtgccatccgcgacgtcggcaaggcgctcggcctgaccgaggacgtcaccgccgcactcgccgatacggtgtggggcagctggggcaagggcctcaacgacatgcaggtcaggcaggccggactcgaccccaacaatcccatgatcaacctcgcggtcgagcttgcgaccgagctgatcgaatttccacgccatctctcccagcatgtcggcggctacgtgctcacgcaggaccggctcgatacctatgttccgatcggcaacgccgcgatggacgaccgcaccttcatcgaatgggacaaggacgacgtcgatgcgctcagcatgatgaaggtcgacgtgctcgcgctgggcatgctgacctgcatcaggaaatgttttgacttgatcgatcagcacaagggtaagcgttacgcgcttgcggatatcaagggggaggatgacgacgaagtctatcaaatgctgcagcgaggagagtcgctcggcgttttccaggtcgagagccgcgcccagatgaacatgctgccgcgcctgaagccaaggactttctacgatctcgtcatcgaagtcgcgatcgtgcgtccgggaccgattcagggcgacatggtgcatccttatctgcgacggcggaacggacttgagaaggtgagctatccctcgccgtcgcctgagcatggccccgcggacgaactctacaaggtcctgcacaagacgaagggggttcccctatttcaagagcaggcgatgcgcattgccatcgaggcggcaaaatttacctccgaggaagccaatggcctgcgccgctcgatggcgaccttccgcaatgtcggcaccatcggtcaatacgaagaaaagctggtcggcaacatggtggcgcgcggctacgatcccaacttcgcccgaagctgcttcgagcagatcaaggggtttggttcctacggctttccggagagccacgccgcgagctttgcgcaactcgtctacatctcctcgtggctgaagtaccatcaccccgacgccttctgctgcggtctgttgaactcgcaaccgatgggcttttacgccccggcgcagatcgtcagcgacgcccgcaagaacggcgtcgaggtgcgcgacatagacgtgtcctatagctttgtgcagaacacgctggagcaggggagtggtagatactgcgccgttcgcctgggtttccgtcagatcgacggctttcactggctggatgaagatgaggagcggttgaagcgctcccagtcgtcattcccgggcgcgccacttggcgcgagcccggaatccatcgaaccgcatttgcctggaggactgggctccgggctcgatgctgacgcatcggcccggaatgacaagagaggggactgggccgatcgcatcgtcgccgcccgcaaccgccgtcccttcacctcgctcgaagatttcgcccgcgacaccggcctgcccaagcgcgcactgatcctcttggcggatgccgacgccttccgttcgctggggctcgaccgtcgcgaggcgctgtggcaggtgcggcggctgcccgacgacgtgccgctgccgctgttcgaggcggcggccgcgcgcgagcagccggacgaaggcgcaaggccgttgccggcgatgccgcgcgccgagcaggtcgtcgcggactaccagaccatccgcctgtcgctgaagggccacccgatggagttcttgcgcgagctgtttacgcgcgagcgcatcgtcgcctgcaaggagatcagtcatgagaacgagcggcgccgcgtccgctgcgccggcgtggtcctggtccgccagcggccgggaagcgccagcggcgtggtgttcatgacgctggaggacgagactggcatcgccaacgtcgtggtgtggcccaagatcatggagcagtaccgcaaggaggtgatgggcgcacgcctcatcctggtcgaaggctacatccagagcagtcccgagaaggtgacgcatctcattgcccagcgcatggtcgaccgctcgcatgatctggtcggtcttgcaaacgatgcgctaagccgcaagcatccgctgccggcaggcgccaccgtggtcgaaccactcaacgaagaccctcgcgcgctcgcagacatgcctgcgcagaaaatccgccatccccgcaacgtccgcatcctgccgccgtcgcgggattttcattga

SEQ ID NO: 1353 - DNA, 771 bp, BradyrhizobiumColbertium
atggacctcggtctcaaaggcaagaacgccatcgtcctcggcggcacgcgcggcatcgggcgggcaatcgcggcgacgctggccggtgaaggcgccaatgtcgcggtgtgcgcgcgcaacgcggatcaggttgcggcaacggtctcggagctgaaggcgcgcggcatcaacgccaccggaagccctgtcgacgtcaccgacggcgcggcgctgaaatcctggatcgaggctgcagcaaaggagctcggcggcgtcgacttgctgttctccaacgccggtgcaatggcgcagggtggcgatcccgcatcctgggagcagaatttccggctcgacgtgctcggcgcggtgcatgcgttcgatgccgcgcggccgtttctcgaagccagcggcgcaggcaagggcgatgccgccttcgtgatcatctcgtcgatctccgcggcgcaagccgataccgcaagctcctacggtccgatcaaggcggccctgatccacatggccaaaggactggcgcggcaatatgcaaagaagaagattcgcgtgaatgtcgtttcgcccggcaccgtttatttcaagggcggcgtttgggagatgatcgagaagaacatgccggagcgctacaaggatgcgatgaaccgcaatccgacaggccggatggcgaccccgcaggaaatcgcaagcgcggcggtgtttctggcaagccccgtgtcggggttcacgaccggatccaatctcgtcgtggatggcgcgatctcgaaccgggtgaacttttga

SEQ ID NO: 1354 - DNA, 1278 bp, BradyrhizobiumColbertium
ttgccgagatcgctgcagacgcgaccgggcttcatggtagtcgaaaagaccaagagattgcagctgcttacaaagcgacggatgattgcatccgtagttctgctggctctcgccggtgctggcgcctatggcttgctgtattcgtctgccaagcagaagaaacattcagagatctccagtcagtcgcgcaagaatgcgcagacctttacgccgacgccatctgaatgggcgacgttgacgatcgagccggtgaaggccaggagcttccgcgccgagtatgtcacggagggcaaggtcgcgatcgacgaggatcgctcgacgccggtgttctcgccctatgcaggccgggtcaccaggctgctagccaagccgggcgagatgctgaagcaaggtcaaccgctgctcacgatcgaagccgccgacaccgtgcaggcccagaacgatttcatcgcggcgatgacctcgcagaacaaggcgaactcggcgctcgagctttccgacatccagttcaagcgcgccaaggacctttatgaaggccatgccattccgctgaaggactatcagctggcggaggcggcgcaggtccaggcgcggaacgacatgcgctcctcggcgacggcgctggaagctgcgcgcaacaagctgcgcatcctcggcttcaccgacgagaccatcaaggccttccgggacaagggcgtcatcaacccggagatcacgatccattcgccgatctccggcacggtcgtgcagcgcaagatcggccccggacaatatgtcagcgccggtgccagcgatccggtgttcgtgatcggcgatctctccacggtctggctcaccgcctttgtgcgcgagagcgatgcggcggcgatctgcatcggccaggacattatcgtcaacgtgatggcgctgccgggccggccgctcaccgccaagatcaactacgtcgccgccgcgatcgatgcgaccacccgccgcctgctcgtccgcgccaccatcgacaacaaggacggactgctcaagccggagatgttcgcgaacgtcacgatctattcggccggcggccgcgccgcgccggcggtgccgaagcaggcgttgatctttgaggcggacaaggttcgcctctgggtcgcgcgcgaggacaagtcggtcgagctgcgccagatcaagatcggtctcatcaacggcaacctggtcgaggtcaccagcaacctgaagcccggcgagcagatcgtgaccaaaggcagccttttcatcgaccgcgcggcgtccggcagctga

SEQ ID NO: 1355 - DNA, 3117 bp, BradyrhizobiumColbertium
atggatcgtctcgttgcccttgccgtcaaccggcgcttcctgatggtcggcctgttcgccgccgtgctgatcggcggtctgatcgcattcaaccggctcaacatcgaggcctatcccgatccgacgccgccgatggtcgacatcgtgacgcagagcccgggcctgtcggcggaggagatcgagcgctacatcacgatcccgatcgagacccaggtcgcgggcctgaagaacatcacgaccatccggaccatctcgctctacggtctctctgacgtcaagattcagttctcgttcgcctacacctatgacgaagcgttgcagcaagtattgaatcgcctggcgcaactcgcgccgctacccggcaacgtgcagccgcaaatctcgccgctcagcccgatcggcgagatcttccgttatcgtctggtcgggccgcccaattacagcgtgctcgacctcaagactgttcaggactggatccttcaacgccgcttccgcgccgtgcccggcgtcatcgacgttaccggctggggcggcaggagcaagacctacgagattcaggccgacttcaacaagctggtcgccaacggactgacgctaccgcagttgctccaggccgtcggcaattccaacgtcaacgtcggcggcaacaccatcgacatcggccagcaatcggccgtggtgcgcggcgtcggcctgatccgctcgatcgacgacctcgccaacaccatggtggcgcagaccggcggcaatccggtgctggtcaaggacgtcgcaaccgtcaccgtcggccaaaaaccacgtctcggcattgccggcctcgacgaggccgacgatatcgtgcaaggcattgtcctgatgcgccgcggcgagcagagttcgccgaccatcaagcgcgtccacaaactcgtccagcagatcaacaactccagcatcctgccgcccggcgtgcgcatcgagcgcatctacgaccgcggggacctgatcgagctcaccacgcacaccgtgctgcacaacatggtggtcggtatcctgctgatcgtgctgctgcaatggatcttcctcggcgacctacgcagcgcgctgatcgtcggcgccacaattccgtttgcgctgttcttcgcggtgatcatcctggtgctgcgcggggaatcggcgaacttgctgtcggtcggcgcgatcgatttcggcctgatcgtggacgccaccgtcatcatggtggaggcgatcttccgccgcctgacgcaaaccacgccgatcgcggaatccgaacagatgtcgtccgagacgctgttcggcatgaagagccatgccatcctcagcgccgccgccgacgtctcacgctccatcttcttcgccgcggcgatcatcatcgcagcgttcctgccgctgttcacgctctccggggtcgagggcaacatcttcgggccgatggcccgcacctacgcctatgcgctcgcgggcgggctcctcgcgaccttcactgttacgccggcgctgtccgcgatcatcctgcccgcgcatgtcgaggaaaccgaaaccaaggtgatgctgatcctgcaccggttgtactcgccgctgctcaattgggccgtcgccaatcgcaacatcgtgctcggcggtgcagtcggactcgtgttgctgacggtggcgctcgcccgcctgctcggcctcgaattcctgccgaagctggaggagggcaatctctggatccgtgccacgttgccgccgaccatctcgcttcaggaaggcaattcctacgtcaacgagatgcgcaaggtgatccgcgcccggccggaggtcgagtccgtcgtatcgcagcacggccgtcccgatgacggtacggacgcggccggtttcttcaatgcggagttcttcgcgccgctcaagcccgcgagccagtggccaggcacccgcgacaaggaggagctgaccgcgcagctgctcaagcagctcgatgacagcttccccggcgtcgagttcaacttctcgcaatatcttcaggacaacgtctccgaagccgtctccggcgtgaaaggcgagaactcgatcaagctgttcggcagcgatctccaggcgctcaccgacaccgccaacaagatcaaatcggtcctggccaccgtgcagggagtgaccgatcttgccgtgttcacctcgctcgggcagcccaccgttcaaatcgacatcgaccgcgccaaggcggcgcgctacggccttgcgccgggcgacatcaatgccaccatcaaggtcgcgatcggcggcgacaccgccggcgatctctatgagccgggaagcgaccgccactttccgatcattgttcgcctcgcgccggaatatcgtcgcagtgccgaggcgatccagaatttgcggatcggcgcgcccgggccgaacggcatggttacgcagatccccttaagcgaggtcgcaaccatcagcctcgtctcgggcgcggcctatatctatcgcgagcagcaggagcgctatctgccgatcaagttctcggtgcgcgagcgcgatctcggcagcgccatccgcgaggctcaggacaagatcgccgatcaggtgcagctgccgccgggctcgcacatggagtgggtcggcgagttcggcaatctccaggacgcgatccggcggctgtcgatcgtagtgccgatctcgctggtgctgatcggcgtgctgctctggttcaatttcggctcgatgaccgatacgctgcttgcgatgagcgtgatcccgatggcgatcttcggcggggtgctgggcttgttgatctcgggcacggcattcagcgtctccgcggcgatcggcttcatcgcgctgttcggcatcgccgtgatggacggcatcatcatcctgtcgcagttcaaccagctcatcgaagagggtatggaccgcatgagtgcggtggtgcgcaccggcgagcttcagctccggcccgtgctgatgacgtgcgtcgtcgcgggcgtcggcctgttgccggcggcactgtcggagggcatcggctcgcaggtgcagaagccgctcgcggtcgtcgtcgtcaccggcatgatgctggcgccggtggtgatcctcctgacgttgccggtgctgatctcgtttttctcccgccgggcgcgctga

SEQ ID NO: 1356 - DNA, 912 bp, BradyrhizobiumColbertium
atgatcgaccaagtccacgcccgtgcggcacagcccgcgacgcgggtcaacttcgacgtgccggcgcatgcctgcgactgccacacccacatccacggcgacgtcgggagatttcctttctttgccgggcgcgtctatacgccggagccggcgagccccgaggaaatgactgcgctgcacaaggcgctgcatatggagcgcgtggtgatcgtgacgccgagcgtgtacggcaccgacaattcttcgacgctgttcggcatgaaggcgcgcggcgcgaccgcgcgcggggtcgctgtgatcgacgacaagacgacggaggccgagctcgacacgatgcaggcagacggcttccgtggcatccgcatcaatctggcgaccgacggcatcagcgatcccaacgtcggacgaagccgcttcacggcgtccgttgagcgcatgaagacacgcggctggcatgtgcagctctacacgacattgccggtgatctcggcgatcaaggatctggtgctggctgcaccggtgcccgtcgtgttcgaccatttcggcggcctcgaggccccgctcggactggagcaacccgggtttgacgacctgatagcgctcgtgaagtccggcaaggcttatgtgaaagtctcgggcgcctatcgttcgtccaagctggcgccggactaccaggacatggttccctatgcccgcgcgttgatagcggcgaacgcggaccgcatagtctggggcaccgactggccgcatccggattcaagccacgtcgagggacgcaagcccaccgacattgcgccgttctatcaaatcgacgacggtcggttgctcaaccagcttccggtgtgggcgccggatgcggacgtgcgtaagaagatcctggtcgataatccggcgcggctctacggcttctga

SEQ ID NO: 1357 - DNA, 1431 bp, BradyrhizobiumColbertium
atgattgggcgtaccgccagagctggtcgcgtgctgacgcggcatcgatcgggcgtggctcccgtgcttgcgacatggaccacgctggcgctctcctgcgccctcgcctctcccgcctgggcggaggccctgcccgaggcgctcgccaaggcctatcagaccaatccgcagctcaatgccgagcgtgcgcgccagcgtgcgactgacgagaacgtaccgcaggcgcttgccggctaccggccgcagatcttggccagcctcagcgccggcctgcaatcggtgcgcaatctgctgcccgacaacaccatccagaccgccaacctgaaaccctggatcatcggcgtcaccgtgacgcagaccctgtttaacggcttccgcaccgccaacagcgtgcgggccgcggaactccaggtgcagtcgggccgcgaagcgctgcgcaatgtcggccaaggcgtactgctcgacgccgtcaccgcttacaccaacgtgctcgccaaccaatcgctcgtcgaggcacagcgctccaatgtcgccttcctgcgcgaaacactttcggtgacccagcgccgcctcaatgccggcgatgtcacgccgaccgacaccgcccaggccgaggcccgtctcaaccgcggccttgccgatctcaacgcggccgaggtcgcgctcgccgtcagtcaggcgatgtatgcacaggtgatcggcaatgcgccctcgcagcttcgccccgccgaggccgtcgaccgctatctgccgaagagtcgcgaggacgcgatgacgaaggcgatccgacagcatccggcggtgatggccgccagcttcgacgtcgatgtcgcctccaccaacatccgcatcgccgaaggcacattgctgccgagcgcgaccatccagggcagcgcgagcaagagccgcaacaacgacccgacactcggcaccttcgccgaagaccaggcttcgatcgtcgccaacgtcactgcgccgatttacgatggcggccaggccgcggcgcagacccggcaagccaaggagatcacggcgcagagccggctcgtgctcgaccaggtgcgcaaccaggctcgcgctgcggcggtgagcgcctgggtcgccaatgaaggcgccaaggtcgcggtctccgcctcggagtccgaagtgaaggccgcgacggtcgcgctccaaggcgtgcagcgcgaggccgccggaggacagcgcacgaccgtcgacgtgctgaactcgcaggccgatctgatcctggccaaggcccgcctgatcggcgcacaacgcgaccgcgtgatcgcctcctacacgctcctcagcgccatcggccatctcgacgtcaagacgctgaacctgaacacgccggactatctgcccgaggtgcactaccatcaggtccgcgacgcctggcacggcctacgcacgccatcagggcagtag

SEQ ID NO: 1358 - DNA, 780 bp, BradyrhizobiumColbertium
atgagcacgtttgaacacattatcgtcgagagcaaaggcgcggtcggcatcatcaagctgaaccggccgaagatgctcaacgcgctctcattcggcgtcttccgcgagatcgctgccgcggtcgacgatctcgaggccgacgatgccatcggctgcatcctcgtgaccggcaacgagaaggcctttgccgccggcgccgacatcaaggagatgcagcccaagagcttcatcgacatgttctccgaggacttcgccgcgatcggcggcgaccgcatcgctcgttgccggaagccaaccatcgccgcggtcgccggttatgcgctgggcggcggctgcgagctcgccatgatgtgcgacttcatcatcgccgccgacacggcaaaattcggccagcccgagatcacgctcggcaccattcccggcatcggcggtaccccgcgcctgacgcgcgcgatcggcaagtccaaggcaatggacctctgcctcaccggccggatgatggatgcggccgaagctgagcgctcgggcctcgtcagccgcatcgtctcggctgacaagctgatggacgaagcgatggcggcagccgagaagattgccgcgatgtcgcgccctgcggccgcaatggccaaggaggcggtgaaccgcgcattcgagaccacgcttgccgagggcatgagcgtcgagcgcaacctgttccattcgactttcgcgctcgaggaccgctccgaaggcatggctgccttcatcgaaaagcgcaagccggtgaacaggaatcggtaa

SEQ ID NO: 1359 - DNA, 678 bp, BradyrhizobiumColbertium
atgatgaaagccagcgcgcgcgcggccctgatcgttgtggccgggcttttcttgctgttcgggggcgttgcacaggcggcgccgagttcggcggccggcaacaaaccggatagcgcggagaagcaggccgacacggccaagcaccggcgccacgattcgcgccgcaccggcagcaacaaggcggtgaagaactccgtcagcaaggccggcaagaaggacactgccgcaaggaccgacgaggccaaggctgacggcaagaccgagggtgtcaagaccgacggtgaggggccggcatcgaaccaaatgccgccggaggtcgccaatgccaatgcgcagctcgctgacgacacgccgaccgcagctgccgcctcggcgatgacgaaccgggccaacgacaatgtccaggcggcagcggataataccaatgccgcggccccggaaagccaggtcgtcgcacccgatcagctcaacgacatcgatcgcgccgtgcagcaggaaaacccgccggcgcagaaggcggtgcttgccgcaaccgaggcgcagcctcggcccgccccggtgatggcaagcagccagcagagctcggcctgggaccagagctccctgatcggcaagatcttcatcggcgtcggcacgctgctgacgctggcctctgccgcgcggatgttcatagcctga

SEQ ID NO: 1360 - DNA, 546 bp, BradyrhizobiumColbertium
gtgcgcggacgtgaagacgaatggaccggcctgatgcggtcggccatggctggcgatgacgcggcgtatcagcgcttgttgaaggcagtcacgcctgtgctgcgcgctgccgcgaggcgcggcttggcgcgggcgggtcagcctccagaccaggccgaggatatcgtgcaggagattttgttggcggtgcatctgaagcggcacacctgggacagcgaagcccccttcgcgccctggctgtttgcgatcggccgcaacaagctgatcgacgcgcttcgccggcgcggcaggcgcgtgttcgtgaacatcgacgacttcgccgagacgctgccgggcgaggcgccgcaggagaccgcttcggccggcgaggtcgccgcccaattgggcaccctgccgcaacgacagcgcgacgtgctgcaatcgatcgcagtcgaggccgcctcgatcaaggacacggcggcaaagctctcgatgagtgagggtgcggtgcgggtcgcgctgcatcgcggacttgcggcgctgacggccaaactgcgggacgcctag

SEQ ID NO: 1361 - DNA, 639 bp, BradyrhizobiumColbertium
atggacaccgatcaactcatccgctcgctcgcggccgacaacgcccatcgcgcgccgcgcgtcggcgccgtgctgacgatggcgctgctggtggccgcgccgctgtcgatcctgatcttcgcaacgttcttcggcgtgcgcgccgacctgatgagcgccatgcgcaatccgttcttcgacatgaagttcgcggtgaccctgtcgctcgcaatccccgcaatcatcatcagcctgcatttgtcgcgtcccgaagccctgctgcgcggctggggctggctgctgctgcttcccgtcgggctccttgccgtagcgatcggcggcgaggcgatgatggcgccggccatgccgatgacgatgcgcctgatgggcaagaactccagggtgtgcctggtcgcgatccccgccatgtcgctgccgctgctggcaggcgcgctgttcggcctgcgccacggcgcgccctcgcgtcctgcgctggccgatgcgctcgccggcctggtgtcggccggcttggctgcgaccctttatgcctcgcactgcaccgacgactcgccgctgttcgtcgcgacctggtacacgttggcgaccgcgatcgtaacggcgatcggggcgctggcgggatccaaagttcttcgctactag

SEQ ID NO: 1362 - DNA, 1104 bp, BradyrhizobiumColbertium
atgaaatccaagatcgcgaaacaatccgaaaacctgctcgaggaattgcagactgcgctcgcgcacggcactgtcgcgcgccgggtcgagacgctccaccgcgtcaccgatctcttcgtgggtaacgcggtggactattccgacgaccacatccgcgtcttcgacgatgtgttccaatgcttgatcgagcagatcgagacctcggcgagggcgcggctcgccgaccggctcgcaccgatcgcggcggccccgccgaatatcatccgcacactcgccctcgacgaggtcatcgaggtctccggaccggtgctgacgaagtcggagcgcctggatgaagcaacgctgatcgagatcgcgcggagcaggggccagccgcatctcaaggcgatctcgctgcggcgggtgctgtcggaagcgctgaccgacgtgctggtgacacgcggcaaccaggacgtggtgcagtcgaccgtcggaaatccgggcgcccggctctccgaaggaagtctcaccgacctcgtcacgcgggccgaacgcgatgacgacctcgccgcctgcatcggcctccggccggacctgccgcgccaccactatctgaggctggtcgccaaagcatcatcgagcgtgcgcaggaagcttgcgtccgcgcatcccgagctcaccaacgaagtatcgcgcgtggtccaggaagcggcgcagagggtccgaatcgccgccatgacgaagcagaccgagatggcgcgcgcgctggtgaaatcgctgcacgaggacggtcgcctcgacgaacttgaggtcaccgccttcgccgagcagggcaagttcgacgaggccaatgcaggattggcggcactcgccggcgtcgcggtcgagaccgccgagactatgatgatcgagagccgcaccgaaggcgtgatgatcctcgccaaggtcgcgggcatgtcctggccgtgcgtgcgcgccatcatcgccatgcgcgagaagctctccggcggcgcgcaggcggacatgctgacactgcgcgacacctacgaggcactgcgctcgtcgaccgcgcaacaagtgctgcgattccatcgcatgcagctgggcacgacgccggcggcgtga

SEQ ID NO: 1363 - DNA, 1158 bp, BradyrhizobiumColbertium
atgagcacggccgcgacgtcctttcccgagaggaatgccgcagaggtcgcggatctcgtcctcgcgcccgagtccgcggcccctgaagtcagggcccgccgggcccggcagcgccgccagatgtatatcgggcaggtcgcgagctattcgctgggcgcctcggtcctgctgctctacgcctatgacggcacgatctccatgggcgtcccgtcgctgttctggctcggcggtctgctgatcattggaacgttcacggtgttatcggaagccggtttcggtgaccgtttcgaggatcattacctcaccgtctaccagatctcggcgcatatggcgctgcaactggtgttcctgctcgcggtgccgaccgtgggggtcgccttcctcgcggtgttgttcctgattttcgcgtttggcacgctgcgcatgacgtcgagccaggcggtgctcacctgggggcttgccacctgcgggcttgccttggttttcttgggatctgacctgccgatcggactgccagtcacgacccggctgcagagagccgcctcgatgctctgcttcgcgctggtgatcggccagtgcgctttcctcggcctgttcggcgccaccctgcgcaagatactgtaccggcgcagcattgaactgaaggccgcctatcagcgcatcgaggaattggccgaactcgatgagcttaccggctgctataaccggcgctgcatcatgcggcttctcgaactcgagatcgagaagtcgcggcaggcatccacgcccttcgcgatcgcgctgatcgatctcgactggttcaagcgcatcaacgacgcccttggccatccggtcggcgacgaggtgctgcgcactttcgcgatcaccatttttgccaacatccgcccgactgacagcttcggccgctacggcggagaggaatttctgctgctgctgccgggtaccgacggtgaggtcgcctcgcgcatgctcgagcggttgcgcggcatcgtcgccgacctcgactggagcgcattttccccgggtatgcacgtcacgatttccgccggcgtcgcgacgctgcgcgacgttgatactgccgacacgtttctcgcgcgcgccgaccgcgcgctctattccgccaaggcgcaaggccgcaaccacattgcaacgagctga

SEQ ID NO: 1364 - DNA, 564 bp, BradyrhizobiumColbertium
gtgacacaggcggcttcggacgagatcctcatcgccaggatcgctcaaggtgaccggctcgccatgcaggtgctgtacgggcggcaccatgtcagggtttacaggttcggactgaggctcgtgcgtgacgagcaggcggcggaagacctcatcagcgaggtgtttctcgacgtctggcgtcaggccggcaagttcgagggccgatccgccgtttcaacctggctgctggcaatcacccgattcaaggccatgtctgcgctccggcgcaggaaggatttcgagttggacgaagaagccgccaacgcgatcgaggatacgtccgacgatccggaaacggtggtgcagaagaaggataccagtgaggcgttgcgggagtgtctgacgggcctctcgccggagcaccgggaaatcgtcgatctcgtctactaccacgagaagtccgtggaagaggtggccgaaatcgtcggaataccggagaacactgtgaagacgcgcttgttctatgcgcgcaagaaactggccgaactgctgaaggcagccggcgttgagcgaggctggccatga

SEQ ID NO: 1365 - DNA, 696 bp, BradyrhizobiumColbertium
atgatggcattgagcaagaagatgctggagcaagagcccagtgagattgaactgatgctgccgtggcacgcggctggcacgctgaatccgcgcgattcccgccgtgtcgaggaagcgctggcgcgcgatcccgaacttgccaaacaatatgccgcgatccgcggcgagtatgaagaaaccatccatctgaacgagagcctgggtgcgccgtcggcgcgcgcaatgcagaagctgttcgccgcgatcgatgccgagccggcacgggcggccggctcgctgccgctctcggcgcgcatcgccgtcttcttcgcgagcctgtcgccgcgcacgctggcctggtcggcgagcctcggcgcagtcgcgctcgtgctgcaggccgggatcatcggcgcggtgctgatgaagaaccagccggcgaccttccagacggcctcgctctcgaccagcgcgccggtcacgcgcgagctcggcagcgcggccgcgccggcgcgcgcgctggtacgcttcacgccggaggcgcgcgtcgccgacatcaccgcactgctcgacagctaccaggcttcgatcatcggcgacgcgaagggcggcatgttccgcctccagttcgacaaggcgatgaaccaggacgagctcgcttcgctgctcggcaggatgcagcgagagaagttcgtcaacctcgccgtcgcggcaccctag

SEQ ID NO: 1366 - DNA, 1683 bp, BradyrhizobiumColbertium
gtggcctacggttcgtcggtcggagccgcgcttctggtcgccgcctgcctcggcttcgacgtggcgcaggcgcaggcgatcatgcgaacgccaacgatcagcgttccctcgcgcacgccgaccatttctccgagcattgccccgcgggtcagcccgaatgtggctgcgcgtgccgtcagcgtcgatcgcggcccgcgaacgatggcgaccattcccaatgccacgacgtcgcgcgtacggccgacgacgccggtgctgccccatgcgcgctactcgccgaacctctatccggcctgtaccgctccccatcgcgcggccgacggcgaatgctctggccagtcgaatgcaggcggcgagggcgcgggcaaatcagccaagaagagcgccggcaaggggcgtggcaacaacacgccggccgtggtcacctctcgcagcattgccggcgaattcgtcgccgagatcgacggtgcgctgtcgacgaccgaggccgacgagctggcgcgtcgccacggcctgacccgcgtcgcttccgaaaatttcccgctgatcggggcgacgttcggcctgttccgtatcactgacggccggccgtacgagacggtgcggcgcgaattcgccgcggacgccagcgtgcgctcgctccagccgaacttccgatatgcgctccaggaccagaaatcgtcgcggacgaccgagggagatcctgcgcaatatgcgctgacaaagcttcggctgccgcaggcgcatacgctggcgcaaggcgccaatgtcacaattgccgtgatcgattccgggatcgacaccaggcatcccgaactcgccaattccatcgccgacaatttcgacgcgctcggcagtgccgaggggccgcacgtccacggcaccggcatcgccggggcgatcgcggcgcacgcccgtctgatgggcagcgcgcccgaggcgcgcatcatcgccatccgggccttcggcggcgccaacggcggcaccgagagttcgtcctacatcatcctgcgctcgctgaactacgccgccgagcacggtgcgcagatcgtcaatatgagcttcgccggtccgaaggacgctgtgatcgagcgcgcaatcgccgcgacggccgcgcgaggtctcgtgctggtcgcggccgccggcaatgccggtgcgaaatctccgccgctgtatccggccgcgaatcccaatgtgatcgcggtcagcgcgacggatcagcaggacaagctgttctccgcctccaatcgcggtaactacatcgcggtcgcagcccctggcgtcgacatcttcctgccggcaccggacggcaaataccagatgacgtcggggacctcattctcagccgcctatgtctccggcgtcgccgcgctgctgctcgagcgcaaccatgccttgaagccggaagcgctgcgcatgacgctggcgaagaccgcgcgtgacctcggctcacccgggcgcgacgagcttttcggcgacggtcagaccgacgcatttgccgcggtcatggccgttcccgccaacagcgcgacgccggtcgcggccgcgtccggtacaacaaaacgtgaagacgccgacaagcgtcgcgatgcgcccggcagccgtgcgatcgagcagccctcgctgtcgagctcggacgataaatccgcgatttctcagatggatagaccggccactcgatag

SEQ ID NO: 1367 - DNA, 756 bp, BradyrhizobiumColbertium
atgacacatcgccaagagtttattcgcgacgcggtcgcaggccgcgacatcgcggcgcgctggtgcgctcttgccgagcagcgcctgcaacatctctccgagatgttcgagaccgggcgctggcgccgttatcattctgagatcgcgtttctcgaaaacatccaggaagccaagcgtgccgtccagacttggcgcgcgcttgcgactggcggggatgtcgccgaggcggctgcgagcgtaacgcctgcattcggctggtcgcccgcgacgatgccgcgcgtgtttcctcgggcgcaacaggggcagatcatgcagcccaaggccgtccacattgctctcgaaaccgccgtgccggtcaggctcgatccgaagccggacattctggccgagatggccgaagctccgatcgcgccgcgtgtcgcatctgcgcctgccgcagcggcctcgttcaccgcgccccccgagatgccaccgctcaaggctcccgctgcgaagcctgcgctcaccgcacctgccatacggtcgccgctcgcgcctgccgccatggcgccgttcaccgcgccggaagtgaggccgccggcagcagcgcccgccgcgcagctgccgaaggccgcccctgcggctatggcagcgctgctgccgcaattcgccccgccggccgaggagatcgtcgcggcccccgagcgcgtggtcgaattcaccttcagcctcgacggcctggaagcgaagtacccgctgctcaggaacgcgttctag

SEQ ID NO: 1368 - DNA, 1371 bp, BradyrhizobiumColbertium
atggacctcaatcgccgtcatctcatcggagcctcgactgtcggcgtcgccggcgctctgaccatgcctgccgacgctgcgcgcgccgcgccgctgacgtcgctgctcggccgcgacgccacgcaatacggcgtgcggcccggcagcaacgaggaccagacgcgcgcgttgcagcgcgccattgacgaggccgcgcggacgcaaatgccgctcgccttgcctccgggcatctaccgcagcggatctctgcgcctgccgaacggcgcacaactgatcggcgtgcgcggcgcgaccaggctggtcttcaccggcggggcctcgatgatccagagcgacggctccgatgcgatcggcctcaccggtatcaccttcgacggcggcaacatcccgctggcgacgcggcgcgggttgatccatgtactcggcgggcgcgacgttcgcatcgccgattgcgagatcaccggttcgggcggcaacggcatctggctcgagcaggtcgcgggcgacatctccggtaacatcttcaccagtatcgcggtgacggcggtggtctcattcgacgccaggggcctcagcgtttcccgcaacactattctcggcacaaacgacaacggcatcgagatcctgcgcacggcgatcggcgatgacggcacgctggttgccgataaccgcatcgagaacatcaaggccggtccgggcggctccggccagtacggcaatgccatcaacgccttccgcgccggcaacgtgatcgtgcgtggcaaccgcatcaggaactgcgattactcggctgtgcgcggcaattcggcctcgaacattcacatcacaggcaacagtgtcagcgacgtgcgcgaggtggccctctactccgagttcgcgttcgaagccgcggtgatcgccaacaacattgtagacggcgcagccgtcggcgtatccgtctgcaatttcaacgaaggcggccgcatcgcggtggtccagggcaacatcatccgcaacctgatcccgaagcggccgatcggcactgcgccggacgacgacgccggtgtcggcatctacatcgaagcggattcatctgtgaccggcaatgtgatcgagaatgcgccgtcctacggcatcgtcgccggctggggaaagtatctgcgcgacgttgcgatcacgggcaacgtgatccgcaaggcgctggcgggtgtcggcgtctccatcgtgccgggcgccggcaccgcgctcgtgaacaacaacatgatctcggagaccccgcggggcgccgtcgtcggtctcgatcacgcgcgtgccgtgacaccggatctgtcggccgacggcgcacagcgattcgcccaggtggtgctcggcggcaatgcggtgcgaaggtag

SEQ ID NO: 1369 - DNA, 651 bp, BradyrhizobiumColbertium
atgaccggcctgcgcattctcctcaccggcttcggccccttccccggcgcgccctataatccgaccgagccgctcgtggcgcggctgacccggctgcgccggccggcgctcgacgatgtcgcgatctcgagccacatcttcccggtgacttacgccgcagtcgaccggcaattgcctgaggtgctcgcggaggtgaagccggatgcgctgctgatgttcggcctcgccgcacggacgccttacctgcgcatcgagactcgtgcgcgcaacgccgttaccatgctctggcccgacgccgccaacacccgctcgagcaagcgcgggatcgccggccacgccgacgcgatgacgttcgggccgcatacggcgaggctgctgcgcgcggcgtgcctcaccggcatcgacgcgcgcgcctcgcgcgatgccggcgcctatctctgcaattacctgagctggcgcgcaatcgaacgcgtcagggctggcgggccacagcttgcggcgttcatccatattcccctgcttgcgcgcggcggcgcggtacggcgcaaaggagcgccacgcatcacgctggaggaactggtggacgcaggggaagccatgctgatggagacggttcggctggcaaggaagacacgcagcccgcttgcgtaa

SEQ ID NO: 1370 - DNA, 990 bp, BradyrhizobiumColbertium
atgatcgagaagaaggcttcgctggacatcaagacccttgcccgcgacttgcgcgccggcagccgtgctgcccttgcccgcgccatcacgcttgttgagagccggcgcggcgatcatcaggcactcgcacgtgagctggtgcagatgctgttgcccgacaccggcaaggcattccgcgtcggtatcaccggctcgcccggcgtcggcaaatccaccacgatcgatgcactcgggatgtatctgatcgcacagggccacaaggtcgcggtgctcgcggtcgatccgtcctcggcgcgcagcggcggctcgatcctcggcgacaaaacgcggatggcacggctgtcggcgtccgcggatgccttcattcgcccctcgccgtcgtctggcacgctcggcggtgtcgccgccaagacgcgcgaggccatgctgctctgcgaggccgccggctttgacgtcgtgctggtcgaaaccgtcggcatcggccagtccgagacggcggtctgcgacatgacggactttttcctcgcactcatgctgccgggtggcggcgacgaacttcagggtatcaagaagggcctcgtcgaactcgccgacatgatcgcgatcaacaaggccgacggcgacaacctcaagcgcgccaagatcaccgcggccgactatcgcagcgcgctgcatattctcgccccgaggtccgagcattggcatcccccggtcgagacctattcggcactcaccggcgatggcatcgcaacgatatggcaaaaggtcctcgatcaccggaaagcgatgaacgcgtccggtgatttcgccgcgcggcggcgcgatcagcaggtgaagtggatgtggtcaatgctggagcagcgcatgctggcgcggctgcgcagcgaggcatcggtgcgaacgaaagtccggaagatcgaagccgaggttgccgacggccacctcacccccgccctcgcagccgagcggattctggagttgctgcaatga

SEQ ID NO: 1371 - DNA, 1512 bp, BradyrhizobiumColbertium
atgttgaagaccctgattgatgcgttcgcgctgatctccacctgggaggtcatcatctccatattcgcggcctcggtgtacgggctggtgatcggctcgctgccgggcctgtcggcgacgatggcgaccgccctgctcgtccccgtcaccttctacctgtccccgattgcggcgatcgcaaccatcgtggcagcctcgtcgatggcgatcttctccggcgacattcccggcgcgctgctccgcatccccggcacgcccgcttctgccgcctatgcagacgaggcctatgccatgacgcgcaagggccaggccgagctcgcgctaggcgccggtgtctggttctccgcggtcggcggcatcgccggcgtgctgtcgctgatgatcctggcgccgccgctcgccgagatcgcgctgtcgttctcgaccttcgaatatttctggctggcgctgctcggcctgatgtgcgccaccctggtggcgcgctcctcgccggtgaaggcgattgccggcatgttcatcggcttgctcgtggcctgcatcggcatcgagaatcccggcggcattccgcgcttcaccttcggcctgaccgatctgttcggcggcatcgagccgatcccggcgctggtcggggtgtttgcagtcgcgcaggtgatgcgcgcaatgctggcgcccgagccgccaccgctgccgcgacgaaaattcggaagcatcctggccggccaatggaggctcacgaagctgtatcactggcagatgacgcgcgggaacatcgtcggcatcatcatcggcgtgctgccgggcgccggcgccgacatggccgcctgggtctcctacgcgatgtcgaagcggttctcaaaggagccggagaagttcggcaccggccatgtcgagggcctggtcgaggccggcgccagcaacaacgccagcatcgcctcgggctgggtgccttcgctgctgttcggcatccccggggacaccatcgcggcgatcgcgatcggcgtgctctacatgaagggtctcaatccgggcccgacgctgttcaccgagaaagcgtcgagcatgtacgcgatctatctgatgttcatcatcgccaacatcatgatgatcccgctcggcatcgccatgatccgcgtcgcagcctacatcctgctggcgccgcgcgcggccatcatgccggtcatcatgctgtgctgcgcggtcggctcgttcgcgatcggcaacaacatgttcggcgtcgtcaccgtcgccgccttcggcgtgatcggctacgtcatggagacgaacggctatcccgtcgcggccatggtgctcggcatcgtcatgggaacgatggtcgagcagtctttcgtgacctcgctgatcaagtccgatggcagcatcctgccgttcttcgagcgcccggtcgccgcgatcctcgccgccatggcgatcggcgcgctgctctggccggtgatggtgtgggtatggcgcaaggtgaagcggccacaggccgcggcggcaacatcccggtga

SEQ ID NO: 1372 - DNA, 492 bp, BradyrhizobiumColbertium
atgcgtcttcccgactccgtcacgggatcgtttctcgtcgtgctcggcgtggccgccgcctatggcggctacatcttgccgccggtgccgggccagccggtcggcccgaacgtatttccactggtgatcggctgcggtcttgcactgtgtgggctcgcgatcgcgttcggcattggccattccttcgaagaggaggaagagttggtcccgttcgaggacggccaggcggccgcaccgccgccgcaaggcaagctctacggcctgcgcgcgttgttgccgccagcgttgctgctgttctacgtctttgccgcggaccggctcggtttcatcatcaccgcggcaatcattgtctacatcacgtcgaccgcgctcggggcgaaatggaagctggcgctgccgctcgcggcgctctcgcccttcgccatccacctcatcttcggcaagctgctgcgcgtgccgctgccggccggcctgctgccgacgccctggtga

SEQ ID NO: 1373 - DNA, 993 bp, BradyrhizobiumColbertium
atgtccaagatttcgcgccgcacctttgcggcttcctcggccgccgtcgcggcatccgccgctttcggcttcaagcctgcgctcgcacaggcctatccggcccggccggtcacggtgatcgtgccctggggcgccggcggaggcaccgacgccaccgcgcgcattgtcgcagcgctgctcgaaaaggatctcggtcagcccttcaatgtggtcaaccgcaccggcggttccggcgtggtcggccatagcgcgatcgcgaccgcccagcccgacggctacaccatcggcatgctcaccgtcgaaatctcgatgatgcactggcagggcctcacggacttgacgcccaagagctacaccccgctggccctcatgaacgaggacccgccgggcatccaggtctcctcctcctcgccgtacaagacggtcaaggaacttgccgacgccatcaaggcggcgcctcccggcaagttcaaggcgtcgggcaccggccagggcggcatctggcatctggccctggtcggctggatgcaggcgatgggtctgcccgccaatcaagtggcttgggtgccctcgaacggcgcggcacccgcgatgcaggacctcgccgccggcggcctcgacctcaccacatgttcggtgcccgaggcgcgcgccatcatcgaggccggcaaagccaggagcctcgccatcatggcaccggcccgcaacccgatcttcaaggacgtgccgacactgaaggaggcgatgggcatcgactacgcgacgggcgcctggcgcggcattgccgggccaaagaacctgccgccggagattgcaaccaagctcacagcggcgctgaagaaggtctacgattccgccgagtacaaagacttcatgagcaatcgcggctttggcaccgtatggggcgatgccgctcatttcgccggcttcatggacaagggcgatgcccagatgggcgaggcgatgaaggcggcgggcctgagcaaggcgtga

SEQ ID NO: 1374 - DNA, 480 bp, BradyrhizobiumColbertium
atgacccaagcctatttcagcgccgtgctggaccacccgctggaccaagtctggtcgctgatccgcgacttcaacaattatcccgcctatatcgacggcgtgagcgagagcgtcatcgaggacgacaagcgcggcgacgaagtgggtgcgatcaggcgcttctgttatctcggaagctggattcgccagcgccttgtcgatcactcggaccggcagcatagcttgacctatgccggtctcgaagcgctgccatatccggaaaacgacggcggccggagtccggcgccggtgcgttaccaaggcaccatgcgcctgcgcccgatcattgccggcgatcgcaccttgatcgaatggtcggtcgccctcgataccgaacccgcggatgccgatcgctggcaggcgttgtttgcctcctggattcccgattggacggactcgctggcgcggagactggctcggacgcgcccgcgatccagctag

SEQ ID NO: 1375 - DNA, 789 bp, BradyrhizobiumColbertium
atgtttcccgcgccaacgttcatgcgcgccgtcgctgcagccgccgtttgctgcgcgctctccggctccgcccacgccgccgatcccaaacccgccgacgtcgtcaagaccaggagcatcgaggcgcgggttttcctcgacgacaggatcaaggcggatgcggcgctcgcagcgaattgcctcgccgaaggcaggaaatggctcgacaagagtgcggccgaggcagcagcctcgcgcaaggaggatccgcagttcttcaaggacggtggctgggacttcgagcgcaaatatgaaatccgctccgtcgttgccgaccgctacatcagcgtcctccgcaacgaccacatgaacacgcgcggcgcgcatcccaattccgacgtgaacaccattctgtgggacaaggccgacaacaagcgcatctccatccgcccgttctttgccgagacagcggacaacggagccaccatgaaggcgatggtgaaggccgtaattgcctcgctcaaggccgaaaaggaaaagcggggcaccagcgagaccgcgactgacgagtggttcaaggaggtcgcgccgagcctgctcaagatcggcgcggtgacgctggcgccttcgaccgaagctggcaaaagctccggcctgaccttccactacccaccctatgctgtcggatcctacgccgaaggcgaatatgtcgcgttcgtgccgtgggagacgctgaagccttatctcaccgcggaaggcacccgcatcttcggcggcaggcgcccgaagggtgacgcggacgggcgatga

SEQ ID NO: 1376 - DNA, 2169 bp, BradyrhizobiumColbertium
atggttgaagccatgagccgcattcccaatttcgccgatgtcgctttcgagcgagctgccacggccgtccccatcggaaacgccgagccctggctgacgccggagggcattctggtgaagcctgcctatggcgaggccgatctcgccggactcgattttctcgaaacgtatcccggcatcgcgccctatctgcgcggcccctacccgaccatgtatgtcaaccagccctggacgatcaggcaatatgccggcttccccacggccgaggattccaacgctttctaccgccgcaatctcgcggcgggccagaaaggcctttcggtcgccttcgatctcgccacccatcgcggctatgacagcgaccatccgcgtgtcggcggtgacgtcggcatggccggcgtcgccatcgattccatctacgacatgcgcacgctgttcgctgggatcccgctcgaccagatgagcgtgtccatgaccatgaacggcgcggtgctgccgatcctcgcgctctacgtcgccgccgccgaggaacagggcgtgccgccggaaaagctctcaggcaccattcagaacgacattctgaaagagttcatggtgcgaaacacctacatctatccgcctgcgccctcgatgcggatcatctcggacatcttcgcctacacctcgcagaagatgccgaagtacaattcgatctcgatctccggctatcatatgcaggaggccggcgcgacgcaggacctggagcttgcctacacgctcgccgacggcgtcgaatatttgcgagccggccttgccgccggcttggacgtggatcgcttcgcgccgcggctgtcgttcttctgggcgatcggcatgaacttcttcatggaggtcgccaagctgcgcgccgcgcgcctgctctgggcgaagctgctcaagccgtttaatccgaaggacccgcgctcgctctcgctgcgcacgcattcgcagacctcgggctggtcgctgaccgcgcaggacgtcttcaacaacgtcatgcgcacgacagttgaggccatggcggcgacgcagggccacacccagtcgctgcacaccaacgcactcgacgaggcactggcgctgccgaccgacttctccgcgcgcatcgcccgcaacacccagctcttcctgcagcaggagagcggcaccacccgcgtcatcgatccctggggcggctcctattatgtcgagcggctgacgcgcgacctcgccgccaaggcctggggccacatccaggaggtcgaggaactcggcggcatggcgaaggccatcgaggccggcgtgccgaagctgcgcatcgaggaggcctcggcaaagacccaggcgcgcatcgacgccggcaggcaggcggtgatcggcgtcaacaaatacaagccgaccgacgaggtcccgatcgagatcctgaaggtcgacaacaccaatgtccgccggcttcagatcgacaagctcaagcggctcaagtccgagcgcaaccagaaggacgtcgacgccgcgctcgccgcgctgacgcgctcggccggcgaaggcaacggcaacctgctcgcgcttgcgatcgacgcagcacgcgcgaaggcgaccgtcggcgaaatctctgacgcattggagaaagtgttcggccgccaccgcgccgaaatcaaatccatcacaggcgtctacaagcgggaggcgtccagcatgggcaaccaggtcgagaaggttcaggcgctgatcgatgccttcgaggaggccgagggtcgtcgcccgcgcatcctggtcgccaagatcggccaggacggccacgaccgcggacagaaggtgattgcgtcggctttcgccgatatcggcttcgacgtcgacatcgggccgctgtttgccaccgccgatgaagccgcgcggcaggcggtcgagaacgatgtccacattctcggcgtctcctccctcgccgccgcccatctcaccgccgtgccggaattgaaggccgcgctgaagaagcagggccgcgacgacatcatgatcatcgtcggcggcgtggtgccgccgcaggattacgacgcgctttatgccgcaggagccgaggccatcttcccaccagggaccgtcatcgctgacgcggcggaggagttgatccgcaagctgaatgcccggctcggccatagcgaggcggcggagtag

SEQ ID NO: 1377 - DNA, 465 bp, BradyrhizobiumColbertium
atgaccgaaaccagcaaacccgttctcaccggcggctgccaatgcggcgccgtgcgctttgcagtcatgacggcgccgaccaggatttcaatctgtcactgccggatgtgccagaaggcggccggtgcgccattcgcctcctttgccgacatcaacaagaacgattttgcctggaccagaggacagccctcgttcttccgctcctccacgatcgccgaacgcggcttctgccctgcctgcggcacgccactgagcttcggccgcatcgacggcgaccgcatcgagatcatgaccggcgccttcgaccggcctgaccgcgtggtgccgacgcggcagttcggcaccgaatcccgcctcggctgggtggtcggcatcgccaatctgccgagccagaccacacagcagaattacggaccggagaagatggcgaccatcgtcagccatcagcatccggaccatgattga

SEQ ID NO: 1378 - DNA, 1872 bp, BradyrhizobiumColbertium
atgacctccgtgactgacgacctgccgctggcggcggattttcccaaggccaccgttgaggactggcgcaagctcgttgacggcgtgctgaagggcgcgccattcgagaagctggtcggcaagacctatgacggcatcaagatcgatccgctctatccgcgcgccaagggcgtcgctcccgtcgtggggcgaccggccgccgctgcctggcaaatcatccagcggatcgaccatcccgatgcggcgctcgcgaatgcgcaagcgttgcaggatctggagaacggcgcgaccgggctcgcgctggtgttcgccggcgccaatgctgcgcgcggtttcggcctggaaccctcggccgaggcgatcgcaaaggttctgaaggacgttcatctcgatgccggcattggcctcgagctcgagatcggaccgcaatcgcggatggccgcgatccatgtcgcggaatatgtgaagagcaaggggctcgatcccgcggcctgcaacatccgcttcggcttcgacccgttcgcggccgcggcggtgtggggccacagcccctacacgtgggatgagatcgcccccgccgtcaccgatgcgatcaagggccttgccgcgctcggctttgacggaccgttcgcgtccgccgacgggcgcgtgatccatgatgccgggggctccgaggtgcaggaactcgccttcgtgctcgcctgcggggttgcttatctgcgtgcgatcgaaggcgccggcattccgctcgagcaggcgcagggcatggtttatgcgcggctcgccgccgatgccgaccaattcctcacgatggctaaactccgcgcgcttcggctgctgtgggcgcgcatcgagcaagcctgcgggctcacgcccaagccgctgttcattgccgccgatacggcctggcgcatgctgacgcagcgcgacccttacgtgaacatgctgcgcgcgaccatcgcgacattcgccgccgggctcgccggcgccaatgcgatcaccgtgctgccgcacactctggcgctcggcctgcctgatccgttcgcgcggcgcgtggcgcgcaatacgcaacttctgctgctggaagaaagcaaccttgccaaggtcagtgacccggcggcaggcgcaggcggcatcgagacgctgacggcgcagctgtgcgacgccgcctggacactgttccaggagagcgagacggccggcggcgccttcgcggcgcttcagcagggcgtgttccagagcaaggtggcggccgcgcgaaaggcccgggacgccaacatcgcaaaacgccgcgacgtgctgaccggcgccagcgagtttccaaatctgcaagagagtgaagccaccatcctggaagcgacaccggtcacgctcgccccctacggcgagcagaagtacaagttcgatgcgctgccgccgatccggctcgcggaaccgttcgaggcgctgcgcgacaaatccgacgcggcgttgaaggcgcggggcgcgcggccaaaggtgttcctggccaatctcggcacgccggccgacttcacggcgcgcgcgaccttcgccaagagcctcttcgaagccggcggcattcaggcggtggacagcgagggttttgccgatccggccaaactggcagccgctttcaaggcctcgggcgcgcagcttgcctgcctctgttccagcgacaaggtctacgccgatcaggcggaacctgccgcctgcgccctgcaaaccgcaggcagcagacatatctacctggcgggccgcccgacagatgccgaggcggcgctgcgggccgccggcgtcacgggttatgtcttcgccggaggcgatgcgcttgccacgctgcaggacgcctaccaacggatggagcaggcatga

SEQ ID NO: 1379 - DNA, 492 bp, BradyrhizobiumColbertium
atggcaagcgtgctgatcgcgctgggcggtaatgtcggcgatgtccgcgcgacgttccagaaggcgatcgcccacatctgcggcatggcgcaagtcgctctgatcgcgcgctcctcggactatgccaccccgccctggggcgacgccgagcaggagtccttcatcaatgcctgcatcgagatcgagaccggtctcgatccacacgcgctactgttcgtgcttcagaaagtcgagcagaagttcggccgcacgcgggacaaggagcggcgctgggggccgcgtacgctcgatctcgacatgatcgcctatgacgatgtcagcttgcagaagcccgacctgacgctgccgcatccgcgcctgttcgagcgcgccttcgtgctcgtgccgctggccgaaatcgcggcggaccgcgtcatctcgggcattcgtgtgcgtgacggcctcgccagcgtctcggcgcaaggcattgagcagcttccggataccggttaa

SEQ ID NO: 1380 - DNA, 369 bp, BradyrhizobiumColbertium
atgaccgatacgatcttcgtcaaaggcctgtcgatccatgcccgccatggcgtgatggatcatgagacggaagtcgggcagcgtttcgtcatcgatctcgaactccataccgacctgtcggagccgtcgcgcagcgaccggctcgcggacacggtgtcctacgccgacgtcgtggcgacgaccactgcggcgttcaagaacaccaattacaagctcctggagcgcgcggcgggcgcggtggccgatgccatcctgtcaaatttcccgcgcatccgcgccgtgaagatcacggtgcacaagccgcatgcgccgatcgccgcgattttcgacgatgtcggcgtcatgctgacacgcgcgcggcatccctga

SEQ ID NO: 1381 - DNA, 807 bp, BradyrhizobiumColbertium
gtgctgcggacgctgctcgaacgaccgcttcctgcggtgatgggcgtgctcaacatcacccccgactccttctccgacggcggcaagttcatcgcgcccgagcaggctctcgcacgggcccgggccatgatcgatgccggcgccgacatcatcgatgtcggcgcggagtccacccgaccgtacaagggcgcccggccggtcaccgcagaagacgaactggcgcgattgaagccggtgctatccggcgtggcggcactcggtgtgcccgtctcgatcgacagcatgaaggccgaggtggtggcgtttgcgctcgaccagggcgcggccatcgccaacgacgtctggggcctgcaacgcgacgccgagatggcgccgctgatcgccgcaaggggcgtccccgtcatcgtcatgcacaaccgcgacagcgtcgatcccgccatcgacatcgtcgcggacatgaagacattcttcgatcgctcgctcgctatcgccgcacaggccggcatcgcgcgtgacaagatcgtgctcgatcccggcatcggcttcggcaagaccgccgagcagagcatgaccgcgctggcgcgcttgcgcgaactcgacactttcggcctgcccatcctggtcggcgcctcgcgcaagcgcttcatcgcctcggtgtcgccgtcggaaccgccggagcggctcgccggttcgatcgcggcacatctgatcgccgcgcagcgcggcgccaagatcatccggacccatgacgtcggcgaaaccctgcaggcgctgcgggtggcgcatgccatcgagagcaagccatga

SEQ ID NO: 1382 - DNA, 147 bp, BradyrhizobiumColbertium
atgcggcccgctttgcgcggtcgggcagggggagtcaagacgggagtggaggccgttcggccgtggccggacgttcccgcgggatgcggagaaggaacgcacggccgttggacaagatgggatcggaacaaccccgctaacgcatga

SEQ ID NO: 1383 - DNA, 408 bp, BradyrhizobiumColbertium
atgacatatccgatctcagagattgagggcctgccggcctttgccgccaccaagctgaaggcgcaaggaatccgcaccaccgatgcgctgctcgaggcggcctccaccgtgaagggccgcaaggcgctttccgccaagaccggcatcagcgagcagcaattgctggaatgggccaacgtctccgactacatgcgcatccccggcatgggcaaggccaaggtcggcctggtccgcgccgcaggcgtcaccaccgtgcgcgaactcgcctatcgaaatccagcgaggttggcgcagagcatgcgcgaggccaacgagaaaaagaagctcgtccgtgtcctcccctccgagaagtcggtcggcgacatcatcgcgaaggccaagaagctgccgccgaagatcacgtactag

SEQ ID NO: 1384 - DNA, 366 bp, BradyrhizobiumColbertium
atggacgaactgatcggacggctggcgacaaacgccagcatagatggtgctgtggccgaaaagaccgtcggcattatcctgggcttcctccgcagcgagggcccttccgacagcgtgcaggccctgatcgaccagatccccggagcggaagctgcgatcgaggcgtccaggagcggcggcggcctgtcgcggctgatgggcggcggcttgatggcggtcggcacgcgcctgatgggcctgggccttggcatgtccgacattcagaaagtcgcccgtgaacttttccgctacggccgagacaaaatcggagcggatcagatgggcaagatcatcgcggggacgccgggcctcagccagttcgcctga

SEQ ID NO: 1385 - DNA, 1623 bp, BradyrhizobiumColbertium
atgaccgcacaggacagcaagctcggcgataccgacgacaagatcttcgtcggcaagggagacgagcaggcttggctgacgctggcgctcgccaatcgccacggcctcgtcacgggtgcaaccggaaccggcaagaccgtgtcgctgcaagtgatggcggaaggatttgcgcgcgccggtgttccggtcttcgctgcggatatcaagggcgacctctccggcatctgtcagatcggcgaagcaaaggacttcatcctcaagcgcgccaccgaaatgggactgaggtttcagccggatcaattctcgaccgtgttctgggacgtgttcggagagcagggccaccccgtgcgcgcgaccgtcacggaaatggggccgctcctgctcgcgcgcatgctcgacctcaatgatgtgcaggaaggcgttctcaacgtcgccttccgcgtcgccgacgacaacggcctcaccttgatcgacatgaaggatctgcgtgcgctgctcgatgccatcgtgccgggcagcggaaagaagggtgcggacgctgaggaggatccgctcgaaccgatccgcaaggccgctcaggggttcggcaacgtcaccaaggcgaccgtcggtaccatccagcgccagctcctcgtgctggagaaccagggtggcaccaagttcttcggcgagccggcgttgatgctgaaggacttcatgaggaccgaccgcgacggccgcggcatggtcaacatcctggtcgcagacaagctgctccagaaccccaggctttacgcgacattcctgctctggatgttgtcggagctcttcgaggagctgcccgaagccggcgatctggccaagccgaagctggtgttcttcttcgacgaggcgcacctgttgttcaacgatgcgcccaaggcgctcttggacaagatcgagcaggtggtccgcctgatccgctccaagggcgtcggagtctacttcgtgacgcaaaacccgatcgatgtgcccgaccgcgtgctcggacaattgggcaaccgggtgcagcacgcgttgcgcgccttcaccccgcgcgaccagaaggccgtcgccgctgcggcgcagaccttccggcccaatccgaagctcgacactgccaaggtgatcacggagcttggcaagggcgaggcgctggtgtccttcctcgagggcaacggcacgccgtcgatggtcgagcgggtgatgatccggccgccgtcggcccgcatcggaacgatcacgccggacgagcgtcaggcgatcatggctgcaagtccggtgaagggcagatatgacagcgccgtcgattccgagtccgcctacgagatgctccagcagcgcatcgccgccacggcggccacggcgaatggtccggcaggcgggggcggcggtatcctgggtcagatcggctcgatcgtcggcaccatcttcggcaccaacgtcaagcgcggccgtctttcgaccggccaggtcattgcgcgggacgtgacgcgatcggtcaccaaccaggtgatcggcgggatggctgccaacatcggcaagtcggtcggcggccagctcggcggctcgatcggccgcacgctggtccgcggtgcgcttggcggattgctgcggcgaagctga

SEQ ID NO: 1386 - DNA, 1395 bp, BradyrhizobiumColbertium
atgtccaacacgcagctccaatccgtgctcgaccacatcgacaaggatttcgacaacagtctggagcgcctgttcgccttgttgcggatcaagtcgatctcggccgacccggccttcgcggacgattgcaaggctgcggccgagcatctcgccaaggacattgccagcctcggtgtagccgccgaggtacggccgaccgcgggccatcccgccgtagtcggcaagaccggagcgggcgggcggccgcacgtgctgttttacggccattacgacgttcagccggttgatccgctcgatctgtggcaccgtccgccgttcgagcccgccgtcgcggatcatgccgatggccgcaagatcatcgtcgcgcgcggcgctgaggacgacaaggggcaggtgatgacgttcgtcgaggcttgccgcgcctggaagaaggtcacgggctcgctgccgatcgacgtcactttcctgatcgagggcgaggaggaggtcggctcgaagaacttcgtgcctttcatcgaagccaacaaggacgaattcaaagcagactacgtgctggtctgcgacaccggcatgtgggatcccagcacgccggcgatcacgacttcgctgcgtggcctgctttacgaggagctgaagattaccgctgccaatcgcgacttgcattccggcgtgttcggcggcaccgcgatgaacccgatccgggtgcttacgaagattctcggcggcctgttcgacgatgacaaccgtatcaccattccaggcttctatgatggagtgaaggacacgcccgctgacatcctggcacagtggaagaagctcgaattcacgcccgacacgttcctcaagcccgtcggcttgtcgcttcccgccggcgagaagggccggctcctgatcgagcaggcgtccacgcgtccgacctgcgacgtcaacgggatttggggcggctatatcggcgagggctccaagacggtgatcccctcgcatgcctcggcgaaggtctcgttccgcctcgtgcagggccaggacccgcagaagatccgcaaggccttccgcgattatgtgacttcgcggattcccggcgactgcaaggtcgagttcggcgaccattccgccgcgcccgctgtcgccctcgactggagcatgaagccgctcgccgccgccagcaaggcactgacggaggaatggggcaaggagacggtgctgatgggctcaggtgcgtcgatcccgatcgtcgccgacttcaagcgcacgttgggcctcgactcgctgctggtgggttttggtctcgacgatgacaatatccattcaccgaacgagaaatacgacctgcggagcttccagaagggcatccgctcctgggcccgcattctcgcggcgctcgcggaggtgaagtaa

SEQ ID NO: 1387 - DNA, 780 bp, BradyrhizobiumColbertium
atgtcgccagcagaagcccgtctgagggaagtgccgtccaacatgacggaggcggagtggcagcaacgggtcaacctcgccgcctgctatcgcctcgtcgcgctgtacggctgggacgatctggtcgacacccacatctccgcgcgcgtgcccggccccgagcatcacttcctgatcaatccctacgggctgatgttcgaggagatcactgcttccagcctcgtcaaggtcgacctgcacggcaaccagctctccgagagcgaatacagcatcaacccggccggcttcaccatccattcggcgattcacgaggtgcgtgaggacgccatctgcgtgctgcatctccacaccctcgacggcaccgcggtgtcgagcagcgcggagggcctgttgccgctgaaccagaccgcgcaactggtcacccacgacctcgcctatcacgactatgaaggcatcgcgctcgatcacgacgagcggccgcggctccagaaggatctcggcgaccacaaccacatgctcctgcgcaaccacggcaccctcacggtcggccgctcggtcgcctccgctttcgaacgcatgtatcatctcgagcgcgcctgctcgatgcaggtgcgcacccgcgcgctgggcacgccggtctacccggtcgatggcaccgcgatcgacaagaacaccgaattgctgtcgaaccgcgaccgcgccgagctgcgcgcgaccaacctggtatggccgcccttgctgcgcaagctcgaccgcgtcaaccccggctacaggtcttga

SEQ ID NO: 1388 - DNA, 1650 bp, BradyrhizobiumColbertium
atgacatcgatcacgacctcggcgatcgagacgcccctgcggcgctcggtcgaacggacttgcgacgatctcgccatgctggtgctggctgcggttgccgtcattgcaggcctgaccttccgagactacgggctcggctgggacgattacacccacgctgaatatgcggacttgctgctgcgcatgttcggttccggcttcaaggataccgcggcgctctccttcgccaatctctacatgtatggcggcggcttcgacatggtcgcggccctgctccacaaggtcatcccactcgagttgttcgagacgcgacgcctggtcggcgccatcgtcggcgtgatcgggcttgccgtgacgtggcggctcggccgccggatcgggggtccccttgccggtctggcctctctcctgctgctcgcgctctgcccgatcttctatggccacatgttcatgaacccgaaggatgcgcccttcgcggtgtccatgatcatcctgatgctggggctcgtccgcctcgccgaggagtatccgcagccatcgccgcgcacgatcctgatcgtcggcttgggcgcaggcctgtcgctcggttgccgcgttctcggcgggctcgcgcttgtctacgccatcattggcttcataccgctgttccttgaggaattgcgcaacgagggctttcgcgagtctgtccgccgcttcgcccatgtcatctacgtgctgctgcccggcctcgtgctcggctacctcgtaatggggctgatctggccgtggtcgatcatggagcccgccaatcctttcgaggcgctgacctacttctcgcactttttcgagaaaccctggaaggagatgttcgacggcgcgatcgtgtccgtgcccgacatgccctggtcctatctgcccacgctgttcgcactccagttgcccgaggtgatgctggtgctgatggcgggcgccgtagtcggcaccttcgccatgctcctgcaccgcaaggtccccgcgcggcgcaagaccatcctcctgatgctgacgctcgccgcgaccctgccgctcgtgatcgccatggtgaagcggccggcgctctacaacggcattcgccatttcgtcttcgtgatcccgccgatggctgtgctcgggggtgtcgccttcgcctggacgatggagcgcctgcgcgccaatcaccgcacatggcagccggtcgtactcgcgaccttctgcttcggcctggcgctcccgctcgccgagatgatccggctgcacccttatcagtacacccacttcaatcacatcgcaggcaccgtccgcggcgcggacaaccgtttcatgctggactattggggcctcgcgctgaagcaggcctccgacgaactgcgcgaacagctcgtcgagcgccaggaagtgccgcccagcagtcgcaaatggaaagtcgcggtctgcggtccgcagcgcccggcccaggtcgcgctcggccccgacttcaccatcggctgggactccaacgcggccgatttcgccatgacgctcggcgagttctactgcaagggcctcacggcgcccgtcatggtcgagatcaagcgcgacgacgtggtgttcgcccgcgtctatgacatccgcggccgcagcatttccagcctcctgtcgatcccggcgccgtag

SEQ ID NO: 1389 - DNA, 840 bp, BradyrhizobiumColbertium
ttggcattgttgatcgtggggatttgcgccgtcctggcgggtctccttgcgatcatttccggcctgaccatcagggaattcagcctcggcgggaccctcataatcgccggcaccattggcgtctgctccggaatgttactggtcggcatgcatctggtgctgctcgagctgaagggtatcgcgcgccggctggctggtgcgatcgcgccgtccgaggttcgggtcaggcccgtgctgcccggcctggccctgcctgacggcctcgcgcccgagccggtcgctgctgcgaggggcgagcctgcgccgccgccggcaagcccgccaccctggcagagcgaagctgctgcgcgcgagcggccgcgcgccgagggaccgcaggagccggaagccgctacgccgcccgccgcgcctgaagcgccgcgtcggcgcaacctgctgttcgcctcgacctcacgcaaggagcgtgagcgcgcagagacgaaaggcactgaaagtgcgctgccgcccgaggagtcgagcggagccgctgacagtccgcccgcgagctttgatgttgcctggccgaagccggaccgcacacgcccgccggagccgccaggcggctcgcgccgcccgccgccgcgctcgccttcgacctttgcggaagccgccccgactcctgcgcccgaaccgccgccgcctgtcgagcccgcacccgtgacggtcctcaaatccggcgtcgtcgacggcatggcctattcactttattccgacggctcgatcgaggcgcagatgccggaagggatgatgcgatttgcctcgatcgacgaactccgcgcccatctcgatcagcgcggttga

SEQ ID NO: 1390 - DNA, 417 bp, BradyrhizobiumColbertium
atgtcggacgcgggagcgaagaatttcatcgagctgaccgcgagcatcgtgtcggcctatctcagcaacaatccgacgcccgcgaccgagattccgaacctgatcagccaggtgcatggcgcgctggtgcgggtgtcgtcaggccgtaccgagaccgcgccgctagagccggccaagccggccgtctcgctgaagaagtcgatcgcgcccgactatctggtctgtttggaggacggcaagcgcttcaagtcgctgaagcgccatctgcgcacgcagtacaacatgacgccggagcaataccgcgagaaatggggcctgcccgccgactacccgatggtcgccccgaactatgcggtggcgcgctcgcagctggccaagcagatgggtttggggcagcagcagcggaagcggaagtaa

SEQ ID NO: 1391 - DNA, 429 bp, BradyrhizobiumColbertium
atgacgacaatcgacgaaatcagggacaatttcgagcttcttgacgagtgggacgaccgctatcggtatgtcatcgaactcggccgcaccctggaaccgatgtcggaggcggaacactccgccgccaacaaggtgcagggctgcgtcagccaagtctggctgcagaagctggtcgaccgcagcaacggcgaactaaccctgaaatatcgcggcgacagcgacgcccatatcgtgcgcgggctggtcgcgatcgtgctcgcgctctattcgggccgaacgccgcagcaaatcctcgataccgatgcgatcgcggtgttcaacgagttcggtttccgcgatcatctgacgccgcagcgctccaacggcctgcgctcgatggtcgagcgcatcaagaccgacgcgaaagaggcactcgcggaagcgtcgtag

SEQ ID NO: 1392 - DNA, 435 bp, BradyrhizobiumColbertium
atgcgctttctgcttcgcatcacattctggctcgggctggtgcttgtgctcctgccgcgggacaagacgcccgaatcggagaagctgccgcagatcggcgccgccgacgcggtgcaggctgcgaccgcggccgtctccgacatgacccagttctgcaagcgccagccggcggcctgcgaggtcggcggacaggccgcgaccatcatcggccagcgagcccaggacggcgcgaagaagatctaccagatcatcaacgacaagaaagagcagatcacgaacgagaagaacgagaagaccgacaagaaggcgcccgaccataccggctcaatcgcgatggccggcgaaggcgacattgctgcgagcgaggcgccgcgcgacaccctcagccaggacgacctcgcgctggaatggcgcggacccgaagctgcgaattag

SEQ ID NO: 1393 - DNA, 132 bp, BradyrhizobiumColbertium
atggtgaacacagggtttcacctcgccgcgcatggtttcgaattggtggatgcggggctgccacggcaaatcacgggcgcgaacgtcaatcgaaaatttacgacaccgccgattgcgaagaattctgcgtaa

SEQ ID NO: 1394 - DNA, 717 bp, BradyrhizobiumColbertium
atgctgggcgcggcccagcgcaaggaatacgctcagctcatcaacgattccgggcagcatctgctctcggtcgtcaacggcatcctggacatgtcgaagatggaatcgggaaatttcgagattgcatcggagccgttcgcgccgcgcgcctcgctgctccattgctgcaatctgctggcgctgaaggcgcgggaaagcggtatcgacctcgtcaccgacgcgccgcaggacctgccgatcatgaccggggatcccagggccttcaagcaaatcgtgctcaaccttgtcgccaatgccatcaaattcaccgagcgcggcggtcaggttcacgtggcagctgcggtttccggttcgcagctgacgctatgcatcagcgataccggggtcggcatcgctcccgacgacctcaaccgcatcggcgcgccgttcttccaggccggcaagacctatcagcgccgtcacgaaggcaccggtctcgggctttcgatcgtgaagagcctcgtggcgttgcatctcggcgaattgacggtacaaagcaggctgggcgagggcactgccgtcaccgtcaagctgccgctcgtctacacgccgccgcaggtcaagcctgccaacgagaagccgagcgagagcaaaatcgcgaccctgacgcctgtgctgcgtcaggaccttcaagatcaaactcaggacgaacccgcaccggtgaagaaaagtgcctag

SEQ ID NO: 1395 - DNA, 702 bp, BradyrhizobiumColbertium
gtgcctaggaagcctgccaaggacgaaaccgctccgcgccgccgtggcgccaaggccgcggtcatcgacgtcgagaccgagcgcaacctcgtgatgcgcgtgctgctgcacagccccaaggatacgctggctggcctcgtcgccgtcggcgcgatcggtgcgatcgttgccaatgcgctgttcctccagaccgggcggcaccccgcgccgatgttcggcacggtgatcaatcttcccgcgccgtcggcggtgccgctgtcgaatccgttgccgcgtccgcggcccgtcggcgccgacacctcaccgctcgagccgcgcgcgaccgagttccgcatcgagcccaaacacgccgaacgtgccgccgagaagccgccggaaaaagccgtcgagacgaccgcggcgacgcgcgcgaatgatccgatggccaatctggtcaaggcgacgacttcgacgccgccctcggctctccgtccgcctgcgccggttccggtgcaaagcccggccgcgcgccgtatcgccggcgtgcagcgcgcgctctcggaatacggctatggcaatctgaagatcacgggcacgatgagtggcgagacgcaatccgcgattcagaaattcgagcgcgagcacaagatgccggtcaccgggcagctgtccgatcggctgctgcgcgaacttgccgctgcgataggccatcccgtcgaatag

SEQ ID NO: 1396 - DNA, 213 bp, BradyrhizobiumColbertium
atgttcaaggtctcgattctcgtctggatcatgctcggcacgacgctggcgggcatcagcctcatcgtggtgctgatggtcccgagcttcgccgccgatgccatcaggaacattccttatgccgtggcggtgggatttgcactcgcaatgccgctgtcatatttcatcgcgacgcagattcgcggtggtcaggacggcacgcggaaggcgtga

SEQ ID NO: 1397 - DNA, 321 bp, BradyrhizobiumColbertium
gtggcggcttacttgcgccgctgccagaccgagggcgtgttcggcgccgtgcggcgtcgtggcgccgaggaggcgggggcggtgttcgtcaaggtgtcgctgctcgacggcaatgcgatgctttatgcaccggcgccgcagaccgtctacgacgacggccggcccgtcgatcgcttcttcgtgccggtcgcgccgcagccactgccggagcaaaccgtcgaggaacggctgacgaaggaaatccgcttcgatccggacgcctggatcgtcgagaccgaggatcgcgccgggcggcatttcctggatttggcgaagacgtag

SEQ ID NO: 1398 - DNA, 978 bp, BradyrhizobiumColbertium
atgaccaagtcgctgtttcccggattcgacgggctgatgaccctctcccgtcgcgaaggtgtcgatgtccgtccgacgctgctccgcgtgctgaccgacctgtatgtccagacgagcacccacagcgacgacgagcagcggcagttcgtcgagcttgcgacacggctgatcgaccaggttgacgatgcgacgcgcgcggccgtcaaggcgcggctcgcggtctatccgcatacgcccgtccccgttctgcagaagctcgggctggtcgcgacgcaagaaggccgccgggtgccgttggccagggagattcccgctccgccggccgcgcccttaccgccgcgcgagcggaccgatgccgagcagcgcatggccgccaacatggcgatgcagccgaaggaagcggccgagatccacgacatgttcttccgcgccggcgcctccgagcgcgcgctgatcctgcacaatcttgcgcagacaccgctgaaagccgccccccgcattccgaccgtgcgcgccaagcgcgcgatccagatcctggagatggccgcgatcgcgggcgacgtcgagagcttcgctttcgagctcggcgacagcctgatcctgccctcgcgcgtcgcagcccagatcgtcgacgatgccggcggcgaggcactcgcggtcgccgcgcgcgcgctcgacatgccgagccccgtcttccagcgcatcctgctgttcttcaagccggagatcgggacgtccgtgaacgccgtataccggctgtcgcggctctacgatcgcctcagcgaccgcgcggccctggtgatgctggcagcctggcgcggctcgacgcttgccgtgacgcgggcgaagtaccaggccggtctgcacgacggcgaacgccagcgcgcccgtgccggagcaagtcagacgcggcagagcatgcagcccggtgcgataccgccgcgccgcaccggcaccgatggatcttcggagcgctga

SEQ ID NO: 1399 - DNA, 189 bp, BradyrhizobiumColbertium
atggggaccatcattgaatttccggccggtcgccgggtgggctcgtcgggggatgtcgctccgcgcgcggacaagggaacggtcctgatccttcccgtgatccgtatcgagcgcgaggcggacgaaaccagcggcgaccgcgggccggagcagggcacggcgcccaggcgccgtcgtcgtcgccgctga

SEQ ID NO: 1400 - DNA, 762 bp, BradyrhizobiumColbertium
atgccggacgccatccgccagatccggcccctcctatcggccgccctgctcgcgctggtaggcgcgttgctcgcggcctgcagcggcggcgatttcggccgcacccgcgagagcatgcgcagcgacgacatgcatcgctggctgggcgcggaggtcacgtccagcgtcggcttgagaccatcgcaattccagctcaccgacgaggagcgccagcttcgcgatctcgcttatcccatgatcgagccgccgctatcccgcccggcgtggaagagcgtgttcggcgactacaaggcgctgccctcgccctggcggcagaaggtcgtattcgaccgaaccatgtacggacgcacgctgatcgacgagccgcaccgctcgcactcctcgcgctatgcacagctgatcgaggacgtgcgcaacgacatcacccgcttcgagccgttcttcggcactgcgatccgtgtcatcgatctcgacaggaagcgtgatgccagcatggcgcgtgtctccgcgctctcgccgcgggagaaggccgacgcggtcgcgcgcatgcaggagaattcgctgatcatccagtgggtgcagcagtgcctggagcagcgtatctcatcctatcgctgggcgctggagcgcctggtgatccaggcgcccgacggcatggccgccgacgccgatcgcctgatcggggaactcgccgcccagaccgccaacccgccggtcgcggcgcagccgccttacggccgggcggtcgtctccaaggggtga

SEQ ID NO: 1401 - DNA, 3399 bp, BradyrhizobiumColbertium
atgagcttagacgccattggtccgtttaagagccgtccggacgtcacctcgcgccagctgctggcacttgccattctgcttctatcgaccggctccgcggccgcgctgtccagggaggcggcgatcgagaattgccggatgacggtcggcaagccgatcgtgcaggcctgcatgcgctccggcggcgccaatctcgaagcttgccgcgccaaggcttcgccccaggtcagggcctgcgcgatggcggcgctgaacgccgccaatggccgcgccaatgttgccgtcgagcttccaaaggagactgcccccaagcttgaagccggcactgcacttccgaaggacttcgtcgcgccgccgcgcagcattgccgacatcacggcggtactcgacggcgacaagcccgacgagaagatgatcgccgaattgaagtcggacgccgatgccgtacccaccggcaaggaatcccgtcaggacctcgctcagctctacttcgatcgcgccaacgcgcgcgcgcagctcggccggctcggcgaagcgatgtccgacgctgacaaggccgtggaagtcgggcggggcgccgtcaatccgaacttgctgggccggatgctgcagcttcagtccctgcagcacgccgttgccggcgatccgaggcgctcgctcgagatcatgcagaggctcttgcgcgaatcggccagcatgcccggtgccaagggcatgcagttcgtgacgaaccgcgggattgcagctgttctcatccagatgggcgatctctcacaggccgaagcctatctccgccgcagccagaccgcgatccaggaggcccgcaccagcggccatcccaattggcgggcggcctatgcgaagttcggccagagctgggaaggtgaactggagctcgctcgtgccttgatcttcgaggcgcgcggacagtttgccgatgccgaggccgcctaccgcaatgccgagctgcgcaagcgcgcaagcatgaaggcaatcatggactcggacgatccgccggcggagaccattctgctgcaggcgatcgacggggccgtgttgagccaggcgcgcatgaaagcgaagcaggggaggctcgccgaggccgaggtggatgcgcgccgcgcgctgctctcgcgactgaaggacacgggcaagtacaactctgtcacgccgcgtttcgtgatgggcctggcgggcattctggtcgaccagggccgttacgaagaggccgagaagctcggccgcgtcgcgctcgagatcaacaagaccgtgggcgtgccggaggactcgcaggcaacggtgcaattgctgtcgcagctcgccggcattctgacgctccggcgccagaacgccgaagcgagcgagatgtttgcgcggatcgacaaggccgtcgccggatgggatccgcagcgccgtcaggtgttcgagctcaatccgtctcgtatcctgtcgctctatggttccgggcagttggacgcgggcattgccgccgccgagcagctcgtgaagaagcagatcgcccgggtcggggacaatcatttcgacaccgcctcggcgcgcggcacgttggcggtcggattgatgcgcgcccgccgcgatgcagaagccatccgcgagttcaaggccgccatcccggtcatgatggcgagcgccaacgaaaacgccgatgacgagaacacgactgtggtggccgcgcgcagccagcggctgcagaccatcgtcgagagttatctgctgctgctcgggagggaaggagcaggcaaggatatcggcgaagaaacgtttagcctcgccgatgccgtccgcggccgctcggtgcagcaggcgctggcagcctcgagcgcgcgtgcggcggcaaaggatcccgcgctcgccgaactcgtgcgcaaggagcaggatctcaccaagcaggtcaacgcccagctcggcacgctcaacaatgtgctcgcgcttcccgcagcggagcgcgacgaaaaaggcgtccagcagattcaggcctcgatcgggactctgcgcggccagcgcgacaaggcgcggcaggagatcaagcagaaattcccgacctatgccgatctcgtgtcgcccaagccgccgagcgtcgccgagatccgcgcgacgctggccgacgacgaggccatgctgtcgttctatttcggtcagaacggcagctttgtttgggcggtgccgaggtcgggaccggtggtgttcgcgccggtccaggccaagagcggcgacatcgagaccaagatccgcaagctgcgcgaagcgctggagccgcaggccgcgatgatctcggacattccgccgttcgatctcaagctcggccacgagctctacgagctgctgctcaagccggtcgagagcggctggaagccggccaagaacctgatcgtcgtgaccaacggggcgctgggattgctgcctttgtctctgttgccgaccgcaccggcggaggtggcctcggaggaggacccactcttcgtcggttatcgcaacgtgccgtggctggcgcgaacccatgcggtgtcgacggtgccgtcggcggcggcgttgcgcaccctgcggcaattgccgccgggcaagcccggccgcggcgacctcgtggccttcggcgatccctatttcaacagcgaacagcacgccgaggcggaaggcggcggggagaagatccaggtcgccgatgccggcggcaatatcacgcgcggcggtccgctgaagcggcgcaacagtcccaagctcgaaggtgtcgacagcgccgagctcggtctgttgcctcgcctgcccgacaccgccgacgagctaaaatcgatcgcattggccctgcaggcggacccctcgaaggtgctgtttctcggcaagagcgcgaccgagagcgcggtcaagagcatgaacctgtccggcttcaggatattggcctttgccacccatggactggtcccgggcgagctgaacgggttgacgcagccggcgctcgccttgtcgtcgccggcggtgacgggcgagggcggcgacggcctcctgaccatggaggagatactcggtctcaagctcgatgcggactgggttatcctgtcggcctgcaacaccggagccggggccggagcaggggccgaggcagcgtccgggctcgggcgtgcgttcttctatgccggaacgcgcgcgctgctggtgacgaactggtcggtgcattcacagtcggcgcggcagctcgtgaccgacctgttcaagcggcaggccgaggatcccaagctgccgcgcagcgaagcgctgcgccaggcggcgatggcgctcgtcgatggttcgggctatctcaacagcgaaggcaagacagagttcgcctatgcgcatccgctgttctgggcgccgtacacgatcatcggcgatggcggcttacgttga

SEQ ID NO: 1402 - DNA, 444 bp, BradyrhizobiumColbertium
atgaagcggaatgtcttggtcgggttcgttgccgcatgtctcttggttccggggacgtcgcatgcgattcaattgatcacggaggaggaagccaagctgccgcctccgaaaggcgcggtcgctgcggacaggcgcggcatcttgcgcggtccaaaagtcgaattcgtttcccccggcgcttccgtcagctcaccgatgcagctgatgttgaagttcgagtcgttcggcgggaccaagatcgatccggagtccgtcaagatgatcttcctccggacgccgaacgtcgacctgacccctcggatcaagcccttcgtgaaacccgatggcatcaacatgcaggatgcagagctgccgccaggtgaatacgcggtgcgggtcgacatcaaggacagtgatggccggccgggcacgaccgtcttcacgctgaaggtcgcacccaggtga

SEQ ID NO: 1403 - DNA, 765 bp, BradyrhizobiumColbertium
atggaatgtccgttctgcgccgagacgatcaaggacgaagccatcgcgtgcaagcattgctcgcgggatttacgcgtcgtgcgaccgatgctgctcgaaatcgaagaaatcgttgccgatctggacaagctcaggcgggaccttgatcgggtcaatgtccggctcgagcgctacaacaatccgctgcgctattacgcaacgcatgcggtgctctatgtcggtattccatcgctgctgctggtgatcgcgcatgtgctggtgaccatcacgttcaacgtgtcgccggtcccgcttcggattgcatcgatcgtcataccgctcctgttcggttttctcgcctatccgctgcaccgggtgtccgcgctgacggccctcgtgctggcgttcctggccgcaagtgtcagtatcctcgcgatgctcacggtgacaggagtgcacgatggtgttcccattctcccgacggtctggatcgagtggcgggaggtgttcgaatatggtgccagcatcctgcttgccttcgtctcaggtaacatactcagcgtcgtgatcttccagatcgcaccgcgtgtgctgacccaaggcggcaagccgaacgcgttcgccttccgcgtggcgcgcctgctggggcagcatgtcggcgaagagcaactgcgtcgccgagcccgcctgattcaggatctcatgcagactctggggccgctggccggcgttgccgcgaccggcgtcggctcgatctatgcggggttgaagggattgctcggatag

SEQ ID NO: 1404 - DNA, 375 bp, BradyrhizobiumColbertium
ttggtgatagaagacgaggatgcgatcctggctgttgttgaagacgcccttgcagagggaggctttcagatcgcaactgcgaagacgggcaaggaagctatcgcgctgctgaagggtggtctcgtgccctaccgcgctctcgtaaccgacgtcaatttgctcggtgatcgcgacggctgggaagtcgcgagagccgcccgtgagatcgatcctcactttcccgtggtttacatgaccggcggcgccgccgacaagtggcctgtactcggtgtgccaaacagcattttgcttcaaaagccgttcgcgccggcccaggtcgtcgcggctgtttcccagctcctcaacgcgggctcgcagcaggcgggtcccgcctga

SEQ ID NO: 1405 - DNA, 402 bp, BradyrhizobiumColbertium
atgagcgtcacgatctatcacaacccggcttgcggcacttcacgcaacaccttggccatgatccggcagagcggtgtcgagcctgtcgtcgtcgagtatctgaagaccccgccgtcccgcgacaggctggtcgagctcatccaggcgatggggatctcccctcgcgcgctgctgcgagagaaaggcacgccctttcgcgagcttggcctcgacgatcccaaatggaccgatgacgagctgatcgatcagatggtcgcccatcccattctcatcaaccgtccgatcgtggtgacgccaaaggggacgcgcttgtgccgaccgtcggaggccgtgattgatctcctggacgatcccgtcggccgcttcgtgaaggaagacggcgaagtggtcgaagcgcgatag

SEQ ID NO: 1406 - DNA, 1056 bp, BradyrhizobiumColbertium
atgagcatcttcgaacgatacctcacgctgtgggtcgcgctttgcatcgtggtcggcgtggcgctgggccacgtgatgcccggcttcttcggcgccgttgcggctgccgaggtcgccaaggtcaacctgccggtcgcgatgctgatctggctcatgatcgtgccgatgttgctgaagatcgacttcggctcgctgggccaggtccgggagcactggcggggcgtcggcgtgaccctcttcatcaactgggccgtaaagccgttctcgatggcgctgctcggctccttcttcatcggtcacctcttcgcaccgtggctgccgtccgctcagatcccatcctacatcgccggcctgatcctgcttgcggctgcaccgtgcaccgcgatggtgttcgtgtggtccaatctttgcgagggagagccccactacacgctgagccaggtcgcactcaacgacgtgatcatggtcttcctgtttgcgccgctggtggggttgctgctcggagtcgcctcgatcagcgtcccctgggacacactgctactgtccgtcgtgctttacatcgtggttcccgtggtcgtcgctcagctgtggcgcaagatgctgctgcgagaaggccccgatggcttcaaccgcgtcatgcgaatgctgcagccactatcgcttgtcgcactccttgcgaccctggtcctgctcttcggcttccagggagagcagatcgtcaggcagcccggcgtcatcgcgatccttgccgtccctattctcgtgcaagtctatctcaatgcgggcctggcctattggctgagccggcggttcggcgtggcctggtgcgtggcggccccagcggcgctcatcggcgccagcaacttcttcgagctggcagtcgccgccgcgatcagcctgttcggtttggagtccggcgcggcgctggcaaccgtggttggcgtccttgtcgaggtgccggtgatgctgtccgtcgtccgcatcgtcaaggctacgcgggggtggtacgaagcgggagcgggtaaagtcccggcggctgccgaggcccaccaataa

SEQ ID NO: 1407 - DNA, 528 bp, BradyrhizobiumColbertium
gtgcctgatcgcgtatacaacgtgctgttcctttgcacgggcaattcagcccgttccgtgctcgcagaatcgatccttcgcaaggacggtgccgggcgctttcgctccttctccgcagggagcacgccgaagggcgccgtgcatccgctggcgctgcgcacgctgcagagcatggactacccgatcgacgggatgcgctccaagagctggctggaattcgcagccgccgacgcaccggtgatggatttcgtctttaccgtctgcgacaacgccgccggcgaagcatgtcccgtctggcccggccaaccgatgactgcgcattggggcatcgaagatcctgcggccgtcgaaggcaccgagatcgaaagacttgcggccttctcgcgcgcgttccgttacttgaagaaccgtattggcgccttcgtgaacctgcccctcagcggcattgaccggctttccctcgggaccaagcttcgggaaatcggccgatccgagggagcgacctccggcaagagcgacgtggcttag

SEQ ID NO: 1408 - DNA, 363 bp, BradyrhizobiumColbertium
atggaaacggagcaagctgtcctggcgctcgccgcgctgtctcaaccgacacgtctggaggcgttccggacgctggtcagacacgagcctgacggtcttgcggccggcgacctcgcgcgcctgctggaagtcccccaaaacacgctctcggcgcatctgtcgattatgagccgcgcgcgcctcgtgtcttccgagcggcacagccgctcgatcatctatcgcgccaacctcggcgaatttcgtgacatcgcgctcttcatgctgcgcgattgctgcggcggacggccggaagtttgcgaacccgtcgtcgagagcctgcaatcgtgctgcgctcccaatcgaaaggagaaggcccgtgcctga

SEQ ID NO: 1409 - DNA, 318 bp, BradyrhizobiumColbertium
atgaagatcgacgacgcagcagcacgcctggaagccctgggaaatcggacccgcctgcagatctatcgggcgctggttcgggccgggcacgcgggcatgccggtcggccgcttgcaggacaagctgaagatccccgcatcgacgctgtcgcaccacatcaaggcgctcgtcttggtcggactggtcagtcagagcagggaatcgacgaccctgatctgccgcgccaatttcgacgccgtgcgcgggctggtcgacttcctggttgcggagtgctgtgccgaagaaaccggatgcagggatgcccagacggcagcctga

SEQ ID NO: 1410 - DNA, 1365 bp, BradyrhizobiumColbertium
atggataagaagacggtagctatcatcggagcgggcccggtcggtctcgcagccgccgcgcatgtgctcgagcgcggcatttcccccatcgtgctcgaagccgggcccgaggccgggcatgcggtgcgtcaatggcagcacgtccagctcttctcgccgtgggaatacaacgtcgacaaggcttcgacgcggctgcttgcgccgaccggatggaactcgccgaacccgagctcctatccgaccggcggcgagctgatcgagcgctatctcgcgccgctcgcaacgcgaacgccgctgcgcgacaccatccggacctcgagccgtgtcacggccatcagccgcgtcggcttcgacaaggcgaagacgaaggggcgggagcaagcgcctttcgaaatccgctatcagaacggcaagggccctgaggtgctgcgcgccgatgccgtcatcgacgtctcaggtacgtggttctcgcccaatcccgccggcagcaacggcttgcctgcgatcggcgaatccgagtgcggcgaccgcatcgcgtacggcatgccggacgtgcggggcgctgcgcgcggcagatatgccggcaagaccgttgccgtgctcggcgccggccattccgcgctgggcacgctgatcgatctcgcgcagctcgccgaggaggtgcccggcaccaagcccgtttggctgttgcgcggcggcgatcctgccaaggccttcggcggcggcagcaacgacaagctcgccgcccgcggcgaacttggctccaccttcgccgcgctcgtagctgctggaaaaatcaaggtcgagaccggcttcggtgtcacccacctctcggacttcgaggggcgtctcaggatttcagcaggtgcctgctgcggtgcgcggagtgtggttgcggatgagctggtggtgtcgaccggcttccgtcccgatctctcgtttctatccgagctgcggctgcggctcgatccggcaatcgaggcgcccgtcgcgctcgcgccgctcatcgatcccaatgagcatagctgcggaacggtgcggcctcatggtgcgcgggaactgacgcatgatgagcccggcttctatctcgccggcatgaaatcctacggccgggcgccgaccttcctgatgatgaccggatacgagcaggtccgctcgatcgtcgccgacatcgccggcgacaaggaggctgcggcacgggtcgaactcgtgctgccggagaccggcgtctgcacgcgtggcgacgtcgagtccgtcggcgcagcgggatgctgcggcggtcctgccaaaaccgagccttcggcctgctgcgccgccgacgagtcggccaagaaggcaggcggcgcgggatgcggttgctcatga

SEQ ID NO: 1411 - DNA, 1200 bp, BradyrhizobiumColbertium
atgagacgaggcgctgcgggatcgctcgccgtcgtcatcgcgctcggtaccgcgcagaccatcgcgtgggcgtcgagttactatctccctgcgatcctggccgcgccgattgcaagcgatctcggccttgcgccgacctacgtgttcggcgcgctgtcgggagcgctcgtcatctccggtctgctcggcccacgcgtcgggcattccatcgatacgttcggagggcgcagcctgcttgcggtctcgaaccttgtcttcgtcgcgggtctgctcctgttgtccgcggcttatgatgtggcggtgctggtagcagcctggatcctgctggggatcggcatgggcatgggcctctatgaagcggcgttcgcgacgcttgcgcgcatctacggcgccaatgcgcgaggaacgatcaccggcatcaccctgatcgccggttttgccagcactctcggctggccgctcacgacatggctcgcttcggagtacggctggcgcgcggcctgccaggtatgggcggcgatccatatttgcgttgccttgccgctcaattgttcgttgccccgtgccgttccattggccgaggactcccgatcgaccacgagcgcgagccgacagtccagcggccagagcgagaccttcgcaatgctgctgctggcatacatgtttgcggccgcgagcttcgtgagctcgggagtctcggccattctgccgaccatgctggttgcgttcggcgcgacgccggcacaggcgttgttcgcaggcgccttggtcggacctgcgcaagtcggcgcccgcctgctcgaagcaggatggctcagccggtttcatccgctgctgtcggcaaggctcgcgatgctcatgaatccgatcggcgtgcttgcgctggtcgcgggcggcccttggctcgcgccggccttcacggtgctgtatggcgcgggcaacggcatcatcaccattgcccgtggtacgctgccattggcgctgttcgggccggtgggattcggccggcgtgtcggcgtgatctcgctgccctccagggcaacaggcgctttcgcgccgcttgcgctgggactgctggtggagcatgtcggcagcagcgcgctctggatcagcgcactggcctcggtcaccgccttgttcgcgcttctgctgcttcgtgcggatcagaacgcccaagcgacggcaggcgagcattcgtag
